United States Patent Application Publication US 2006/0134663 A1 - sequence listing, part 51

SEQ ID NO: 119589 - DNA, 579 bp, Homo Sapiens
gcggccgccaaacggcacttggtaaccgggaatcgccacggccttgagcaaggcgcggcggatcatgcgtttggtctgttcgtcgaggtaggcgaagttgtacgccgggtcgcgcacagccggtagggtcaagtcattcatggcggttgccctcggccggttggcgcagtttgcggatcagttccagctcggactggaagtccacgtagtgaggcaatttgaggtgcgagacaaaacccgccgcctcgacgttgtcgcagtgggccagcacaaactcttcgcgttgggccggtgagacgacttcttcgttgtactccccggcgcgcagcgagcggtcgaccagcgccatgcccatggccttgcgctcggcatgcccgaacgccaggccgtaaccacgggtgaactgcgcaagctcagtggccgagccgacaaattggttgaccatctcgcactcggtgacttcgatgctgcccaggcagatgggaaagcccaactcttcggggtcgatccacacctcgacgtcgccgatgcgaatctcaccggcaaacgggtggttgcggccgtaaccgccctcgtgcc

SEQ ID NO: 119590 - DNA, 708 bp, Homo Sapiens
  misc_feature (59)..(99): n is a, c, g, or t
  misc_feature (311)..(348): n is a, c, g, or t
  misc_feature (499)..(499): n is a, c, g, or t
ccgtagagacagggttttgctatgttgtccagatgggtctggaactcctgggctctagnnnnnnnnnnnnnnnnnnnnnnnnnnnnnnnnnnnnnnnnngtgtgagccaccatacctggctgctggcttcttgtggcaaactgtccctacaaccctgggccagaccctgcacagcccctgtaacttcacaccgtggctctgttcttcatagcagtgtagggagcagagaatagcagaaccccaggaattaggagggtgaagtcctaatcctactgctccctctgcacaaggtcgtcttggttctttctatnnnnnnnnnnnnnnnnnnnnnnnnnnnnnnnnnnnnnntgaactagatctgtggttttcaaacagggttccagggaaatctggcagaggtacctcaggggtgaaggggccccatgcccttccctgtttcatctaaaaatagggaactcctttcccaggcggctgccgaagatggcagaggggcaggtcncggtgctcaatggtcaaagctatctcctgggcttcctgagggccatggtggctaagcaggccggaagttggtggtcgtacactgcgggggcatcagtatttctggcaatgtctatagaaagaagttgaagtacctggccttcctccacaagtggatgaacagcaaccttcccgaggcacctacacttctgggcccccacacttccgggt

SEQ ID NO: 119591 - DNA, 384 bp, Homo Sapiens; identical to SEQ ID NO: 80713

SEQ ID NO: 119592 - DNA, 582 bp, Homo Sapiens; identical to SEQ ID NO: 80724

SEQ ID NO: 119593 - DNA, 492 bp, Homo Sapiens
gcggccgctccaaaatgatttatagaaacgaaaggcattttccatttgttgtcttctgccgaaattctgaattgcatacacacatgaaggataatgaatggtttcaacggtgctatattaggttctctgattttcatgacctatgtatgtttggaaatacaatattgtataaaatgtggatcgttttgttaccgatttaatattgccattttaatttggtgtaacaattggttacacttgtttttcaaagctatcctttgaggagaaagtcaaaatgtgttgttagcctacctccactcaggcctcttgctgtgtaatcattattccaggttatgatgtgcatagcttttaaaactgcgtgtactattattctgctctttcccatactcttgtcatgtattcagaacctaaacttatagcaaaagagccaagcagtagcagtttttgtaaatgtaaaaataattagatccagactttgtttccttcaatttt

SEQ ID NO: 119594 - DNA, 599 bp, Homo Sapiens
gcggccgcagcttcgagctgcacgaggtcgaggccttcctggcgaccaagaagatcggcccgctggaaggcttccgctccaaggccggctggcccttcacggccgaactggccctggtctacgacgacgagatcgccaactggaagctggagttcgacttcggcgaggacgccaagaaggccgagaacgacggcgagccggtcgacttctcgggccagaactcgctggggccctgccccaagtgcaagggccatgtctacgagcacggggccaactacgtctgcgagcactcggtcggtgcccatgtcacctgcgacttcaagacgggcaaggtcatcctgacccagcccattgagccggcccaagtgcacaagctgctggccgacggcaagaccgacctgctggagaacttcgtctccaacaagacccgccgcaagttcaaggccttcctggcttatgacaagaaggaaggcaaggtcgtgttcgagttcgagccgcgcgccgccaaggcgccgccggccaagaaggccgcggccaagaagacggccaaggcctgatgtgagcgggatgcgctgcctgctggccgccgccctcgtgcc

SEQ ID NO: 119595 - DNA, 436 bp, Homo Sapiens; identical to SEQ ID NO: 80761

SEQ ID NO: 119596 - DNA, 628 bp, Homo Sapiens
  misc_feature (331)..(402): n is a, c, g, or t
gcggttcccgtcgggacagggggtgcgacactttgtcgaggcgggacctggaaaaaagcgtagccgtaaatgaaccttggccattcgaccgcgttggggggtcaaggtgccggggaaaaacggcgggttgccataaggggccgcgtgagcggtcggcgacaccgcggagcgaaaagcagccctggaaccgctggaacacagccagatccggttacgccgctgtccggtccacgggcggcgcggaccaccagtgaggaccagatcatgaaatccctgctccgcgtcaccaccgccctcgcgggcgtcgccttcgccggctcggccttcgctnnnnnnnnnnnnnnnnnnnnnnnnnnnnnnnnnnnnnnnnnnnnnnnnnnnnnnnnnnnnnnnnnnnnnnnntatttcggtatcaacgccggctacgccttcgacgccagcgaccgcaactccggcaacaccttcgcggtgcccttcccctacggcgcccccggcaccgtcgcctccttccgcaaccgcagtcaggacggcttctccggcggtggccagatcggctacaactaccagttcaccccgggctcgggtgtcgtgatcggcttcgaggccgacgcccagtacctcgacttcg

SEQ ID NO: 119597 - DNA, 528 bp, Homo Sapiens; identical to SEQ ID NO: 80787

SEQ ID NO: 119598 - DNA, 394 bp, Homo Sapiens; identical to SEQ ID NO: 80797

SEQ ID NO: 119599 - DNA, 221 bp, Homo Sapiens
gcggccgctccaacatcagttaagagggtcttgtagcactgtgcttcccaggagaatgagttgttaagtgctcactccgcatttttcagtaacatatacttaaagtaagcacacaggggctacagacgctattttttggttcaacatgacctgagcagttaattatttgtaaagggaagaagcaagaataggctcagggagggagagtttcacctcgtgcc

SEQ ID NO: 119600 - DNA, 452 bp, Homo Sapiens
  misc_feature (161)..(216): n is a, c, g, or t
gcgtgccagggcttcgatttcccggcgttgggtcagatcaaggtagttggccatcggtagctcagagcaggtgtttcctgctctgtgcagtgaggcgcaaaaatcttgcagatcgtttggttctaagcttgtaactcagtgaccgaacaggccggtttcannnnnnnnnnnnnnnnnnnnnnnnnnnnnnnnnnnnnnnnnnnnnnnnnnnnnnnncttcgcggctttctttgaatccatacctttggccatgatgcatgctccacgtgaaggggatgtaacactgggtataccacctattgcccggcagaaggcgcttataatcggcggcccttgattacgttgctcaaacaccatgcccgaactgcacatccaactgctggcagagccactgtggccgctgctgaacaagttttaccgccgccataattcgccgatgaaggcgctcaagg

SEQ ID NO: 119601 - DNA, 533 bp, Homo Sapiens; identical to SEQ ID NO: 80842

SEQ ID NO: 119602 - DNA, 459 bp, Homo Sapiens
gcggccgcctgtttgctcttcggcttcgcggatgtcttttctgatgctttcgtggaggtcttcgcagttgctcgggccattggacggctccttctcagtgtcgcatcgcgacccatcgacctagacctgccccacagacgcacggaagcctgcagcatagggacagccgaagcatcaagatccgccactatgggcgataggtcaggacacgcgatgtcaggtcagagaggtagaacggcgacagatcttgcttcgactggtgccgttctaccacagacgaagctgccggtcagcgcaatcgacggcgaagtctgaaaatgcttaatgtcgtcattgctgtgccgcatgtccgagcacaacgaaaatgcgatatcagccttggcgcgcggcggtgacgacatccaagcccagccgcagcaactcggaccaagccccctccgccgtttccgccctcgttcc

SEQ ID NO: 119603 - DNA, 697 bp, Homo Sapiens
  misc_feature (176)..(257): n is a, c, g, or t
ccaagctacagaactcctagtctccccaggctcttcagaagtccctccagcaaacctggctggagtagccacctcctcctgcccaaactctttaccctgtgggggttggcatgggaagatggtggcaggtataggggaagacatggccttctgggtcaaccttgggtttggaccannnnnnnnnnnnnnnnnnnnnnnnnnnnnnnnnnnnnnnnnnnnnnnnnnnnnnnnnnnnnnnnnnnnnnnnnnnnnnnnnntgggcagtatagcgtatcgtgggattgttctggggaattaatgtctataaagaaccccacagtgtaccagttcacagtcggtgcttaatacgtgggagtttccctgcgacctaagtgtactggccccctgcacgtagctttttgaacaccatctgtccagggtcaacagtgaatttgttattactagggggtcggaaggagagggcgaggagggagtttggcggagcctggggccggtacagctgaagagaggcgtctgtcttccgaggtgggtgggtgggtccaggaggcgccggccgcaggagccttagcggggagccgcagcctctcccggtcccagagccgcccgcgagcgcggacaccggccggctcctggagggctgagcacggcctgcagcgaccccgcgtgccgggagagagaaagcaactcctgcggcgcg

SEQ ID NO: 119604 - DNA, 548 bp, Homo Sapiens; identical to SEQ ID NO: 80878

SEQ ID NO: 119605 - DNA, 410 bp, Homo Sapiens
gcggccgcctgctcattagagctctgatatgtaattgaaatctgagattacttatctggcttgtcgtatttaaaccactgattatggctctgacatttttgttactcttcaatcaaccagtatataaaggattcagaatctcttggaattaagaaaaagctattatcttcctggtatcaattatagcgcaagtaaaaagcaatgccttttttagccaaaactttgcaaaagtacatgctgggatctcagatctttccttgatgcccttcactttaacccctacttttatgtgtgacacaaacccggccacttctcaccttggaggcgagcaagctccatacccttcttccactcctgctcctgttgctgttgttacagctgtcagaatggccttctaaaaacaactcagg

SEQ ID NO: 119606 - DNA, 565 bp, Homo Sapiens
gcggccgcagcacctcgctgcggcccctggcaccttgtccctctcttagcccgtccgtggagctgctttggtggtaactgaaatcgcttcccgcgaccgtctgcaaccgtccctgctggaccggctgaccgacgatgacccaaccaacctcaaggaaagcgccgacaaacgcgtgctgtccctgacccaattaaaagcctcggtgctgcgtgacctggcgtggttgcttaacaccacgtcgctcctcgacgccgatgccacgttgcacaccccggctggcacatcggtggtcaattacggcctgcctgcgctggccggcaacagcgtttccagtgtggatatcaaagccctggaagccttgatctaccaggcgattgccacttttgaaccacgtattttgcgccacacgctgcgcgtaaaagcccgcgtgggccatggcgagatgaaccacaacgcattgagtttcgagatcgaaggcgacctgtgggcgcagccggtgccgttgcgcctgctgctgcaaaccgacctcgatctggaatccgggcatgtgcgtgtgcctcgtgcc

SEQ ID NO: 119607 - DNA, 499 bp, Homo Sapiens
gcggccgcaagaccaagaccagtttcagccagggttactgctacccgtgcatgaccaaactggcccagtgtgacctgtgcatcatgagccccgagcgttgccattacgacgccggcacctgccgtgatccgggctggggcgaacaattctgcatgaccgaccacgtggtgtacctggccaactcgtcgggcatcaaggtcggcatcacccgtgccacccagttgccgacccgctggctcgaccagggcgccagccaggcgctgccgatcatgcgcgtggcgacccgtcagcaatccggtttcgttgaagacctgtttcgcagccaagtggccgataaaaccaactggcgtgctttactcaagggcgatgcgcaatcggtggatctcaagcaggtacgcgatgagctgttcgccacctgcgccgacggcctgctggggttgcaggaacgctttggcttgcaggccatccaaccggtaaccgacatcgagcccctcgtgcc

SEQ ID NO: 119608 - DNA, 408 bp, Homo Sapiens
  misc_feature (73)..(81): n is a, c, g, or t
gcggccgctctggtaggcggcgcgggcctggatcgcgatcaggcgttgctgttcaacgcgtgcgctctggagnnnnnnnnnctcagcgtcgagtcgctccagttccgactcgctcttctttaattctttttgtagctcctggacctgcttctcgagcttgcccatctcggtttccgtgccgcgcaggtctttctgcaccccggatttttcttcctggagcttgccgagcagctttttcagctcggtaatgtcctgacgcgtagcgtccaactgttgttgggtttgtgcgcgctcatcggcaaacgccggttggagcaggcagacaagagcgagggaaatcaaggcgcgaagcatagaggcgggcgacaccagggaaatggacggcctagtatgcccgccaagcgccgc

SEQ ID NO: 119609 - DNA, 537 bp, Homo Sapiens; identical to SEQ ID NO: 81015

SEQ ID NO: 119610 - DNA, 660 bp, Homo Sapiens
gcggccgcccggcttgagtacgcgcagcatcgagcggatggcgtcctctttatgggtcacgttgcgcaggccgaaggcgatggtcacgcagtcgaaatggttgtccgggaacggcagcttttccgcatcggcctggacgaactcgatattgccggccacacctttatccagcaggcgatcacggccgaccttgagcatcgaaccgttgatgtccgccagcacgacctggccggtcgggccaaccagcttggagaacttggccgccagatcgcccgtgccgccggcgatgtcgagcacgcggttgccggtgcgtacacccgacaactcgatggtgaagcgcttccacaggcggtgcatgccgcccgagagtacgtcgttcatcaggtcgtacttggccgcaacggagtggaacacctcagcgactttttccgctttctggctttccggaacgttcttgaagccgaagtgagtggtgggttcggcatcgctgcctttgcgctgatcagtcatatcgctgtcaccaaaagagaatgcgggacatgataatccccaccgcctgctttgtcttggcaaggctgaaggtaagataggtgttcatcgagaccttttgccgcatggcaggtgttctgagtcgatataaagaggagtcattgcaatggc

SEQ ID NO: 119611 - DNA, 606 bp, Homo Sapiens
gcggccgcgacctggatcgccttggccacggtcttgggcaggtggcccagctcggcgttgacgccggcggcagcgcccttgaccaggccaagcgcgcggatgaaaccgcgaggcatgcgctggcccgagaccgggaagttctgtacggcacgctgggtctgcgcaccccacagggcatcggcaggcacctgcagctcgcccatgctgtcatgttcgatccggaatcccggggtggcacccttgcttgcagctttgctcattgcatcaactccgcactacttcagttggggaaagggaagcggcggctggcagggtgtcgcttcccgggctggcggctgcgacaacgatactcccttgcctgcagcgtgggatgacgagggcgggccagatcgttccgcctgcacggccgttccgcgcgcgcaagggcagtgccggccgctggccggcagcgcatggaatcgcgggccgggcgtggtcgccggccagcgcccggcactacctgaccggcacgtcgtagaatatggcccccgccgctcgccccgccctgccgacatgtccgattccgccctgctcgccctgtccccgcttgatggccgttacgctggc

SEQ ID NO: 119612 - DNA, 283 bp, Homo Sapiens; identical to SEQ ID NO: 81085

SEQ ID NO: 119613 - DNA, 467 bp, Homo Sapiens; identical to SEQ ID NO: 81091

SEQ ID NO: 119614 - DNA, 477 bp, Homo Sapiens; identical to SEQ ID NO: 81110

SEQ ID NO: 119615 - DNA, 598 bp, Homo Sapiens; identical to SEQ ID NO: 81187

SEQ ID NO: 119616 - DNA, 553 bp, Homo Sapiens
gcggccgcggatcctgcgaattccgcagtaggtcagacgcgccgagaaacgctgtcttttgccggcaacataactattttccgatacagaagccgctgaacagccggtcgagcacatcctcgaccccaacatggccggcgacctcgcccagcgcccggacggcgagccgcagatcctccgctgccagctccggcagaccgcctgcgcccgtgaggaggcggtcgagatgggtgacgcaggcttcgagcgcggccctgtgccgggcgcgggtgatcagcgcgtcgccggtgccgaggccggattcggccgcggcttggatggcatcgagcaacgtcgcaagcccttcgcccgtgcgggccgagacggctaaaaagtcgatgccctgcgcaacttctgagccggcaaaaagatcggccttcgtgtggaccctcaggattggattgcgggtcggccccagctcggggaccgtcccgtcggggggcaccagcgcgattaccagatcggccgtgtcgatccgcgcccgggtccgcgcgatgccctccgccctcgtgcc

SEQ ID NO: 119617 - DNA, 581 bp, Homo Sapiens; identical to SEQ ID NO: 81224

SEQ ID NO: 119618 - DNA, 574 bp, Homo Sapiens
gcggccgcatccaggccgacaaggtctcgctgacggcacgggaaaacctcgacaacctcggcggcctgatcggcgcgacagacagcctcgccatcaacgccgggcgaaacgtcaacgtcgtgtccagcagtcgtgacagcagcagcatccaaggtacgcgcaccaatctctcgcgggtggccgggctgtttgtcagcggtgctggcggcaccctcgacgtcagcgcaggcaaggacctcaacctgaccggcgcccaagtggtcaacgccggcacaggtggtagcacatcgctcaaggcaggcaacaccatcaacctggcgacggtcggcgaggcccatcagcaatcggtgagctggaacagcagcaactggcgcaaggacgcaagccagacagaagtcggctccaccgttcagggccagggcgatgttcgcttgagcgccgggcaggacctcaatgcccgaggcgcgagcgtcaccagtcagcaaggtgccatcattgccgacgccgggcgcgacgtgaacatgacggctgcgaaaaacaaccaattcgctgatgaagcacacaagttcaaagg

SEQ ID NO: 119619 - DNA, 640 bp, Homo Sapiens
gcggccgccggccttttaaccttcttcctgcttgagaaggctttctacgaaattgaatatgagctgtcgtaccggcccgactggctacgcgtgcccttgaccggtatgatccgactgctgtcgcaaccctctcccgaggccgcatgaccaagctacccgccgaggcctatgcgatcctggaaggaaagcactccgacccattccactatctcggcctccatcatgagggcgaccggaaggtggtgcgcgcattcctgccggaagccagcaatgtcgaggcgatcggcgaacacggcgagaccgcgccgttgaagcggatccatgccgccggcctgttcgcaggctcgctgccgaacggttcgacgcgctatcagctgcgcgcccggttcggagagaatgtcgtcgagatggacgacccctaccgcttcccgccggtgctgagcgacttcgacctgcacctgctcggcgaaggcacgcatatgcggatctacgacaagctcggcgcccacccgatgacactggaaggcgtcgatggcgtcgccttcgtggtgctggcgccgaacgccaagggcgtcagcgtggtcggcgatttcaactactggaacaggcgccggcatccgatgcgggtgcgcctcgtgcc

SEQ ID NO: 119620 - DNA, 534 bp, Homo Sapiens; identical to SEQ ID NO: 81248

SEQ ID NO: 119621 - DNA, 290 bp, Homo Sapiens
cttgtttttattcttttgtggtggcaagtgccagcatgtggggtaggtagggtgaggcaaggtgggtgacagtaaaggacactgtgctcaattcgaagctacgggaggagagagctctagtcctagatttgcaccaaggagctttgagctctcagtaattcagcaaccctgggctgtcatttcatctataaaatcagagggttaggtgttctccacagcctcctcctgcactcaatcctatgataactgctgaaaactccagcatgggacaattaccagtgcctcgtgcc

SEQ ID NO: 119622 - DNA, 213 bp, Homo Sapiens
gtaatatatttttatagagcaaaatgtaaaacctttgtacagccacatcacatagctttttcttcttgccaaactctcttgaggaattcaaattattgtcacctttttttccccatagcaaatacagccaacataaatgtcaattaattaattgaaaaatgtacccaaagctgagcaatgtaaggccctctagcctggaaccgtttgcttttc

SEQ ID NO: 119623 - DNA, 129 bp, Homo Sapiens
ctagaatgctcattccctgtctctacctaggaagacttgcccacctttgagggcctaatgcaaatgtgatttcttactgggtgagatctgagggtgaggtgggtcctgcctttaatccctgtgctttgg

SEQ ID NO: 119624 - DNA, 500 bp, Homo Sapiens
acacatgacacaattctggtcaataatacaagaggagaggccagctaggacacttcagggaaaaagagacaggaagagctgtcttcccttctactgaatgagactgaatctggatgtgatgtctggatcaagggcaccatcttgtgtccttgaggaaagctggtgtaacaaaaaagccagcacaccaggcgggcgttgcctcgcacagtgcctgatgcgtggttggaatccatacttaaatgctgaaggagtacatgagggacagaactgggtccttaatgaatcacagagaccctgaatttatcagccttaatatcctccataacttgggatatcctgctgacacaattaatatccttttttttcccagccagtgtaggttttctgttacttgctgcccaaatcacgtaactatatgaatactacagccacaattctctcttcttcctcactgatttgggtattgattatttatgattcaactgctgcctgggggaata

SEQ ID NO: 119625 - DNA, 281 bp, Homo Sapiens
cagtaatactaaaataatggagcattttatcttcaagagcatcttagattcaatgaaatacggtagttaaaaaatgggttactgactccaggaacagttttggatataggaaatttatcatacatgtgtagggctgtcgtccttttctctaactctgttaaatgtgtgacctgcagtctgatctaccaaacattggtttaatagcactaagatgttttcattatgaaaaagaagactttttcaaaagagcacacaaaagcaatgaaaatgaatcatgatgg

SEQ ID NO: 119626 - DNA, 702 bp, Homo Sapiens
  misc_feature (203)..(215): n is a, c, g, or t
  misc_feature (637)..(652): n is a, c, g, or t
ctgccacaggtgactcacctctcctcccttaaatctcgccttcccctcatgggctttctggcttccttagggtaccctagcatgccggagtctcttctggtccttgaactagggtcgccagagtccagggggcccagcgcaggggctgatgagaaggcactttcgtccgtgggagacccagcccccgcttcttttccgcatgnnnnnnnnnnnnnctgccgcaggtgcctcacctctcttccctcaaacctcaccttcccctcatgggccttctgcccgctttggggtacacctagtggccccgaggtgcactcaggcctagaaccagggtcgcctgggcccacggggcccagctcagggactgatgggaaggcactttctttccatgggagacccaggccccacttctccgtggcgcggtttctttttcttttctgacacaagtgtctcacctctcctccctcacagctcaccttcctctcatgggctttccaccgccttggggtacccctagtggcccgaggctctccctgagctcgaaccagggactctaggttccacggggcccagtgcaggggctgatgggaaggcactttcatccgtggggtacccaggccacacctctccgcggcggggnnnnnnnnnnnnnnnnctgtgacaggtgcctcacctctccttcctcaaaactcaccttcccctcac

SEQ ID NO: 119627 - DNA, 1016 bp, Homo Sapiens
  misc_feature (279)..(813): n is a, c, g, or t
  misc_feature (851)..(851): n is a, c, g, or t
  misc_feature (899)..(899): n is a, c, g, or t
agcctctaactagtcacatttactcttaagaaatgaaaggttttccaggagagaactgtgtacaaataaggtgactggagatgtgacctgatgtgtcacgaggcccttcggggcggcaggcgctatcgtgggcgtggtccttgcaccgtcccatcggccttgccttccagctccgtggcacggtttcctggtctttgggccagtgtgtaccttggagtgacttcctttctcaacttccactgcaatgtgtgtgccttctgccctcgtgccgaattcttnnnnnnnnnnnnnnnnnnnnnnnnnnnnnnnnnnnnnnnnnnnnnnnnnnnnnnnnnnnnnnnnnnnnnnnnnnnnnnnnnnnnnnnnnnnnnnnnnnnnnnnnnnnnnnnnnnnnnnnnnnnnnnnnnnnnnnnnnnnnnnnnnnnnnnnnnnnnnnnnnnnnnnnnnnnnnnnnnnnnnnnnnnnnnnnnnnnnnnnnnnnnnnnnnnnnnnnnnnnnnnnnnnnnnnnnnnnnnnnnnnnnnnnnnnnnnnnnnnnnnnnnnnnnnnnnnnnnnnnnnnnnnnnnnnnnnnnnnnnnnnnnnnnnnnnnnnnnnnnnnnnnnnnnnnnnnnnnnnnnnnnnnnnnnnnnnnnnnnnnnnnnnnnnnnnnnnnnnnnnnnnnnnnnnnnnnnnnnnnnnnnnnnnnnnnnnnnnnnnnnnnnnnnnnnnnnnnnnnnnnnnnnnnnnnnnnnnnnnnnnnnnnnnnnnnnnnnnnnnnnnnnnnnnnnnnnnnnnnnnnnnnnnnnnnnnnnnnnnnnnnnnnnnnnnnnnnnttcccctgggagctcctcgtggctctctgttcgacctngcgctacggaactgtccgcttctccctcgggagcgtgggcttctcaanctaacgcttagtactactctgtgtaggcgtcgtccagcgggtgtgtgagaaccccgttaaccgacggttgctatcggtatatcgctgatcaaccgtggacactacgcacggacacag

SEQ ID NO: 119628 - DNA, 416 bp, Homo Sapiens
  misc_feature (345)..(345): n is a, c, g, or t
  misc_feature (347)..(362): n is a, c, g, or t
catgttttaacacctttatttgtcactttaccaacttacacacaatgttaacgacagcagacacaggagcagtgtgcacacagacacgagctgtttcactacaggtttgcaagccaggctcaacagcaagtccaacaggcaacaccacacctctcacctgcaggaggaacagcagggccaccccaccccgcggacgtccgtgggagtgcggtttagacatcagcagaagtggctttcagagtcagaacagccatgacgtggacatcacccgtcacactgataaagtgatgcactcagtactccctaatgttaatcacacagtgtaaaaaataaattggcggatangnnnnnnnnnnnnnnnnaattgtttccctttcttggaaaaaacttagtacaaactagtagttacacgatcc

SEQ ID NO: 119629 - DNA, 275 bp, Homo Sapiens
tttaaagcctttatcggtatgaaaggttgaatgctctaggtttgagcactgctttctcggcttgctcttctggtgcagtataggcacacctagagggccacgtcagtctttgcgatcaccaaatctggttctgagaaataggcactggcaatttacacatgccttgctgtgtaatctcactatatttgctcaggcaaagtgggagaagcagccttaggttttcattctagagatgccggctttcccacctgatcggcttagagttcacgattgac

SEQ ID NO: 119630 - DNA, 530 bp, Homo Sapiens
  misc_feature (193)..(298): n is a, c, g, or t
  misc_feature (469)..(469): n is a, c, g, or t
taaatcacaagagggataagcccaagtggatggcaaacgggcccccgttggaagagctggctgcagtctcggctgggcctcttggctcagcttcaccagggcgatggccgtgtggcacagggaggaccccttacagcaaccaccgcatcgggaatccgaaagggagaagttattttaatttttacttatctannnnnnnnnnnnnnnnnnnnnnnnnnnnnnnnnnnnnnnnnnnnnnnnnnnnnnnnnnnnnnnnnnnnnnnnnnnnnnnnnnnnnnnnnnnnnnnnnnnnnnnnnncatgagccacggcgcccggccagcatagtttcttttcaaaactcatccaagtagtagcaggtgtcagaatttccttcctttttacggctgaatagtattccatggtacatatgtatcacattttcggtatccattcatccatcaggggatgcttagatggcttccaccttntggttatggaggggacagggctgctacaaatatcgagggtgtgaatatccattcgggtatc

SEQ ID NO: 119631 - DNA, 273 bp, Homo Sapiens
tttaacagtttacacagactttatttttcacccattgaggtgagcacacaaaaatctgggcaggcagagttctatgagatgcagtgtcacaattacctgccctggttcacagacacagaccacgagactcggtggtgagggaaaggggtcttgttcttaccataaattgctatgggattatcacaatgacacatttattcctggttctatttacatcatggagtgtggagagggtacatttcttacactaaaaatatatactttggaatctct

SEQ ID NO: 119632 - DNA, 1053 bp, Homo Sapiens
  misc_feature (121)..(999): n is a, c, g, or t
acaaatactttggaattccaatgtgttttttgcttccgtgaggattaatttggaaaggtttttaatgacattccactgatttcagattttgcttgagattgaccctcgtgccgaattcttnnnnnnnnnnnnnnnnnnnnnnnnnnnnnnnnnnnnnnnnnnnnnnnnnnnnnnnnnnnnnnnnnnnnnnnnnnnnnnnnnnnnnnnnnnnnnnnnnnnnnnnnnnnnnnnnnnnnnnnnnnnnnnnnnnnnnnnnnnnnnnnnnnnnnnnnnnnnnnnnnnnnnnnnnnnnnnnnnnnnnnnnnnnnnnnnnnnnnnnnnnnnnnnnnnnnnnnnnnnnnnnnnnnnnnnnnnnnnnnnnnnnnnnnnnnnnnnnnnnnnnnnnnnnnnnnnnnnnnnnnnnnnnnnnnnnnnnnnnnnnnnnnnnnnnnnnnnnnnnnnnnnnnnnnnnnnnnnnnnnnnnnnnnnnnnnnnnnnnnnnnnnnnnnnnnnnnnnnnnnnnnnnnnnnnnnnnnnnnnnnnnnnnnnnnnnnnnnnnnnnnnnnnnnnnnnnnnnnnnnnnnnnnnnnnnnnnnnnnnnnnnnnnnnnnnnnnnnnnnnnnnnnnnnnnnnnnnnnnnnnnnnnnnnnnnnnnnnnnnnnnnnnnnnnnnnnnnnnnnnnnnnnnnnnnnnnnnnnnnnnnnnnnnnnnnnnnnnnnnnnnnnnnnnnnnnnnnnnnnnnnnnnnnnnnnnnnnnnnnnnnnnnnnnnnnnnnnnnnnnnnnnnnnnnnnnnnnnnnnnnnnnnnnnnnnnnnnnnnnnnnnnnnnnnnnnnnnnnnnnnnnnnnnnnnnnnnnnnnnnnnnnnnnnnnnnnnnnnnnnnnnnnnnnnnnnnnnnnnnnnnnnnnnnnnnnnnnnnnnnnnnnnnnnnnnnnnnnnnnnnnnnnnnnnnnnnnnnnnnnnnnnnnnnnnnnnnnnnnnnnnnnnnnnnnnnnnnnnnnnnnnnnnnnnnnnnnnnnnnaaaaacatattggtactgcgcctgctgagcagtacttcggaaaggttggagccg

SEQ ID NO: 119633 - DNA, 867 bp, Homo Sapiens
  misc_feature (416)..(424): n is a, c, g, or t
  misc_feature (471)..(471): n is a, c, g, or t
  misc_feature (593)..(603): n is a, c, g, or t
ggtcaggaggaccaaagcctgcgtgagcctttttattttcagtaaaatggtgcttttttccttacttcgagatactatatataaataataatgtaaatgacaccttttcgtacggagctgtttgagtattgctttacagagctcactaaatcagcttcaacaatcttgagctctgtggctcctcaccctgtctgcatggaagaccttgctggacgctctcgggagagcagacatagcaccagaagccactgggagaagtgttttcgatccgtgtctgggccacagtagtattcactgtttagtctttgagttccgtaagcagtctcttcatacatttcttacagtctggagtgtactgactaaatctgtgtaagcaaattgaaatactctttcttttaggtagcgtcacagtgggnnnnnnnnncctccggataatttctatacaatttcccttactgtcaaagggaccanatccttttcctcactgcggaaggggtccgtgcaggtgggataaaggaaaaacctggccctccccaaaagtgacctgcaccatctcttacctcctcaccctaaaccatgggcgcggttgtagnnnnnnnnnnntttcttcgccccctaccctacgcccatttatataacccccccatctcctctccccatttaccttcgaaccctctccctaattcctcacccatcatacgcctcacgacccgttaatttaccttgcttcatcccttccctatcccttcccccctcacttcttttcccttcttacattgccactgccacgcacgcgatcctttatacctacgcacgccccctcgccgcccaaatgttaccgcaccgtttaaccacgcgggggggtgg

SEQ ID NO: 119634 - DNA, 990 bp, Homo Sapiens
  misc_feature (388)..(430): n is a, c, g, or t
  misc_feature (449)..(736): n is a, c, g, or t
aatttattaaatttatttataagaaatacaattgtcaaagcagcagctctcacccaaaagaacagcccattatctccctggagcagacttagattgaaacttaaaaactgttttgatccaaacattgcttactaaaatgccaagaaatcaaaatagtaattaatggatagtaactaatgtagccattgattaccatgtaactctgggtcactattcattagtaaaacgagattgaggacttcaaaaatgagtgaagattgctaagggtaccttaagaatagggttgtcttccctattctactgtcgaaatatgggcgaaatgggcgattatacacaaaaatacattctcagctggaacgctataatgtatcatcacaacaagtcattnnnnnnnnnnnnnnnnnnnnnnnnnnnnnnnnnnnnnnnnnnnccctcgtgccgaattcttnnnnnnnnnnnnnnnnnnnnnnnnnnnnnnnnnnnnnnnnnnnnnnnnnnnnnnnnnnnnnnnnnnnnnnnnnnnnnnnnnnnnnnnnnnnnnnnnnnnnnnnnnnnnnnnnnnnnnnnnnnnnnnnnnnnnnnnnnnnnnnnnnnnnnnnnnnnnnnnnnnnnnnnnnnnnnnnnnnnnnnnnnnnnnnnnnnnnnnnnnnnnnnnnnnnnnnnnnnnnnnnnnnnnnnnnnnnnnnnnnnnnnnnnnnnnnnnnnnnnnnnnnnnnnnnnnnnnnnnnnnnnnnnngtgatccgctgggcccggtcgttcggttggcgggaaggggaacacttcacccaaaggcgggtatacggttacccaaaaatcagggggatacgctaggagaaacatggggccaacagtgcaacacatggaaggaacggtaaaaggccgggtgtcggaggtttttccaaaggcccgccgccgtgagaagcatcaaatattcagcttccaatcaagggtgtaacccgaaggaatattaaatatcagggtttccccga

SEQ ID NO: 119635 - DNA, 1140 bp, Homo Sapiens
  misc_feature (33)..(33): n is a, c, g, or t
  misc_feature (37)..(37): n is a, c, g, or t
  misc_feature (79)..(93): n is a, c, g, or t
  misc_feature (218)..(228): n is a, c, g, or t
  misc_feature (518)..(518): n is a, c, g, or t
  misc_feature (689)..(689): n is a, c, g, or t
  misc_feature (857)..(857): n is a, c, g, or t
  misc_feature (1024)..(1024): n is a, c, g, or t
  misc_feature (1036)..(1036): n is a, c, g, or t
  misc_feature (1107)..(1107): n is a, c, g, or t
gctgctaacgacggccagtgccatgctcgaatnatcntcactaaagggcatacgcttgcgggcgcggctgtatgctccnnnnnnnnnnnnnnngaaacagtgatttatatgaactgttggaataatggaacctcaaactacagatgtgtatgtaaaattgcataaatgcactgacttccttctccctgactatatttttaataatcagcattatcctnnnnnnnnnnnttataaaagcctacagtagcggttgttgctttattttccttaactcgtgctgctttcatatggtcatttgtcgacttattctaatgctcctcttctgatttagctctgtcctctgttctcgtttcctttttctgtttgctgtctctgccttgtattagctcttctcttatacattacttactcttctatcattttgctgctctctgttccccctgttattcttatttgcctcctttcctttcttgcatcctattcttcttctctctctcgtttaccttctctccgttctnactgtgttttatctctcgctgtctattgtcttacgtttggcgctttctgtctgcgctcgattggcctatttttctcttctcttgttctccctgttatgtgcctctcccttttctccgttcgcctctctctggcttctttgtgtcgctctttctgattatatccactcacgnctttttctctctcttcgcttttgtgtcctcttattgcccatttcctaaatttttgtaactactggtttatcttgtcaatgttgttcaccttcccgttgtcctttgtcgtgtttaaccgcttcttgcgtcatatttctctgtcattctcttctttctatgtcactatcnttctagtctatactgtgtctgcgttgttcttctttcttcttatgtctgcctttctcttgtttcacggtccactattgctatagccttctactcttttcggatcttgtaccttccttatcttatcgcccttctttctccctattttcccctttcatgtctagcgctcntctatctttttntctctacttccttcccattctttctcgtcttcacctgctttcgtatttagtcattgcgctacgctgacctntgcactctactgctatatttcccgctcagtctg

SEQ ID NO: 119636 - DNA, 318 bp, Homo Sapiens
gaccattctcttttagtctatgggaattacagggttgccgctaaaatattcacttgttcatatcgtgtcagagatttcctcttctctggagcttaggtggctcttcacaatccataggcttgaatctgcaacctagtgtaaactgccttgctttccccggttctttcccctgctagcacctgctttctcatccctatctccagtcaaagatgggattgcttaatccaactctggagagggaccaagtcttttctgcccacatctcacacaattgaggtgtctgaacaagcttggggagggtctataaggggtaggctc

SEQ ID NO: 119637 - DNA, 1017 bp, Homo Sapiens
  misc_feature (107)..(107): n is a, c, g, or t
  misc_feature (262)..(792): n is a, c, g, or t
  misc_feature (881)..(881): n is a, c, g, or t
  misc_feature (888)..(888): n is a, c, g, or t
  misc_feature (893)..(893): n is a, c, g, or t
cgtaaagacagcgtcttgataggttgcccaggctgctctgggactcttggcctcaagcaatcttcctacctccacctccccagttgttgcgccatggtgcctagccnagatgagactctcattcaaacagtcaaaaacccgacttaaagtagctcagacacgcatagaatggattggctgctgggacatcatccttgggtactggttccaacagtgcctgcagatggagccaccctcggagagtcctcgtgccgaattcttnnnnnnnnnnnnnnnnnnnnnnnnnnnnnnnnnnnnnnnnnnnnnnnnnnnnnnnnnnnnnnnnnnnnnnnnnnnnnnnnnnnnnnnnnnnnnnnnnnnnnnnnnnnnnnnnnnnnnnnnnnnnnnnnnnnnnnnnnnnnnnnnnnnnnnnnnnnnnnnnnnnnnnnnnnnnnnnnnnnnnnnnnnnnnnnnnnnnnnnnnnnnnnnnnnnnnnnnnnnnnnnnnnnnnnnnnnnnnnnnnnnnnnnnnnnnnnnnnnnnnnnnnnnnnnnnnnnnnnnnnnnnnnnnnnnnnnnnnnnnnnnnnnnnnnnnnnnnnnnnnnnnnnnnnnnnnnnnnnnnnnnnnnnnnnnnnnnnnnnnnnnnnnnnnnnnnnnnnnnnnnnnnnnnnnnnnnnnnnnnnnnnnnnnnnnnnnnnnnnnnnnnnnnnnnnnnnnnnnnnnnnnnnnnnnnnnnnnnnnnnnnnnnnnnnnnnnnnnnnnnnnnnnnnnnnnnnnnnnnnnnnnnnnnnnnnnnnnnnnnnnnnnnnnnnnatacaagcgttcccctggaagctcctcgtgcgtctctgttcgacctgcgctaccgaactgtcgctttctctcgggagctgggcttccanactagcntagtnctcatcggttaggcgttgctcaactggtgttggagaccccgttagcgacgtcgctacggtatatgcttatcaccggggaacatatcccggacacctgtaaggtaaaacagagttggggcaattt

SEQ ID NO: 119638 - DNA, 477 bp, Homo Sapiens
  misc_feature (221)..(237): n is a, c, g, or t
  misc_feature (298)..(298): n is a, c, g, or t
  misc_feature (300)..(300): n is a, c, g, or t
  misc_feature (349)..(386): n is a, c, g, or t
  misc_feature (417)..(417): n is a, c, g, or t
  misc_feature (427)..(427): n is a, c, g, or t
caatttttcattcccggtggttgtctggggaggtggttggacgaggtcctgcttgaggctcggggatcagaacgatgtcaagtgaagaaaaatgcacgggggcatgctgagccactggagttccagagagggccgaggagggtgcagccacggaggttggatcctctgctccgccgcctcgtcctcgtcccgcttctgctgggttccgctttgtccctggnnnnnnnnnnnnnnnnnctgtgtgcgtgcgaatggtgcggcccctcccctctcaccgtggttaacgtgacgaaggcananttcctgtaaatgtgtaaactaaggggatggttggattttttttcaatgnnnnnnnnnnnnnnnnnnnnnnnnnnnnnnnnnnnnnnggttttatgaacagcagactctatgtaaagnattttagtanaaattttttattgatacttcttaagaataaatatatggctattgtcaggt

SEQ ID NO: 119639 - DNA, 1013 bp, Homo Sapiens
  misc_feature (409)..(417): n is a, c, g, or t
  misc_feature (458)..(494): n is a, c, g, or t
  misc_feature (525)..(907): n is a, c, g, or t
  misc_feature (929)..(929): n is a, c, g, or t
  misc_feature (935)..(935): n is a, c, g, or t
  misc_feature (937)..(938): n is a, c, g, or t
  misc_feature (963)..(963): n is a, c, g, or t
aaatacttgagatccagtgccaggcaagagggcagaaccaccctgctcagtgggctggcaactcctttctgggagggcatcgatatctcttgaccccccgggataaatcttccctggatcctacacaaccctcgtgattgagatgaaacaatttaacatgtgaatccaacagccctgcatttcacagaatgttctgtttcaggcagtgacattctttatggggaactagtatacgcaaagcacgtgcaaggaaagggaagagtttcctaaagtgcattaagatagactgactagtaacaggatgcaaacggccctgacacatacagtagctccataagcagggcaggaggggtggcacgacagaaacagaacattctgtgaaatgcagggctgttggaaacatatttannnnnnnnnatttataaaaggttgatttaggaatattttgtcagtcattnnnnnnnnnnnnnnnnnnnnnnnnnnnnnnnnnnnnngcctacagccgcgcctcgttccgaattcttnnnnnnnnnnnnnnnnnnnnnnnnnnnnnnnnnnnnnnnnnnnnnnnnnnnnnnnnnnnnnnnnnnnnnnnnnnnnnnnnnnnnnnnnnnnnnnnnnnnnnnnnnnnnnnnnnnnnnnnnnnnnnnnnnnnnnnnnnnnnnnnnnnnnnnnnnnnnnnnnnnnnnnnnnnnnnnnnnnnnnnnnnnnnnnnnnnnnnnnnnnnnnnnnnnnnnnnnnnnnnnnnnnnnnnnnnnnnnnnnnnnnnnnnnnnnnnnnnnnnnnnnnnnnnnnnnnnnnnnnnnnnnnnnnnnnnnnnnnnnnnnnnnnnnnnnnnnnnnnnnnnnnnnnnnnnnnnnnnnnnnnnnnnnnnnnnnnnnnnnnnnnnnnnnnnnnnnnnnnnnnngacatgtgagcaaaggcagcanaggcangnnacgtaaaggcgcgtgctgcgttttncatagtccgcccctgacagatcaaaatcgagtcaatcaaggtgcgaacgg

SEQ ID NO: 119640 - DNA, 1017 bp, Homo Sapiens
  misc_feature (345)..(928): n is a, c, g, or t
cagtttatcttagtaatgccagaaaaataacagccgttattttcactttaaatgcaaaccaaatactgctgcacacagagtacaaagattacctatgaacatggttaggtacaaaggccatattagatgtatagaccacactttgttcttacatcaaagaccgaccgacagagcaattttttgacaattattttagcaaataaccgtgctactaaacaaaggcaaatacacatatatacacaaacacgtctcaactaaaattatacagggaactctggggtgcaaatatctggtgaaaccaccagagaatttgtttgtcaaagtgaccctcgtgccgaattcttnnnnnnnnnnnnnnnnnnnnnnnnnnnnnnnnnnnnnnnnnnnnnnnnnnnnnnnnnnnnnnnnnnnnnnnnnnnnnnnnnnnnnnnnnnnnnnnnnnnnnnnnnnnnnnnnnnnnnnnnnnnnnnnnnnnnnnnnnnnnnnnnnnnnnnnnnnnnnnnnnnnnnnnnnnnnnnnnnnnnnnnnnnnnnnnnnnnnnnnnnnnnnnnnnnnnnnnnnnnnnnnnnnnnnnnnnnnnnnnnnnnnnnnnnnnnnnnnnnnnnnnnnnnnnnnnnnnnnnnnnnnnnnnnnnnnnnnnnnnnnnnnnnnnnnnnnnnnnnnnnnnnnnnnnnnnnnnnnnnnnnnnnnnnnnnnnnnnnnnnnnnnnnnnnnnnnnnnnnnnnnnnnnnnnnnnnnnnnnnnnnnnnnnnnnnnnnnnnnnnnnnnnnnnnnnnnnnnnnnnnnnnnnnnnnnnnnnnnnnnnnnnnnnnnnnnnnnnnnnnnnnnnnnnnnnnnnnnnnnnnnnnnnnnnnnnnnnnnnnnnnnnnnnnnnnnnnnnnnnnnnnnnnnnnnnnnnnnnnnnnnnnnnnnnnnnnnnnnnnnnnnngctacggatactgtccgctttctccctcgggaggcgtgggcttctcatactcacccgtagtactcagttcgtgtaggtcgtcgcccagc

SEQ ID NO: 119641 - DNA, 853 bp, Homo Sapiens
tctgaatgtcttgaatacatgttgggaagaatcggtgtcttaacagtctccagtgtccacgcgttgactgccgtgtgtgactccagtcggcgtctcaacagtctccagtgtccacgcgttgactgccgtgtgtgactccagtcggcgtctcagcagtctccgagtgtccacgcgttgactgccgtgtgtgactccagtcggcgtctcagacagtctccggtgtccacgcgtagactagccgtgtgtgactccagtcggcgtctcagcagtctccggtgtccaccgcgttgactgccgtgtgtgactccagtcaggcagatctcaagcagtctcctggtgtccaccgcagttgactgccgtgtgtgactccacgtcaggcgatctcacgcagaatcataccggtgtccacagcgtagactgcacagatgtgggtgaacagccccacgacacaggacggaacgaacgaacccacgactccaccgggaaggtcccaacagcaagtacgaactggcaccgctcgtatagagggtccctaagaacaaagcaggacgtcaaacaagaaccacacagaaagacggtggcaaacgcaactaggacagggacagaagatcgtgaacgtcaccaggctcctgcgaggaaaccaacagccaacgcacaactaccaatcgggaccccaacgccacgcacgcacatggccgaagaacagaggccgacaacaccaccgggaggacgacacgaccacggccacccacacggcgtcacccggcactcgcgcctgcacgaacaatacgacaacccccacacgacggggcacaaagcagccccaaccccgcaccccccacgccggacctca

SEQ ID NO: 119642 - DNA, 926 bp, Homo Sapiens
  misc_feature (360)..(558): n is a, c, g, or t
cgccgcgggcccagagacgtgaggctgtcggcagtctggtggccccgcctcgtgtcccccccggaccccacgccgctgggagcttgggggttgcggtcttctcttcctccgacctcaccttcgatgcggaagcgcaggggcaggtgcgccgccctcggcccgcgcaggcggtgggcccgtctggggcaaggcgcccggaagcgcctggttggttcagaaacatcggaccgcagcgggagggcgggcaccggcgcgtggtctcagtggccccaggcgaaccctgatgagcagcagccgcaagtggcttactaaaggagccactttctacgtttgtctggaatttacgtgaattaagctggnnnnnnnnnnnnnnnnnnnnnnnnnnnnnnnnnnnnnnnnnnnnnnnnnnnnnnnnnnnnnnnnnnnnnnnnnnnnnnnnnnnnnnnnnnnnnnnnnnnnnnnnnnnnnnnnnnnnnnnnnnnnnnnnnnnnnnnnnnnnnnnnnnnnnnnnnnnnnnnnnnnnnnnnnnnnnnnnnnnnnnnnnnnnnnnnnnnnnnncctgagccagaccgctctggactgtttataacttttttcagccttactacctgccagaatttcaatgtaactatgtatcttttgtccttacgtatatcaattgtatatacaattgagattatcctgtattggctattaccccccatcacttgatatggtgacttttctcatgttagggctgaatacactaacatgtgggaaactgtcggactgaaaacgaagcggaggacaacagtttctctaagtagaggagttattatggggccacacatgagcagaaatgcaaggggccctgaatgtgtacgtcgaattgacgattacggggatttaaaggcggaagggggcaggatgaaaaagggaactgaaga

SEQ ID NO: 119643 - DNA, 347 bp, Homo Sapiens
  misc_feature (251)..(284): n is a, c, g, or t
tggttagaagtgatgagatatattttaaaagtccatacaacaaaattacaataaacatttattaagctgtaattttcacaatattttaattctgttctgagatctacaaatatctctacataacaccaaagccagtgatttaataaataagaggaatgtatatatcgctttgcaaaaaaatgcctgatacatttatctctatataagatatttgtagaatcagtttcccaaggctcacgaaactaaagtgnnnnnnnnnnnnnnnnnnnnnnnnnnnnnnnnnntattcaaatcaaatggatttatattaagtgccaattaaatgctatacaaatttataaccagat

SEQ ID NO: 119644 - DNA, 268 bp, Homo Sapiens
  misc_feature (201)..(218): n is a, c, g, or t
aggaaatacagtttttattaaagtatctttattttccacttgatatttactagcaaactaaaccacagccataaccttggcttctcttaaagtcaaaatcagtttaacagtaaaaccaggtgaattttaacccactaagccttttcttaatttaacatgaatagctaaaacagtaagctttggacaaaataagatttatgnnnnnnnnnnnnnnnnnnagtctctaagagctctgctggaatacagcaaaacataacaccaaaaataa

SEQ ID NO: 119645 - DNA, 336 bp, Homo Sapiens
aaaggggattcaaacacacatacattgagtaaacaatcttgattatctaactgccatcctaggctactgctggcagcctttgtggttgctcaccttaccaattaatgagcgataattaacaaagagcagcagctgactcaggaaagatgtcattgctatgactgtcagaattaatatttccaaggtaatgttttaaggagaaaggagtgattgactaggaagctatcattattgactcaaagaaagaagctgtcaacctaatttacgtggtccatttttttctgagaacatttttatcccaagagggaaaatggcagtatgaaaagtgactatgaa

SEQ ID NO: 119646 - DNA, 294 bp, Homo Sapiens
taacatttcacaagactttttattggtttctaaaaagcagttaatattttaaggtacggtatataaacaaaatagccatatctgatttttggcaacatgaaaatgccaatttcctttcaaaccaattcccggactacagctacaaatgtggtcaacaacgtcatcctggagtaaaattcagctcctgacacacacttctatggcaattataacatagttaacacttggcctgtacctatatgaacactgatccattgggggccactgaataaaaatttcttcaatctcatttgc

SEQ ID NO: 119647 - DNA, 236 bp, Homo Sapiens
catatctctctttgtcacagttccagaagaattcccaggaatttagctttccctttactctaatctcagaaggagctataccctctttgaagctccatagagagaaataggaacaaacttacccaaaacacacggtgggtatgagtgctgatttttatccccatggagaaagggaattttacagcaatgagcatagggtctctggtgaaaggtcatatccatacatatctttatag

SEQ ID NO: 119648 - DNA, 117 bp, Homo Sapiens
taaataataaagtatgtgctaatattatgtaataattacatataacattagcaaaatttgttgagtatctctgtgacaggcctataaagctaggactacagtgccagttagagttta

SEQ ID NO: 119649 - DNA, 294 bp, Homo Sapiens
cagtgaggagtctatgagaatatggggaaccatatttccctaggagcgtcctagctgttgctgtgttcaaactgggattctgaaaatggattacaaatacgccaaggtattggttcttcagacctcaggtcctaggccagtcacccctggcagccttcttcacttaaccccagcactcccgagtgtgctgtacagatgctattctctttgtgttgtcttgtgccctgttcgggtggcaccatgcctcattcccctcccggcagtgctggcgcttgcagcatgtagagcccacca

SEQ ID NO: 119650 - DNA, 458 bp, Homo Sapiens
  misc_feature (429)..(429): n is a, c, g, or t
tttgttaactcagcaaatatttattgagctcctataatgtgccagtctctaggccccaggttgatagctgagagcaaagctggacgaattctcatgagcataatgtagaatcagtggcagccctgagcttgttttcctgcaactggatggtcccatctgggggtgatgggagacagtgacaggtcatcaggcattagattctcataaggagctcacaacctatatccctcactgacgcagttcacagtagggtccgtgcttctatgggaatctaacaccactgctgatctgacaggaggaggggctcaggccgtaatgctcgccccgctgctcacctcccgctgtgcagccccattcctaacaggccacggaccagtatcaggaactggggacctctgatgtatataggatgtcacgtggtagtgatgnaaatgaatcaggaaaagagcactagagat

SEQ ID NO: 119651 - DNA, 495 bp, Homo Sapiens
  misc_feature (79)..(154): n is a, c, g, or t
tttaagtgtctggtgagtctttttatttctcgaggcagtggctgcatggggaagtgcttgagccctggcacccaaatcnnnnnnnnnnnnnnnnnnnnnnnnnnnnnnnnnnnnnnnnnnnnnnnnnnnnnnnnnnnnnnnnnnnnnnnnnnnnattcccattgtgtggccatgccaagttacgaggtctctctgtttcctccttcctaaaaaggagacaacatccatctcgaaggaagatctggcctgaagagcagtcactcttgcctggcatgcagagaatgccaaatcatattaatgactggccagaatgaagtgcgtgacctcatcactccataactgacaggaaacaacccaaccagtgttgtttgcaacacttcagcttctctcctcacgaagcacgtctccagagacgcctcttccgcaacaccttcccagggaagccatttctgcctggacccaccacagctcccaacctgtcacgcacccctggag

SEQ ID NO: 119652 - DNA, 307 bp, Homo Sapiens
cctacaagtctggcatggctagataacaggttagtttactgggctggttgatgcagatcctgggtcacagttctatttttatagatgatctgaccattgtcccttggtgtattcaatcttttacttccctatgaccaacactgacatgtaccatccattatttcatttaatctcatttaatcccaatatgaagctttgagaattcctgttttacagaggaagaaatcaagcttgatcagttcatgtgcatgtccaacgcacaccaaacgagtgctagggctggtcatcagagtccaatgatctgatc

SEQ ID NO: 119653 - DNA, 295 bp, Homo Sapiens
aataaatgacagactgtttgttatagacaaaaataaaagcattctgtaaacttctaaaagcatacacagattggcccccaaggaaacagttactcaaataatgtatgtgtaccttatctttacttcagggtctcatggttgtggtcttgggtcaaaccacagtagaacttcacaacacaaaaactgatctgatgccagaattaatggtgcagggaaaaaccaaatcatagtatggattactttaaatacataaaagatgaatctgtacactacgtgacagtggtgttaacactgg

SEQ ID NO: 119654 - DNA, 411 bp, Homo Sapiens
  misc_feature (131)..(131): n is a, c, g, or t
  misc_feature (266)..(266): n is a, c, g, or t
  misc_feature (275)..(275): n is a, c, g, or t
tctggttggggaacaaccagggtgaaatggactaaaccataagtgccactctagttattcggcagagtgcctactaaaggtctactacaataccaccacacatctgctcagagatgaacaagggctgaccnattgataagctcttgaaaattcttaagctcactgcatcctttcaggtctccaaggaatgctaaatctcctctctgccgtgagatacaagaagtgaacttagtgttgggagacggaagctggaaggccctcggggnttgaatccncagggacttcgggatatagcagagagagctatatgttactccaggctgtagaatcctgggaaaagagctaccatgcagcccacacctgggtcaactacaggaccaccttagtggaagggggacaatcagggcctct

SEQ ID NO: 119655 - DNA, 484 bp, Homo Sapiens
ttttgagcatcatgtagtctttaatcatgttggggaggacaggatgattatttcttatgtgtaggtcagattagataactcaattccatggctgggcccaatttgtaagcagtcatggcacatcccatggaaacctataatctaattatggctgctgcatcagtcctcatccttcatgctgtcatccacagctcctcaccacccatcttacttggatgaaggctctctgaggtatgaagggcaaacatctgatccttccactggaggcctagactgctttccttattctcacagcagccacaagtattgggatcacagcttgaaaggctcttcttggtccgtgggactgaggcagtcaggacaatttcaggcctttagtgaatggaggcatttcattacttcagatctcacctagtcttggaggtcttgggcatttttagaactcacccagccaggctgccactcagggtgaggctacctggat

SEQ ID NO: 119656 - DNA, 756 bp, Homo Sapiens
  misc_feature (12)..(12): n is a, c, g, or t
  misc_feature (41)..(169): n is a, c, g, or t
aagtatgaagtnacggccgccgattcggcacgaggtgcacnnnnnnnnnnnnnnnnnnnnnnnnnnnnnnnnnnnnnnnnnnnnnnnnnnnnnnnnnnnnnnnnnnnnnnnnnnnnnnnnnnnnnnnnnnnnnnnnnnnnnnnnnnnnnnnnnnnnnnnnnnnnnnnnngtcatcctcctccaactactgattgacatatggatcatcagttcagaccctcactgcatacaggatccctagagggttctatttaatagcttgaggaagggagactttaaaaggacgtgtgtgagtgaaataggatatagccattaccacggtgccaggacctgacagcgttccaattctttttgcagcatggggaatcaaaggtggcatgccaagttcaactcagggctgaggtatccacattgtccacatcaggcaagccctgcactgaggtatccacattgtccacatcaggcaagccctgcactgacggttgagcctcatggagaggagcatgtgttggaaagagatccctttgttaactgttttgtggtgttctcttcaatgaattagagctcatgccccttttctggctttgctgttgatttggatggtagagaatttcctgagaccttcctttggccccagctatgccaccatctcttctttggtgattcctgaagaaagtcagtgcatgtcctgtatcaaatctcaataaatggtactaattgcgaatccaaatcggtaactttctgacattagatgat

SEQ ID NO: 119657 - DNA, 423 bp, Homo Sapiens
  misc_feature (177)..(193): n is a, c, g, or t
gagtattttttaaataccctgtgtccatttaataggaaaaacagtttgaggtactctgagtttcttacaactatttgtctctgaatagttttctcttaaaatttgacaaatgttaaaaacattgtccttcctcctttggttatagtggagtcttctgttttgccaggaaagcgaacnnnnnnnnnnnnnnnnngttcatcatttacaaattagatgggatatattttagcaaatagatctcaagagctggatttaattagcagctttttaggacataaacattaaagggttagatggaaaagattgttttgactgacaggataaatgacagggctgtgtttgatgtgcgtccaggaattggtctggagctggtgcccaacttctcagtccatcttgagaagccaaataaaatacttaacctag

SEQ ID NO: 119658 - DNA, 197 bp, Homo Sapiens
tttctctattatgatttttattcatcaaagcttattttcagtgttctggaacttcacacaaatggtcatacagtgtctactcttgtgtatctggcttcttttgctcaacataaaatttttgagaaccattcacattattatatatcagaggttgtttctttcttacttctgagtacttttacactgtaggaatatgc

SEQ ID NO: 119659 - DNA, 338 bp, Homo Sapiens
ttaattctgtgaagaatgatgatggtattttcatgggaattgcattgaatttatagattgcttttggtagtatggtcattttcacaatattgattctacctatccatgagcatgggatgtgtttccatttgtttgtgttacggatttatttcagcagtgttttgtagttttccttgtagagatctaccacctccttggttaggtatattcttaagtatttttattttgttattttttacaactgttgtaaaaggagttgagttcttgatttaattatcagcttggtcactgttggtgtatagcagtgctactaatttgtgtacattgattttgtatcc

SEQ ID NO: 119660 - DNA, 344 bp, Homo Sapiens
gaattggagatactggggaaagcagaagagagattcttcaaaatcttaagaaatttagtatcttcagagacatatgagaagacactatattcttcagcaataatacgatgccataaagagggaacttgtggaaaaagtgaaaaacattttctgaaaaacaggtcttagaaattaaaactgaagaaatagaactaaaatcaccagaaagatttgaaaataaaattaaggaaatttactggaatattgggcagtacgacagaaggatttttaaaaaacttagtccaggaactgtactaccagcttaatagttgtggacagaataaaagcagagggaattgcttaag

SEQ ID NO: 119661 - DNA, 762 bp, Homo Sapiens
  misc_feature (294)..(294): n is a, c, g, or t
ccggctaggtacgaggctgcctggtgaatcggcacgaggaggcggggtcgagatggcggcgcctttgaggattcagagcgactgggcgcaagccctcaggaaggatgaacggggacggccctggctgagtctgtcagtcccccagggtagaaccactctttgtatggacacggcctgcagcttgtcatggatattagtgcccgtagatggcatcccgagcaggcttaccgagcatcaggaagcgatttacatgtgcacatgagaagtaacacaaggaaatagcacttcatactngcatgtccaaaggaaaatgcatcttctacagttgtttggcaccatatactactcttgttccagaattcatacataagagtgtaagcattcgcctgtgcacattttccagcatgaggaggtctcgcgtgtgtcttctagtatctgacgggatccatgataaatctggtcaggcttcccaattcggatgaactcaggacgcagtattggaaggacatgtgtttgatgtgaacttggtcgcaggtttttcccatcaggccttgtggtcctgagtggcgggacatggatgcccacgtctgtctgatctggtcagctgacagatgctagctgcgtggtgaccttccccggtcactgaggaggtgtcctggataccgccatcgttgatcgggggcggcatgtggctgtcgtgcttctcgagatgggacagcccgactttgggatggtgggcgctcagctgcttgggagtcttgc

SEQ ID NO: 119662 - DNA, 402 bp, Homo Sapiens
  misc_feature (335)..(335): n is a, c, g, or t
attgatatatcatagttgtacaaacatttggagtacatgtgatactttgatacatgtgtgtgatatacaatgatcaaatcagggtaatggggatatccatcatctaaaacatttatcttttctttatgttgggaacattgcaattcttctcttctagttattttgaaatacacaataaattattgttaactacaatttctctaacatactatccaatattagaacttactccttctatcaattgtatttttttacctatcaaccaacttctcttcatttccccccaatcctatctactttaacagtggtttttgaagatttaaatgaagcagacnatattctttaaacactttaacaatatccacacaaattactgttccattcaaaagaagaccaccacaa

SEQ ID NO: 119663 - DNA, 458 bp, Homo Sapiens
tttacagtattaggagatatttatttagtacatacgataggtcatgctctgtctgagccctgggaatacagcatgtaacacagataaggtccttgcctttaaacagcttacatcctctctgaggattgacattttagtcaaatagcgagagccagctatgcaaagatctgttgaaacagtattctgagcaaagaaaacctctggtccaaaggcgcaagactggggattagcctggtgtgctgaaggaactgacagaggtcagtgtgtcaggagcccatgagagttttattggctagtctttgaagtgcattctgctcttccagcagaatatccagttggtcagatatcccatagcaatttcccttgcttcaatcacattggtacttctggaaatatggatatgcaatctccttaactggaatgtaacctcttgaagagcagacttatatttaatttgt

SEQ ID NO: 119664 - DNA, 672 bp, Homo Sapiens
  misc_feature (621)..(621): n is a, c, g, or t
gggagagagtatgaagtcgacggcgcgccgaattcggcacgagggtgccatctatgaaaggctcgtatccgctagccgtgtaggtctggttggatttgagcaggtgaaggattacaccaagtggaaggaggcctgcaggagttgctgccggtccccgtcaccactgtgggactgttagacctgcaaggcagacccaccctcgtctggaatgaggtaacaccaagaggtgtggccagtgcacagaaccatagactcaagctttagaaagtggccattgtggccggcccaggagcagtgggcactgagaggtctcagcctctgtgggggtcgagagaggtcgtggtgtgcctgacagccccgtcctgccggaaagcaggggtgctgcctggagatgcggcgggtctcactgatgtcttcgtcagagctccgtggagagcccctggttgcaggcaggacagcaaggctgaggggtcacacggggccacatctgctggtgcccgtcgtgctcctctgcagcaagcccagcctggccattgctggaggtcctggagcccacagtgccttggccttaaagagctcacttgagaaacggcttgttccggtggggtggggggtggattntataatattaaattatttgtaaacataaattaaaaaatattatattttatt

SEQ ID NO: 119665 - DNA, 624 bp, Homo Sapiens
  misc_feature (604)..(604): n is a, c, g, or t
gcggccgccactttgctggtttacttgccggagttgggcgagttggatcgcagagaagtggcggcgttagcgggcatagccccttacaacgacgacagcggaaaccacaatggaaaacggcagatatacggaggaagaacccgtgtcaggcatgcgttatacatgtcgagttgggttgttatccgctttcaagcagactttaaaacgcgctacgaggctctaagggagcgaggcaagagcgcgaaagtcgcgctcatcgcctgcatgcggatactgctgatcagactaaatgccatgctgcgagacggtacagaatggcgctgacggacggtgggttaagacagttgctcccacattagtccagggttcgcggcagttgtaaggtcacccgcaacccgccttcgcgcaaattctgcaaactcacttccccaccatggctgtgggcaatgttgcgcgcgatgcccaggcccaagccatacccctgctgctggccagccaggcgaaagtgcggttcgaagacctgttccaaacgctgctccggcacgcccgggccttcgtcatccacatgcaggatgaactccacgccatcgtcctcgatatgcanatgcgcgttctgcccgtact

SEQ ID NO: 119666 - DNA, 667 bp, Homo Sapiens
  misc_feature (498)..(559): n is a, c, g, or t
aaaaaccagccatttatttagctcataattctgtaggttggcttaacagttctggtctagattggctcagttgatctctcaggtgcttgcttctgtgtctgaggtcatctagggtgttgcctggttgttggatgatctaagatagccttgttcatatgtctgacaattagcagactgttggttagggctaggagagtgactcaaccacgtctctcataatccagcaggcaagacggtacacatggaggtcacggggttgcaagtgcagtaagagaggacaaaccctgatgactgaagtgtctgcttgcatcacaactgctaatgccccattggccaaagcagctcacatcaacgacctagacttaaagggtgcagaaaaagactccacttcctggtgggaagatctgcaatgtcacactgcaaaatcatgataaagggagaggaagagtttgtggccaattttataatctatcacattgggttttcttgtgtgagtcnnnnnnnnnnnnnnnnnnnnnnnnnnnnnnnnnnnnnnnnnnnnnnnnnnnnnnnnnnnnnnaactttaagtgacattcattgatatcatttaaatatcttttgactcccatcaattgcctatttaccaataaatttacttattttacttttcctttctgatgactgcac

SEQ ID NO: 119667 - DNA, 224 bp, Homo Sapiens
cccgacaccgacagaaaccttttgtcctttccttttccatgcttagagggaagtttctgacttgggagaacgccttaagttcttggggtctgaactcctctgatgccttccaaagtcacgtagctgtaagacccagcgggtgccagccgggagggtgactccagctcagcagcatgtatggaagtgcattgtgaccatgaaggagtctgccagtggccaagcca

SEQ ID NO: 119668 - DNA, 627 bp, Homo Sapiens
ggcattggggttgaagccgagcgcccccatccggcggggattgtcgcggacgccctgcagcgcgaggccgaacggcgcgcgcgagacatactggacggcaaagtaggagatcgcggcgacgccgagcgtcacatagtagaaggcgatgtcgctgcgccagtcgacgccccagaaatgcggcgtcgccacggtgttgatgccggtgtggccgttgaagatcgcccagttctggttggtgaaatagtagaacgcagcgccgatcgcgagcgtgatcatgatggtgtagatgccctcggtgcgcaccgcgagcgcgccgccgagcgtgccgaacagcgtcgccagcgccagcgccatcggggttgccagccaccacggccagcccaggctgatattggcgttgccgctcacgccgaacaccgcgaccatgtagccggcgaagcccgcgatggtgagctgcatcaggctgaccatgccgccatagccggcgaggaacatcaggctgagggcgatgacgccgaggatcagcgtggtggcgaagatctcgatcaggaagaagccgttggcgatcagcggcatgatcacgaggatcagcgcgaccagccaggccacgggattctggaattccgg

SEQ ID NO: 119669 - DNA, 117 bp, Homo Sapiens
gatgttagggctaccgagacatcttgaggtgattgtaatagctgtaatgccaggtccaccatatttttagcataaagcaaatgtttacgcgtgatatgactgcacgggcctttcctt

SEQ ID NO: 119670 - DNA, 440 bp, Homo Sapiens
  misc_feature (65)..(110): n is a, c, g, or t
ttttttttcctagtaagcaaattattttaatgtgtttcaagatgttgaattctctgtatggaatnnnnnnnnnnnnnnnnnnnnnnnnnnnnnnnnnnnnnnnnnnnnnngagttaagacacagaaacttcgaaatgtcataaaattacaaatacaaaagcaacaaattaaaaaacatacacgattgcagatttcagtaacatcagtagccagaaacataccccaatgaatcacttaatcatcaaatatctcgctgattttgaaagggggctagtggttgatgatttaacctcaatcaatccaaaggacatgactctttccttacattacaagcaatctgtaaagatggctttaagtacctttgaaaaggtggagtgtcctttctcaaaggaaacagacaaggaaggggttatccgctctgcccccccactaccgaaatg

SEQ ID NO: 119671 - DNA, 516 bp, Homo Sapiens
  misc_feature (114)..(126): n is a, c, g, or t
catggggattatttggtttattgtaatacaataaaggaaatacaataaaaggtttaacaaaccttttcataaagttgctttggttgttaaaaaattttagacctttcctgccannnnnnnnnnnnnaagtacatcattctaacttcctaaaagtatagctcaaaaaggtgggggcccaggggagaggccagcagcgaaggcattattaggatcttatttgccccaagatcacgcagagatgatttattcagtttgtagattatataaacggaagagggaattaatagttcctgaatctaccatgagtcagatacaaactttctcatacaaccctcacggtaatcccacaaggttagaaattgggaacagaagagagagggcggggaactgagctcgggtttcaggctagcagcagacaagcaggaagcggaacgaagaatgatttctaagcgcagttccgcagcccactcacctcgtcggctggggccacctgctctgggagtttcgacctcgtgc

SEQ ID NO: 119672 - DNA, 294 bp, Homo Sapiens
gcaagtttatgaatagtttattacatttcagtaagtgtattgtgaatcaataaagcaaaagttaaggacaatgagctcattaccaagccagttattgattctctggttccaaaatagaacagtacaggaagggtatagagaaaataggatttttcatgataaaaattttaagcatcttaggaacacagacctaaagaaactataagacacaacggaaatttcagcagctacttaggatgtttatttatttacctttttttgccaattagaattagttatttggtttttactctt

SEQ ID NO: 119673 - DNA, 421 bp, Homo Sapiens
tatttgaagagatttattctgagccgaatctgagtgaccaatggcccgagacagagacctcaggagggcctgagaacatgtgcccagggtgatctgggcacagcctaattgtatacattttagggagacatgagacatcaatcaaatacatgcaagatccacattgcttctgtccagaatggtaggacaactcgaaggtggagcggggaggttccaggttataggtagattcaaaatttttttattggcaattggttgaaagagttattatcactagaaaggagtgtctaggttatgataaggggttgtggagaccaaagttttatcatgcaaaggaagactccaggtagcacgcttcagagagtatagattgtaaatgccactaatcagacttaaggtctgtgttaatgttcatgctggt

SEQ ID NO: 119674 - DNA, 163 bp, Homo Sapiens
actaccagcgtgaacaaccagcatttttattgcatttgagaatgcttataatgtcagtaattagtactgactacacaacattttttttattgtctgtatccgcagacatggaatgatggaattacagttgatgtcaaggaatgagtttcttttatgccttatc

SEQ ID NO: 119675 - DNA, 517 bp, Homo Sapiens
  misc_feature (366)..(423): n is a, c, g, or t
tttttctaagcttcatcttttattatgaagacaatagacccttgaggttatgttcacttcatttggttgtagctggtcttttaggagggaatagactaaagccatcaacaaaattccccttttggggaaatttatgctttgtggttcttctgggaacttcagttgtcaaggccttgggaagggccaagaaatggcactctcttccagagaacaaaagagggcttagggccttctgtggcctccttagggactcattcctcatggagtggcttaatagagtgagccctggacttggagctggacagttctggattcaagtccccagagacttcctttttcttccagttggatgaatttggaaagtcnnnnnnnnnnnnnnnnnnnnnnnnnnnnnnnnnnnnnnnnnnnnnnnnnnnnnnnnnngatgattatggaggctgaaaagttccaaaatctgctgtctgccaggtaagagacccaggaaagcccaaagtatagtccaaagcctgatagtcag

SEQ ID NO: 119676 - DNA, 195 bp, Homo Sapiens
tttcagggcatattgtagttttattaatagtgtaagcaaaatataaatgattaaaagctttgatgaatcataatacattgtagaagcaatagttaattactagtaagcatttgcttcttttagctcttaggtggagggagctctcacattctggaagagggggttgctgctatttgttcagtttctcctccaagg

SEQ ID NO: 119677 - DNA, 518 bp, Homo Sapiens
ttttttttgtaccttctgaaagggcagtctaatgacaaagtcagtcgataattgctcagaagatctgtattcaccagaaagagtctttctgctgatattcagaagatcaaattttaagctcagcatgaaccaagatccagttacacatataaaaggccgtagtaggcctttattagtaattattttccccatctttataagattttagagtttgaaagcattttccccaaatcgatgccaaaacttggacccatgctggctccttgttagctatgggaaagtcattgtatctttttaaacttttatatctttctctttgtacagtgacttaagacttctatcttctttgcaaatcaaatgtaatgataaaggtgcaggaaagctgaatatttaatgcaggtattttatttgaaaccaagtgctcctgttctccagggtctactttctgccaccagcctacatcccattgaatatgtttcaatcaatcttgatgttgggaattctttcatgtttggacc

SEQ ID NO: 119678 - DNA, 418 bp, Homo Sapiens
  misc_feature (87)..(115): n is a, c, g, or t
aaaggtttacagtaatcataggcctcatggggtgcctcaaatcacacgatggaggcagctaaacatgctgcctgcatgtgagcccannnnnnnnnnnnnnnnnnnnnnnnnnnnnctaaatccaagtgataaaacttgcacttccttctaccaccccagggtcatgaaaaagttaggaaaccaaacgtattacattttataaggtttgttttccactgcaagaagtgtggatgctatctatataaagtgagactcctcacatttggaggggcaatttctctcttgggaaacttgtgagaagagctcttaggttggctccttacactgatgaaacctctaatgaggtgtcaaaaccacaaacaaaactataacacatgatggccaaaacaaacttattaaatgctgataaaatcgttaa

SEQ ID NO: 119679 - DNA, 247 bp, Homo Sapiens
cttcccatctgtcatgtgaatgtccccaagcagtggtgaaggacatgctaggtcagtgttggggaacctgccctgccaggtcctgttttgtagataaacaaatggctgccttctggtgtttttattctatttcatctcattaacactacaaccttgtgttatttacttgataatctgtaattgtatgtaaatacatacaggattatgtaatttgtgtaaatacataattacagagttttgaaaactg

SEQ ID NO: 119680 - DNA, 442 bp, Homo Sapiens
  misc_feature (174)..(234): n is a, c, g, or t
ctcttcccaaaaaagtagagaacaatttcctggcagcctccctcggtggggatcaggaccccaattcattattcagaaaatggatcaataacagaaaataatgacaaatggatcttgctttttcttttcaaactatatttcaagatatcaaatacataatgatgaaaaattgannnnnnnnnnnnnnnnnnnnnnnnnnnnnnnnnnnnnnnnnnnnnnnnnnnnnnnnnnnnngtttgtgacttctagagaagtccattgcaaaaaccattacttaaggtaatgtatggctgatgaggaaccttataaatggtggaccaggtatacagctaaatcttctgaccaatcttaactcactgaagttgggacagacagatactatgtctctcccaatgagatatactggaaagtacatagcaccaactatacagcaatcttgcct

SEQ ID NO: 119681 - DNA, 383 bp, Homo Sapiens
  misc_feature (158)..(207): n is a, c, g, or t
tttgctgttgaagtccatttattgacatggaaagatggggacaatatgatcccattcttatatatatttgtgtatagaaaaggctttggaagggtactataaacaagttatttctggtttgaaaaccaactctgccatttattagcttaagactctannnnnnnnnnnnnnnnnnnnnnnnnnnnnnnnnnnnnnnnnnnnnnnnnncccaaaccctaccttctctcaggctactgtcgctgtcttcaatgagttagtataaagtccctaacccacaagagccccgaaaatgttagttacaatttttcctcagtatttacatttttatctggtgagtatgtattatatttattgtaaggggaaaaatgttcacagaccattgc

SEQ ID NO: 119682 - DNA, 479 bp, Homo Sapiens; identical to SEQ ID NO: 88096

SEQ ID NO: 119683 - DNA, 307 bp, Homo Sapiens
  misc_feature (89)..(91): n is a, c, g, or t
  misc_feature (93)..(103): n is a, c, g, or t
  misc_feature (105)..(113): n is a, c, g, or t
  misc_feature (115)..(138): n is a, c, g, or t
aaaggtagcatcttttaatcctcagactgccctgcgtggtccgattgaattgggcagtcagcactaggctcttcaaagggaaacaggcnnngnnnnnnnnnnngnnnnnnnnngnnnnnnnnnnnnnnnnnnnnnnnnagaaaaaagagagaaaaacacaccgggggaggaaaatctacatttggggcatatccccttgagatggctgtggctagcgacacatgatgtgaacacctctcttggattgtggttcggccgcacaaggccccatcagagttctacaggtggagtgtggggcccagaaggg

SEQ ID NO: 119684 - DNA, 457 bp, Homo Sapiens
  misc_feature (158)..(379): n is a, c, g, or t
aaagttggatctgcataaatagagaaaaattcatgtttatggagaagacaattgaatattgtgaagatgtctttcactaaaatgatctacaaattcaaagccatatctgtcaaaatcccagctgtcatttttatagctgtacacactgatacttaaannnnnnnnnnnnnnnnnnnnnnnnnnnnnnnnnnnnnnnnnnnnnnnnnnnnnnnnnnnnnnnnnnnnnnnnnnnnnnnnnnnnnnnnnnnnnnnnnnnnnnnnnnnnnnnnnnnnnnnnnnnnnnnnnnnnnnnnnnnnnnnnnnnnnnnnnnnnnnnnnnnnnnnnnnnnnnnnnnnnnnnnnnnnnnnnnnnnnnnnnnnnnnnnnnnnnnnnnnnnnntgaatttcacctctgagagtttcataagctggtattgtcctgacattgcaaagtgtttaccacaaagatcctgtacat

SEQ ID NO: 119685 - DNA, 186 bp, Homo Sapiens
gaagacttgagtattaactcactgctttcagacctgagagctgctagaatatattttctcctaaaaattaaggagtcctttgacctttactcaggccctgcctgacatccccacacgtgtcctggggtccctggcctcaccagttctccaagattgaggctaacgtctgaagtggctgtgagaagg

SEQ ID NO: 119686 - DNA, 477 bp, Homo Sapiens
  misc_feature (199)..(199): n is a, c, g, or t
  misc_feature (361)..(361): n is a, c, g, or t
  misc_feature (392)..(392): n is a, c, g, or t
ctttgggtctcaaatgttctagtgctggaatggaacttgccttttcctggctaattttcctggagattgaacttgattgaggttctttgccagctctaattgctgagttttcctgagtgtttatacaaaaaataaattaaagtttaaaatcagaagtccttaatttaatagatgggattcttctatctgcttagggcantgtttttatactttggctacacactggaatgctctgaggagatttaagaaacacagatgcctggatctcaacctagagcttctgattaaattgtcttgggcattgaaggagagctgcaaatggctcccaggtgagaaggctgagaactgctgacctggaggntgaaatggatggcttctaataaacctttggncattgctaagagcagaagaatgctcaatccttttaacagtgataaacaaacatctctggggaaatggagaacttggtttggtgcc

SEQ ID NO: 119687 - DNA, 334 bp, Homo Sapiens
gtcagtacatagtaggtacatatatttatgtggtacatgagatgttttgatacagacatgcaatgcataataatcatgtcatagaaaatggggtatccatcccctcaaacatttatcctttgttatagttaagtattcctaaaatttaaaatcatcataaaaattttacatggcaatgcattcatttgttttgtttggaacatgattattatgcattgcatgtcagtacatagtaggtacatatatttatgtggtacatgagatgttttgatacagacatgcaatgcataataatcatgtcatagaaaatggggtatccatcccctcaaacatt

SEQ ID NO: 119688 - DNA, 425 bp, Homo Sapiens
  misc_feature (213)..(254): n is a, c, g, or t
ccattggaatactacgtttattgaggcaaggggacattatttttagttcttggagtcaaaaagcgtacacgaatgttcttcaacacagttactaaaaatacaagaccaagttgaatgtgccaaagagataccattcagttgggttttctagagtcatcaggaagaatattagagaagggatttacatggttggtttccatagcttgatagacnnnnnnnnnnnnnnnnnnnnnnnnnnnnnnnnnnnnnnnnnntttttatccatacaggaatggagcgtcccttttttttgtattttctcacttgacgtctgccaagggaacatacttaggaacatatgtagatgaaaacgactcctccatcctcaaatcactgagttctaatggccagcctgcagctcctttgatgttctgcggcactagcac

SEQ ID NO: 119689 - DNA, 451 bp, Homo Sapiens
tttatctatgagtccagactttatttttttacacactgaaccccccatcctccttgggtagggcagagcaaggggacacaaacaaaccaccaggtcagggctagatgggtgctgtgtccatgcatcgtggttggtgcagttttgcccgcgtgccgagccatgctctgttgctgatgacagtactctgaacagatcgtgacatgacatgaacacacatgccccgggctggcagcacacagggtgacttggcctctgagcacatttgtgagtctgtcgagagccaagcagatgaatggagggttataatggatccaattcagtgacaccatgaggtctaggaagacaccttgacagcccaataaaggctcaacctatccaaatcctcgagacgctcatggactccagcaggaaagccgcacaagcacgtctgcgccattttattcacaggatc

SEQ ID NO: 119690 - DNA, 237 bp, Homo Sapiens
cgggatgaacagcggcggcggcttcggtttgggcttaggcttcggcctcacccccacgtcggtgattcaggtgacgaatctgtcgtcggcggtgaccagcgagcaaatgcggacgcttttttccttccttggtgcccatatttgattagggcacccgggttccgccgtcctgctctccttagtcggatttggggggttaactactgcacggagcccttaccaaggatttagaatggt

SEQ ID NO: 119691 - DNA, 550 bp, Homo Sapiens
ttttgatggattgcttgtttctagttttaatcatgggagattcagtctttttctgtagacttcaatggtctctgaaatgtcccattgtagattttacaaaaagagtgttgccagccagctgaatcaatacaaacgtttaactctgtgagataaatcttccatcacaaagcattttcacagatagcttgtttctggttttcaaggcgaaatattcagtttttcactataggcctcaatggactccaaaatgtttctttgtagattttacaaaagagtgtttccaacctgttttttactataggcttttataggtgtgaaacatccctttgtatattctacaaaaaggtattccaaacttgctgaataaatgcagaggtttaaatttgtgacatgaatccacatattgcacagcatttttactgacagcttttttctagtttttatcacgggataatcagtttttcagtataggcctcaatttggtccgaatagtaccctagtagattgtagaaaaagagggtttccaacctgctgttgaatcaaaacaaag

SEQ ID NO: 119692 - DNA, 546 bp, Homo Sapiens
tttgtggtttgaaacaacatttattagctcatattttctctgtgttaggaatgtaagcgtagcttaattgggttctctggcttagggtttctcataaggcttcaatcaaggtgtccactagggcggcagtcatctcaaagctcaactagaggggaggacaagcttccaagtttcttcacataattgtttgctggattcagttcctcagtgggttattggcagggttcagttccttgcaggctgtttgactgagggcctgagttcctcactgggtgttggccagaagccaccctctgttccttgccacatgagcctctccatagggcagctttcagcatgtcagtttgctgaagggtcgtatcccctttgggccctgggccaagctttttctcctgcttgaagctatcttcttgtgtgctgctcttgccttttgaacccatcctttagagaccaaggcaggcaaccccattcctagggcactgcttatgcatcagatgccacttaacgatgatgtcccaggcatttcatttattccctagcacacct

SEQ ID NO: 119693 - DNA, 429 bp, Homo Sapiens
  misc_feature (261)..(313): n is a, c, g, or t
tgacttgctccagaagagatgactgaactctccagggagcctatggactcaccgcttaggggtagagaggaggaacctccttggtcacgtccctgggggtgggcagtgaaagctgatccatcaagagagaagcaagagtcacctccaaatgggctgagagggacggacagccacgggccacctggtactgagttctgttgctggactagggactttatgaggacaaacactgttttcagtcatctctttgttctcatgctnnnnnnnnnnnnnnnnnnnnnnnnnnnnnnnnnnnnnnnnnnnnnnnnnnnnntgagacttttcaaaatatgacaaatatccactgttggaatgagctgccctgaagagttgtgtgagttctagcactgtcagagtttaagaaaaaatgataaatatctgttgactaat

SEQ ID NO: 119694 - DNA, 477 bp, Homo Sapiens
  misc_feature (202)..(212): n is a, c, g, or t
gtattgcaaaatgtacagcatttattcacatacagacaaaaaggcacaattctactaaatagttcaacaaaaaaatacagctgtcctcaactagttttataaatactttcaaaaagggggtagaaataaatacaggattgggtcatgtaatataaaatagtcatctctacatatactttgatttttaactcttcatgcaccnnnnnnnnnnncaattttagctgaatggacaccaagctaggcacatagtgaaaaatcctctgtacaaggttacaaatgtaatgacaagtttgtccatttcaaaataagatttgtacacaacacataaaacccttcatttagatcttgtgtttataacctaacaaatgacattccaggcaactttacaaaagtttaactagcctacattttgacataatacattaatcataatcaaagatatttcttggtcaggatgcacaaggaaagataaagctt

SEQ ID NO: 119695 - DNA, 412 bp, Homo Sapiens
ttttttccatggattcttttaatacatgcttgttgtgtgtgtccaggctctgaggatggtggtggactagtcagaccagctgcctcttcttgtcgggacaggactcatgcccgagctctgtttctgatcagtttgcaaggagaatgtatatacccacattgccacttaccacgaggaagctcggcttttcagcgttgcctaagtgcttgagttgcaaaggttcagcaacccagcttgtgttgggtggactccgaagtagtgctggctctgtagtgctgaatggagaggtgaggtattgcagctgttatcttttgaactaactgctattgcgtgtcccatgaccagccgtggcagggtttttgttcccatgaatgaatgggctataaatctgtcggaactgacagtagcagca

SEQ ID NO: 119696 - DNA, 530 bp, Homo Sapiens
  misc_feature (200)..(269): n is a, c, g, or t
gtggattgtttttgttttagacaagttgaagctgccaaaatttcacctgccccagtggttggagcatacaattaaatggctgatttgatatgcatacacttcattcaatggaataaatctgtcggttttgattttgcctcagtctctagtgatatgtaagtacatgttgattcatttcaaattagttggccttccccaannnnnnnnnnnnnnnnnnnnnnnnnnnnnnnnnnnnnnnnnnnnnnnnnnnnnnnnnnnnnnnnnnnnnnaaaaaacaccattgcttttgtttgtggcagtttaattatgggattgacagccattttaatctcttcaaagctccgcaactgccgcttttcagctaatccaattatatctactccacaagttacagcctcatctaaagatgattaattattgattaagccagtcaaaaagcattaggaaagatttatttaatcttttcataggctcttatttattacatggagattatggtgaatgtacctgttgagttgctaactccagtc

SEQ ID NO: 119697 - DNA, 553 bp, Homo Sapiens
tttcaaaatataacatttaatataattttcccttagaatggatacattaattagagtaggctgtctgctttgctgttgacttgaaaggtataatgtactaaacctttgtttatttcttgtttacgtagattccataaaagggctcctgattagtggatgactttcctccacctggtctttcacaaactttgtctccttctactttgtagtctgccatcttcagcatattccaagattgttattcttatcttgtcaaagtctaagttcaacaatgtctttattcttctcccttgagttggtttctgttgaactcatcaaatcagaaagttgtgcaggtcaagaagcgatacttatggtacctgggttgacaccaattagtgctccataaatgctaattgatgggttagttgataactgcaaaatctgtatccacgtgaagtcactatcatgctctggggaatctggaggaggatttccaaagacctgtatttcagatcaatccgtggctttggaatgtccctcatttctcaggcattgaggattttccttcttg

SEQ ID NO: 119698 - DNA, 473 bp, Homo Sapiens
aaatcttgtagagcttgttaaccagaacaccactgtaagagaccttgaatctttttgttcccaggactttctgaattttcagcccatatgacatggaagaagagttagaaggggaatctgactgcttggatcagggactgtctggctggtggaacttgaatgtatacaacactcttcatttgcatgttttgacattttaaaaaatgttttcactttccttatctactttgactctaataacatcctgaaaggtaagtagaattattctcataatatgatgaagaacccaaggctctcaagggaacaccactcttggattatttagccccgctcttctacaagaattgcataccccaacccctggagcccctccccatatccatgtttctgccctataatctgatcctttcaccaaaaatgtttagatcaggtacacacacctgaactaaattgggactatcagtttctctctc

SEQ ID NO: 119699 - DNA, 534 bp, Homo Sapiens
tttttgtgcaacacagataattttgcttttgttaggaaattttgctattaagggatagggctgaagttcatccattcacaacagacagacgatatgtccttcatcaccagctccccagccccatcgtttcctgtattttgggacataagctctgcccacacctctgtggtcctctacattaccaccagtgatctggcataacctagagaggagccctactgagagatcttcagtgatagatgctcaattgtgggcagtttttgtacagtcaggcattcccttgacagtgattcgtgttataaagggggtcatatgagctgcaaagtacatttgcacatggagatgtctgtgccacgtctcagcacactgaatggttatatgatgtttaaaagacaatttccatcatttatatccaccccccaaaatacatgctatcaaatgtaacacacttttattacaaaagggagaattgatggatttttctcaccaggttccgaggaagccttcttatcagtttcagcagtctcagcacgg

SEQ ID NO: 119700 - DNA, 323 bp, Homo Sapiens
  misc_feature (186)..(244): n is a, c, g, or t
ttttttttgatcaacgaactccgtttcccactttaataataatagtaaacaactggagtttctaacatcacaaacctaggtgagagtcagttttgcagtcatgtataaaagggaaaccagtattgaagattaggcaagcatccaaatagctgttctggctagactatattaggcctaaagattctnnnnnnnnnnnnnnnnnnnnnnnnnnnnnnnnnnnnnnnnnnnnnnnnnnnnnnnnnnntcaaagtgagttcttcaatgacgcaaagtaactagttaatgttgtttcagaataatatgcaaaagggaagggaggaaac

SEQ ID NO: 119701 - DNA, 534 bp, Homo Sapiens
tttaatatttaaagaacttgatttaatccaaatgagagatcgctcaggtgctgtcagttacttacataactccttcttttctgatcagggggtgacagtttggatagcgatctcctggcaatttgaggatctgactccgttggagtctggcagctgggatcaggcctgaggtagctgtaagtgttctaatgtggtgatttagcgaggtaatgcatgtaatatagtaagcctcaccaaatgttgggtactatccaaaagtcttctgagcagaatttctcttttacttgatgacttagaagacactctatttcaacaaccaaaaatgtattgtgcatcttgggggcctttactaaagacactgataaagtatttttcagtagatgggccaaagtgctggttgccagaaggttctgatcaattagagagtctttctcttactacattttttaaaggctttgattccattgcccttttcctagatggggaagaaatggaaatccaagcaactttgattttgcatctggggatctcctt

SEQ ID NO: 119702 - DNA, 295 bp, Homo Sapiens
ttttgtcatttaactttttaccacacacttgggaaaagtgcactcaactgggttggaaagttcctttgcttgtcttaagaggagttctacggtgactgtgttgatgctgcatggcctgggtgaggaagagcactggccaagacctgcagctgcctgagctgtcccactctgtcgcaattctggtacccagaggagaaaacagaggaaagaggactaggaagaggatttctgtttcctttcctcgattcatgcttaaccttggccggcttagattccttgatctttgtgggtcaca

SEQ ID NO: 119703 - DNA, 403 bp, Homo Sapiens
gacattatcatgtcacattcattcttgaagtataattttgctaaatatggaattctggattaactgtttttttgaaaatcactttcaaaatgcctttcttttctttcaccaatcttctgagtggattgctgcaacgggtcaagtatggccattagaattcctctctatgagtctctaacatccttaaaacttctatagttggtaaggggggcagaatattttgcaagtttaccaccatattccttgatgtggcgatcttctggatccatcaaaggaacaaagtctgctgttgctgaattccatgcattaaccagtgcacatccagaagagctgtaaactggcaatcctgagttgcttcccgatgtcctcagctttgctgattatccacataggaaaggcatgg

SEQ ID NO: 119704 - DNA, 393 bp, Homo Sapiens
tagtggttttattcattgaatgaatgacagcaaagcccaccatctgaacagccacgcgcaactcactccaggaccatcacaccctcactgccatctcagcctctctatcattcctgcttgccttctggagttgcatttcattcgtgaaagtacttgatagaggtggctcctgcattcattgcacacgtgtcccaggaaccatcttgggattctcatgctccatgtcactgactccatcagcttcccatgtggcaaacatgcgaggcactgtagacatgaggattaattagactcataccctgccctcaagaaactcataattcagaggagattcagagatcaaccatctccactcatcaattcagtcgtttggtcactcaacaaacattcatt

SEQ ID NO: 119705 - DNA, 432 bp, Homo Sapiens
tttaggagatgtgttggggttatttattacattaagtaattacattatcacttcattttgtctccatcaagtctgatgcccctctttttgtctcttatacatacattatagaaacaacctacattataaatttatcaactactaatacaaaacacctgtgggatatttagttcccttttcatcagataaatggactgtatgacaatatgagatttaagtaagtagaacatctgaagagtccttcaggagtttgggataaaagaatatataaaacactatatttgaaaggagaatataaggtagcaagcaacacatcagatgaatgatgcttatgtttctggtacaatactgttcttcccacaacaaactccttccttggcctgtatcccacagatgtttgctttctttctcacttcatgtaatgatttctgg

SEQ ID NO: 119706 - DNA, 265 bp, Homo Sapiens
  misc_feature (253)..(253): n is a, c, g, or t
tttgaaaagatgaaagctgaaaaaagttaggtttggtgtaggttactggtcctaacaaaaatataagtggtaccagcaggcactacttcgcataccaatgtgaagtaaaaattccctttcatctgtggtcaagtatggaaaaattatgaaggtcctcattaaatccacattttttaacccattaaattatccttataaaaattcagataaactactgtcataaatgcaactgcactgcctcaaggacctaaanactgttttccta

SEQ ID NO: 119707 - DNA, 448 bp, Homo Sapiens
ttttgccaacatactaatctctttattgagataccaaaatccaaaggcagctagtacatcagtctattttaaaaggttaaggacctagattgctgccctctagtttgctggtctatactgacatcattggtgcccaaacaaagagcattttgctttatgagggcctaggtaagcataaggtgccacgtgtgaatatctactgtgctagaaacagaacatggccaaggagtatgtagcttttaggtttcctgggtctatagtcagcaatagaaggatcacacaagctgagaagttgaaatacaaagttgccataagatactatcaggtcactgctaactgcaaatggcttcaacaccatgttatgcctaaaaggagcatagaacctcaaaggcccacacaatttctgtaggtaaaagtatcttcttcttttctgttagactcaaaaact

SEQ ID NO: 119708 - DNA, 403 bp, Homo Sapiens
ttttagtacacgtggagggtttatttgggccacgtttgaggacggcatcctgggggacgtagattcaggtggctctgaacatatgctccagttagcagcagttacagtgggtttgaaagaatgaaagaaggggcaagttcccacactggttcattaaaataacataagctattgactggctgtagatggttctttgcatcacagattccaggagcatgaagataatgggtgaaggtcacattgtctaacttgtgtaacatttcttgtgatttttcagccagcctcatttcctcctgatctgtggctggaactaggatcatggatttggcgttttatccaggattcctgactctgaccccctgtaattatttcctaagtaactagagcaataagaatatctttt

SEQ ID NO: 119709 - DNA, 500 bp, Homo Sapiens
tttctcgtgtcaaatattttatttctctcattaaataaggagggatctaacagtgatgttacaattcttgaattcaaaaaatacaaactcatagaaaaccaagaatgcctcaatgaattaccaacagatacaaaatggactattacaagggcagtcagtaatccactgcatctgtgacacagttcatcttcatttctcaatggcagtcctgtgtccttgtcatccatctggatcctcaggatgcaggacttgagagcttcatggagggtgaacagctcaagaataaagcagtgatctactcttaatgttcaggcaccaaagttcctaaaaaagagccaagctctttcagctgacccagaaccaagggaactgctaggacgctggcatttcttgggcccattatgtggctgagtcagccaactaataactccagtctttggacaaggtttgggaggaccaacctgagaccccctcctagtggtggccttgctgtgctgtga

SEQ ID NO: 119710 - DNA, 450 bp, Homo Sapiens
  misc_feature (276)..(341): n is a, c, g, or t
tttgcgaaccaacgatagtaattttattgactgaggtaatttgaagccaaataatggttatgaggaggatggaagcttttggaaaatgtgaacttgaggcactcttctgatgctaaaaatctctaaggaaaatagtacatcaccagtgtcaccagtgtggttctaaggcagctggtggcccagaatgtgaggacgtgaaatacaaaactttctcatttccaccatcatattatttgctggattcaggaaaatctgaaggaaggtctttttatgcannnnnnnnnnnnnnnnnnnnnnnnnnnnnnnnnnnnnnnnnnnnnnnnnnnnnnnnnnnnnnnnnntcagcccaggaagtagacatttgattaaaccaaaaagtcagtccaaagcccaatttataccaagggaacatgcagatttcacaaacactgactcagaaaccagattttc

SEQ ID NO: 119711 - DNA, 347 bp, Homo Sapiens
catgtgttattttattctttaaatgcagaagatagccctgtgagatgggtttagcaatctacatgtcacaggggaggagcatgaggttcagagacgctgagtaatgtgcccacagactctcagctggcatagaaagctgggggtttagcctccaggttctgtgttctcaacactgtccgggtgtctcctagcagatacattgacgtcctgatgtttgtatctgcagttgaaaacttgtcttctagaaacccatgaactctggcatcctcactgctgccttttgtttgatgcatcggtgttacgggaaagctccttggcagcgagggcctggctctttatcgccgtgt

SEQ ID NO: 119712 - DNA, 396 bp, Homo Sapiens
ttttttttaatcttgttgcttttattttcttaagacaagttatataggtgttgtttatataatgcacacaacatagaaatgtttgaaatgcctgaagaaattctggatttagagtcttctctctcaggactggcttccagacatccactcacagcatgtctcctcgtgtccaggatctctgggagatactcagtcccttccatcaggaacacatgtggctgcccatagctcagtggcctatcaactaaaggacacacatgcataaactcaatgtgcaatgatggagtaacactcaataacagcaaataagactactgtcagtaacagagaggctcaggaagcacatggcagtcactggccattgtagtttctcaaatcccacagggcaaggattga

SEQ ID NO: 119713 - DNA, 289 bp, Homo Sapiens
tttttggaattcactgatttattattgaaactgggcaagattcacagctaattctttagcttacagttgttaaaataggattcctaccacacttcatttaagaagaaagtttgaaattctaaaataatgaatttcatttatggcagactgacatattttcattttactcaggaaccattcctaataattaaagactaattattaatgatctccaagatggtagcttgttgctagcaaaatgctaagaaaaaaatatcaatctcaaattacagtgcatttctagaatatt

SEQ ID NO: 119714 - DNA, 377 bp, Homo Sapiens
ttttaccaagaatgagtttattgctaaaaatgaaaccaaatgggatacaaagaaatgcatcaaaagcaacatatcaaagggtgtcataaaggatgaggtagcgtgtcatcccagggttcagtgaccactgccatgtctgtctccccaggtatggagggaaaggtgagggtcacctcgtggtggggtcacgtagactccacagcaaagtttaaatgctggaggtttggtgagagctatggcttctgcctttcctatcagggcggtaactagtacagacaccagcagttcctggatcttcttttcccagccatcctcggggggtagtttcatgactccagatctttgctgatggccagttgtttcttcttcctggaaag

SEQ ID NO: 119715 - DNA, 321 bp, Homo Sapiens
ttttttcgcaaatcaccataacaaatataataataatacaaaagtttgaaatgttgcagaaattaacaaaatgacatacacagacacatagtaggcacatgctattggaaaaatggcactgacagacttgctgttcacagagttgccacaaagcttcaatttggttttgtctctatctcaaatacgtaggtgagaaaacacaggtaattatactttgacaattacagtagccacaaaaagttagtgttttcttcaatttatggtactgaagagtatctttgtaattaaaatgtgaagcaatccattttcatgtcagttacc

SEQ ID NO: 119716 - DNA, 521 bp, Homo Sapiens
tttaaagggattttacctttgttattgaaatgtaatgacaccaaagctctcaaaaatgatggggtttctccttgttgccttccgaggtgcaatggaagaagctgtgggtacctgtggtgggcacttgtcgctgtgcaacacccttttctttcctgttaccccaactccaattctgtccaagggacggggagccctgctcaggggtgtgaatcctgatggacatgtgattcagtccttgccagtgagaccagtggaggccttgggaccttttctttctggtaagcaataggtccaaggagaggtcttttttgtccctttggcttgggctgctgtcttctgaggatgtgatggaaggagccatggcagccaggcagccgtgaagtgacaaactggtgacctcatggcaagaacatggttttggaagacactgggctttgtttaactgctcagctttgataacagcagctcatccatctttgcaaatgtactttgaagcctttttcattcttctgcaacattcc

SEQ ID NO: 119717 - DNA, 462 bp, Homo Sapiens
  misc_feature (65)..(128): n is a, c, g, or t
  misc_feature (183)..(183): n is a, c, g, or t
  misc_feature (213)..(213): n is a, c, g, or t
  misc_feature (297)..(297): n is a, c, g, or t
  misc_feature (368)..(368): n is a, c, g, or t
cgaccgggcccaggcgccggacgccggggggcgcctcgctgcaacttctctttggaagccccgannnnnnnnnnnnnnnnnnnnnnnnnnnnnnnnnnnnnnnnnnnnnnnnnnnnnnnnnnnnnnnncgcgcgccctccgtctattttttcctcttcctttcatcctcacactctaaaatangtcaaggggtggaagttacacctagtgcanccctcagctctgatgcaaaagcagcttttgcccctggctgcaggacagcactataactactcacaacaggagagctgctgccantcaccacaccatacagaaagcaccaacaaccaaagcactaacaatggtctacataagggagcagaaagaancttctattacaccctagatccactaccttcacacccacccacaagaaagaagaggcacaacaagtcgtctaacacataccccaaaacccacacc

SEQ ID NO: 119718 - DNA, 453 bp, Homo Sapiens
  misc_feature (242)..(365): n is a, c, g, or t
  misc_feature (382)..(382): n is a, c, g, or t
gaaaatctgggtgtttattcttccaaccccctccgctcccgaaggaacatgaagtggcgtgggagtggggagtgtgtcatccactgtcggtaaaagcaggaagcttacccaagtgaacaaccacaacaaaaaccctgcatggctccaagtcgctgctgaaaccccgtcgcatctgggggcggaggaaacgggatgttgaggaccaaatgggggcttcccagtgacgtgtcgggaatctgtannnnnnnnnnnnnnnnnnnnnnnnnnnnnnnnnnnnnnnnnnnnnnnnnnnnnnnnnnnnnnnnnnnnnnnnnnnnnnnnnnnnnnnnnnnnnnnnnnnnnnnnnnnnnnnnnnnnnnnnnnnngggatctgaggacccanggaaggcggccacaagaccacagaggcagcggttagaaccaagggacgcctggagccccctgaagccggag

SEQ ID NO: 119719 - DNA, 299 bp, Homo Sapiens
ggaaagctgagaaatgtttattcccagaagacagtggtgacacgatgtccagccacctgtcagccagtgatgcagggttggtggctctgaaatgttaggtctcccagcccggacacatatggctgtcttctggtgactgtttctctcaaactaaccacgcgggtccattagaagctgccatgctctcagaggagcccccgccacattctgccagcctcagctccagaggtgttgctgacctggggggatgctggtcatggaggaaaaccaggcaggagtggagatgtcacagagtctgg

SEQ ID NO: 119720 - DNA, 552 bp, Homo Sapiens
  misc_feature (60)..(100): n is a, c, g, or t
  misc_feature (329)..(337): n is a, c, g, or t
ctaatagaacactttttatgtcatctttttatttctcaggaaatagaaatacattggagnnnnnnnnnnnnnnnnnnnnnnnnnnnnnnnnnnnnnnnnntttctttttcactctgacctgctagtttccctcctcagaggctactactattactttgttagacgcatcatgtctcaaaaggagttcagttcaacaacaaatactaattgagtgtgcagtttgtaccaggcatggtgttaggtgttggagcatcaaaggtcattaagaaccagccctgtataatagtggagacaggcacaaaacagatcatttcaatataacataaacnnnnnnnnngtaagtatgcaaagaatccatctcagacctctctttttgagtttcagaatcattcatccaattgccatgtatctggacattgtcatgtgtatgtttcacaggcatgttgagctagacatgtttaaaactgaatcaccagttacctcccaagtgagtctgcctctgtgttacctaaatcagagactggcatcccatttatctgggtactcaagcca

SEQ ID NO: 119721 - DNA, 434 bp, Homo Sapiens
tttaaaagcaggaagtaactggaagcgtcttgctgaattcattaaattcaaaagatcttacttctcattcacatacataactgacattttgtgtcacactggttgaaatgtcaatggaatagtgagatacagctaagaatcaccaacatgtcccaatattctgttccgcccgggagtggggaggggcatgacacccgccgcctaggctcacagtcgggggagcgggcgcgccagtccctcagcctaattgccgcacgactgtaacaggacagaatgaggcttgcaattatagtcgcaaagtacatagggaactgaggggttactggccctttgcagaaagggagagatacacaaatacatcaccggagtcactggatttagtgatacctcagccccttccaggtttggagccaataaatccctttttacttaag

SEQ ID NO: 119722 - DNA, 358 bp, Homo Sapiens
  misc_feature (117)..(156): n is a, c, g, or t
agagagcactaagttttatttctttgggtttcacagagcaggttaggaaatgctgtacaggttaggaagacctgtattaaagcaatcatttatatcccatagttaactggaaaatannnnnnnnnnnnnnnnnnnnnnnnnnnnnnnnnnnnnnnnttctacatcacttgttaaaaactacaaattgcattttcaaaaactccttcctgatcctatcataatcttttaaatatttttaaggtgtcaattaaagattggacatcatcttacataaaatcagggcctaattttcatttcggaaccactacagcctgactttaaagaaaatggctactaaactgaacttttggttctatgc

SEQ ID NO: 119723 - DNA, 356 bp, Homo Sapiens
ttttgtctgaaaattcgatgttatttatattagtaatactacaaactcttagtcttgttaagattaattccaaaatgtgatcttaacgtaaattcgaggattcattgggggcaggcaattcaatgtctaggagccatttacttctgctttcctgtttttaacatagggcaactacagtttcatatccaggagcttggtgcttaacagatggtacactgatttcacaacatcatctactctggggatgatccacttggccaccacaatgatgctgctgacagtggttgaagtcttcttttcagcctctgagcccattgtcatggcaacaagtttttctctcaaagtgtgacaaatct

SEQ ID NO: 119724 - DNA, 366 bp, Homo Sapiens
  misc_feature (196)..(196): n is a, c, g, or t
  misc_feature (198)..(198): n is a, c, g, or t
  misc_feature (200)..(201): n is a, c, g, or t
  misc_feature (207)..(207): n is a, c, g, or t
tttattgtttagaaggaagctccctttgttcttactttttaaccaaagagaagcgaaaacatttttttcctgatcacattttcaccgacacctgagccgacaagccagctcctggcccccggctcaggactcctcgctctctcccttctcggggccctgtcgccgttgaaaggcccgctgcagtgggggggtgaancngnngccccnggccatctcccccgagccgggcgggcagactgcggaaggcaggccccacacgcgccgcttttccgagccccggttttcttcaggagcgaaaggctgttccagctgacccgcgcgttttgggggggcctagggcccggctttccgatttccattttaaaa

SEQ ID NO: 119725 - DNA, 355 bp, Homo Sapiens
gtgcaatggtcatactgttccatgtcatacacagcaaggggagaatgcattattctctcaatggatgcctttcgaaagatatgcttaaagcaagtgccctcctgctgctacaaagtgcaaggctgcctgtgtcaggactaaaggaagaataccgagaaccccaagttatatccttgttgcccctgctgggtggaacagggcagagcgatgtgggtgtggattagcgccctctggttgctgaaagtgaattcacagtttgttctagtccccagttagatgacgttggaaatgataaaattacagtagttaagatagtcaatggcatattttcaaacatcccgatgttctttctctc

SEQ ID NO: 119726 - DNA, 166 bp, Homo Sapiens
tttaagttttaacataaggaactttattttatctacattttaaaggacatttttgtagattacaaaacttcgctcacagatattattatttagcactttgaagatactcctttgaagatttcttttcaagcatccattattatagtcaagaggttttatagtcagc

SEQ ID NO: 119727 - DNA, 493 bp, Homo Sapiens
  misc_feature (322)..(323): n is a, c, g, or t
  misc_feature (326)..(336): n is a, c, g, or t
  misc_feature (350)..(350): n is a, c, g, or t
  misc_feature (361)..(361): n is a, c, g, or t
  misc_feature (373)..(381): n is a, c, g, or t
  misc_feature (433)..(433): n is a, c, g, or t
tgtggggactgcctgcgaaacgccttggaggccgctgtgtgagctgcggctccgggctggtggccacgcgagggtgtccgccctcttcgacctgcctggatttttgtgctgcagaatggcagggcaaacagcgtgtccttcaccatctagagccccttaaggggttgtccaattcctattgggctaatcagtttgagactcatttacttttcgtgcctgggtctgtttgctggctgcaggcttctttagggaccaagatgtaattaaaatatgtgaaccaatacattgaaagttggtgttgtcatgtaagtgactgctgtanngcnnnnnnnnnnnccccttgggaaagnttggccccttnccaccccaaaannnnnnnnnccccccgggccaatggacagtgagggggctctctgctgatgattctgcccanctagttcttacattttgtgtttctttggtttaacaaagcagtagaggggcggcaaatgca

SEQ ID NO: 119728 - DNA, 448 bp, Homo Sapiens
ttttttacattcttactacaagaaagagatgcatcatagattgaaaagcattcctatctacccacggacttctttcatagaggagatacttgttttaaggacagttttgtgcctccagacaaatgcaggcattctttaatggctagaattcagacatgacacatagcaatgagagctggtcatgctagttgacagtagcatggttaaagaaagatgactatgtaaaaatcataaggcaagcactcctaaagggtagctctttaaaaaagatgtgtgatttaattcaatggagtccttaattttcaaacctttacagcaaaatctccaatgactcgtagatgtcaattttcctggtctaaggtgcctacccccgagaccatcattttttattacccctaaggagatttcagcagtttttaacccaaaacttgtctctcatttcttcttc

SEQ ID NO: 119729 - DNA, 332 bp, Homo Sapiens
cacaggtaacttctacatttattttataccaaaaaagttatgtgcaacaaataaacattcttacatatttacatttggttttatttaccagttagcaaaacagtgccttaaatctctgataaagagtatttctatctagattaaaggggaaacctgcccagtgaactccattttaaatgactgtttactctggagcttaaagcactagtaagaaatatttctgatggaacatactacacagatcatatacctaataaatacttaggccatgcttaatacagttttataacaaaatatttcaccttttctgggcgaatttgtagtaaaaaatg

SEQ ID NO: 119730 - DNA, 398 bp, Homo Sapiens
ctcacttatatagctgcttcaaataacaaaatgttttctgaagataaaataatttccttgaacccaatcagtgacaactggatgttgagagcaatcagattggttttgttcccccaaataagctgaagcacaggccaagactagaggcattaggacaaattctcacaactacagccctggatctcaggagctcgtacagagccgtgttctgacatcctggcagttctgagcagatctccttccaggcaagcaagtggggactctagaatccagctctccctctggtagttgcgccatcttcacctcggctcccaaagtctctggagaacatctaagagcacaagacgaaagtgcgtaaattccgcggggattgcacgcagagatggtagcctgtctca

SEQ ID NO: 119731 - DNA, 433 bp, Homo Sapiens
  misc_feature (74)..(365): n is a, c, g, or t
  misc_feature (410)..(410): n is a, c, g, or t
ttggcagagtcataggagcaggcctaccctctgaccatagaccagtagagccactagagggcatttccagcctnnnnnnnnnnnnnnnnnnnnnnnnnnnnnnnnnnnnnnnnnnnnnnnnnnnnnnnnnnnnnnnnnnnnnnnnnnnnnnnnnnnnnnnnnnnnnnnnnnnnnnnnnnnnnnnnnnnnnnnnnnnnnnnnnnnnnnnnnnnnnnnnnnnnnnnnnnnnnnnnnnnnnnnnnnnnnnnnnnnnnnnnnnnnnnnnnnnnnnnnnnnnnnnnnnnnnnnnnnnnnnnnnnnnnnnnnnnnnnnnnnnnnnnnnnnnnnnnnnnnnnnnnnnnnnnnnnnnnnnnnnnnnnnnnnnnctctcataataaacataccttgagtctcacctacatctggtttanatgacatttactttgagacttca

SEQ ID NO: 119732 - DNA, 493 bp, Homo Sapiens
gagagaaatcacactaccatcaaagacaacgggtcaaaaagaatgccgtcctaagctgagaagccatcttcctaacgacagccatgtaatatgaaagggaaaaacacactgttattgaagaacttatcagctatgtcacatcttccacacaaatactcaggaaagttaaaagaaaattttacctcggacacagttgaggattgctaaagtcctattgcatgctttaagatgccttgcgtttggtgaattgaagcctgatatgtcaacatactctctgtaaacacagcagcacagagggcaaagaaacacttatccagcaccacagctaggacaaaaggaattattttgacagtaaatggacttgcagcttaaggttggtatgtacccaattgtgactaaaccaaaagaaacaaatctggaaactgaagtatcaatacgtgaaaagcgttcttttggtattgggagtgccagttgtctttgtttcatgaactac

SEQ ID NO: 119733 - DNA, 422 bp, Homo Sapiens
atttctgaaccgttgctgtttgcagtctgtgagaagtttgatgtagttgtcaacaaacaccaccaacggttcatgaggggccatcactacctacagcgggaggagacaggagcaagcccctcaggaaaactaccaccacgggtaggagacaggagcgggccctcaagaaaactcactacccaccgcaggaggagacgggagcgggcccttcaggaaaactcactcctcacttgcccgccgagtcgctaaatggattctgagaggtttccttaagcagcagcaacccagactagaaacgccccagtggcccatctcatcttcacatgccactacagcaatgtcctaaatttgctgaatcctaaatacacctgcgctgctgtttgaagtatgggtttccgggggactgggtttcgaggggggga

SEQ ID NO: 119734 - DNA, 443 bp, Homo Sapiens
aattttcaaagagatttattttgagccaaatatgagtgaccatggcccatgacacagccctcaggaggtccttagaacatgtgcccaaggtaattggggatgcagcttggttttatacattttagggaggtatgagacatcaatcaaatacatttaagaaatacattcgtttggtctagaaggatgggacaactcaaagcaggggcttccaggctacaggtgaatttaaatattttctgattgacaattggttgagtttgtctaaagacctgggattgatagaagggaaaggttcaggttaagataaaagattgtggagaccaaggttcttttgaagtcttatagaggctgcccttagagataatagttgaaatgtttcctattcagatctctaagaagtgctagacttttagttaatctccttaggtttgggagggcctgga

SEQ ID NO: 119735 - DNA, 261 bp, Homo Sapiens
  misc_feature (104)..(159): n is a, c, g, or t
ggaaaatttaaataatctccaaaaaattgagaattctgatttcttcaaaagcataattttgcataaaaattgcattactagtatcacaactgagctgtgagcannnnnnnnnnnnnnnnnnnnnnnnnnnnnnnnnnnnnnnnnnnnnnnnnnnnnnnnggttcacagcaacactgagcagatttcccatattcccccaccctgccaccaccagagggtacctctgttataactgatgatcctacactaacacatcattat

SEQ ID NO: 119736 - DNA, 202 bp, Homo Sapiens
  misc_feature (39)..(39): n is a, c, g, or t
  misc_feature (41)..(42): n is a, c, g, or t
tttttaatgtgactcttttttactgcttgggctttgcgnannagtgcttgagatgtattgctgggcctagcacctaagtaatggtgactctcctctccttccaaaatactgcagacattgtgatatattgctgagtccaacacctagaaggtgcaacttttctgcagaagcactgcccaaaggagaataatgacatatcttt

SEQ ID NO: 119737 - DNA, 437 bp, Homo Sapiens
ttaaactaagagtttatttctcttttttatttcagagtcctagaggcaggcttctatggctgatgtggtgacttcattcgttaggaactgagatgccttctttcttgctgctctgctctttctgatgcactgcctcatgttcaaagatggctgcttgagctctagcaatcacatacatagttcaggaagccctataggagagggtgaaaaggaaagacctcctaccttttaggaagacttcccacagtcccatataacatgtttacttgtatttccattgcttgaatgtaagagtcagatgatgttttaattgaaataaaattctaggctggatgcaatgtgccccaaataaaatcagggatttgttgctgaggagaatagacattgaaattggaaatagatgtctcatcaatacacatgttgagcttcatgtatct

SEQ ID NO: 119738 - DNA, 244 bp, Homo Sapiens
actagaatggaaaaaattcacttttattacctcgaagatgccaaacagtgccattttattactgtgggaagctggaagtcatttccgaacccttttggcaagggtgctatgtagagcatccagttcagtcctttaagtgtcttctgagaaccaccacacagactgtgatttactgtcttcaggagttaaagggaccctttctaccctgaaacttgaaaagacagatggaggtaagttcctttat

SEQ ID NO: 119739 - DNA, 187 bp, Homo Sapiens
tttatgtataacagttcccagtttactcaggaaattctcagattacaaagagactttacaaataaacaagtgaagagaagaaccttagtggttccaacatagtatggccatcgttttatactcaaaatatagaaagacaacctcagaatagaattgaataaatcaagtttatcattaaaacgcaaag

SEQ ID NO: 119740 - DNA, 478 bp, Homo Sapiens
  misc_feature (434)..(434): n is a, c, g, or t
ttttttttatccacaatagaggtttattcggttcatggttctggaggctggggagtccaagactgaggggctgcactaggtgagggcctttttgctgtgtcataatgtggcatagggcatcacatggtgagagagtgcgtgagagagggtaagaaggggcttactttgtttttatagtagacccactcccaccataatgacatgaattcatttcacattcatccattaatcactgaaagatcacacatctccacactgttgcatgagggattacgtttccaacacaaggaactttgggaaacacactcaagccatagcacggtcctccgctgtccctctcccgccctcaccatctcgggtctctctgtcgggctttgacagagcaggtctggcctgaactcagtctgcagaagtagattctccatgtgcatganaattgcccatttactttgagaatcccatagaaatcgttctcctc

SEQ ID NO: 119741 - DNA, 448 bp, Homo Sapiens
ttttttttgactttatttagatctttatttatgtctttgttatgataacagtaaagttgcagaaaacataaaacatccaaactattttaaacagaacaattattcaattgttaacaaattatgggaagagttggaggagcaatgtttaggctagatctccagaaatggctctttggacaaaatcacattactgacctggtgaacttctacccttaccataataagaaacttggtacagaggacatccacaatctcagcccctggctttatgttcactacacttttgccattttgcctggatcagcaaggtgataccataaatgttggcttcaggagaacaccagctttactgcgtgcgattcaggttcagaaagctgttttgagaattcttgactccagagccaaactggttcttccacatcttctagttgttcactctctttctgag

SEQ ID NO: 119742 - DNA, 276 bp, Homo Sapiens
ctcagtgctggaattaggacaacctcttcattccgtggggttgattctaagatttcagcctcgcttcagtcctgctctaaggtcgacaccacgcttgcttgatagttgaccgtgccttagttttcccgtcagtcaagtgggaagagcagcccatttcctgccgctccccgggccctgtcccgcctggacgcctccctccaggagcctgcgccccggccccggggtcagggttgggatgcgggctctgcaggcgccccggcgaacagctctacctgg

SEQ ID NO: 119743 - DNA, 1290 bp, Homo Sapiens
  misc_feature (16)..(16): n is a, c, g, or t
cctcgtccccaccggnccaacgccaacaccgcaaaaatgggtattgcgtacggtccggaatccttccagactggccgatggcgtggaggctttcaaccggaccctcgagaggctggtggaagcacgccctacccgggaagcctcaccctcactccaggacggtagtcctgccagtggagtggcccaggggcctgctggaggctcccaggacagccccaagggcacccactcggggctcgaggtcttctcagggatgatcttgaaggtggaggaggagatatagggctggtcgggggtgctggcagagccaaagggcaggagcagggcctccagtctttcccctgctgagtccagccaggggagaggtggcagtgactgggtctccagggcaccgggacaactccagtccaggagaccggaaggatgagaggatgcgggctgtctacctgtgatgtcgcgtccttgccattgcctgtacagggtggtgacctgcacggaaaggctgcagatagccgacctgtgggactcagtggaccaggtctactcagggatgatgctgttggaggctccaaccccatgtggcaccagctgccgaagtctgcagcccagcgttccctggaagcaggggaggagcggcaatatgcactgcacgggcccccctgctcactgggaactccggaaaagggtgggctcatgccaggcttctaaaaaggtccccaagcgtgaatctgggtggggactccctgaaaagccccctggtcccttttgggggggccatgtccccccttggcaggagcaaggaattcctcctggccctaaacaggcggttttgggcccaaaggaggaaacccctatccccattttggcccgggaaataaattggccgatcccaaattttcccgtggaaataaaattaccctctgcagctcaccatcatggcggagttagtggggtggccccactaacatttgacctggggcaacacgccaaatccggggttggtcgaaaagaacccatcttttgtataaccagcgaaagagatcttatccccccgcccacagggggtgtgctttccttccagcgtggtagcctctccaagaatggaccaaacaaccgtattgccctcccctgtttgacatgatttgttttgcgaactaccgcacccttttggacacattgggcgaaaccccgccgccttctcttttcgagatccccttatcccatgcgggaaaaaccccacttgccatggtttttaaaaatcctacctccctgaatctctaggacgcccct

SEQ ID NO: 119744 - DNA, 443 bp, Homo Sapiens
  misc_feature (22)..(22): n is a, c, g, or t
  misc_feature (30)..(30): n is a, c, g, or t
  misc_feature (304)..(383): n is a, c, g, or t
ttttaatttctaagcttagagntatattgntacataattgtaattacttgacataaaattgtatcctgtttctgcatgtaacttaagtacattgcatattaacactagcttttcaaaaatgaacattttaataaatgcataaaattctagcaagttctatagtgttcttaactatcctgctattattcctttctgtaaatgctgctgctgaaaactcaaaacaacacacagggagacagcacagagtggtgattaaacatgcagacattagtaccaaatttcagacgtcaaaccccaccatctnnnnnnnnnnnnnnnnnnnnnnnnnnnnnnnnnnnnnnnnnnnnnnnnnnnnnnnnnnnnnnnnnnnnnnnnnnnnnnnnagaggatgatacagtgtatctatatcattaagtgtcttgtaaatattatctaaagggtta

SEQ ID NO: 119745 - DNA, 269 bp, Homo Sapiens
tttaaccgttgaatgtttaatcactattgttttgacatctagaagtattgtcataggttacaatttaaacatcagaagatgggggtgtatgagaatatcacatttagggagatgtcagttgtccagaagttttgcagagaatttcacacccagattgagtttcccatgaacatgactcgttctcctgagggagaacccctctttggaaagcatgttcacccaggcatgtttgacacaaggaagactcgaagtctggctcccctggaggg

SEQ ID NO: 119746 - DNA, 206 bp, Homo Sapiens
acttgcatgtactttgaatgtatttaggcctcataataaccttctgagggcaggtccaaatccataatgtctgcaattccaagtttctgaaagcttgggccactgaggtgtcaaatttgatgtcaaagtcgaagactgcagtcctggttcagtttcaaataagggactgtgatgccacgaagcagaacgaagactgagcctggatc

SEQ ID NO: 119747 - DNA, 714 bp, Homo Sapiens
  misc_feature (27)..(27): n is a, c, g, or t
  misc_feature (333)..(442): n is a, c, g, or t
  misc_feature (477)..(633): n is a, c, g, or t
tattgtcgagaatatgacacatagcanaggtaatattcaaagtcatctgacaagcattgggcaggatgatgtccaacattaatgctctgctactcatctagccactgaccctggtcactcaatattcaagacttaatgaatggaaagtggaagatgcattttgccttccttttgcttttgaggtgagactccgagttctcaaagaaaatcaaggcatatggctgggcatctcttttagcatccttgaacagtctgtaatggcccaaatgtacttcaagaatgcagcaattgaaaacaagtcacccggagcacacagactagagtctctgtggnnnnnnnnnnnnnnnnnnnnnnnnnnnnnnnnnnnnnnnnnnnnnnnnnnnnnnnnnnnnnnnnnnnnnnnnnnnnnnnnnnnnnnnnnnnnnnnnnnnnnnnnnnnnnntgatcatgaatgcagactctctaaagcctttacannnnnnnnnnnnnnnnnnnnnnnnnnnnnnnnnnnnnnnnnnnnnnnnnnnnnnnnnnnnnnnnnnnnnnnnnnnnnnnnnnnnnnnnnnnnnnnnnnnnnnnnnnnnnnnnnnnnnnnnnnnnnnnnnnnnnnnnnnnnnnnnnnnnnnnnnnnnntgaatatacactaaccctaaaataatctcaaaatcccttcatgttgtccaggtagtaccattaaatgtgacctgcatgttc

SEQ ID NO: 119748 - DNA, 1032 bp, Homo Sapiens
  misc_feature (144)..(153): n is a, c, g, or t
  misc_feature (183)..(266): n is a, c, g, or t
  misc_feature (804)..(804): n is a, c, g, or t
  misc_feature (908)..(908): n is a, c, g, or t
ggagtgggcgtggggctctgctccaggcgctcctgcagagacccagccccagagaccctaccctgccctcaaataactttcatactggtgtatgatgaactgaccattaatagtttaagtgcttacaagctatgtttctgttcnnnnnnnnnntagtttggtataataaatgctataaaccgnnnnnnnnnnnnnnnnnnnnnnnnnnnnnnnnnnnnnnnnnnnnnnnnnnnnnnnnnnnnnnnnnnnnnnnnnnnnnnnnnnnncgacactcccgccacctccgtactccctaccccggaccccactcacaccccgctgctggtttcgctcccccgcacgtaaataggcccccagggcctgcgtgcatgcactccgctccgaatgctatccaacccacgctgaccatcgcccgcggggctccgcccactctcatacgcagacgatgcagaccgaccaccggtccgccacagagcgcctcgaccccgacaccctcagcggcgggacgaccccctcaggatgagggcacccctctctgccgtatctacagccttacgcctaccacgaggcacagccgtccgcgcctgttctcgacccgccccacgccccgaccacttggcggcaccccgcgcccacaactgtgagcccttacccgcttgcttacccaccccccgtaccgctcgcaacccctcaactactccgaatgactccatactgcaactaccgcgatacggtgctacctgccgccaacgcgccctcctcccccgagtgcacctcataacgccacggcacgcggggaaggancagcgacctgtatgcaagcccgaccctcgccgaccgccactcgtcatgcgcagtctcaccggtcgtaccgacccaagcggagatgtgagactaactatctacgngcagttgcgcaagctcgtgagcgacagtggtgtgtggcgtacgatgcctcacactgacgcgacggaccgtgaacaacatatcactctcgtacgtgccgcctacatactcgtgatatactcgtgc

SEQ ID NO: 119749 - DNA, 460 bp, Homo Sapiens
cagccctgtaggagacacctccagagaaagtaacagctctcaattgattagctgagaataaacagatgcttttacagctcgccttggcggacagatctggcacaaatgaagtatctataaggagcagcagagtcaaggtggtgatcctgtggatgaataactgacacctgctatacttgacagcagaaaatataaagcaaattgaaaaggagagagtgtggagataaataagaacatgaaagaactgataaagtcacttggattaaaaaacctgggagtaagggcttcgtctatgattgcactcaagagagaattgagggaccacctacctttgatgttaacgagaaagtaaagaggagacatatttagagataccctttggtgaaaaacagaaatggatgtgtcatctgatgcatcacattatttattcaacaaactcttagtgagaacttactgtgta

SEQ ID NO: 119750 - DNA, 407 bp, Homo Sapiens
tagcagggagaagagaggaaaatccatcctgtttctttcagggatggagagaggaaggaattgagattacttgggtgagggaacttccaatcagatgccgctagagtgctgaatgttcccttagaccagagttgccactgaaagggcagaggggtcggtttagtgacagttatgaaggcaacaaacaaaggggtctcctcaggtcagtcaacactggccagccccatgtctctgtgctctacagcagccttggaagagtgactcaggggcccaaagcagcctgcatcacaagacagcaaaaatagcacatcaataatttctgcagcggaatcctttggatggccatgaaaggatgcagaaaatgccgtgctgaaatttcacactgggacatgcaggtttcaaatgcc

SEQ ID NO: 119751 - DNA, 280 bp, Homo Sapiens
tttttgaattttctctccctttattctgaaaactctaccccctcacatccctaatccctgttctgtccctgccacatacacacacagacgtctgaccctgcacctccaagttcccaaagatattgtacgtagaaaaaacaaacctttttttattgacattcacactcaacactgaacactccttgccaccaactgtgtgggttttctcccacactggccaattctccaataccaactggatatcatacaattcaattctggcattaatcggcattaagtg

SEQ ID NO: 119752 - DNA, 738 bp, Homo Sapiens
gagtatgaagtcgacggcgcgccgaattctgcacgaggggagtgtgagaggcatctccgtgctcatccgtgaccccagctgtactccaagggaaggcatctccagggaagagcagcttggtcccgcaaaagctggactgaaagaaggactttgtgacttgggatgtgacgggcacggagatggagtggggggtggtggcagcgcaaggtgtgcaggtgacagcaggtgtgtgcctccgacgtgggcgggggagacactcggagggtgcatgagggcgcatctactgaaggcccggctccagggcttccatctcgcatgggcagcgcagaggaggcggccctcactcattgtcttgatctcatgcgggggcactgtttgcatggggaggggcttcctgggcttctcatctctggcgggaagcgctcccctacgcattctctacttatggtatacccctaatgcaagtatcctggccgaccgaaaggatttatacgacattattggaccctctgggaataattgggagacgtcacgaccttagccccaccccttattttttttactacccctgtcatatacccatggtgacgcgttattcatgtgacctgtatattcacatctatacttggataacagttttatcagatactaaactttattcgtcaaatatattcataattctcagagtattataattttaagtatatataaataattctattgtcatcataattatac

SEQ ID NO: 119753 - DNA, 370 bp, Homo Sapiens
tgcggccgccaactctttcctatgggcctctactgagagcatggaggtaatacatctaatacactgaagaccagggcaagagagctggaagaaatccctcttaagcactccaggccttcactgagtatgaggtgctggtctccaaaggcagagggcaaggcaaggcagagagggatctcctggggcacagacaactgacaaaagaaacacttggattgttgtataagaggagtgagctttgtaaataccacgttagctggcctgctgtggaacagaatgcctatgaatgacagtagtcaggtagtggatgaacactgatctgagagcctgtaaaagaaactctttggaatgataatgtcatctagacctt

SEQ ID NO: 119754 - DNA, 458 bp, Homo Sapiens
ggctggaccggtccggaattcccgggatcgagcccgagccgcagctgccgcctggggcgcttgggtcggcctcgaggacaccggagaggggcgccacgccgccgtggccgcagaaatgaccatggttgacacagagatgccattctggccccacaactttgggatcagctccgtggatctctcccgtatggaaagacactcccactccctttgatatcagcccttcactactggtgacttctccagcatttctactccacatttacaagacatttcatttcccaagacagattcagtggttgcagattacaagtattgactggaactttcagagtacaaagtggcatcaaatggagcctggatctcaccctattatttggaaaaaatcacctctacaataagcctctttgaaaggccttccacttccccctgaggaattgaatatgcccgcctcgggg

SEQ ID NO: 119755 - DNA, 484 bp, Homo Sapiens
atactgacccctcccccgacccgtagccccctcttgaggggctcccaggcgtcgggccataggaggtggggagcttctttccttagcttacctgcctttggtgagccttaaggaaaccgctatgactgtcctctggcctgtccattctagttgtgggagagaggtaccctaagttccgctccccctgcttccagaatcggaggatctttgctaggtgtgaaggaacctgtccctcttctcttttagaagtgacagggagtgctgtctgtcgccgttttccttcctcctgtcccacaaaaccagttgtcccctctagccctagaggaatatctcgatttcctttgggggaggggggtcgtctgggtgagaccgttccacacgcacagaagtgtgtgtgcgctcccgcaactccttacttcctctctttcctcaagccagagaaccaaccaggacctcagctgagtttaaagtcacttactagaaa

SEQ ID NO: 119756 - DNA, 432 bp, Homo Sapiens
  misc_feature (257)..(316): n is a, c, g, or t
tttgaaggaatgataataataatttattttttgaggactcaatgtcatttcaggccctgtcttaagcattttatgcaaataattttaattaattaccaaaaaacactatatttatatacaattgttacttcaattttacacaccaagaagcacaaaaggttaattaatttaaccaaaactggagagctagtaaataatggaggcaaaatgtaaatccagacaatcctctgaaaccatgcttttaaccattttgctannnnnnnnnnnnnnnnnnnnnnnnnnnnnnnnnnnnnnnnnnnnnnnnnnnnnnnnnnnngatacagctgaagaaagaaccagtaaactggaagacagagattaagaaattacctaaaatgcaataagtgataatgaaatgaaaattttgcaagactaattaagagtcatgagact

SEQ ID NO: 119757 - DNA, 460 bp, Homo Sapiens
  misc_feature (242)..(300): n is a, c, g, or t
gatggccttcaaaagtgtgttctcaatgttgtatgaacctccttcacatgagttcggttgttgtctctcttcaaagactcttcaacccacaaagaagcaactaaatgtttctctaagtttaattttctagcgtgttgttgtcttacctttttaaccttaccataatatttctgttaactgttacatttaatataccaatgtgtgtaagtatacagagaaaaatctgtttgtaaagtaaaatnnnnnnnnnnnnnnnnnnnnnnnnnnnnnnnnnnnnnnnnnnnnnnnnnnnnnnnnnnnacttatttttccttatccacagatttcagctaccatgtatatataaataaacttattttattagccagaggattctgttgctaatacattttgcattcttttcaagataagctctaagtcttccttaagcagtaccaacaccactttatatccatctgta

SEQ ID NO: 119758 - DNA, 286 bp, Homo Sapiens
ttttagatggcttatttctggtttaatgaaactcacctaaaaacaataaagtgatggaaaaagtttggactgggaacctggcatcacacagtccagttctgcctcttagtgatgcctttgggaagatcattttattcttctggccttccatttccattcattcagttattcatctaagtaacaaatattcctctaatggctcctgtgtgccaggaactgttttgaagagttggtatagaacaaaatccaggatgtcctcctggaattttcagttatcaatgaagta

SEQ ID NO: 119759 - DNA, 458 bp, Homo Sapiens
tttgatgtagttgcactcttttatgttagctttagatttttcccttttgacattcattcataatgtgcttcaacttttgcttttgagtcagcatccttgttgttgaataaggtgttttacatctcagtttactgtgctccttgttatatctgcaatccacttctccgctatgcatgggcgtcactttctctaatcttcattaccatttgggtggaggatatcggaattcagtggtttctctaattgtaggatggagtatttggagcactgatgctgaattaagtttggtgacacatagtgaggcatggtggagaaaggaacaaatctgtgtcttccctgggtctttccagcaccttgtctagacatggtttcttctttcctctccagaagattcttcatgtaatgggagactgaaacagccccagccatttaacttgctgacagtaggctattgttga

SEQ ID NO: 119760 - DNA, 310 bp, Homo Sapiens
ttcatggtctcctggaagctttggctggagactactcagctcgtcactgaactaacggcttttgggggttcttttttcccagttgagtttctgtgtcttttacacgtttggttttatggtccgttggaggttttttcacgctgagggtgaagattcttagtttcctcaattagcataaaagctgctccaaggctgctgagtcttcagttccattccattcaaaatgttaattcctgagacacgcaacctacgccctactgtcctttgtcccacggcttctcgagattatctctgtgttttaatagataaa

SEQ ID NO: 119761 - DNA, 460 bp, Homo Sapiens
tttagagacagggtttttccatgtttcctaaacttgtctcccactcctgagctcgagcaatctgcctgccccaacctcctaaagtgtagagctgtgtttttagtctttttttgagctgttttacaatccagtgttgaattgataagtttggattcactctgatatttgcagatttaacatcctacttcacaagatgttcatagccttgaaccattacagccgctgcctcatccatctctgctcatatccttgatccaatacaacagccacctcttccatctatgctcatagcctaaactaatagaagccagagggaagaaatggaagccaacgtgagtccagaacacacgttttataagagcataagaaatttaaaaatagcaaagtataaaatgaagtttgtaatagatgtgcatggctaaaatttattcttatattaaccaatatattctataaattg

SEQ ID NO: 119762 - DNA, 398 bp, Homo Sapiens
ttttgtgtttgctagttgtttattatgtctcttctaccaggctgggaacttcaggaaagccaggaccaagtcaatcttgatctaggctctgtcttcagcatctagaaccaggcttggcaccaactgagtaggtaatccgtaaataaattgctgttgctgaagactcagctgggcaggttactgttgatggctcactcatttggctggcaggagatgccatctattggctagagggtcggagctgcaaaccaaagcacctacatgtggccccttcacatggcttaggtttctcagaacatggtggctagattctgagagggaggcatcccaaaacatgcatccaacagtatgaaagctgccagtctcttacggtttgaccacttaattgccttggactg

SEQ ID NO: 119763 - DNA, 392 bp, Homo Sapiens
gccatttccatttgtactttattattttatgtgatagctgcttaaatcaaaccctggtctgcatctttgccaaaatgtgcatagttaacttcttttctcaacttgggatccaagaacaccatctattatggattatgaatgaggctgcaggatgtggggcttcctgtctggagtaagccatggaacttagataacctcggctggggtgaccagtccacttctcccccttggacttgatcctccagggattatttccaagatggcaggtgatttttagcttctgggccaagtcttttgcttttggagcagaagcaatgtcaaatctctccattctaccaaaatgttgagcttttcagaatcactttcttacaagcttaggaagctcttcagag

SEQ ID NO: 119764 - DNA, 384 bp, Homo Sapiens
  misc_feature (257)..(314): n is a, c, g, or t
gactctggatgataatgatatgtcaatctgtgcttttcctgcagggactgaacaagggcagtgtgtgcacatgtgggagtgccagaagcaccagcgcaatccagatgtgcccaggcccatctgtgcgtgaaaatgcagacacaccacactatttatcaattagtgtctgctgctgccagtgtcaccagttctctgcctgatgaatgatgctaggctggacaagccacaccccaagatatcccgctgcactcagatannnnnnnnnnnnnnnnnnnnnnnnnnnnnnnnnnnnnnnnnnnnnnnnnnnnnnnnnncaactaagcccagagatggatcccaaaactgaagaattggtttaattaaattgaaagctctggccgcttg

SEQ ID NO: 119765 - DNA, 214 bp, Homo Sapiens
  misc_feature (151)..(168): n is a, c, g, or t
  misc_feature (171)..(171): n is a, c, g, or t
tttaggaaatggctgtcctactggccatgaagtggtatctcactgcagtttcaatttgcacttctctaacgattcatgatgctgatcatcttttcatgtgcttgttggcacctgccactctttggaatgtctattcaagtcctatgtccannnnnnnnnnnnnnnnnnggncttggcttcttcacaggacaagttctaccatgcccattttctg

SEQ ID NO: 119766 - DNA, 271 bp, Homo Sapiens
aaggtgacgcattgttttaagtaacaatgaccaactcatctactcttcttccaaattgtgtaaattgaagggtaaaatgtgggaaaacgctaaatttgaatgctaaatttgaacatttcacacaacaataatttgaaatgcttctttgcaatattatggcgtttcggaacagataaaaatacttcattttcagacatttggtcaacaaatacttcttggacgtttatatgcaaagcaatgcatgtaacattttcattactttgcaagtgtg

SEQ ID NO: 119767 - DNA, 402 bp, Homo Sapiens
  misc_feature (200)..(249): n is a, c, g, or t
tgttttcaggaagtatttattaacatgaaaaaagtcctaattgtaataagtgaaaaagcagcatttagagttgtataaacaatataataccagtgtccattctttaaaaatgtgtttgcatgaagacagaaataaagagacttacaataaatataccacaatcattaatagctgtctctggttggtgggattttgggtcnnnnnnnnnnnnnnnnnnnnnnnnnnnnnnnnnnnnnnnnnnnnnnnnnncctaaaatgataaacagaaaagaattgctgttaagtaaaggaattgctgttaaaatagagacactaattccaactttggaattacgtatccaccctgtctgatgttattcactgccacccatccccatcccattcccaacctcccaaagtgtc

SEQ ID NO: 119768 - DNA, 267 bp, Homo Sapiens
  misc_feature (97)..(160): n is a, c, g, or t
cctgatatcttagtgacacttcagttatctatgcattctttacatctgtgattcggtaaacaggcagccatgttcacgatgccttctatgtcttacnnnnnnnnnnnnnnnnnnnnnnnnnnnnnnnnnnnnnnnnnnnnnnnnnnnnnnnnnnnnnnnnctgaaatatactgcattattgtgttaatgtattctctttcctggatattatctaccagtgtatccagatctaagtaatctcagtgaactatacattgcctaaaaagt

SEQ ID NO: 119769 - DNA, 425 bp, Homo Sapiens
ggcacgaggcttatttattatgcgtgtatcagagataagctgtgaggtggtggagggaggacctgaaggaaggaggagcgagggcagaggcggggacgggaggaccccaactagctgtgctgatgttaatcccgctgggagactccgggccctactgtctgctcttcacaaagccaggctgctgcaggaacagttcccgcggtcctaaagccggggcggggaggctagtgggtggaacttgagggttgggtctggaggaagagatgcctgggcagcgtggtccagcccctgcctcggggtggaaaggcagagagcaaagaggaggcccctcttattccggacccccaggccagagcccaggagtgggaaagcagagggcaaagaggaggcccctcctctcatccctgacccccaggccagagcct

SEQ ID NO: 119770 - DNA, 818 bp, Homo Sapiens
gggaatggctttcttcagattataatcgttattaaagctgtatgtacactttacttaaaaactattaacagtttttcatgttgcactggtggtaattttgaacttggaattactgggtgggaattccaggaaccacagagtattgatttttgctgccaaaatgctcttgaagcagatgtccctgtgctcccctggctgcttctggctgaaggggggaggtgtagactgaagcttgggcactcatgtgtgtcccctccccagtccccatcctagtggggccagtctcattaggcagccatagataagcctggaacttggctgtcattagtgacttgatcctggtatgaaatgcatactgggtataaggttgctcaggtattttatttccttggccacaactcccatagatgccaatgttttgatagcctcagtttctcaacgatgtcttttgtttacagtgctacacttagtgtgagtcaagaagtgcttgagttacaagaaacttcttattcaggtttgagtaagcattttacttccatgtgtacttttaaataatcatacccttgaagaagttggccaatgatattatatacatggctgatctggattgttcttttcattccttgagtcaacttcaggggtcttggatactaaagagaaggagacctggggggtaaatgtttgggatcatccatttgtgaaccaaggcccgaactttggccccattttagggctatcccgggacttaaaggtaagcccatctgggaatcataagaaagggtccctgcaagtttgaaaacaaaatgaaccccaaggta

SEQ ID NO: 119771 - DNA, 806 bp, Homo Sapiens
tcggaggcccgcgcgtcatatcggcacgaggcgctctgcacgactgaaggcgggcatttggtgtggtccttacagccgtgtgccccatcccactgatccttgcctgcgtgcagaaagctacaggattggctttgcctttaagtgtcctgactgccctggcctcccttacctaccatgacacgccgagagctgagctgtcccactcgtgactaactcgccgttgcctgcaacctgctccgttgcctgcctcacaccaccccgctgtgctgcctgcaggcaccccctttcatgaggacctgggctgtgcccaggcggcccctgtgttgctggggcctgtgctgctctcgcacggcctccagagcctccctcggccccttgacccgcatgaaccggcttcccctggtgactcagtcccctcccgtcccttcctggacctcagcacaggcccatggggctggcagcgctgagcacccggcacccccgcataaccgcttgagccctgcctgcttcaggctatacaagagtgcgtgcgacatggccgagcgcacgaggccagccacacaggagcttgacatccccctgtgtgtggtgccggccacgattagcaacaatgtccaggcacagacactaagcctgggctccgacactggccctgcaatgctcgcgccgaccacctgcagaccgcatcaagcacgcccgcccgcggaaccaagcgacccgtcgtcatcatccagaccacggccggctactgagactacctggacccacacgcccggcaccccggcccgagcagaaccgcgtcccta

SEQ ID NO: 119772 - DNA, 824 bp, Homo Sapiens
  misc_feature (522)..(577): n is a, c, g, or t
  misc_feature (609)..(733): n is a, c, g, or t
gggggtagaagctcgtggagccctggtggtttagcttttggagtcgtctgcgcctgttggtcccagtcccccttggcgttttcagggccagcctacctcgccccttggcgccatgaccactaccactacctttaagggtgtggaccctaacagcaggaacagctcccgggttttgcggcctccaggtggtgggtccaatttttcattaggctttgatgagccagcagaacagcctgtgaggaagaacaagatggcttctaacatctttgggacaccggaagagaaccccccatcttgggccaagtcagcaggttccaagtctagtggcggcagggaagattcggagtcccctgccacccctacaattaactcttctgaagcaagctctggagatttcctagacctcaagggagaaagcggattgccctgccaatgtgggacctgaacttctcatcccacctggcgcaatcttcaccataaatccttcgcctcgctgctccctgtgtcccgccctggggtccnnnnnnnnnnnnnnnnnnnnnnnnnnnnnnnnnnnnnnnnnnnnnnnnnnnnnnnnggcttgtgtaaaccttcccttgcgaagcggcnnnnnnnnnnnnnnnnnnnnnnnnnnnnnnnnnnnnnnnnnnnnnnnnnnnnnnnnnnnnnnnnnnnnnnnnnnnnnnnnnnnnnnnnnnnnnnnnnnnnnnnnnnnnnnnnnnnnnnnnnnnnntcgttattccccacggccacatatccactccagtcgtctccccgccttgcctttctatttttcccgcacacctttctttcttccccgcctc

SEQ ID NO: 119773 - DNA, 329 bp, Homo Sapiens
gtcacacacaaatcagtttctcctgatctttatgtcttggaacagggccagacagggagaactctcaggtactcttgggagttggtcccatacaagtgcggactcctggacattagcgaggtgtaaagagggcagtgtctgtgctgccccggcagctttgctctccagatgctggactagggtgggcctccttcagcctgggagggtctgagaataagatctagtgacccccatttatatcaaacctgataccttacacatgggcttctttctagattcttctttccatagctcatggagctgcagggaaagctttaagagctttggtc

SEQ ID NO: 119774 - DNA, 111 bp, Homo Sapiens
accctcaccacctgctttcccaagttgtgttaacaaatatctaatatttatttagcacttgttatattcagctttaaatagataattacattaaactttcacagcaatctt

SEQ ID NO: 119775 - DNA, 437 bp, Homo Sapiens
cagaagccaacaacccatttgttactgccttaggcagaggttaaaaatgccctcaaccatggtgaacatgacagtagagggcacctagtgagcatgacacatcctcaaatgtcacaaaaggacacaaatatccttgttgcagtattgcttcctaaagaatatggggacagtatgcacacaagcaagaaataacttattccgtatttggtgggggcaggggaatgctatagtcttgacgatctagaattctactatgtaactctaggagttctctcattctatagtcactccactacagccaaacagtttcttgtgaaattcaaacccagcacaatcatcatttttagaaatcaaaactgtatcaagccaagggtccatcaaaccgtgcaccttttaagaaaaatttagaaaaattctactgcagttggcaagcatgg

SEQ ID NO: 119776 - DNA, 313 bp, Homo Sapiens
gcaagacctataactttatttaactattccaataatttgtactagagtttccaaatattaatatttgttaataaaaatctctcgtttctttttttaaattaactgatttacctcaagagtgccttctaggaatgtttggacatttgttcaaaaacatgactaccataatccaaatttctgatttctataccaatttaaatcaccaatttacaaattgttcagttttttccttaagaaacaaaaaagccagtttttttgaagctactaaaaaatttgactgttaagacatgtaaatcctttttgtggccctagt

SEQ ID NO: 119777 - DNA, 358 bp, Homo Sapiens
aagatttctgttgaggagctgcacagacagctgcaattcatgggcgacgctgattgccagaaacgctatggattggcatggggtctgcagctcacagatccctgatcaatacccctacactaacacgccagatggtttggggaaggacaaaaataaaatagtccaaatcaacccaccattatgtttttttgtgtgtgtattgctctgataacctagttgtagcataaatgtgttctaccctgacacaaaacctgacaagatttcgagcattggggtagaaattagcagctctcctctaccctagatttgggtcgtggttactgttgtatagtaaaaacaaagatattgggccccttat

SEQ ID NO: 119778 - DNA, 234 bp, Homo Sapiens
  misc_feature (110)..(118): n is a, c, g, or t
tcagttgctaaattttacttcataattcctttgtcaatcagttatttagattttaaaagaggagagaatcctgtgatgttatctgcatgatcattagtctcacacaatgnnnnnnnnncaataaaataagactaaagaaatcattcttccaatgattgtcattgaactgttacattagtaaacattcacagtttgaagtctctctcaatctccagcatataaagtagtgcaaag

SEQ ID NO: 119779 - DNA, 391 bp, Homo Sapiens
ataaagggcagattcatttagacatttaagtatctaattcctccaaaaaggctaaaagatacagtgatgcagtgccatttaatgagttttttaaggtttcaaaatcaagctcaaatgctgtatattattgacattcaccattattcaagaaaacctttaataatattctttatattataatgtgatcaaagaataaaaaaattttcatgaagggctggtttacaaaatagaactctgtctagggtctgagccatttttctcatacccgtcccattctctctctgtaacagcagtgggaggagtgacagagctcgcaggttaagacagacacgcaggtgttggtatctaatgcactgaactgtggaagttatgggaagttgttttctctttt

SEQ ID NO: 119780 - DNA, 367 bp, Homo Sapiens
atgataacagtcttcccccaaactaaatcacctttgcgaagctaatgaaaggccaccaggttaggaggatgtgaggagcctgaattctgctaaggtgtagacataaaagattaccagccattattccagagatcacaagatttgcaactccccagctgctcctgcaaataacatcactattgtagagcctaagattggtggttgagatgtcttttcaggtttttgcatttctgacgactgatggctccacctggacctgctctccctccaccccacaagtcctgaggccccagtcagaagcaggctccctggactttgaattttcggggaattgatttgggtaataactctgtctcccatacagcat

SEQ ID NO: 119781 - DNA, 420 bp, Homo Sapiens
gcacaaacactcataaaaactttaccagacaccaaataattacaggaaggggcgaaccttcaatccaccaagccacagcattttgaagtggatttaaaataaagatcaaataggatgggcactggccccagcctcacatcgggcccccttccccagacacgggcccatgagatagagaccaaggaactttctgggttttgggactctgtgttcaattcatagaaaatgtctttctgcaagttattcttagtgtcttcatgtggcttttatggtttcaaatacgatcctgggtcttctctgctctcactgtggtcctcagctggggaagctcccggttccagacaggcgacacacacgcaggtagggtagggcgggagcctctaatcctccacaaagccgggcccctccgcggggccccgc

SEQ ID NO: 119782 - DNA, 352 bp, Homo Sapiens
ataaggctggtaaaatactcagcaagtgatcaaactggcctaatttaaagagactatgacgtcttttatgaagttacctttcactcctaaatctcattcttcccaactatagagtaaaataaataagaggacttgcccgatgtagtcttttctttctccatggctagccaagtgagcatcctctgggccttcatttcacatattgcaccaccctctcagctcgtctccctgccaccagcctttcccccagtttactctgtgccacacaggatagccctttgcttcatgccactggcctgatcacagctgcaacaggagagaaacgcacacagtcatatgcactcagaagacc

SEQ ID NO: 119783 - DNA, 455 bp, Homo Sapiens
tttaatttaaggcacattttaatagatttataaaaatcatatatacaaaacatgttaaactaaccaccgtggctataacatatatttttacactttatcatatcttaacctcgtacactgtattcgtaaaccaagtccggtcacggcatgatggcccggcgcaggtggtgctggcgctgtagcgaccgtcttggaggggctgcacagagcactcggttcctttctgtatttaaggtcctgaaaggcacaggcgctaaagccagaaggccgtccaactggtcccttcggcagtgtgtcctcctgctgcgtgggctggggcctgagcacaggaaagggagttcaggacacggtggccatgagtaggtgccaagcttaccacactgaatttcctggcgacgcttgtgcccatcgatgtgagctggttcaaatggagttaagaaaaagggcatttcgaa

SEQ ID NO: 119784 - DNA, 349 bp, Homo Sapiens
tttatttctcaaattcatattgcagaagttcatcttttacagtttcttgctgtacatgatttgcaggtcaatatgtcatttccttcatttttttctcccctggagaaggcctgagatgatcattctcctctttggctttttttggttctaacattgctgttttggcctgacattagaatatttatcttgaaggcgtagaaaagcagcgtttttctccagtataacttaattttgtgctcttggcttttcttgatatgtctgaatttttccatataaccagaaaagttactgtggtaagtaacagcatgctgttactaagaaccatgtagttccctgctcaaggtactag

SEQ ID NO: 119785 - DNA, 270 bp, Homo Sapiens
catatacattcaaataagagcttttctgacttggtagtagtaggtcaggataaagagctggggtgtgctatcccctacttgtgagttgtatataatttgttaggattcttttgtgtccacctttttttaagtttagatggctggctctgactgctataacaaggtatgtatcacagctatgtaatgtaagaatgcaaaatctactatagttgtactataaattcagcacctgttactgtataattaagatactgcatttgaagacaataa

SEQ ID NO: 119786 - DNA, 318 bp, Homo Sapiens
cccttttcctcttctccccaaaacacaatgctgttgggattctgattgaaattacattatttattatatttgtcattttaaaaaatttgtgatgtaactcctatgccataaatttaccctttttaaagagtaaatttaagtgcacaattcagtgttttttagtgtgtccacaagattgtgccacaatcatcattatctaattccagattattttcatcaccccaaaaagaaacccctcacctgttaacagtcacttcacatttctcttgccccgcaagacatgggctaccactaatctactgtttctctggatttacc

SEQ ID NO: 119787 - DNA, 282 bp, Homo Sapiens
ttatccatgtaatgtttcattaattctttgatgctgaagtttcacctcctgcagggagcatttgcagcaccccaggcgagttgtcagcagttgctgcctggcagtagcacacattaactctagtgagcagaagtggagctcgaaggctccccacactgctgcaccttgagctgctcttcctggcccagcccgttctgcttcctgggaccccagatctggtctccaagtactgtttctcttctaagtgtagtcattaacttcccagagtgagaagaagagact

SEQ ID NO: 119788 - DNA, 468 bp, Homo Sapiens
  misc_feature (105)..(158): n is a, c, g, or t
ctggacaagttttaaataaaccagtctttttctcaaaggaaaactaaaaagcccaccagcccatcagtcccctccctccaacccacccgtctttatcactttttnnnnnnnnnnnnnnnnnnnnnnnnnnnnnnnnnnnnnnnnnnnnnnnnnnnnnntgctaacctgaacgccagagattttttggctgcgggagtgaatagactgcagggaaagaagggaagagatgctaggaggtctcaaactccccagatttgcaaacaagtgctcaaaggcgaatgcttcccctagacatgaagggaggcaggatcagtactcctggtggggtgtatgttggtgggggctgtttcaaaacacacttcaaaaagcatttttgggccactggaagcacttggtgcagcgaattgaaaagaagagaagccagacaggagaaagatcttccagcctgcaggggaatgggccaggggg

SEQ ID NO: 119789 - DNA, 341 bp, Homo Sapiens
  misc_feature (115)..(115): n is a, c, g, or t
ttttttatcacatgaggctgatgagtgtgtcacgctgttcatcccccaagtgagtgcactcccagggccacctttctggaaaatgttctttggtgcagggtgcgtggtgggccanggaatggtctgggcgttcccattaatctgagaggatgggagggtaatcccttcacaaatatgggaatgggggctgctctgaggctggcaaataataaacaatgagggtttcttttttttctgtttagtgctggattcctccagccctcgctctctgtggtcgtgagcaataacttagcccttgtcttcctctgtgaaggatgtaaatggaatgaccttaattctcg

SEQ ID NO: 119790 - DNA, 350 bp, Homo Sapiens
ttagatgcaatgcaatgttttgaccagacttttctctgtgcttttgggtgggtttccctattagcaggtaaaacatttatctcttgactaaaagtagatgacatctttccccaaccatgagtcctcaggttgttacagaggctgccttcctgtctcactctgtaccccccattgcctctccgagtttaaaaaggaaatgattaattagtcaaaagaatatgtcaaaaatgtaacatattatgtttaacataagtaactaatgattagtcaaaaagaatatgctaaaactttaacacattatgtttaacataagtaactatattaaaatttagaatatatttatgatttcc

SEQ ID NO: 119791 - DNA, 271 bp, Homo Sapiens
agcagcaattatctagtgggagcagttagctacgctttaggggtgtatgtttgtatgtgcattgtgtataacagaagtgttctctagagtgagcagtcagattacactgcaatggtcatattaccattgagtcccccaaacactaaagaaagacattatttttttctatataaacttaatacgcagagttataaacataaaatattgatatagacacacatacgcacaccactgcttcccaaagcctatgaatgcatccacgtactagtcc

SEQ ID NO: 119792 - DNA, 421 bp, Homo Sapiens
tttgctattcttttataggttagtgttaatgcttagcataaagatgcctttgtttgtaagtaacaccagcaactggaactgaaccagtaaagatttattggttcctataatggaaaattccagttgtagtgtttgggtttcagcagaggtctgatccagaagttctcaatgtcaacaaggctcttccaggcaggaggtattatttgtggtaaaattttaattgttatcattatttctagtttacagatcaggtaaactaagaatcaaagactataaatgaattatacaaggtcagatagcaaataagcagcagatataacactcaagcctagatcttgacactcccaatcaatgttcctattgctcaaatggatttttatatggtttttttcaggttaattagatattctatttgatcact

SEQ ID NO: 119793 - DNA, 516 bp, Homo Sapiens
  misc_feature (109)..(164): n is a, c, g, or t
cttcttcattccttcctctctgtctttcctgcctccttcccctcatggtctccccattcaggttctcacactcttctcctctcttgctttctgaattgctttaccctcnnnnnnnnnnnnnnnnnnnnnnnnnnnnnnnnnnnnnnnnnnnnnnnnnnnnnnnntctgtcctgaggctgagcaaggagggagagtggaaacagaggcagagaaagtggagagaggagtcaggatgcaattccaaatcttctgaatgggttttggctcagaggtctcctgttccaaattacaaaatccaacccgggatgggaaagtcatctacatacttagtagactgtctgctatttgcttgaatatctccaatagcagggagcttactatcaggcagggcagctcaatcccttttaggaaacctctaacctgttctggtgtatatcacaccaggaatgaatgaatggccctcgttattctatggagtaagtcttagccctctgccttgtgtctgcacttcatcca

SEQ ID NO: 119794 - DNA, 508 bp, Homo Sapiens
gcggatagcattcccaaagtgggactgcctggccagagtatgtaactggacttgttttcatgacccccaggcagggccgcaggaagcatcaagtgtttttgaaatggcttctggacccatagctctcccgggttggttggcttacctttaaccagaacactcccagcagaggctatgggtctgtgtctccttcaggtaaaatgagattaacttgagtaccaagggaaacagtgaagtgtaaaagtcaagagctaccgtttatcgcaggccaattaggtccgttttgtgtgatcttcaaaataagtctcagaagcagatattattttacccacttcacagatgaggagcttgaagctcatcaggaataaagattttactctatgccatacaactggaaagtaggaaagtggggttaaagctcactttcacatggctcccaagcaaattctgcatccattctggcagcttgaagcatagcctagcttcatggtactgggtaccttgcaga

SEQ ID NO: 119795 - DNA, 491 bp, Homo Sapiens
  misc_feature (63)..(310): n is a, c, g, or t
caaatgtccaaccagaaattcaggaattaaagtatatgatgaagccgagcatggtggctcggnnnnnnnnnnnnnnnnnnnnnnnnnnnnnnnnnnnnnnnnnnnnnnnnnnnnnnnnnnnnnnnnnnnnnnnnnnnnnnnnnnnnnnnnnnnnnnnnnnnnnnnnnnnnnnnnnnnnnnnnnnnnnnnnnnnnnnnnnnnnnnnnnnnnnnnnnnnnnnnnnnnnnnnnnnnnnnnnnnnnnnnnnnnnnnnnnnnnnnnnnnnnnnnnnnnnnnnnnnnnnnnnnnnnnnnnnnnnnnnnnnnnnnnntatatatatattcataccatggaatgcaagggtttaaaacaatgaaatggaactttatgtactgacatcaaaagctttttttatatgaacatgattgtaaaagagtaaatataatttcaatctgctattttaaaacagtacatttctagatacatattaaaagtatggaatcagcttcaca

SEQ ID NO: 119796 - DNA, 201 bp, Homo Sapiens
gctattataaataaagccactataaacatttgtttactggtttttatgtggacacgttttcatttctctcactgcgcccagcaatgaatacatttattttatggcaaaactaaaagtttgtcaaacacccaaattcagtatgataagttagctttttataggatactgacaggttattgtgggtactccaatcttgttcag

SEQ ID NO: 119797 - DNA, 483 bp, Homo Sapiens
aatgtatacatttttaatggaattaaagtacactccaagcatttttatcctgaacactcatgcatacacttaaattaaatattgaaataaccacatgcacaaaatcttctgtggtcatggttctcatcctgcatgaatcacttctgtccaaaagcgggcatccctgtgtaacagcctttggagggcgtgggaacggacagagttcatgctctacaaacatctgaaagtggcgttgacttccctgcctgcctgaatgagtgtgcaatgtagataaatcctcttttgactaacaggtctatgctggcccattaggatccacaggaatgaacaggaatcccttcgggaatttttcaaggcttacagggtatatttcccattgcttccgtaaaaatgtaaagctgttctttctgcagtcttttgcccgaagctatcggtcttttggggtttagcaaccaccctgaaaacctggacactcatttgaat

SEQ ID NO: 119798 - DNA, 434 bp, Homo Sapiens
  misc_feature (50)..(128): n is a, c, g, or t
tgcggccgccaagccactccatggcaatgagctccgaagacattgtgcannnnnnnnnnnnnnnnnnnnnnnnnnnnnnnnnnnnnnnnnnnnnnnnnnnnnnnnnnnnnnnnnnnnnnnnnnnnnnnggtaatatattaaggaataaatacatgcatgcagatttaagacagagccatgctagaacaggaatgaaaggctgtgtgaaccaagcagaccgcttaattggcaccagtgctgctggtatggtcaatcacctactcaactaaggaacggctcaaagcatacacatgggagggaggagtggggccacagagagagggcccattagttgcagattacgatgtatccagttaggtgcacctgccttcgagaagtgtaaaaataagtatttacatagaaagaaagactgaatggatgcacggtgaatgcat

SEQ ID NO: 119799 - DNA, 396 bp, Homo Sapiens
ggataagcagttggatttattgtgagatgaagatggcttcacggtcttctcgaagcctttccgtacagcatcagtatgtttgctgttccccccgcagttcctgtagacggagctccttgaggccctgtggttaccattctgttcccttagattgtaggcatctgatatggaggaaaagagaaaagtagcacagagacacggcaagttgccaatgtcagcatttttacttctttctgggtaatttatctaacccgtggtagcttggatttgctataatttcagagtagttttaaaaacgtgccttccttggtcgctttttcgagggtagccttacagtactgaggacttttcctgtgagattgtcagacccccacagatccccatgatagcccaggg

SEQ ID NO: 119800 - DNA, 500 bp, Homo Sapiens
tttgcttttctaccaaatactgcttttaacacaggcttttcactgagtagtggacaatctatcagctaggtgctattcagtgtgaggggcatttgcaaaggtctgcatcagtgctggctgatggaactttctagtgatagcatcattctgtagctgcactgtccagtgcagaggctacttgccactgtggctactgctcaggatggtgcaggtctgaatatcttagacacagcggccaccgtgtctactgcacgggactgaatattttagacacagcggccaccgtgtctactgcacgggacggcgagggtctgaatatcttacagacagcggccaccgtgtctactgcacgggacggcgagggtctgaatatctcagacacagcggccacggtgtctactgcacgggacggtgcaggtctgactgtcttagacacagctcacctttgatccgtgttaggaattatccacatctcctctctgggcaatattctactttct

SEQ ID NO: 119801 - DNA, 157 bp, Homo Sapiens
attctaatatttttaccatgcattgaacgcaacaggagggtatttcagcaaattcacgacaaggtaatcgtcttatcactttttgtaggccattaatggtcaggaaattgcccatactctgtcattattgtttaataaatcattaaattatttcatt

SEQ ID NO: 119802 - DNA, 388 bp, Homo Sapiens
tgtagatgtagagggggagaggactaactacaaagggcatcaggaaactttttaagatgattggcatgatagtttcacaaaaacaatatttctcaaaatgttaaattgtactgttaattttgctgagtgaaaattatacctccataaactgactttttaaaaaatggatttaatgattatccctacataggtgcctcttcctcaagtttctttacctcaaaaaatggcatcactatctgcctatttactaaaacctgaaaccaggcaatgatacttgggacttcctttttccttcacaccccacccacatccaatccatctctgaatcccaacaattctacttccaaaatgtattgcaaacccatctcctaaacttcctatctgagct

SEQ ID NO: 119803 - DNA, 420 bp, Homo Sapiens
actttcaaatgactgtatattttaattatagcatttgcatacaactgagtttatttatctatgctgtacgctaagtttaggggcaggcttggtgcacaaatggtttcgcccaccctttgcacagggcaagccccccccaggcgcccaggctgggaggcccaagtcccggcagctgctgcggtggacttaaaggcagcagctcctgcttctgccccaaacgttcagtgtagtcggattcccggggacagcagggcagtctgcgcgcacatccccggggcatcgcaggacacctgctgccccctatcggtggtgagaacaataacccgaacccggttggaatcaactggaagaggccttttgaaaaaaagaatattccaggactacgcagtagccagacgactctctaagaacatgggtttc

SEQ ID NO: 119804 - DNA, 148 bp, Homo Sapiens
ggttttcaatgatgggcaacctaaaatttactcacacagaacacaaaacagttgaatttgttaaaagtccaaaatgtgcttttgtacttttgtaaaatgggaatgtgcttcttgtacaaatcacaatatgctttctagaccacaacct

SEQ ID NO: 119805 - DNA, 477 bp, Homo Sapiens
tttatgctttttttggcctttctttagacaacctaagtcccacttttgaaaaaaattaattcctattttccctccactatttagaaaattactctctccattcttatgagtatctttgatactacagtgcacacttaatttaacaatgttgaggttaaccaatatcttacagcttttgtcctgaacagttcatgaatgttaaaacacttaattcagatcaccctatcccaacttacatactacttctattctctattttagtaatttattaaaactgtagttgtattttagtggagggcctttcagaatatcatgctaggggcactgaaggaggcaaggatcttctccctttatttgctgacccagtcttctgctttttgctggtttcttgactcagggtttactcctcattgtttggatggattattcaactgccccacagctcttttgccgtggaactgcttctctgtagacctg

SEQ ID NO: 119806 - DNA, 511 bp, Homo Sapiens
catgtacctgttggccatttgtatgtcttcttttgagaaatgtctattcatgtcctttgctcactttttaatgggattatatgggttttttttcaactgttgggttgtttgagttccttgtacattctggatattagtcctttgtcacattaatagtttgcaaatattttctccaattcaccaggctgtctcttcacactgttgattgtgtgtagatgctgtgcagaagctatttagttcaacatagtcccatttgtctagtgttgtttttgttgcctatgcttgtgatcctgttttatatttatggaggatagaggtgagacatcataatcatatcagtgttaaggaccttgaaaggttgaatgcagatctttagtagcacataaagctgggactatattttggaagacttgaattccaagtgaagcagttggaccttgcatatcttgatgtgcaaagggctttgaggacaatgactacctcaagttctctgggtctctggagaaaaata

SEQ ID NO: 119807 - DNA, 363 bp, Homo Sapiens
tttggatgtagatgtccagtgtccttgcactatttatcttccctccattgcattgcctgtgctcctttgtcaaagttgatctttgactatattcatgtggatctatttctggactctctatcctgctccactgatgtgttattccaatctttcaccactgccgtactgtctaaaactaaagcctgtagttagtcttgaagtcaggtagtgtagtgctctgacttccatcctcacttccatattgtgttgattattctaaatctttggcctctcgatataaactttaaaatgagtgtgtcaatatccatgaaataacttgcttggattttggttgggattgcattgaatttatggatcaatttg

SEQ ID NO: 119808 - DNA, 263 bp, Homo Sapiens
aagatctctaggtattaactataagccggagaccaatacacacacaccaaagtagaatttgagttacataattatctcactctccctctccccccatccttttttgaatattgagtttttaccagtttaaattaccactatttggaaagcctgacatttagtatcagtctgtgttaagctatagatgtaatttctttaaagcttgtttttctgttgttttttatagaactttcctttttcccccaaaaatatgcctgagaggg

SEQ ID NO: 119809 - DNA, 350 bp, Homo Sapiens
agatatctgtggttaggtccttgaaatctagttccctgtgagctaaaaagcattcagggcaaaattcagactttgaagatggaagagatttcagaagttatgtaatctaacactcagtttaccaagttagaaactgaggatggataggtcatatgattaaggctataatggcagctttggatactttctaatggtctttccatcaaggccaaacctatctggcctgagggcctgatctggaagccaatttcaccgtggttgccttcagtagttttctgactttcttctcattaactatctaattcaccccaacaacagttatatacctctctactttcctcgtattttat

SEQ ID NO: 119810 - DNA, 481 bp, Homo Sapiens
  misc_feature (186)..(314): n is a, c, g, or t
catgtaaagtattcataaagaaaattataaatccttattgaaaggaatcagtggaaagctataccatatttatgggtgggataattaaaaatcattaatttgatatcctgcatttttctttatagcatttacttctaccagccacactctaaatttgtttacttgcttatcatgtctatcatgtcnnnnnnnnnnnnnnnnnnnnnnnnnnnnnnnnnnnnnnnnnnnnnnnnnnnnnnnnnnnnnnnnnnnnnnnnnnnnnnnnnnnnnnnnnnnnnnnnnnnnnnnnnnnnnnnnnnnnnnnnnnnnnnnnncgaatgaatgagaggtattaacactgtttactctgctacaggagtccttggctaaaaagattgagaaccagtaagctatagaacactctatgcaaaacgaaaaccacccatacttttcacatggaagcataagacagttttaactaaataaatgaaaacttttcttc

SEQ ID NO: 119811 - DNA, 285 bp, Homo Sapiens
  misc_feature (127)..(167): n is a, c, g, or t
ttttttttaaattacatgggggtcttgacttttattacagaaagatatgtagtaaatattcagaacagatacacaatgttacttggacatttcagaattatcagagaacatagcataggcagataannnnnnnnnnnnnnnnnnnnnnnnnnnnnnnnnnnnnnnnnagcagcgctgtgtcttataataaaggcctgatttatgaaatgaatgaaaacagagctagtttggttgaactggacttggggtgggtgctttggctacacacctactcaaatccacctc

SEQ ID NO: 119812 - DNA, 492 bp, Homo Sapiens
tttaagtacccaacatttttattgtaatggcttttgatgaatcacattctaagatgtagaacattctgtgatccccagcagaacacataggctcctgtaggctcttattaattcggagccagcccttttctttcccacctggtcttctgggtcttccttccctgtatcgggttgtgatttcatagtccaggaccagactattgttgccccaacctccccttgggcctccttgccttgcccaggtagatggggaagatggtgcctctgcactggaatgatctccctaactcggatgatctccctaacactcggggccacccaggagccttctgagctcccctacattcagccccacattcaaatctctgctcagtcttgtcctggggtcccattccaaccttctgtccctgacagcttccctacccttggcagtaggaaagatgaaactaaagggggatgaaaagagaacacaggatttgagtctgaaagcct

SEQ ID NO: 119813 - DNA, 133 bp, Homo Sapiens
gagaagacgacagaagggatctaggctgaaaataatcgtgacaaccctaacaaaggttaaaaatcacttttagtaatctgtgtaatgagggaagaaaaatggcagtttaattatcattaaagtgttggtgccc

SEQ ID NO: 119814 - DNA, 404 bp, Homo Sapiens
cacctctgcccaaattcttacagaatttggtcataagtgctttctcctgagtgataggatgggaaggaagagatttaagaactggaaacactgagaggattacacatctgttgagcacaaactccagggcttgatttttgtcaggttctgttctggacttgaaaacacattcagtcatgatttgtgcctttaaggagtcactacctgtgcatgggcaatccttctttaagtctggaaaggatggtgattaaagtagatggagtatcaggttctcagcttacctgggctctttctttcacgcacttgtgggactcattgagagttattttattcactcattgactcatttattacccttgaactgcttatttgttccacgttaaaggaaacaaggaattaggaat

SEQ ID NO: 119815 - DNA, 410 bp, Homo Sapiens
  misc_feature (145)..(169): n is a, c, g, or t
  misc_feature (183)..(243): n is a, c, g, or t
gaaggtagataggtttaatggccaattagacacacctgatgacaggattagtgaaaatggaaaaatcagaggtacatgtattaacatggatgactcttacaatgttgagggaaaaaagcaaattacagaaacatatactgtatannnnnnnnnnnnnnnnnnnnnnnnnaagacaagcttttnnnnnnnnnnnnnnnnnnnnnnnnnnnnnnnnnnnnnnnnnnnnnnnnnnnnnnnnnnnnntgggctgaagcaatcctcccacctcagcctccagaatagctgggactacaggcacgcaccaccacacctggatagttttttcactttctgtagagacagggtctcgctatgttgcccaggttagtctcgaactcctagcctcaactgatcctactgcttctgcctcc

SEQ ID NO: 119816 - DNA, 373 bp, Homo Sapiens
tcagtacagagtgatttatttggggaacttaaggatggaagtgtagtcttggagagcagcaaaacaggtagatctccacactgttgctccccagacccagggcttatatatcacagggaaagggtatacatgctctatgcaagacaattaaaggcagccctccagaacaggcaagaatgctacatgcatcataacctataatttgtgcaataacatcaaggctgacatgttcttacgctaaagacagtaaataaagtgagaatcaggaggttttcacaggaccagggctaatcagaagtcaacagggcagattagcatctgtattagttcattctcacattgctatgaagaaatacctgaggccggataattt

SEQ ID NO: 119817 - DNA, 318 bp, Homo Sapiens
  misc_feature (244)..(277): n is a, c, g, or t
tttcctttcccctcctttatttttactaatgaattggccactgatacacaaatggtgggtggacaggctctcatttctcaactagttttatagaaattaaattaaaaattattcctgtggaacaatgctcattgcccacttctgattcattaggaaaacacatcctattttgaagccagtgttttgaaagacagttgaagttccatttcaaggactaagcatcagaagcactccttatgaattnnnnnnnnnnnnnnnnnnnnnnnnnnnnnnnnnnaattgacaaggcagcactgctgacaggctattaagggaaac

SEQ ID NO: 119818 - DNA, 317 bp, Homo Sapiens
  misc_feature (210)..(246): n is a, c, g, or t
actctcgaggatcccccaaatgatcattaaattgccatctctcttatatttatcttttatttatctttccccccctcccagtggctctagtgaaagcagccttcccagaaaaggtaatgccgacatgccccattcccttacagccactgaatctatttggaaattgcaaataatttaccttccctctccccttccccctaccattggacnnnnnnnnnnnnnnnnnnnnnnnnnnnnnnnnnnnnnccaggagaaaaacaaattgtaggacacttccacccactctcacattttgactttttcaagtccttgagacc

SEQ ID NO: 119819 - DNA, 196 bp, Homo Sapiens
gtgtgagccaccgggttcctggccgaatcaggtgatttcttaggccctttctaaatacaaggtttaagtgttttgaggcagccgacagctatacctttaagtctcttgcttctctaagaataagacattttggatcatttgttctaccataacgtaatgaatacaagttgggagcattttgctcttctgttaagca

SEQ ID NO: 119820 - DNA, 330 bp, Homo Sapiens
ggagaatgtttaaaccatagcgtttgtattttaagtacactatgatgtatagtttgcagtattgactgacacgtggactggcttgagcctttgcccatggctctaccaagttaacaagtagtactgaagggaattgtctcgaggcaactcctcgtagctcgtggcttttataattgaaatagcatcaatatattcccaccctgtggaaagacataaacgtgtgtggacctggttatgtctgaccttgtgctgttcacaacatgccttgagagagaaatacttctgaattgaggcctctcacacgatgggtacagcaagtgctaataaact

SEQ ID NO: 119821 - DNA, 140 bp, Homo Sapiens
gttttcagtatatagtagctattttttaaggaaattagtttcatacaagaaaaagattattataaaagtgatacttttgcatgaaatattagtttgtgttgataactcttagttaacccttaaagtttaaaacagtactc

SEQ ID NO: 119822 - DNA, 237 bp, Homo Sapiens
gccctaaccctgttacattgtgtccttttgaaggtactattggtctgggaaacagaagtccgcagggcctccctaatgtctttggagcttaaaccccttgtatatttgccccttttcaataaacgccccacgctgatagcacagaggagcccggcatgcactgtatgggaaagcagtccaccttgttacagttttaaatttcttgctatcttagcattcagataccaatggcttgct

SEQ ID NO: 119823 - DNA, 195 bp, Homo Sapiens
gcaccgtagtcagcaatcgtcactataattttctgcagaaataaatgttttcgttgtcctgtaatgtctgaaattacgctaaagctggaaatgtgtttagctttctcagcaaaattcttaaaaggatatggtcagagccaacaatccagaattatctttactctttaaatggttcttcacccactttggtttgcc

SEQ ID NO: 119824 - DNA, 367 bp, Homo Sapiens
  misc_feature (108)..(244): n is a, c, g, or t
agttcgacggagactctctgcaatatcccccacagttgatatctttgtttgaagagaggcagggttgcacagtatctaaatgcacacgctttgagtcagagacacatnnnnnnnnnnnnnnnnnnnnnnnnnnnnnnnnnnnnnnnnnnnnnnnnnnnnnnnnnnnnnnnnnnnnnnnnnnnnnnnnnnnnnnnnnnnnnnnnnnnnnnnnnnnnnnnnnnnnnnnnnnnnnnnnnnnnnnnnngtggtacagtaaggacttagcatgtagtaagtgctcatacaaaatgttagctagcactgactactgctataataggcccattccaaagttaaaacagctccaactatcaggaaggtcaaaacc

SEQ ID NO: 119825 - DNA, 595 bp, Homo Sapiens
  misc_feature (162)..(225): n is a, c, g, or t
tatagatcgagctcggtaccgattacgctcctagacgggcactgtctaggtggcactggttcacatgcatcccccttccctctacagtgggcagcagtgttatctccggatgaaagcaaaggctctgagggcagaaggagtcgggctcacagctgtgcagtnnnnnnnnnnnnnnnnnnnnnnnnnnnnnnnnnnnnnnnnnnnnnnnnnnnnnnnnnnnnnnnntcttagcacagagtgagcacacagtaagagtagatgctgctgtccttgcaaccatttctgttatggccccaggataaagtccttatagtcccttatagatttacaccaaaggatgtcgagcccttggtttgtgaagtgggactggtaactagattcaatgagatccatgccctgggcttggtgacagaatcaatgatggagttaaaatcctcacttccccccttccaaccgcatggcctcaggaagacaacatcccaaactcatctgtcacaggaagacagtaccagcatcttcatgatcagggtgactaaatggaggctaggcattgtgccaggctctcaacatacctcaagccccacaggatggtatc

SEQ ID NO: 119826 - DNA, 474 bp, Homo Sapiens
gatcgagtcggtaccgattacgctcatagagggggcaaagctttgatggtatgagaaaacagtgcgattatcttttctttaagggtgtacaatgaatctgctttattatagcattacataggacaaccaggctctaaggacttgggcagcccaatggaaggctctcaaaggcctgtgagtttagctgtcgggcttacgatggtgttaattagccacagggagaaaaaaagccatcctgatgtgggactcctgaagtgtgtcctactgaaagccaaatggagaacggaggaatgtcatcctctccagccagtcatgtacccaccacaagaatccaagcctcagtcccaagcttacacatggaaaagcactgctttcgctcttctccaggggtctacagatatttcctccttgcatgtcatcagatgggtcttcctcctaaatgcctctgaactttactaagatgatccattaggc

SEQ ID NO: 119827 - DNA, 414 bp, Homo Sapiens
  misc_feature (193)..(193): n is a, c, g, or t
  misc_feature (366)..(366): n is a, c, g, or t
gtcacgcccacagacttccagtaacaggtctgctgggcggggctctgcttcctgctcccgggggagggaagcctgtcccgccggggatctaccctggccacccctggtcaccccaatcttccatcctcgcaatggggcgggcggaagggagtgcccatgcccacagaagacctagtctcccttgcaggtgtgntgtgtgtacgggggggcgccataatcctcgagtcctcccggcctgggggacccttctggaactccaccccgctagagctcaggctccagctggctgcaagtcctccttatcccggcatccacccccaatatctcttgggagccagaaatagccctaactcttctttaagaatnaggacttcccccgtccttcagagctccaggatcccaaactaccttgcc

SEQ ID NO: 119828 - DNA, 588 bp, Homo Sapiens
  misc_feature (543)..(543): n is a, c, g, or t
gcctagaggatcccctatgtctcgatacgtaatgcgcactagccaggaataagcctttgggcattggtctggtctagagcttttggcacctggtcgctgggagccctaggggtctgtgcagaggccttggatgctgccatgagaggctgatgggtcgggtggtattgggggaagtctctagctcccctcttcctgctgattcttgcagccctactttcatttactttatatatggagagactgtgtaaaatttcattgactttaatagttcaaaaaatgttggaatgtatctgacttagcccattaaatgctgctgaaagaatgctcatctcaaatcagattaggagggagccattaagcaggccacacatgaatagggctcttgacaatgtacacagctctttcgtattgcctaccccatttcatctacctgagaggcggataggacggatagtcccattgtacagttgaacatgagggtttagagccactctgtggtaaagctcagatctgaactcagactttctgccttctgtggcaggncttctttttatacctagagtccccggaactaggtagcctgggtgg

SEQ ID NO: 119829 - DNA, 550 bp, Homo Sapiens
agtgtatgtaatatctcctgaatatgtcacatggcctttatctaaagaatggaaagatggtgactaggagttggtcccgtgagaaacaaggatgagggtaggagaggtggagcatattttagcaagatccttaatagtcagagtagatattgggtagctaattctggttttgggtttgggttttttactcttccactttatggtaggagaaaattcagggtgcatgacgagaaatgaaataagtgacagaaggtcaaaatcaaactttaaaacataaactcttgagggcagagctgatgacttaatggtatgtgagtagaactggtactgtcatggttgtggatttgggagttggaggaaacttgagcaaagaagtggcagatgatgaaaataactcagttttaattctggataaaacgggttttggaaaatgtggtttagatttaaatgtggcacaattttttcaatcataaactctagaattagtcagacttgcccacccagtaacaggtagcttttgagctccttaagcctccttatgtgagggtct

SEQ ID NO: 119830 - DNA, 359 bp, Homo Sapiens
tgatggtgtccacacttcatccatgtcccaacaaaggacatgaactcattcctttttatggctgcatagccatccatggtgtatatgtgccacatttactttattcatgctgtcattgatgagcattggggttggttccaagcatttgctatggtgaacagtattgcaataaacatacgtgtgcatgtgtctttacaggagaatgattcataatccgttgggtatatacccaataatgggcatggctgggtcaaatggtataactgggtctagatccttgaggaatcgccacacggtattccacaagggtggcactaatttacacgcacaccaacagtgtaaacagtgttcctatttct

SEQ ID NO: 119831 - DNA, 194 bp, Homo Sapiens
ttcacgcccacatgactctgtgttggaaatgtggaaacgatggaatggttgggccctcataccaccatcttgtctcagtcattggacagtggcacagccataagaaaatcataaacttgttccaaaagctgagtataccctgtaggagccaacagtggtatgctgtcaggtgatcacagtcttgaagcagggca

SEQ ID NO: 119832 - DNA, 228 bp, Homo Sapiens
tcatacataaaaaaacgggagcaccctcccgattatagccctacatattcgtttttttgttctggtttgtaagcccctgctaattcgagttcacgagtaatatcgcggtattgggaaatcgtgatttcgccgcgcaaatacatttggcgcgcaaaatcgagcagttcatttaaatcggcgggctcataatttttcgtggcgatgaatttattttttaattcggtcgcg

SEQ ID NO: 119833 - DNA, 427 bp, Homo Sapiens
gcaactgctcgaggtgtcagtgcccctattctccatgctattcaaaagtcaattataatttggtgaccaatttttataaagtgaactttgtgtttttatatcttaagtaaatagagttaagtaaatcttgcttcttattttattatacattactattgatccatgtaaggccttttcttatttccttcttagctatacccaccattttaataggtgatcattctgttgtgtttagtgaatccttttttatgtgttcttgtaaaatgtgctctgattagtggaaagctattattaattaaataagtaatactgtgtgatatatttcattatgttcctttctttttcacaggcatctttttaatatccattcattgttgtgtttctaattcattgtttctaattgctacatggtaagttaccatgatgt

SEQ ID NO: 119834 - DNA, 538 bp, Homo Sapiens
  misc_feature (487)..(487): n is a, c, g, or t
  misc_feature (520)..(520): n is a, c, g, or t
gactctagttgatccacggatggtcgtgccggatcatgagttccatgaagtccagctacaattgatttgactgtgatagggcctttgacggccatggctgagtctaagcatccccaaaaattaaaaaataccaaatgtatgaaacctcagttatgtgtgagcatgggctgattagtcattagtccatcgagatgtcttatttaaggggaaagagtgggcgattttaggtgagatggtcctgaagtaagaaccagatgcctgttaaagttcatcaatagaaacccccacggtttatgggcccggagcgagaagagggatccctgccaagcgggttgctgagttcacgcggcatggtagttaagctcgtgatctagtggtggtgatatgcatgttgactggagttatttgacatgatatgtgctatgtacgatcaataataatatgtactatgtaatattaataataatatgtacatgcttatatgcantgggactagcaattaatgcacgacgtacatagngttatagtatagcacgac

SEQ ID NO: 119835 - DNA, 428 bp, Homo Sapiens
cctaggtatatgtcgtgccagtgaagaacagaacctcggaaataataaataaaattataccgtatcgtaagcctttttggacaactgatgtgtggtggccttggaaagtgctctctcgaataatgtctcgtcaccattggtatattgtcaaagtattggttaatagtcctagagatagtaagagtatagagttaaagtggaatcatatagttaggcctgatgttattaaaggggctgatagggctccggtaagtggtcatgggcttgcatttactatgtggtatgcatgtgattggagcgtcattatgtattgacgtgtaggtataagcttactagcagtgtaaacacataagcttggatcagagctactgcaaattcaagaatagttaatagactgaggatagtaaatgtgatagaagctgatatag

SEQ ID NO: 119836 - DNA, 459 bp, Homo Sapiens
  misc_feature (378)..(378): n is a, c, g, or t
ctctgagcgctgcacttacggcaactcttgatgtcatgtgggcttgctgactagtggagagcgcctctattgaaaccaggggattccaccaggttgctgctatgatgaggccataaactattatccgtctagtagggaattttctttaaaaatttgaaattgtttaaggaaggtcttaaaattcatccgtagtttattattatatttttaactttggtgtggcaacgttacccgtagaatctgcgagcctaataagaagatccgtagaatctgcgagcctaatgagaagatccttctaagtcatgaagtcttgggggtaatctgttgcacagcaatagtgacgggaacagatgagctctctctggttggctgtctcgngaacacctgagcttcaacaagtccagcgtggggcccagaactatctcttctagtccagcctgatggctttgcacgacatat

SEQ ID NO: 119837 - DNA, 307 bp, Homo Sapiens
cttggtcgcacctctaacctcctggcatctagcggtgaagccccagaacctggcttctcctggcatggagctccatcatcttcatgatgttgttgagtggactcctttgactgcctctccaaccaccagaagagccaccaccaaacttattattgatgatggtgcccctctcccagcacattctttatggtcttagtgaagagtgagctttctgctccttctcttggactatgaccttctcttgggtcttttggtctgacataatatacaatctctgcttccttcagcatatcctctggcttctgac

SEQ ID NO: 119838 - DNA, 483 bp, Homo Sapiens
ggatcttggtgggaccctagcatcgtctagggaacagagaggttgtgattaagaggtatctggatgaaatcttggtgaaaggaagcacttgtttttaatcccaccatggtttttcatatgcatacaaccatcctcaaccatctgcccatcagcagagctcctagaaaggcaggacataccactggatatccccttctggcagttctaaaccagccttgcccggaagtgggagccttatctatgtggcccagactcaaataaggcctcttggaaatactctcacccttcccctttgtttaccctccaacccctgtgaatcttgtgaacagagggttgaagaaacatgttctgcacatgtgctagtacctgtgaatcttgatgtcccctggaccctctgtgtaagtacatcatggcagaattgctctagatccttcggagctgcagggtgagttaccagccactcaaggtggaggcaaacatgcc

SEQ ID NO: 119839 - DNA, 468 bp, Homo Sapiens
  misc_feature (135)..(388): n is a, c, g, or t
tagaggatctatttggcggcgccttttccactggtctataagaaacgtgacataaggactacgtctggattcgattctgactccccagcacccaattaaatggcagcaatgtcattcttttttttgggaaacaannnnnnnnnnnnnnnnnnnnnnnnnnnnnnnnnnnnnnnnnnnnnnnnnnnnnnnnnnnnnnnnnnnnnnnnnnnnnnnnnnnnnnnnnnnnnnnnnnnnnnnnnnnnnnnnnnnnnnnnnnnnnnnnnnnnnnnnnnnnnnnnnnnnnnnnnnnnnnnnnnnnnnnnnnnnnnnnnnnnnnnnnnnnnnnnnnnnnnnnnnnnnnnnnnnnnnnnnnnnnnnnnnnnnnnnnnnnnnnnnnnnnnnnnnnnnntgagccactgcgcctgtccatggatcctttcaaagtctttaaatctctcccacatccgggcttcatcctcccctgcctgt

SEQ ID NO: 119840 - DNA, 200 bp, Homo Sapiens
ggatcccggacgagtgcaatggctgggaaatcagatcttttctggactgaaaacattggccagatgagagtgagacaccgcagtaagcgtgcagggttccagatggtggcagtggcacacggtattatttattcagacctcttctctcccgcattctcttagtagcaggagatttcacatgcaggagccaatgtacatgt

SEQ ID NO: 119841 - DNA, 473 bp, Homo Sapiens
gtgcatggctggatccaaaaccacttaatcagcctcctggagtttcctcctcctctctgcgggtggaaaccccaagtcagctcaagcgcctggcattccgtggaaaatgtgtgtctttattgtccatggcaaggcaccaacagccgttctgaacaggatgctgactcacatctgccgagacacactgactgcacaaagaaaatggatttcatttgtgtttgatgaaggtctcgggagagtgggggttgacttggaaaacaaaggaaaactgtccagatcctctccttacctagattatggggaagaccacgacttgacttgactaagattactgagcataccagtatcaaagctgagaagaaatcatctttactaaaagaaggtcagaggcatgccacaaagagaggacaatgccacagagctatgggtgtgtacacgtggacgtagttcatttattataataatagtaacct

SEQ ID NO: 119842 - DNA, 303 bp, Homo Sapiens
acccccacgacgcaatggagaaagacggagagcgccaacggcgtccatctttaaggagtcgccagcgataaccggagtagtggaaatggttataagacgaccaatctgaccagcaaggaagccaagatgggaaaggtcatgcggcatacgctcggcgccagagcgtaccataaacgcaagcctcaacgcagcgacgagcacgagagcggtcagtagcaatccaaactttgttactcgtcagaaaatcgaaatcatcttcggttaaatccaaaacggcagaagcctgaatgagcttaatagagg

SEQ ID NO: 119843 - DNA, 239 bp, Homo Sapiens
tcagttcatcaacatcatagccagatgcccagataagcatgacaagtaaaggacggttgtcagcgtcataagaggttttacctccaaatgaagaaataacatcacggtaacgctgcatgaagtaatcacgttcttggtcagtatgcaaattagcataagcagcttgcagacccaataatgtcaatacgatgtggtagaaagtcgtcaatttggcgagaacagctcaagtctcgaggagg

SEQ ID NO: 119844 - DNA, 214 bp, Homo Sapiens
aggtgactctagagcgaggttacagttttctggtcgtgtcaacagacctattaaacattctgtgccgcgtttctttgttcctgagcatggactatgtttactcttgcgcttgtgccgttttccgcctactgcgactaaagagattcagtaccttaacgctaaaggtgctttgacttataccgcatattgctggcgacccatgttttgtatggca

SEQ ID NO: 119845 - DNA, 236 bp, Homo Sapiens
actctagcaggatcgtccaacagcggtctggaaacgtacgcgattgttcagtaccttgactcatagatttcttacctattagtggttgaacagcatcggactcagatagtagtgccacgctctttttcaaatgtccaccagagaatctctaccatgaaccaaatgtgactcatattctaaaccagtccttgacgaacgttgccaagcatatttaaagccacttcttcctacatcca

SEQ ID NO: 119846 - DNA, 417 bp, Homo Sapiens
aatcaacaactttaatgtaagagcaagagtgagtaatggaaatccagctctggtagtagagagcatctacttgtggcagccaaagatttctttgcagtaacttttagctaggtttagggataaaaagaagaatgagatgaacacattacaatatgatgtaaaccactggtatggttttcacaaaagtggaaaagatttaatcagtgaataaatgctacaaatttgccaatcgatttttaacttcccctaaatttatatttcgataagcaatctctaagatttcaactctacaatatttgatgcacaaaaacacagaaaaatgttttaagggaagaataaattattttaagttagtcagactgttaagatatatttaaaaacctgtattccagaacaaaagtcacagatgactaacag

SEQ ID NO: 119847 - DNA, 1017 bp, Homo Sapiens
  misc_feature (256)..(283): n is a, c, g, or t
  misc_feature (413)..(426): n is a, c, g, or t
  misc_feature (562)..(575): n is a, c, g, or t
ggactaaatctagaatgatgtgattaatgaataggctttagctctataatatcttctaggttattagaattgaaacctgacagttttataaaaagtcatgttatctcatgagctgcttcccacctggctgtataattttatcatcatggttccccagtttcgatgagttctcacagtcaaatgagagtttgtttaaccaccttaggagaaacatactacaaagtcatcaagaataaaggttccaaagtaattatgnnnnnnnnnnnnnnnnnnnnnnnnnnnntaaacaaatcaggaaaagtcaccatgcccgcaagaaacctaaagcaaaatcatcaagtgaaaaaccttaatttgcaacaacacaatcatgaacccaacaacccacctgcaaacgaacccccgttcgcgtnnnnnnnnnnnnnngaacaaattctacaccaatcctttctccgtgggcgcggggccccccccgtgcccagaaaggcaatgcggccccctcggtttccccccttgagcggcctccgcgcaaccagggacagagggcgtaggccccttcccnnnnnnnnnnnnnncctcccccggggcggccaaagcagggaaatcttccggcaacaaccctccacaccggcggggttttcctgcggagacgttcttcaagagggggtcttccctggcacaccggggatgcccccggggtggcgccctctatgtaaaacccccgctttccccgcccccctccgccgcgcgcacgctcttgcggagaataaatgggggggagaaacttttatcgtaagcttctttctccgcgcccatgtgtggagaaaccccatcgcataacatacaggggcaggataagaacaccgcgttatttaaccgccgcggagcgcattttcagacccgccttctggggtcccacgcgcggacacaaaataattcccccaccccgcgggtgagacaacaccggggcggccacaaaaaaatagccccccctatgtgggcccaccaacgcccaac

SEQ ID NO: 119848 - DNA, 586 bp, Homo Sapiens
  misc_feature (196)..(363): n is a, c, g, or t
ctggaagaagtgtgccacaacttgggcttcaagggattcttacaaaaaaaagtcccatagggatgagttctcagcaaaaaggacaaaacacaagaggagacattccacagtgagtgggagtcagtagacacacagataggtgacctagaacccctgtaccctgaacttgaaatgatgcatgacagcccaaaagggnnnnnnnnnnnnnnnnnnnnnnnnnnnnnnnnnnnnnnnnnnnnnnnnnnnnnnnnnnnnnnnnnnnnnnnnnnnnnnnnnnnnnnnnnnnnnnnnnnnnnnnnnnnnnnnnnnnnnnnnnnnnnnnnnnnnnnnnnnnnnnnnnnnnnnnnnnnnnnnnnnnnnnnnttgtatgtttatgaatatgtaggaacttagatccaacaagggcttattttaggatgccaggatcatttaacattaggaaatctgttgatgtagattaaagaagaaaaacgttttctcaatagatgtggagaagtctgaggctaattcccccaatagaatatgcatccctcatgcatgaataaataagagtgatcacaggctgtcattgattaagactactaga

SEQ ID NO: 119849 - DNA, 1000 bp, Homo Sapiens
gagaataactttcttctaccctcaccctcccttctggctagagccttaacaagaggtggcagatggacatctgagacccagagagactctggacgccccacgcgcccagccttggagaggcacagggtgtgtcgccagcctccacatcccatgcccggtgcgctcagctggggagcaacctcactgaaggtgggtggctttccctggagcccctcccacctcctcagcagacggaatcacacattacaaaataatccataaaaatgcagtataaaaattatcttcgatatgctacatccatggagagcctgccaccaggactcacagcggcctttagcttttctttaaaaggagaaaaaaaaaaagaccaaaaggaaaaaaaaaaacaaacaaaaaaaacccaacccaaatcctaacacctcagaacatgttggtaccaaaaggtggcacctgccagaggcgatagtctacctaacctgtttgggccacaagagactgcaatctgcaagaaatatccacagtgtgccaggatctgtgtccccctctcccaccccccaacccccactgctctgcccagggtgggggtgagggggatcctcttttcagactcacaaccctgtaggtttatacactttcccccctctaaggggagaggaagagactgtaggcgggaagggggagaaggcattttataaaaggacatcacttctaattctttttattcaaattaaaaaaaaaaaaaagcacccacatcagttgctatttttctctggtagctccctgagctgagttgctatgctgtcttctaactttttgtcctttttaggctgtgtcccaagattcagaagagctggagagggagttcctttgaacttccattgctcacaacaataactaagtgtgcaccaaagagaaagaccaggctgaggaggagagagggagagaccaagaaagagagacacagagagggcaagaggcagccagagtgcaagagaccaca

SEQ ID NO: 119850 - DNA, 1000 bp, Homo Sapiens
ctaatcagaacctcaagtgtatatataaaggtactgtacaatatataaacatttacaaccagtacatccacattttgctcagcattccaaggccacattgctaagtcagtatataatcagtacagagtttacttaggaagaaccacataggacaacatatgacatcaaagttatgtcacagttaacaaaaataggattcgttatcactaattgtggactacagggaaaataataaataatttctgtggtactaaattcttagtatttatcaagcctcctaattttgctctatttgaatagttacaataggtgggtaaatatagttctggatgaaaaggggatttcaaaaatctcactctgggaagcatgtcttatctacaggggctaattgagttgttgggttaaagagtttcacagtcagactcccagagggaaggacctggacctaatgtgcttcacaacaagatgaacccaggtgacagaacaagtgtgttcacacactccataaaatagttttattctcagaaggtgcctttatttatatagatgctactgaatgctgcttcagggaactgaaaaacctggatctattttatggaagttgttaacagtctccaacttctaagaaacatctttaactagacttttaaaaagaattctgaaaatgtgtacaagttaagcagatgtttagtctccctttcttgtttttaaataagaaagttagttaatgtagctaaaagttaaataagatccagtaagtactgtctacacatttgtcctcatttgctgggcataccctacacaggttgtttttaaacacccaagcttgtgcacctgctaccagaagagttggtacttggactgtgaaactggtttcatgattaagtccctcacataatctatataatatgtttacttttcaaatatgtattatgtattaaagactaatgactttagtagtaggtacagccaaaatatccagaaatagttggtggttttt

SEQ ID NO: 119851 - DNA, 1000 bp, Homo Sapiens
gtggccagagggtagactgcaatcaccaagatgaaatttacaaggaacaaatgtgaagcccaacatttaggttttaaaaatcaagcgtatgaatacagaaggtggagggaacttgctttagacgcagttcaggtgaagaaagacctggaaacttctgttaactataagctcagtaggggctaaaagcatgttaatcggcataaaaaggcaatgagatcttagggcacacagctccccgcccctcttctgcccttcatccttctttcaatcagcagggaccgtgcactctcttggagccaccacagaaaacagaggtgcatccagcaccacagaaaacagagccaccacagaaaacagagggtgactgtcatcccctccagtctctgcacactcccagctgcagcagagcaggaggagagagcacagcctgcaatgctaatttgccaggagctcacctgcctgcgtcactgggcacagacgccagtgaggccagaggccgggctgtgctggggcctgagctgggtggtggggagagagtctctcccctgcccctgtctcttccgtgcaggaggagcatgtttaaggggacgggttcaaagctggtcacatccccaccgaaaaagcccatggacaacgaaaagcccactagcttgtccagtgccacaggaggggcaagtggaggaggagaggtggcggtgctccccactccactgccagtcgtcactggctctcccttcccttcatcctcgttccctatctgtcaccatttcctgtcgtcgtttcctctgaatgtctcaccctgccctccctgcttgcaagtcccctgtctgtagcctcacccctgtcgtatcctgactacaataacagcttctgggtgtccctggcatccactctctctcccttcttgtcccttccgtgacggatgcctgaggaaccttccccaaactcttctgtcccatccctgccctgctcaaaatccaatcacagctccctaacacgc

SEQ ID NO: 119852 - DNA, 1000 bp, Homo Sapiens
ctgctcagttctttattgattggtgtgccgttttctctggaagcctcttaagaacacagtggcgcaggctgggtggagccgtccccccatggagcacaggcagacagaagtccccgccccagctgtgtggcctcaagccagccttccgctccttgaagctggtctccacacagtgctggttccgtcaccccctcccaaggaagtaggtctgagcagcttgtcctggctgtgtccatgtcagagcaacggcccaagtctgggtctgggggggaaggtgtcatggagccccctacgattcccagtcgtcctcgtcctcctctgcctgtggctgctgcggtggcggcagaggagggatggagtctgacacgcgggcaaaggctcctccgggcccctcaccagccccaggtcctttcccagagatgcctggagggaaaaggctgagtgagggtggttggtgggaaaccctggttcccccagcccccggagacttaaatacaggaagaaaaaggcaggacagaattacaaggtgctggcccagggcgggcagcggccctgcctcctacccttgcgcctcatgaccagcttgttgaagagatccgacatcaagtgcccaccttggctcgtggctctcactgcaacgggaaagccacagactggggtgaagagttcagtcacatgcgaccggtgactccctgtccccacccccatgacactccccagccctccaaggccactgtgtttcccagttagctcagagcctcagtcgatccctgacccagcaccgggcactgatgagacagcggctgtttgaggagccacctcccagccacctcggggccagggccagggtgtgcagcaccactgtacgatggggaaactggcccagagaggtgaggcagcttgcctggggtcacagagcaaggcaaaagcagcgctgggtacaagctcaaaaccatagtgcccagggcactgccgctgcaggcgcaggcatcgcatcaca

SEQ ID NO: 119853 - DNA, 1000 bp, Homo Sapiens
cttttcatatttcaactttatttaaaatatgaggttttatgtccagaagggagggcagttgcccatggaaggtgaagtgaggcacaatactattgggttgcgggccaagtacacagggttgcactgtgaaggaactgaggaggttctgggagggcctggtgacaacaatggatttggggagatccacaaaggaaattttcatttcctccccaggttagctattcagtgggtggattattcagtctttttagcaaggtcactgctccttagcaacatcaacaaaagtgccaaagctgaggacacagagaataccatcattgtcttttgtttctctttatgcctggatggggaaaggaatggaaactaatagcagaaaatgaaacatttctgatgttatcccttgccatgaagaatcacgggcttgtgtagagacctctttcttttctttttttttttgagggtctcactgtcaccaagctggagtgcagtggtgcgatcatagctcagtaacctccaactcctgggctcaagcgatcctcctgtctcagcttcctgagtagctgggaatacagatgtgtgccaccatgcccagctaattttaaaagtttttgtagagacagggtcccactatgttgctcagactggtctcgaactcctgggctcaagcaatgctcctgcctcagcctcccaaagtgttgcgattacaggtatgaaccaccacaccgagcagagacctgtttcctagcctgggaatgggtgatcaggaggcctgagtttaagtcccatcttgagctgcactaacaaattctatgaccctgctagagtcatttctcacctctggacctgtgttctcatctgtaaaggagccaggaaccaatgacgtcggaagagaagccttttcatgtctgattctatgacctgcaaactgcaaagatcccagcaggctccagaaaaacacggcagttagaaacaagggaatgtgggtgttaggtggaaaact

SEQ ID NO: 119854 - DNA, 1000 bp, Homo Sapiens
ccagttaaattcagttttattgttttccgttacatgttcactccctgttccttctcgccgcctggtctggtgggggcataggagagggagggaggactgaaggtcatacatttctgataatgtcgctttctaaagggctgtgacatttttgtacatcttttccatcttttagtagcaagtggttgctgcagaccagaagtgaaccaaataaagactcctgctctgtgcagctctcacaaagatcacagctgcttttgtacattccagtaactgcatgacacaaaacggtacctgtgagcaggaaacacattcacaccatgagacatgcacacaggcaggtgtccctgagcgaagttgtgcagagatctaggcctaggggcagtcagctcctgccgcaacacaacctagaaaaccaaggcgagaacggccccttgccttccagcagcgagggcagagggcaaagccacttccctgtgaattccaggaggattcaaccaaggctaaaatgccccgggtctgagagaatcgaatctttaattggtttccacatggggtgattaaggagaaggctgcttcccgcctgtccggagcctcggccttccctgacaggcacgcagtccctccgcccaggcccaggggacctgcttccctgcacacagtcgggcagggcaggacagcatgtgcccggctggctgctgctgcatggagaatttgacgagttttcattaacccgagagcagcctggtgagagccattttccgccccaatagcttcttcatgtttcacctgtgcacccgaggccaggaggaagtggtggcatcccctgcagacagcagcgcggtctgcggggggtgggtgtggacagcccatgggccaggctggcgtctccccacccttacaagcctgcagacaggtccacctctggcccaggaacagatgagccccgccctggaagagctggagaagaccctctgccccggggcctctggtgaaactgtct

SEQ ID NO: 119855 - DNA, 1000 bp, Homo Sapiens
cctcttcttgctctacatatgagataattttaatgtaatagacatgttgaggcatagtagggggtggtttgaaagaataaatttttgcccataaagagtaaaatattataaatatgtggatatggaaaatagagatgagtttttattatttaataccctaaaccacagctcaacactttttaaaaagaaaaacaaactgtcttctctaccaggtttcccagataatcccattctgaagcgcagacttgggaacctctaatgcttagagcagcacattgctattttcttgactaatttctcaaaaagtatgcaaattctaacttttgggttgtgttactccctcaattatacaaaacatataactgatctttggtaaaaaccagaaacattcatggtatttctttagcccttagccacctagcatgtgtgaattgtaaaaataaagttctctatttttgtgagtattatgtgaaaatactttactgatgatgttatatgccagccaaaattataccaagttgggttttaagagagttacaattactagtaatgctacaattactactactattaatgatagtaggaaaaatcgtaactacaaaagtatttttgaaagtacagaatatagtattctggccaaagttttatttaggatataaatttatatactcaatgcttagcattaaggcttcccagatttaagagcactggactgtttaaacttctttgttgatccaagaaaaaaaagcacagtattttttcttttatatgtatattatatgtataatatctataaatgaacaaaacttctaaggttatagaaataagctcagaaacaaaaagccaattataatcaaagatggctaatgcttcttgggcatcctgctacattccctcccatgctcatgacagacattatttgttgactatggccagaggcagcttcagacctctctccaaacagtgccctaggaagccacagtcagctagcaatggcaaa

SEQ ID NO: 119856 - DNA, 1000 bp, Homo Sapiens
aagctttagctaagatcattgacgaaggtggctacactaaacaacagattttcaatgtagatgaaacagccttctattggaagaagatgccatctagaactttcatagctagagaggagaagtcagtgcctggcttcaaagcttcaaaggacaggctgactctcttgttaggggctaatgcagctggtgactttaagttgaagccaatgcttatttaccattctgaaaatcctagggcccttaagaattatactaaatctactctacccgtgctatataaatggaacagcaaagcccggatgacagcacatctgtttacagcgtggtttactgaatattttaaacccactgttgagacctactgctcagaaaagaagattcctttcaaaatattactgctcattgacaatgcccctagtcatccaagagctctgatggagatatacgaggagattaatgttattttcatgcctgctaacacaacatccattctgcagcccatggatcaaggggtaatttcgaccttcaagtcttattatttgagaaatacatttcataaggctctagctgccatggatagtgatgtctctgatggatctgggcaaagcaaattgaaaaccttctggaaaggattcaccattttagatgccattaaaaacattcgtgattcatgggaggaggtcaaattgtcaacattaacaggagtttggaagaagttgattcccaccctcattgatgactatgaggggttcaagacttcagtggaggaagtaagtgcagatgtggtggaaatagcaaaagaactagaattagaagtagagcctgaagatgtaactgaattgctgcaatctcatgataaaactttaacagatgaggagttgtttcttatggatgcgcaaagaaagtggtttcttgagatggaatctacacctggtgaagatgctgtgaacattgttgaaatgacaacaaaggatttagaatattacataaacttagttga

SEQ ID NO: 119857 - DNA, 660 bp, Homo Sapiens
ggaacctttttttcagggtataaacattcattcaatccaataaagacattttagaaaaaagtcaacctatccaatttattttatttttcctaatacctgggctaaccaaaatatatttggtgatactgtaaaatactaagcattttcagtaaaactggcaatcaaatacagcttaaccttctttgcgtgacaactgaggattttaattggaaaagtattatagtctataaacaggaatacccaaaacatatttaaaccactcgagcactttgatttttccatgttctttgcatctagattgaaacacatcacaggaaatttcaaagaccaacgggctgaatatttttcatttcaacatttccagtggcattctacaagagaactagcactcacaatgagtcatctgaattttctttaaatcgtaactcatttttaatttctaaacaggttttacctccttatcttcagaatctcctccttccaatagccagtacagtagctccattatgaattgcagactttgcagaccagccttgggatgaatttcagccaacatttggaggaaccccttagttcagaagtgaacttagctgacagcatccaaatgtattatggaagcatcacacttaacacctctcctccgccgcgcgggcgcgcggg

SEQ ID NO: 119858 - DNA, 1000 bp, Homo Sapiens
ctaattccgagagactcaccaaagacatgaagagaaaacaaacaatacttttcttggaaatattgtaattgctggtacatttgttgttctggcataaagtagaaattgtcaggtaaacattgcttccttttggatcaaaaagaaatttaaccaaataaatgcaagaggtatgagggaagataatgggaaataaatgagatttgagaaatcagtggaggttcaagtggttttttttttcttttgtagttgataatactctgttttaaatcagtgagttttacttatatatgcttgtccttttttttttctagttaccagaacaatactcagtgaacttatgaatatatggtaaatattaaacacatcccacttggatgagaagatatgtgagtcgatgagtatagctaagtctaaagttagatgtgttccataaacatagtgtttatggagttggtgcatattcacttctcagtaagttacactttcttaatttctttttggtgctaggtgatattctgctaagtacacataagtatagtaatattggttagtaaactagtaaaatgctcccctagctattagtaaatagcttctgccttgtgtctccaaaatatctctaccattatcctgatcttgattgctattttatattaaaagaagacatgtgaatgtatatgaacatttaaaaaaattgttatttcttatttacctttaaaaatacagtgtgctgtactagtactactactaataaatagcatcattgactcatagatcacttactatcagccaggcagtcctaagtattccacttacattaactcacttaatgcatgcaacaatgctatgaggcactatttttatcatttgcatatttacatataaggaaacagagacactaatattaagtagtaagagacataaatgggagtcgaagttccatagtctattaatagttttggagttcaggatagtctctattactctaacctacctcattaag

SEQ ID NO: 119859 - DNA, 1000 bp, Homo Sapiens
gcccagtggggcgttgggacggtttccttggccctgtctcaacccagagaaagaagcctgcgggtgaagaaggtcttcgtgaaaggaatgaaaaaggagagggctttaggggaaggggctgcctggtggcaaagccagcgccttgtgtccccaggcaaacgtgacagagtctcgacgcacaggaagagccagtccgtctttactggagtgagtgcgggagacaaacagtttgcaacaacctttagcattgtcttcaccatttgataaaaagttcactattatatttattgtataatgaagaaaaacaacacattcagggaaaaattgagattaacttatttttcttaaaaggttcatctcaaggatggcaacaaagtccagcttgtgccgccaaacggttttacatgatcaaaccgtgtacagcttcttgtgtgaactgttgactacaaacatttaccaaatacataaatctcttgtaagaaaagccattttgaatatagcaaagcagtgtcttcttgcacagcaaagtgaagaaagtttctacagagaaatagaagttttacatttgtaaaatctttttcacattctaatcatctagcttaagatccgatgccaggagttttcttcttccttatttcctatgtatttcttgtgcgcatgatggttaatacagaaattatgttgatgcattactagttatccttctagttaaaggaaagggtaaaacatgtattgttcttgtagaacaaacccctgatttagtctataacaaaatggacataattgggctcacaagatgaagttttgattgggaccacctgtgtacacacaacagtgacttccactcgcggtggagtggccattagagtactgaggaaggacagctgttggaaactgtactttaaccagtgcaatttaagctttttttgcttttgttctttagtaataaaatacttctggagggataaaattttcttgcaatggtgtctcacacaaaaca

SEQ ID NO: 119860 - DNA, 1000 bp, Homo Sapiens
gaattcaagaccagcctggccaacatgacaaaaccctgtatttaccaaaaatacaaaaaaaaaaaaaatagctgggagtgatggtgcatgcctgtaatcccagctatttgggaagctgaggcaggagaatcgctcaaacctgggagatggaggttgcggtgagccaagatcgtgccactgcactccattctgggcgacagagtgagactgggtctcaaaaaaagaggccgggcgcggtggctcatgcctgtaatcccagcactttgggaggccgaggcgggcggatgacaaggtcaagagatcaagaccatcctggccaacatgatgaaaccccatctctactaaaaatacaaaaattagctgggcgtggtggtgcacaactgtagtcccagcggctgaggcagaagaatcgcttgaatccaggaggcggaagttgcagtgggtggagatcacaccactgcactccagcctggtgacagagcgagattctgtctcaaaaaaaaaaaaaaaagaaagaaagaaagaaaaagaaataaaataataatgggagaggattgcgagggatataaacaaaattagtcagaagttgataccttcaattgttgaagttggtagctgtgaatgtaagatttactatactggccgagcgcagtggctcacacctgtaatcccagcactttgggagtctgaggcaggcagatcacctgaggtcaggagttcaagaccagactggccaacatatagtgaaaccccgtctctactaaaaatacaaaaattagctgggcgtagtggcgcacgcctgcagtcccagctacctgggaagctgaggcaggagaatcgcttgaacccaggaggaggaggttagagtgagctgagatcatgccactgcactccagcctgggcgacagagcgagactccatctctcaaaaacaaacaaaccaaaaagatttactatactcatttttctactttcgtacatttttgaaatttccaataata

SEQ ID NO: 119861 - DNA, 1000 bp, Homo Sapiens
ctagagagagaagaggggaggggcagttagagacctaggtcgccatccttagtaccaagctccaccctgcctcaccgtccctcctaagagcctctcccagcctcaccactgctggcaggattcaagtcttaagaaaactgggactccccagccagactcagggcaggaggctgccaatgaagcctccagcaccccatcactcctctggactcctaggacccccaccttcaaaaccacaaagatacaatgataaaccatcacatttgtatgtgtgccgtgactgtgcttggggagtaggggtgggggtcaccctgattctaaagctcttgcccctgggcggcctggccccgttctccccccgagttaggaaggagttaacgcttgaagaggagggagggaagaggacataagctgggggcagaggaaactggggtcaacaggatattcaaagccggccactcccccgccccctctgcttccgctcccccctccaccccattctgccagcagccactgcccctcctccacccaaacaatcccagggccagggacccaaggcagggggtgcaaagaagagtcacaaatgctgggcacagtaggaggtgtctccctgagatagggggagataccctgaatacagggagaagagtccccagggccccaaaagcccattattctgggtaccccccatctggggagagatggcatgacaaagggggtctgttcccatcaatgctctgtctgtctggcctcaatactatgtccgggttactaacccctccccttctgttattcagctccaagagggcagccaggaggggtgacccagacagcaggggcagccctcactggccaaatcctccccagtgtctggctccatgcccatcactgtaggcagaacagggctgggttgggtaggggctatccatgtccaaagcctgggcagctaagggtgttgggtgcaagataagaactatgaccaggacaatcccagattccc

SEQ ID NO: 119862 - DNA, 1000 bp, Homo Sapiens
cagactgcttgagtccagaagtttgaggccaacctgggcaacatggtaaacctccgtctcttaaaacaaacaaacaaacaaacaaaaattagctgcgtgtggtggtgcatgcctgtggccccagctattcaggaggctgaggtcggaggaccacctaagcccaggagacagaggttgcagtgagccgagagtacgccactgcactccagcctgggtgacatagtgagaccctgtctcaagaaaaaaaaaaaaaaattcatacaaataaattgttaggattaattagaaagtttataagtctgctaaatacaaacatcaaatgtatttgtggacctttgctctggaactttatgaaaatacaggtttggctgggtgcggtggctcatgcctataatcccagcactttgggaggttgaggtaggtggatcacctgaggtcaggagttcgagaccagcctgaccaatatggtgaaaccctgtctttattaaaaatacaaaaattagctggacatggtggtgcatacctgtagtcccagctaaactcgggaggttgagacataattgcttgaacctgggaggtggaggttgaagtgaatcgagatcacaccactgcactccagcctgggcaacaaagcgagactccatctcaaaaaataaataaataaataaattaaattaaatacaggtttggggctccacccccatttctaaatcagtagctccagggcagggctcaaggatgtgcatttcttttttttttctttttttgagatggagtctcactctgttacccaggctggagtgcagtggtgtgatctcggctactgcaacctccgcctcctgggttcaagtgattctcctacctcagcctttcgagtagctgggattacaggagccagccaccatgcccagctaatttttgtgtttttagtagatacaggtttcaccatgttggccaggctaatcttgaactcctgacctcaggtgattccccggcctcg

SEQ ID NO: 119863 - DNA, 1000 bp, Homo Sapiens
aacataattctcacggttctgtcaaatgagttagttgcgaggtgtgcagttgatggaaaggctgtagaacccttctcgagtgctgctgcagaaagacgggccctcccacaggcgtccgaccaagaatcgagggcacatcagaggccctggctggagccctggggtcatgaggaagagtttgaaagaaaaatccaacatttccagatcttccacagataagtaaaatgaccagaaggagcaacgaaaagaaaataggaaatcatatcttatttttttgtcccatgctcttcattctagaaaatgtgaaccaattagaacaccacaattacactgggtttataaaacatcttttagttaaaaatgaggcctttccgggctgtcaacatggaagtgtcacacatgaatacacctaagttaaaacatgaaacatgactgacaaaacgttattgctggagagcacctggcaactgttttacaagaaataaatatgactattgaaaccataacagctctctactagggttgaatcctggtaaagaaagtcccttggattagctgagactttgagttaggatatgcaaaatgaactgggagctcagttttggaggagctgatgtaggggtggagggcgacggggcataaagggctggggagatgaccagaggtgggatggggtggcgtggccagggaaactgtggcaagggccttcaagaaggacgtctcagagttgggcgagtcaaagctgaggtcatgcgtgctgctgtgatgtaaacctgccgccacttccatctcctgcagaaatcttagggaggtcatggggcctttaatagggtgtggaaggagttctgagcaatcctagctagagcttaaggcaggccccagtagatgcctgggttacacaagactattaacatcaaggagtttcaaatacacataaacacattcttccctataccattacctcgaaatgtacgtattttttaatgaggagatggagata

SEQ ID NO: 119864 - DNA, 1000 bp, Homo Sapiens
tcgactcactatagggcgaattgggccctagatgcatgctcgagcggccgccagtgtgatggatatctgcagaattcggcttgccattgcactccagcctggacaacatagcgagactccatttctaaaaaaataaaattaaaaaacttatcaagttgtacactttatttttttatttgaattggttatccccgtcccccccgtagccgtattgcatgtcaattacatctcaataaaactgttttattgattgattgattgattgattgagatggagtctctgttacccaggatggaatgcagtggccgatcttggctcactgaaacctctgcctcctgggttcaattcattctcctaccccagcctcccaagttgctgggattgcaggtgcccgccaccatgcccgggtaatttttgtatttttagtagcagtggggagacggggatttgccatgttggacaggctggtctcaaactcctgacctcaggtgatccacccgccttgacttcctgaagtgctgggatcacagcatgagccaccgtgcctggcctcaataaagctgttttagaaaattataaatggggatagtcatacctacctcatagcattaggattatgattcagtgtgggtttttccatttggacccagacctgaatttcttgctgacggaggatgggacactgcaccaccctgcacccatgtacccaagctgaaaccccatgattcccccttcctttaccgctacccccacgtgaatcactgtcacttgttgctttgatggctgcagtagcttcttttttttttttacatttaattatttatcttttttattttttaaattttccaccccagaaaatccttaatgcaccagcccactctgcttccactttcctccttctatgagccttttccctttcctccatagggcagtaaggtgatctattttgttgttcagttcattgtttttgtttgtttgtttgctttttttttgagatgg

SEQ ID NO: 119865 - DNA, 1000 bp, Homo Sapiens
aaataatcatacgttaatcaatgaagaaagggagccacacatttaaaaaagcagaaatcgtacaggccacttcctcagataaccattctaactagggtcaaattatacatcaggactgaaaccacaaacatataggaaataagataaagtcttttggtttttttgagacggagtctcactctgtcacccaggctggagtgtagtggcgcgatcttggctcactgtaacctccacctcccgggttcaagtgattcttctgcctcagcctcccgagtagctgggactacaggcgtgcgccaccatgcctggctattttgtagtttagtagagatggggtttaccatattggccaggctggtcttgaactcctgacctcgtgatccacctgcctcagcctcccaaagtgctaagattacaggcgtgagcaccatactcgtctgataaagtcttttcttaaatacagatggaaggccttcatgtgccctgggggtcacgtcctgaatcctcatggtggcccccaggcctggaagttggccctgtccctgccagccccagcttgcatgacttcaggctccagccatttccttcatagcctggcagctttgctcctgccttcgcagacaggaatgctgtccttccagcttctcctacccttcgggtcagagccccaaggtccccacccctggttagggctgttttcactcgggcgggggctacactccttggtaactgtcacaactgcccttaactaatgatttgtgcattgccacctgaggcctgtcccccatgagaacagcagcagcgtgaaggcgaggctgtcagctgaatgcctgtgtctctggggaccagctcaggctctggccatgggggatgttgatggagtgaccattaaaaaaaaaaaaaaaatcaaaactctgtggaatgaggcaacaactgtccactgttaccctttgctgggcaccccacatgcctgctaggctctcgctgcccacacgaaacc

SEQ ID NO: 119866 - DNA, 1000 bp, Homo Sapiens
atgtataaacaggtaccagttttgattttatttaatcatttcatacattaacatacatgacacatcaaaatgagaaatgcacagtttaaccgttcaacagctggccttacttcaaaagaacactatattcatattaaacatttacagtctttccatctaactttacacatgtcctaaatcattttccagcacttctcacatagaagtctagttttgctctttaaaatcaccatctgtatcacccctagtagaaacgagggtttccccaattacatgctgaagagagccagccaccaccccacctaaagacatccaagcagctccagagcctgcctccgaggccaccccttcgccacggcagtctcgattccaagaactgattatctgacactagtgaaccagcactaaaggctgtaggatgtgactacatcacagttccagaaggaaggggaccatggccaagagaagccctaaatgacagaagctcattaaaaccaagtcccccaaacctcctgaaacatcgttagcaaggagctactgctttcctttcttaaacatgttttgggcatgaccacactctggaagtggtgaactgttacacatttggtgtgtgtgtacataacatcaaaaactactgtgtgaaacttgagaatgtctgattaaagatttcaatgtatatctaaaaactaactcaaatcgttgaccagcactttcccagtatcataacaatgcggctgaccctcttctgccttcactttacaccccatcatagcacattatttgtgcacaactagtgaggtctgtgcggctcatcatccccataaccaagtcggtctgtgttgagtcatatcattctgtgctggttttagaagtcaccataggaaacatgaagtcacatcctggtcaaaaaactgtccatttctcaaaaacagagaaaaacctgagatacgaggcagcaactagcgacacttacaggaagggaaagaacaatgacaacacc

SEQ ID NO: 119867 - DNA, 1000 bp, Homo Sapiens
gtatgcagtatattttactcccatgaaaataaaacacatttgtttcatatttgctgaaaagtaaaacaataatattgtacgaaatgttatacacagggtaggttgtacatagcagtttcagaaacatcattgcatccaccacacaaactattctaaaactgatattcacacattttttataataataataatatgttagaaacatacagtgtggcatttagtatatacactcccttgctcgcaagcgaaaaatcctaatcgcttctgtataacatgctttattttaaagcctaacctttaaaaacactgttgtgatattactaacaactgcttttataaaattaatttgacatttcgatatatatacatcctttcagtcatttaaatgttaacaatgctaaacttaaaaaataacaagcttatagtaatgttaaaatgtcatatccagtcaaaacatttgtttgtgtatgtgtccttgcaactgttagaaatacttgtagtgaaagatgtcagacactgaggacatccctttgaaatcaaaggagctctctctttgattcagtggtttccttttctctatatagcttctctttctctccctttctttagtgcccacgaccttctagcataattcccagtctttcaagggcggagttgccccatccggcaaggtcctaggatcccggcgctgtgggtgcggctcacacgggccggtccactgcatactggcaagcactcaggttggaggccggtttctgcacgctggcgtagccgaagctggagtgctgctttgctttcagtctcaggctggccaggctcgagttacacgtgtccctataaacatacggaggagtcggcggcgcgtaaggacaggcaggcgtcggcaccgcggaattcagcgacgggctactcaggttgttcaagttattcaggctgttgagactggagcccgggacgcctgtcactgctgagggcaccatgctggacgacatgctcatgg

SEQ ID NO: 119868 - DNA, 1000 bp, Homo Sapiens
tttttttttttttttttttgagggaggtaaatgtattcagagcacatggcgagtaagaggcaaatcttctgccagcaagtccaggatttttttcaccagaggacattgcttggtccccagagctcaggaccctgtgttttgtctcactcccacccacagagctcctgtatccaggcatcaactccacctcccactcctggaggccgaggcaggaggatcacttgagcccaggagttcgagaccagcctgggccacatagtgagaccttgtctccacacaaaaattttaaaaatagctgggcttggtggtggcatgtgcctgtagtcctagctcctcgagaggctgacgttggaggatcactttgagcccaggaggtggaggtgcagtgagcagtcatcactgtactccagcctggtgacagagcgagaccctatcaccgccccccgccccaccaaaaaaaaactgagtagacaggtgtcctcttggcatgataagtcttaagtcccctcccagatctgtgacatttgacaggtgtcttttcctctggacctcggtgtccccatctgagtgagaaaaggcagtggggaggtggatcttccagtcgaagcggtatagaagcccgtgtgaaaagccatactccaaggggctccaagtccagcgcacagtcccagaagggcccagcaaggcagccagggcggcacaggcaccaggtcccaaccttcttccctgtttgcccactctcagaccccggagttcatcatctcggtgctgctggccaatatgtactcatgtgggaaccagaacacactgatggaggagttggcagagcaggcacagcagcacgacgagatgctgcacatgcaccacgcgctgaaggaggcgctcagcatcatcggtgacataacaggaccactgtcaccatgcccatgcccccgcccgtggacgacacctggttgtcagagcatccctgacgaacacaggtaccaaagactgcccccca

SEQ ID NO: 119869 - DNA, 1000 bp, Homo Sapiens
catcgtgatgtcttatttaaggggaacgtgtgggctatttaggctttatggccctgaagtaggaaccagatgtcggatacagttcactttagctacccccaagtgttatgggcccggagcgaggagagtagcactcttgtgcgggatattgatttcacggaggatggtggtcaagggacccctatctgaggggggtcatccatggggacgagaagggatttgactgtaatgtgctatgtacggtaaatggctttatgtactatgtactgttaagggtgggtaggtttgttggtatcctagtgggtgaggggtgactttggagttgcagttgatgtgtgatagttgaaggttgattgctgtacttgcttgtaagcatggggaggggattttgatgtggattgggtttttatgtactacaggtggtcaagtatttatggtaccgtacaatattcatggtggctggcagtaatgtacgaaatacatagcggttgttgatgggtgagtcaatacttgggtggtacccaaatctgcttccccatgaaagaacagagaatagtttaaattagaatcttagctttgggtgctaatggtggagttaaagactttttctctgatttgtccttggaaaaaggttttcatctccggtttacaagactggtgtattagtttatactacaaggacaggcccatttgagtattttgttttcaattagggagatagttggtattaggattaggattgttgtgaagtatagtacggatgctacttgtccaatgatggtaaaagggtagcttactggttgtcctccgattcaggttagaatgaggaggtctgcggctaggagtcaataaagtgattggcttagtgggcgaaatattatgctttgttgtttggatatatggaggatggggattattgctaggatgaggatggatagtaatagggcaaggacgcctcctagtttgttagggacggatcggagaattgtgtaggcgaata

SEQ ID NO: 119870 - DNA, 1000 bp, Homo Sapiens
catcgtgatgtcttatttaaggggaacgtgtgggctatttagactttatgaccctgaagtaggaaccagatgtcggatacagttcactttagctacccccaagtgttatgggcccggagcgaggagagtagcactcttgtgcgggatattgatttcacggaggatggtggtcaagggacccctatctgaggggggtcatccatggggacaagaagggatttgactgtaatgtgctatgtacggtaaatggctttatgtgctatgtactgttaaggatgggtagctttgttgatatcctagtgggggaggggtggctttggagttgcagttgatgtatgatagttgaaggttgattgttgtacttgcttgtaagcatggggggagggttttgatgtggattgggtttttatgtactacaggtggttaagtatttatggtactgtacaatattcatggtggctggcagtaatgtacgaaatacatagcggttgttgatggatgagtcaatacttgggtggtacccaaatctgcttccccatgaaagaacagagaatagtttaaattagaatcttagctttgggtgctaatggtggagttaaagactttttctctgatttgtccttggaaaaaggttttcatctccggtttacaagactggtgtattagtttatactacaaggacaggcccatttgagtattttgttttcaattagggagatagttggtattaggattaggattgttgtgaagtatagtacggatgctacttgtccaatgatggtaaaggggtagcttactggttgtcctccgattcaggttagaatgaggaggtctgcggctaggagtcaataaagtgattggcttagtgggcgaaatattatgctttgttgtttggatatatggaggatggggattattgctaggatgaggatggatagtaatagggcaaggacgcctcctagtttgttagggacggatcggagaattgtgtaggcgaata

SEQ ID NO: 119871 - DNA, 1000 bp, Homo Sapiens
catcgtgatgtcttatttaaggggaacgtgtgggctatttaggctttatggccctgaagtaggaaccagatgtcggatacagttcactttagctacccccaagtgttatgggcccggagcgaggagagtagcactcttgtgcgggatattgatttcacggaggatggtggtcaagggacccctatctgaggggggtcatccatggggacgagaagggatttgactgtaatgtgctatgtacggtaaatggctttatgtgctatgtactgttaagggtgcgtaggtttgttgatatcctagtgggtgaggggtggctttggagttgcagttgatgtgtgacagttgaaggttgattactgtgcttgcttgtaagcatgggggggggggttttgatgtgggttggggttttatgtactacaggtggtcaagtatttatggtaccgtacaatattcatggtggctggcagtaatgtacgaaatacatagcggttgttgatgggtgagtcaatacttgggtggtacccaaatctgcttccccatgaaagaacagagaatagtttaaattagaatcttagctttgggtgctaatggtggagttaaagactttttctctgatttgtccttggaaaaaggttttcatctccggtttacaagactggtgtattagtttatactacaaggacaggcccatttgagtattttgttttcaattagggagatagttggtattaggattaggattgttgtgaagtatagtacggatgctacttgtccaatgatggtaaaagggtagcttactggttgtcctccgattcaggttagaatgaggaggtctgcggctaggagtcaataaagtgattggcttagtgggcgaaatattatgctttgttgtttggatatatggaggatggggattattgctaggatgaggatggatagtaatagggcaaggacgcctcctagtttgttagggacggatcggagaattgtgtaggcgaat

SEQ ID NO: 119872 - DNA, 1000 bp, Homo Sapiens
gatctgagttatacattcaagtaatacttattgagcaactacaggcactgttccaggatccaagcaagacttctgctctcagggaagcttacaccctctgtgactcagacagtgagcaagaacacaagacgaagaaaaagataaacatacctcatagtaagtgctatgatgacgatgaaacagggctgtgagagagtgcctgggtccacttcagattgtgtggttaggaaaagctctctgaggaggggtgcgagctaagatctaaagggtgattggagccaaccctgaccttgagaagttttggaggtagagccttccaagcagagggaagagtcaaggatgactaggggtttggtacttcttccatatctatggctctttgggggtgtgggggcagggtcaggagactcccaggtgtccctgaagcagagcaagagacggataagagagaggtgtgttctccagaataacagggagaaattctagaggtgttgacaaatgaagtggcttttaaaagatgagtaaagattttgaaaggtagattatagaacagagaaagacattccacgtaggaaaggggaagaatgggaggcacacaggagtcattggctatggcaattctgaaatccaagtgggcaaatattttgagggcctcctagtctggtcgggaattattcattattttctgattcaggtccctggaagtagctcccttgcctgttgttctccttatcccttgcttctgccctcaaagaggttcttcacattttagtgtccctgctgatgtggggcttgaggcataaacctctttgggggctgagcagccttctcaactcttaggtgtgttaagagcctgagcattctctaccatagattattgaaagcccaagagccatttaatgtcttcaacagttattgttttctgttagtctaggctcatcattcccctggcaataaaacactctaaaaacctcattatgggccgggcacagtggctcac

SEQ ID NO: 119873 - DNA, 1000 bp, Homo Sapiens
aagcttgtaaaatgtcatttcattacatcagattttcgttaagtaaaaaatgactactatgtcatgagagaagcaggaaaaaaagtcaacttagaagggtgaaaaaaaccacaatttagtcctagcttcttggcttataaaatgaaattatggctctccaagtgtgttttcctcattttaattaaaaaggggaatgtgtgtgtgtgtgtgtatgtgtgtgtgtgtgtatgtgcatgcacacatttgtgtactcaaagtgtgggcactccttccaggggtgcatgctatctacatacaatttaccccaataatatcatctcctgtgaaaatctgataacttacaaatcccttagttactgctacccaaaaaaacgaatgaagaaaatgccaatggttaaattttaaggtatacagtattcctcccttatctatgggggatatgttccaagacttccagtggatgcatgaaactttagatagtactgtgcatatactatgttttttcctatacatacatacctcataatgaagtttaacttacaaattaggcatagtaagagattaacaacaacaggtaataataaaacagaacaatgttaacaatatcccagcatcattacccttgcactttggggccattatgaactaaataaaggttactggatgacaagcactgtgagaccatgacagtcaatctgaaaactgagctcgctactcagtgactaatgggtgggtaatgtagacagcatggatatgctggcaaaaggttttacatcccaagcagaatggagtgagatttcatcatctactcagaacagcgcacattttaaaacctatgaattgtttctggaatttttcatttaatatttttggactgtggttgaccatggatacctgaagccatggaaagtgaaattgtggatggggttgtacttgtaactgtctctttctgactagtaagactcttctaaagaacagtaatatacttggtaaacagaca

SEQ ID NO: 119874 - DNA, 1000 bp, Homo Sapiens
gatcctcccatctcagcctccctagtagctgggactacagctacaccaccacacccagctaattttttgtgtgggtttttttgtttgtttgtttgtttgtttgtttgtttgtttgtgtagagacagggtttttccatgttacccaggctggtctcgaattcctgggctccagtgatcctccctcctcagcctcccaaagtgctggaattataggcaagagccactgcacctggcttgattacatttcaacatgagatgtggacagggatgaatatccaaactatataattccacccctgccccctcacgcaaatctcatgtccttctcacattgcaaaatacaatcatgcctttccaacagtaccccaaagtctttttttttttagatggagtttcactcttgttgcccagggtggagtacaatggtgccatctcagctcactgtaacctccgcctcccaggttcaagccattctcctgcctcagcctcccaaatagctgggattacaggggtccgccaccatgcccggctaatttttttttttttttttttttttgtatttttagtagagacgagttttcgccatgttggccaggctggtctcaaactcctgacctcaggtgatctgcccgcctcggcctctcaaagtgctgggattacaggcgtgagccaccacgcccacccccacagtcttaactcattacagcattttggtcacaaccatcgaacaagtctctaagaagttccaaactttccctcatcttactgtcttcttccatgccccccccaaacgcttccaagctctgaccgttggggccctagatctcctcaaccagcatatccagcctcaggtccacaggtccaaaccccaccacacacatgcccttagctgttcacaagcaccttcgtgcttaccagaaccgagccagccagctgcccaccccttcccccacagggggccaggcccgggcctccccacctgggttctgtacagcgatgg

SEQ ID NO: 119875 - DNA, 1000 bp, Homo Sapiens
gatcccggcctgcaggagccggcacccaggccgccagacagctggcaggaggtgcgggacgagccgccccccaggccagaggagcccttgatggagctggaggaggtgaactggcggatggaggtggtcatggtggcggcggcgggaggcaggcacacaggagaagggctggaaagaagaggggccccaagtagtgtagggctgccggggttcacaggcttcctttataggccaccaagtgggcgtagcgattacaacaggctcctctgtttcccttcccctgggctttcatcaccacgggccacctgccagctcccaggtggctggggaccccctccccacccatcatcaggaatttgcctcatttctccaaatcctcgtgctgggtgccacgcgtgtgcgtgccactgctctgaggcccgtcacctgtgatttgggcgggccctccagctatgctttcccatgacctaatatgggagaagaggagaatacaggacttcaccgtccccaggccctcccaggcagccaccatcccagcccggcccacctcaaccctgtctggtggggaaatgggttgcagtgtcaggtgaccacccccctgaagttgctgtctttcaccccacactgctccacccaaggtgctggcccggggctgggtgctgaagagaaagaggggaccgagagcctatcctgccttggaaactgagcccaaacccaccaggcccacctcacagcatagaaatgccatcaaggctcggagaccaacccacatcgcagataaagaaattggggctccagaggggtgcagtggccccttctgcagagtctgacacccaggaatgcactctaggggctacagttccatccagtcagcttctgaccctgccccatccctagaagcccttgctaacccagtctcctcgtgtaaacctttccccaggtttacactccaggctggggtgggcaaacaggggctcagctataggatgggggaaaggtg

SEQ ID NO: 119876 - DNA, 1000 bp, Homo Sapiens
gatcaagccactgcactccagcctgggcgacagagccagactctgtctcaaaaaaaaaaagaaaagaaatgtagaattcgaatctaagatctgagaataaacaaatgattcttactattaaaggcaatttaaaaataagaaaaaagcaagcttcctaaatgttgtgataaatattatgacttccctgtagtgttatatctaacataaaaactgaaaggttaatgagttatgtctgtttgtagttctaaattccattgtagttttccttttttgaaagaagttttggttcaagagatcttttgtacagcatagggactataatagttaattatgacacattcttaaaaagtgccaagagtggatattaggtgttctcaaatcgctttttcttatcactcaaaagtggtaactgtgcagtaatacatttgtaaattagctagatttaatcattccacaatgtacacatactttaaaacatgttgtacacgatgaatacatacaataaaaaagaaattagctgcatgccagatacaagagaaaaaacatgaaaaagaaagaaattctgttttcaaattattttgtgttgttgttgttgttacagggtctcactttgtcccccaggctggagtgcagtggcgtgatctcacctcactgcagcatcaccctcccaggatcgagggattctcacaccttgggacccccaccccccagcagctgggactacaggcatgtgccacaggcacacgcctgagtaatttttttgtatttattgttgagacagggtttcaccatgttacccaggttgggctcgaagtcctgggctgaagcaattcccctgccttggtctcccaaattgctgggattacaagcgtgcaccactgcacccagcccagaatattttgcatacattttgcctgtcatttgtctatttataaattctacaacagatattcgtacatagatatgttgtacaaaacacaatattttttcatttcttctg

SEQ ID NO: 119877 - DNA, 1000 bp, Homo Sapiens
gatccaacacctcaaatatttctttattctgggaacatctgaattcttctcttctggctatttcgaaatattcagtagattattgttaactgtagtcatcttactgaactatcgaacactaaatcttattccttctatttaactgtatttttgtatccattaatcaacctctctttatcctcctctacccttcccagctctggtaaccaacaatctaatctctatctccttgagatccatgtttatagctctcacatatgagtgaaagcaagccatctttgcctttctgtccctggcttattttaattaatctctagttccaattaatgatagttccattcagggttgctgcaaatgtcaggattgcatttcttttgtatggataaatactattctgttgtatattcatatgtcacatcttgtttatccattcagccactgacgaacacataggttgattcccaattttgtctattgtgaaataaccagtatttcacaacactgcagtatttcacaacactgcagtatttcacaaggctgcagtaaacatgggagtgcgggtatctcttcaatatattgatttcctttcttttggatatatacccagcagtgggattgctggatcatatggtagttctatttttagttttttgaggaaccttcatactctgttccatagcagctatactaatttacatttccaccagcactgtacaaaggttgccctttctccatatccttgccagcattcatttttttttgtctttttgatacaaagccattttaactgtgctgagatgatgtggttttgatttgcatttccctgatgaaaagtttgtattgttttgattattgtaattttgtagcaatgtttgaaatcaagacacatgggtccttgaattttgttctttttcaatattgtttggctatttgggacctcctacttttccacatgaattttattttatttatcttattttggacaggctttcattctatt

SEQ ID NO: 119878 - DNA, 1000 bp, Homo Sapiens
gtctggttataatgcagaatttgtaaagaaattaagtgcaaaatcaaaaagatccaatcatctgttaacatatattgatccttcaaggcgtatgtgattatccacactatgttgaaaaaatgattctatataagatgtgagactccacagcaaagttaccctacaacgtcctgtgtgccagaaaagaataaacttaaaagatgttttagaaagcaaactgcaaacctcaaatttatgatctctactccaccagcagaaattatgttatatatgttctaatgttatattcatattcacagttatatacattaaaacatatataacatactccaaatttggaggaagaaaatttgcatatcaacactaactctgtaacctccccaacactgaaaccaccatcaccctgacttccgcagagcagctggttagacctcgaggcctctctatgatcctataatactccatttctctccttgagatcattcactgcaccttggaggtgtttctgtacttttgttacaaaataccatacctatgatgggaggatctcatagctgctgagtccatctaagggtgtaataacaagaagtccacagtgaaaagggacagtcattcacagagtgttgtttactcagaaggggcagggtctcacttgcagacaaaagagacagatgagacctgtccattgtccaaaggcaatacaaaccctgtgtatctctatgtcaacaaaaaagaactcctcaactactatacagtgacaaaaaactgacacatactactaccaaaaataaaattccagacgttaaccacttattctgaattctaagtaaaatccagctgtgatgtcactcttgaaacaaatagcacttaaaactgtggtctggaacatcacaatcctatggaatcaccggggctgagatttctctgctccttctggttccattcttctgcatggcctccatttttctgtaagaataaatgcgctgggcgtggtggctca

SEQ ID NO: 119879 - DNA, 1000 bp, Homo Sapiens
tacatatgtgtgaatgtattgtgcatgtgatgtgtgcagtgtgtggtgagggagggggcaggtcccaggtgtgtggagtcgatggtggaggagggacttgaccctctcagacccaggcagcagacttggggcatctggtctttgggaggagacagccagggcactgtgctctggtgggctagggtgagcagggtagtgtgtggggacgcctgccctccagagggggaacagtgaggaaactgttaaggaagcctctggggaggggcagttgtccccagcctgccctaaggccacagagctgcagagggcatggcatggcatggcccagactctctagggcccgcagtgaccacagggcaagaatcccttcttcacagtctgggggtgcaggctgttcctgcagggagggaaacttctgcccaccagcaatggcaccccttggcccagcccctcaactccggcttctcagggtggggctcatggccctgcccacccctccatggccaggggcacagctgctcctctgacctgcagggtgacccctccctttggggaccccctgccctccctcccgtgctgtcagggggcagctcttgcaaccccagtgaaccttcccttctccctccagccccaccctgcccgcctggcggttctcacttataggacgcgtccgcagagccctatatggccctttcatacccaaggccttctgggctgagttacttttctcagggacaagagaaccgcttcctggcacgagggcacccacctgttcaacctcatcccccacgtccccctaccacgccttggaaggagcaatgggaacaaggttacacctgtgtggctctgaagcggggcttttcacacttgcatacatggccgtgggacagtcctgcagggctctctaaagcacctgcctgcccctcactgccgccacacccaaagctgcatctccgggaagcccctgcctgggctcctcttgcctgcagggtcaccagag

SEQ ID NO: 119880 - DNA, 1000 bp, Homo Sapiens
gctaatttttaaaaatctttttagagatgggggaggtctccctatgtggcccaggctggccttgaactcttgggctcaagtgatcctctcgccttggcctcccaaagtgttaggatggcaggcttgagccaccacgcctggcagctccatctgtgttgactcctgaagcccctcatcttggctaatccggacaggcttgctggggaccccatctccccttggagactttgggatgtggctggatgtccaagtggccggggtcctccacagcccccagcttcccagggcgggaggcaggctgtgtcctcggtgggcactgacagtgaggctgaaacgtttgcacttcacatttccacatttaggggcattttgttgttgactcattcaaagctcttttaagtcgcttaatttgctgctcagagggaaatgaaaagggagccattttccctgatttgtttgcctcatcaacttttcaatcaataaaaaagtgcattttgctcatcggatgcaaataggtccatctttcctaatatgttgaaatatagtgattcatcagccatttcatttcatctggaagctgaaagcctaatggcgtttggagagaactcctcactcgagaagagtcggtaataagtcagcatgaacgcacaggtggggtggctctgcgtgggtgcagaagcgtggcgctgggtgacgtacggaaacggggacctgcagcggctgggagtgaaggctgtggccccgacgccggctcaccggtgaccagtgcccaccggggtttgccctcccccagaggccacacccccacagacccaaactcagggtccctgccaggctggactgcagatgccccgccagggatgcaggtaggggacttgaatgaggcgcaaactcctcgtcaaaggacaagcacgtccccgtccaggcagccactgcctgcccctcacagttgtagccgctgccgcctggtatggggggtcacgtttggcaccgtgagctt

SEQ ID NO: 119881 - DNA, 1000 bp, Homo Sapiens
cttttctcagagtgataattttaaaaactgaaattggtcttttgcactcgcagttttctcttgcttccttaaacatttgcgaaatatgagaacaatataaataggttctcaagctctgagcaaacccttaaccatgtaaataagccccataaagaacaaagcctggccgggtgcggtggctcacgcctataacaccagcactttgggaggcagaggtgggaggatcgcttcagcccaggagttcgagaccagcctggggaacctagggagatcctgtctctacaaaaaatacagtaaattagctgggtgtggtgggggcacgcccgtagtcccagctactcgggaggctgacgtgggaggatcacttgaacctgggagtttcaggtcgcagtgagctgtgattacatcactggactccagcctgggtgacagagcaagaccctgtctcaaaacacaaataaataaatacatacataaatacataaaataaaataaataaaagtagagtagagttggttcattgcaacagatactgtctggcccacaaagccctttacatatagcaacttacagaagaatttgtgcccctgtgatagatagcattggaggtttccgcctagggaaagctgtggtgcagccctgagaagcgtcatgtggtaagattcatccctctgagggcatgagatgggctggggcaggggagatgagagcccctgcagcgtgctgctccatcccctgacaacactgccagagccgcaggagggtggcagcaacagacgtggagagacaagggcaggtgctaaggaaaaacagaacctggctcctgatgatgacagtggaggagaagggaggattcaaggctgcctttgagacgctgagcttcagttaccaggtgttttccatagaattggaaggttctgagctggcttggggtgagcctaggagctgaactttagatacttggcaatgctgcagacggctggcaaggtggggctggaac

SEQ ID NO: 119882 - DNA, 1000 bp, Homo Sapiens
aagctttgaaaatgaattaaatggatacattcataaaaaataaaacttgcaaaagacaatcaaaaacaaacaaatgttaaaggatatttcatcagtagctaaacatttccacaaaaagaagctttgtcaaatagtcaaggaataggtaattctaatctcacataaactctttcaaataacaaaataaaagaaacctttcccaggtactttatgagacaagcacgactttgattccaaaaccagacaaggacagctaaaagggaaaaagtataggccaatatctcttataaacagagattttaaaaacaggatgcaaatactagcaaactggaccaagcaaagtatgaatcatgaggaggttgggtttacatcatggatgtaaggttgattcaatataagaaaattagcagattaaaagaaaataggattatctcaatagagaaaaaggggttgataaaattcaacatcaattcatgataaaactgttagaaaactaggaacagtaggtaacttctctaacctgataaatgacagatacaacaataaaactctatagcaaacatcacatttaataatgaaatgttgaaagcattttctttaagatcagaaaaaaaggccaagatgccttccatcactacttctattcaatattgtatttagaggtcctagctaggacagtaagaaaccatttttaaaaataaaagaattcagaagaggcaaaactgttattatgtgcaaactataatgactgaatattttataagtaatccatggattgtgaataagatattttagtaagtctgtttgtaagaaaaatcagcacacgaaagtcaattgaaaatgacttcattcccactaggatggctagaataaaaaagtcagataataacaagtattgacaaggacatgaagaaaccaaaacgcttacacactgctagtaggaatgtaaaatggtgtggctgctttgggaaacagtctggcagttccacaaatggttaaa

SEQ ID NO: 119883 - DNA, 1000 bp, Homo Sapiens
tatagaagagagatttcttaaagtggtgacagacttcagcaccataggaaaggtaaatttttttaaaaaatttaaaaaataggatggacgctgtggctcatgcctgtaatcccaacattttgggaggccaaggtgggtggatcgcttgaggtcacgagttcaagaccagcctggccaacatggtgaaaccctgtctctaccaaaaatacaaagattagccaggtgtggtggccagtgcctgtaatcccagctacttggaaggctaaggcaggagaatcgtttgagcctgggaggtgaaggttgcagtgagcagagagattgcaccactgaactccagcctgggtgacagagtgagactttgtctcaaaaataaataaataaataaatagtaaataaagtagtgacagactgagaatgaactcagcagcaaaagaggaacgtgaagacaatggaatgatattgtcaatgttctgatataaaataaagttaatctagaattcaaagcctagcataaacatggagaaaccccgtctctactaaaaatacaaaattagccggccgtggtggtgcatgcctgtaattccagttatttgggaggctgaggcaggaaaatcgcctgaacccgggaggcggagattcccgtgggcggagattgccgtgagccgagatcgcgccatcgcactccagccggggcaataagagccaaactccatctcaaaaaaaacctcaaaagcaaatatgaaataaagacattttcagaccccaaaaaacgagtttgccaccaacagaccatacactaaagcaattctaaaaattacacttcaggcagtatctcctttttaaggctgaataatatcccatggcatatatttgtatcaccatttctttgtttgttcatcagccaatggacaattgagttgtttccatactttggctctgtgagtaatgctgcaatgaacatgggagtgcagatatctctatgaggttatgattttatttt

SEQ ID NO: 119884 - DNA, 1000 bp, Homo Sapiens
gggcccgcgagggggacacagagagaacttgggtgcaggaacagagagggaaagaaaaggaaatatgaagcgggagccctgacggaagttaaaaaatatatacaaaatccccgggagacttcttagagtgggagcaaaaaaagtgaaaatgctttttctcctccctgcacgccgcctcctcctccctcccctcctcccttcgcgggttggcttcgggagcctcgcgtggcgctcgcgtgtgaggctgccgctggcgccttcttgtttctaagaaaaaaaaaagcagaagcagcagcaaaagtcagtgctgaacgcgctctgccgcgtctcgcgttcctctcctactaaggctgcgctctcttgcgccgggtctcggtctctccagccgtggctcaggctgtttttattattttgttaactcccttcctttctgatttccttctttcactcgccctccctggccggatccctgtcggtgcgccttccacgttccctggccagaagtgagagagtgctgggctgccggagtgcgtccgccttttcaatgggacacccagccccacgcgcagccctggccccgcctcgccccccactccccgctgctgcagcgagcggctgcagcccccactcccccccctcctcttacctcttcctcccacccactccctaaactccccctcctcctctcctctccccccctcccgttcctttctcccgctccttgcaaactctccattcagctgggtttgttgttgcagtgcgtgcgcctggcggtgccggactcccggctgaataaacaggcggcgcgctcggggcgggctgctgccgggggtggctttaggaagggggtggggggcgtcacaggagggacaaatggctctaggaattgaggtgtataggtggaaagacttggggtgaagctctcttggattctactaagaacttgaagcaaagcgcagggaagggtttgggcagaaaaaatggcacaggaacggtgtgg

SEQ ID NO: 119885 - DNA, 1000 bp, Homo Sapiens
ctctgtactttcagaagctacaatggaaaaagatatgcttcaaaattactcaggagtttaagaaaatccggactatattcgagatacaaatgacgtttcttacattttggtggatacatctaaataccatggacctaatatagatacaaacatatctatacacacgcatgctaccaggacacatgcctgcactctccccttactaggtctaatcctcacagaggaaggtggagaacaccgagatccctcaccaggcacaatgagaagcttatacgttgtttgcattatttgttttttaaagagaaagatgaaaatgtctgctgaattctacattacagcttaaacaggactggccactgtgataaggtttttgttattttgttctgctttgttttagcaatgtaacctttttgttcaaatgctattattgattaaaatctcataatataaaatgaataaaagtgaagctgctgcaaggtgccccaccccaggtcactgttgaggaggccgagggttttgcagaacacagctgggacactcatggcctagagcagtaattcctaggcttgtcaccatcaagggttctttatttttccctacctcatggccaccataagccctatgttttgaaagactattaaccaaactgcatttattaagtaacagaatttctaaccagcaggaaatacttattattaccccacaaatttaattccacccaaaagcaaacaggcttcattatcatactttgccccattaagctttagagaccagctctcaaatctgcatactactccaatgggcccctcagagatcaaggactccaggagcatttgctctaatagatggatggctgccatggggaaactgtcaagagcctcaaggagtgaatcagacgctattggtcaaaaggtgtagtctgctccacataagtacgggtgtctcctttccacaaataactttccaaaggatgccctgagaactgacctccagaaaggtc

SEQ ID NO: 119886 - DNA, 1000 bp, Homo Sapiens
  misc_feature (508)..(508): n is a, c, g, or t
  misc_feature (523)..(523): n is a, c, g, or t
  misc_feature (539)..(539): n is a, c, g, or t
  misc_feature (541)..(541): n is a, c, g, or t
  misc_feature (550)..(550): n is a, c, g, or t
  misc_feature (552)..(552): n is a, c, g, or t
gactttgcccacaagatgccttgtggagattttattatatagagtgtaaaatgaattgtcagtcaaataaaaagaacactttgttttcttaaaaaccccatgcataacattttccaattgtcttttttaatagttagacatttcaagcattataagaaaaataaggagaaaaaaccagaaactgtaacttcagtacatttcaaacggaatgtccctcaggtcaattagaaatgcaagaaaaaatagcttcaattccgttttttttcctttaaaaatacatgttatctgtacaagatacactacagtaaacactggaaatcatattatccctttcattaaatcaaaattatttaattcataatgcggttaatactagatttatttattcatctagttaatctgacaaaatattaagaaaatatttaaaagaaaaaagcaaacaacaccttggaattaaaaatagttataactacatttttatacgkttaatgttccacagtgtgtgttnaaagttatattgaanttcttaatattaaaanwncagtatttntntttctgagataatagagaaaggttttttgttttgttttaaaaacaagcttggaggtcttagatacacaattgcaactggtaatggaggcatgagaaaaacgtaggctaaacacacgagcacatttttatattacccctttcgaactctagaaattatacaaaccctacaaaatgcccctcccaacccctgttggacagcaatacaattatctgtctcagttcagaattcacatcattcattacaatacataatagttcagtttttttaaaaatgcaataaaaccagacagccaagatacaagaaattagaagtaaaacattaaatgaatttacacatttaagaatacttaaatactgctttaaaatttttaaaaagaatttgttacataccacctaagacttccaagccactttctgttgcaacagaaaaaactgcaaataaaaagga

SEQ ID NO: 119887 - DNA, 1000 bp, Homo Sapiens
ggatccctgcgggaatccgggcttcgggtgcatgcgatctgatctgagttgtttctgacagtgacagagtgacaatctataagtatctcaagatcaaatggttaaataaaacataagaaatttaaaacgattaaaatatgcctcagtcttgggaatcctggtgtctgcaacaaaaaaacttgaggctgtccttgcaaacggtcctcatggtgctgggggtggtgccaggcccggcgtttgcctggaacacagagcatgcgagaaggagcagaggacgtgggtgccagggaaggaccccggcgtcagagccagggcctggacctgagttacccattaatggcactccactggttttcctttaaagaaatgaataaatacaactgcagtggggctgcttgtggtttccaaacgtcggcagaggctggagacggctctctagtgctgggtgtggagtgaggcaccaccctcgccctgaagcctggggcactcagtcaccatggctcatgccccagaaccagacccggccgccagcgacctcggggatgagaggcccaagtgggacaacaaggcccagtacctcctgagctgcatcgggtttgccgtggggctggggaacatttggcggttcccatacctgtgccagacctatggaggaggtaagcacccacctgcgtcctggggcagacccctaagcaggggaggccgtctccaccctgacctgccaggcgcctgccacgcatccccagtgcttgggcagagtcactcctcctggaaaccagggtgcaccattgcccacggcagagtcagtcccctcagggcccacctgcagtcttctgggacctcagggcagcttcaccactgcccacagcacggaggatccagtcccctcggggtccactatggtcttccgggacctcagggcagcttcctgccaggcgtcaggttgaatgggccgccctgcccgacacacacaccctacaaacagtgagcgctcttccat

SEQ ID NO: 119888 - DNA, 1000 bp, Homo Sapiens
aaatgcctttctacggtaacaggctctagaattatcagaagaaagaaaccccccacagatttgtaacagtgtgttggaacctcgggatcccagcatacagagtatactttttgttgatttttttttctttttgctaaagttgaagtagatttttatgattgacattttattttctgagtttgaaaataagctttttcctgcagagagtcttggccttcacctacacacccaagctaaaaatcctaggtgtaaaaaaactcaaaacatcaatgcttattttagcacgtcaatctttgaaggaatgcttaaaatttccttaccaagccatgaatctactttatgtgtagtatttagaccatgagtagtttattttccttattgtggcttgaaaaatagaagaaaactgtaattgcagctatgtcaaaatcaaccacattcaggttatttccttaataaatactgatggagtgttatatattggctgattattccacgcttgctgtattactgtaggtgtgtgtgtgtgtgtgtgtgtgtgtgtggagaaggtcactacaatcagtacattcttccatttaatggcattctctcttcagccttctccagccgtacctagctggtgttacacaggtgtcatacttgtaggtgggatgtcagcccatcacgctgctggaactcaggaggtaaatccagagagagttggttcctaaatgaacgtggcctttgaaactcatcatgaactcgggtctttcctgcatcattatgaggtatccaatttctggttgcaagtgcccagaggttgagttcactggagaagttggcctttaaactcttcacagctctggattacttacgtattcttatacaggttctcaaagctaaagccagagagaaactggcatagtagatctagaattgagaccacgaagatttcattcctagatcagcgtatgtgtgtccccacaagagtggtgctcaaaaagcttaatttgagtcgtta

SEQ ID NO: 119889 - DNA, 377 bp, Homo Sapiens
ttttttttttgcactgctgtaacaatttcattatagaccaagggagaaaaagaaaaaaaggataaaaccaccacactgagtaaattactaaagcttttctactttgtaacaggattttcccatctgatagatttattgtcatatccccttcaaaacagacaagatgctcaccatattttaaagattatagaggttgccactgaaagaaaaattttacacagtcactgtacatcaaggttgaaaaactgtcctgcatgaaaaatatacttagaaatcatgtgaataaaagaaaaaagaaaacattattgtgtttaaggaaagattaaagtcctcataatgtgccatctaaatgtggatactcattcttcttggagtcg

SEQ ID NO: 119890 - DNA, 1000 bp, Homo Sapiens
ttgcgagcgacaccacgaattaggacaatttatgtcgggcccgttcatttccactgttggtcctttagctcgcgacctgtttgtgcctgccctggatcgacccgtggaggttccagcactcgttaaggtgttggactccagcttccagacagtatcggttcgccaaagtcatgaagcctggactccttgaggtctccaattggcagatatgtttggcgcttcacgggctgtctgcccccagatccatgtttgcaccaagcccgtgcatcgtgtctggctgtgaggctgtgtggcctcctctgtgtgtttatctaaggggtgttgcccctaggagcttctgtgttctcacgggcaggacccagaaccccctcctcttgttctggggaatttctccactccaaagggaactctctggattacaagacactaaagacaaagggccgtctgaggccccttctccaactggctggagtgggctttgggcacacatggccttggaacagcccattgggcggcctctgtgaaattccctagaaatgatgagacttccctgcgcccagtccccaccccgcacggggagttcacaccaattgttcttccccggggactcctgccaaccagggaacgtgacagttcacagtgaggggcccgaggctgtgggcagcaggtcccgctggggactctgggcaggatgccaccttcagatgctgccgtggccacagcattcgtgccagaccagcaagggtgtcctggacactgcccagatgctgaccccgtcatcaaagcagacactggacactgcccaggtgccgaccccaccatcgaagcagacactaccttgtcccctcccgccccccagcaagaagacgccaagccctgagagatttgcctgtgctcagcactgtgtggaggagcggcatgttttcgtgggcacagagacagctctggtgaggatgtaaaatagcgcaactgccacggaaagcagtctggcagttcctca

SEQ ID NO: 119891 - DNA, 1000 bp, Homo Sapiens
gtcaggaaacagctatgaccctcttgatgttctctctgggctaccatcggtgagctgggactcactcataccagccaggagggcagattgtgcatatctcttcccaactctgtgtttagactcaaatcaggagcatgaaattacaccatggaaataagcaaatgctacaaatcaggctttattgagtgcctactatgtgccaggctgggactaaaggcagtgaacaaaatagagttgctggcctggtataacttgtgttttatctttatctttgtttccagtatgcatttatctctgtctatccaaccaatcattcttccttcaagctttttattaaagccattaagagtaatatcaaagacttttgcaccaacttaataccatcttcctatccacccacacatccatccatcctccatccaccctcctacctactaatccctcctttcaggtgagccagctcttgtctccaacttttatttttaagagacagggtcttgatctgtgacccaggctggagtgcaacggtgtaatcacagctcactgcagcctcaaattcctgggctccagcgatcctcccaccttagcctcccgagtagctgggactataggcaagcaccaccacacctggctaatttttttaaaaaataataatttttgtagagatggggccttgctatgttgcccaggctggtctcgaactcctggcctcaagtgatccaccttccttggcctcccaaagtgctgagatcacaggtgtgagccactacgcccggccctccaactttgctcctctgtgtttataagctgagttcccttcaaaggtgggattctgaggagcctcatctgccccagtccagagtcccccaatctggcctcaggccttccccaaccatctgtgttcccctccgccacccagcaagctctgggtgcaggagagctgtgctgctttcctgggagcctgtggctcaggtggcacccacaggtggctcctggaacc

SEQ ID NO: 119892 - DNA, 1000 bp, Homo Sapiens
ttcaactacctatacaaaatgttttaaggtgtttttataaaaggaatatttgagataagagtaataaagaaacagatcatagaaagatcataatcatataaaaagattacacactgacatctacccactgaggtggatgaaccctgcaatggtcttttacgaaatgttgtcatcactagtgctcattcgttggtcatcttcagcctccgtcttctttgtccagaaacagaagcaaaactgttcctttgggaaagtcattctgtcctgttctcaaccatgcagctatcatatgcagctgaccccatcccccacataaggggccagccataactgactctaggcaatcagcatgtctgattccactggccacaagttgggatggaacatgatccaatttgacctaataagagcaagttctaggcttctgaaaaaattatctggagggtgtgccatgaagatataagatctagaagcacttctttcatctggctaccataggaaagagagcctaaagcaccctatgagttgaaattgacaccatggaaggcacactgaagacatggtacaaacccagtcctggttacaaagctgagtgcctgcatcagtcctaacctaaaaacatacccacagccaataagcccaattttaattggtttcttttctctttctttcttttggcaactacaaatgagaaactcgtgatacactggctttatctaacagagtaatctaaagagttcagaagttctagaaaacaccctcacacaaagctgtacttctgcttgatgatgttagtcaagtatgtgtcattagttctgcgctctatccttaaccctatcgctgccatctgtatctttcaactctggagaaaaagcatcaataaatacaaaaaacatctgtaacatcaagagataatattatacaaattacaaatataacagatcactcccccaaaatgacacgggatttctttcgggtaagcagcactgtgagggtttgt

SEQ ID NO: 119893 - DNA, 1000 bp, Homo Sapiens
cccaaagtgctgggattacaggcgtgagccactgcacccagcctcgatttctggctttcttgaaaaggcaacattctggctgcactggcggcattgctgcctggcaataactggctgtgatggagaggcggcatcttcctttggatcaagcttgtccaacctgtggcctgtgggctgcacgcagcccaggacgtcgggacctactaacctattcatcttacttgcccactcctgcagatttctaagctttcaatatcttttttctttcattttttttttttgagagggtagggtctcactttgtcacccaggctagagtacagtggcatgatcacggctcccagggtcaaggcatcctcctaccgcagcctcccaagtagctgggactacaggcatgcgtcaccagacccagctaattttttcttttctttctttttttttttttttttgtagagacggggtctcattatgttgcccgaggcttcagtatcttttccaaagcaacatgaaagaaatgtgaccgtaaatcaatcagcttcttggtgtgatctatgtgacggctaggtgataaacgagttggtcagagaaaactggaaatatttccaaagccatgtttactcccttcacccacctgtgagtcttcgccttggctgtttccgactcggaatgtcctcgcattgatcctcccaatcacagccagctgaaaccagcctccttcctgacgtattcagtaacttcagctgattgccatctctccttcatctcaacaacctgtaccacactcactggagcacttcgctttgcatctttagtcgaccagttcagatatatacaacctataaggtagggacggaggcttctacctgcctgtaccccctttggagggcccacgaatacagagctgagcacaaaagatgtttaaaggacattttgtcaaaaatgtcgcttacaggtaggtcgttattagcatggtagagcagcggtacggccgagtctacgc

SEQ ID NO: 119894 - DNA, 567 bp, Homo Sapiens
gcacaggcgaagcctgttaaagcttaggccagaaagccgcttccgcccggccacggtcgctctgagcctactcgggagccacacagcgccccctggcggagtggagcgggggcggcggtggcgcgccctccggtgggcagggtgtctgtcccgcccccgacggctcctccctttccgctccccgctcccctcggttgacttgggctcgcttctctcccccatctgatttttaatgggaccgcccgtgcgatgtgctctagcgtagcgtccatctcttccacacacgccagggagaggagaagcatccggtcctcgggaggaccgagaaaagaaggcgatccagggccgtggaacaatgaggaagtgggggatggcggccgcccaggtcccccactcagtccgcgggccggagacttgtcaggtagagacagggtgcgactgggcgagacgtatctcatttcttccgggcctttgctcaaatgtcgccttatcagagggctttcccttcaaacttaggtaaaataactccctcactatccctgcttatatttcctagcacttgccgtg

SEQ ID NO: 119895 - DNA, 1000 bp, Homo Sapiens
ggaaaggaagaaagaaaagaaggaaagaaagaaagaaagaaagaaagaaagaaagaaagaaagaaatgtattcatatttaagacacccagatgtgtctactgttactttttgatgaactttctttaaactgttttccttagactgatgtcagcaacatggcagaataggaagctcctggcactcccaatactcacaaatgcacagaatgaacatctcaattaattccctgtgagagaaagtcagaaataagttgagagattcctgcctaccaggcaagaaagaaaacatgcatggccgggcgcagtggctcatgcctttaatcccagcactttgggaggccaaggctggtggattatttgagtccaggagtttgagaccagcctggataacatgatgaaaccctgtctctaccaaaaatacaaaaattagctgggaatggtggtacgcatctgtagtcacagctactcgggaggctgaggcaggagaatcacttgaaccagggaggcagaggctgcagtgagccaagattgtgccactgcactctagcctttacaacagaatgagactctgtctcaaaaaaaaagacaaaaaaaaacacatcaaaagcaaaataaaaacccaaacatgcacttcaaatgggtagacaaatctgaggcatacttgagcatggaccccttccaggtacttcaccatataactggaatcactaacactcagattctccctgtggagaggattgggaccttacatatggcaccccaattataagatgcccaacagtttggctcttaattcaccaactctgggagttagagagaattagacatacacaagtttatttagaccacaggaaaacagtggcagttttatatgtgtgtgcaagcactttttcaggtgctttaacactgtgaattagtagaattagtacagagacaggactcaaaaataccactacctggttctccctggaagaggtttacagcatactcccctagcggc

SEQ ID NO: 119896 - DNA, 1000 bp, Homo Sapiens
gaattctcatgaggggacactgggctgacagttaggaaggactaaaaccatgagggaagctcttaccttgctggtgagtttctctagataatgtgtagtatgtatattcagacttatttcctcacagtgaaactaattagatcctggaataggtccctaaggaaataaacccacaaactagacagttttactctagttagcacttgggaaagaagatattcagatatttcattttcttgaaactttagaaaaaaattttttcttaatctctattgattttgtgcctctcttttcaacatattctaaatgtattataattatacttataattaatagtatataaacataagtattaaatgtaagctttaatagactctacactaggtatgtttgttaaaacctaatctaagtgaaatagtagaaaatacttaaagtgtgttcagtattaatgaagatgaactatggcatgtgtttagaaaataatttatttgaaaactttctctaagacgtttctaccaagacttaactaggtttgtcctccttcatgtcctttttctttttgtggtggaaaattagaaaacctgcacttcaacgttttctctggctcttttttccttctagggatagaaaatacaaatctcagaattggctgctaaatttactcaccttagcaataattttccatctgtgtttatttctaattagtatttactgccacaagtctttctcattttcatttcattgtatttctttccatactgcttccatttggctcccatccttcagtaatattcataacgaacttcactatgcttctctccactaccgcctggctctggatcccaatgtctttgatcattttggattaatcttttaattttttcttgctctttgtcgacacattttcactgtaagttaatgaaagttttgattcttctgcacatgacagatcacaggggccacggttaaagcttggaatttaagtatctgacttgtgcag

SEQ ID NO: 119897 - DNA, 1000 bp, Homo Sapiens
ttttttttttttttttttgcatgtggttgtccagttgttccagtaccttttgttttctgctttgtcaaaggtcagttgactatatttatgtgggtctatttctaggccctctattttattccactgaactattggtagaggtctattctttcacaaataccacactgtcgtgattactgtcgctttacggtaagtcttgacgttaagtagtgccagtcctctggctttgttcttctccttcagtactgcgttggctattctgggtcttttgtctctacatataaactttagaactagtttgtcaatatccacaaaataactctgtaggattttgattagtattgtattgaatatatacatcaagttgggaagaactgacatcttgacaatattgagtcttcctatccatgaatgttgaatatctctccatttatttagatcatctctaatttctttcattagagttttgcacttttcctcacataaatcttgtacatatgttgttagatttttatatctaagtgttgtgtattcttgtggtgctaatgtaaatggcattatgtgtttaaattcaaatcctacttgttcattgttggtacataggaaagcacttgacttttgtgtattagccttgtaccctgcaacttcactatactcacttattagtttcaggagttttttttttggttgttgttgttgttaattcttttgattttctacatagacaatcatgacatctgtgaacaaagacagtttttatttcttcctttccaatcagtatacctgttattttctttacttgtcttatttattgtattagcgagggcttctagcatggcattgaaaagaagtttattagagatgacatatttggcttgtttctgatcttagtgagaaagcttctgtacagtttatcgtcattaagtatgatgttaactgtagtttttttaatagacattccttatcaagttgaggaagttcccctatatttctagtttac

SEQ ID NO: 119898 - DNA, 1000 bp, Homo Sapiens
ttttttttttttttttttttttttttttttttggatttaagcgaacaatttgttataatgaaccagaaatacaagattccactgaaactgaacagttgacagaatatggttgaacttaaaccttcaagggaaacaagggcaaaacaaagctaatgagtggaaaagtccaagattagtttgggataaacatgaggatataattgcattttagcatggctatcttctgacctcttccagcagttcgtctgccatcattctcccttctgacacacctaccaaatcaaatggcttctgatcctctatattgcagtataaaccaaccctatagtacccctctggtcatgatacaaacccagaaggaaagtctgtaaatctcatacaaaggtagaaagtgcaattcaacccaacacgctggttatggtatatgtgctgtcaatgtacatggtagcaacttgaatcaaaccagagctgctaccacatgtaagcaacctcttatgctgccctgtagtgatgtcaatgttctcagtttactaaattatcaatgtggaagaacgcatttttgagctccagaccttctaaacattttaaacaggctatcgaagaggatgtaacagaaccctatttcagaaacctaaggatcagggaggaaggaacactgaccggtttttctgggatgtttctgtgggggcaacagggatgaacaaaagaaatgttagcatgtcagagcatatgacaagtgaggggagacagaggtaggaagagggtgttctagccacaaggctaatgcatttgtgttcaaagagaagtctgggcaaaggagggaaaccccccctcccccctaaaaaaacaaaaacaaaaaccaaatcaaaggacaaaagggtttcatacaacacagtatcaaaaagtaaaaggaacacactaaatgcacaagctggtggcaagtaagtccacagcctattgtgataggtccatccagcatcaatcagatttcttctcatct

SEQ ID NO: 119899 - DNA, 1000 bp, Homo Sapiens
attcacactaacctatcaatgataacagctcaatgtcatttctcagaggatgttgaattaaaaacagtatttctggaatgagcaaagagtgtgttgaatgttggaatttcagatgctttggggcttgatagggaggtaattactgggtgcaggaagggcaggaagaagagacactgcttcccttaaatcagtgcttcttgactaggggcagtttagtccgccagtggacatttggcagtctggaggcacttctggctgtcataaacttggagtggattttctagaggtcattgtccttgtaatgcatgggacagctccctcacagcaaagaattgtctagcccaatatggcaatagtgctgaggttgaaaaaccctgccctaaatcatactttgagtggctctacatgaagacttgccctatatctgagtaatgtaattattaggttaaacaatcacaacttgtgggaaaaaaccagaaagtaacttccattccagtcttcaactgttcctttaaaatgattctgtggggtttgttcttgacctgttattggctgaaaacttggacaggcctcatgaattttctggtcactattacacaatgaaaaaagtcttgaaactgcagagtacattctcaattcagtaattagcatgtctagcctcctataataataataaacttgatttaaagtggagcctctcccttcccctggcatggggaaggctgcgctggaggaagcgggagtggcaggctttttctccctttctatgcccaatgccccaactcctccccagcatgccaagcctctggggttggtgcatggggcgggagtaggggaaagggcgccaggaaagttcttcatagactgatagtgtagtgagttggcacggaactctgtgcctggcaggtatttaaagctgattctatcctcttggatattttggggaactttattacctagagttcccttttgtgaataatacactctctcctagcttggg

SEQ ID NO: 119900 - DNA, 1000 bp, Homo Sapiens
tggctcctaacgtattcttccaaagcacactgagacttttcctgcaagctttccacatgggctacatcagagagaccacaggcatctgaggtgaacaggactatggccttgaggcagctgtactcggctgagtcaacgtgcagcgccttgagcttctccacttgctcttggaagatccgtatgtggtccataaaggcgaccacccggtcggcggacatgggcgaagcatgcaggccggcggcggccaggagcggggcgacgtggaggggcatggagcactgcgccgcattcaacacaaacagctcgctccaggtgaggcgaagcagggccacctggtccgtgatctgcaggtcggggaagaaggggatgttccgggcccactcgacggcgctgaagagcatcctcgcggccagttcgcaaatgttctcgatacccatgatgttgttgggctgcatgcattggctgccgaagcgcgacgtgggatagggctccgcgcgcaacagcagggaaatatatccggacaggtacgagtggcagttgaggggatccccgttggtcagcgcgaactgcccgtgggtcggctgggtcggcggcatcctgcccctctgcaccgcttcccgtctcatgcccactttgaggcactttttgaggcggcagtactggcactggttgcgatggtgctggtcgatgggacagttccggttggcgcggcacgtgtagctcaggttcctccgcacgctgcgcttgaagaagctcttgcagccctcgcacgtgaactggccgtagtgcttgccgctcgacttgtctccgcacaccacgcactcgatgtgttgctgctgctgctgcttgtcgctacccgggccgccagggccgccctggccaccggccgccgtctgggctggcgtgctggctgggcccccttggccgggcgtctgtggcgtgtgcggggcgccgggcggcgggccgggcacgggcggcgcctgcgaggcctggctgccct

SEQ ID NO: 119901 - DNA, 1000 bp, Homo Sapiens
gtcggagaaaagcaatgtaattagtctaattttatagctacttcaaattgccatctttttctattagaaccttgttcctattctgaatagcactcaatagaacttgtgaaaccatcaaaatggcataaagcttactccactgacttcaaaatggacccttccactcatagggtgtacactagccactacacttatttcttatgtcatggcaaatagtcaactttcactgcccagtcattttaacccacgtttcaacatgcacatcccagtaatttggaaacattttgtttccaaagattcacttaacattggtttagcaacatgaagctttctatgcaacccaaggactcagtttttggcctgttttagtgacaggcaatcagcaacatgctgcatttctctccagtgttgtaatcaaagaaaccctcccatagctttaaatgatattccttccccttccaattatgtggggggaaaacaaccctattctccacccagaagtgttaactcaagaattacattttcaagaagtttccagattcgtaaaaccagaattagatgtctttcacctaaatgtctcggtgttgaccaaaggaacacacaggtttctcatttaacttttttaatgggtctcaaaattctgtgacaaatttttggtcaagttgtttccattaaaaagtactgattttaaaaactaataacttaaaactgccacacgcaaaaaagaaaaccaaagtggtccacaaaacattctcctttccttctgaaggttttacgatgcattgttatcattaaccagtcttttactactaaacttaaatggccaattgaaacaaacagttctgagaccgttcttccaccactgattaagagtggggtggcaggtattagggataatattcatttagccttctgagctttctgggcagacttggtgaccttgccagctccagcagccttcttgtccactgctttgatgacacccaccgcaactgtctgt

SEQ ID NO: 119902 - DNA, 1000 bp, Homo Sapiens
tgtagcaggatgagtcgcagacaaaactcctcagacgccagattaaagaaggaagaggttttttattcggccgggatcattggcagactcgtgtcttaagagccgagctccccgaaaaagaaattcttgcccttttaagggcttagaactctaaggggtctacatgaaaaagtcataatagatcaagtaagcgtgagaaacatgactgggggctacatacatcagctaacagaacaaaaagttttacagtattttctcatacagtgtctggaatttacagataacaccaatagttttggtcaggggttaataatattattattattttagccaccagggccaggtggtggtgccaaggtcgtccagctatttatcttacttctgtttcttttcaactttttgctttctcccttttctcctgtcttataaactagggaaaaggggaggttggggagaaactgagaaggacaacaggagaagtggcgacctcataccatatttccccccctttgagaattttcacttttagtgggagttcttactctcgtcctcacttttttagtctctttgtgagatagagcgatagtgatttgtataatacacatgtgctgaagttttctgatgaactaaagtaacaacaaaatattttatcatttgaaaaagcaagggtaatacacaggggagcagcaagcaagttcctatcactagcaatacacctacaatgagggttttaaatcctcctatagctggaaaccattttccaaataaagactcaggattaaacttgtgccaaacctgtacaggcacatgtgccacctttgccatgtccctgactatgttttcaaccacctgtccttgatcatctatttgtaggcagtaattggttaagttaaattttccacaaactcctccttcagctgctagcaagtagtccaaggccagtctattctgatagatagcattcctcgtttgggtttcctgccgagctaaaacagtcaaa

SEQ ID NO: 119903 - DNA, 1000 bp, Homo Sapiens
tcatttccaaagccatagagacaatttctgactaaatgatatcctaggcagactcaaaaattgtttatttaactgaagggttgcatggctgggttttaattagaatggattaacacagtgttcccgcttataaaaaccaaaatcgaaaagaaggaaatgcaatgaggtaattaaagtgaggaaaaaatcctctggatcctcccccacccaaatggaaccattaaaaagacagggaaaattaagtaaaaatttatgttattttttgtataccctggtaaagtctgtatataaaaatctcaagtgtcacatagctgtttaagcttctagtgtgtatatacatatatgtatgtttgttcatgtgtgtacatagttttgtactgtataatcatataaacctatatacggattgttttttgtttacaatagtatatgacagtatatataggtaacacttttttcctttttcctctcaactgactgatttggcaaaatcaagaagtttgcatggtagtgcaataagatgacctacatgatttaccactgcaaaattttgaaatgtgtcattgggttttcattccaagcagcaatgggaaatcattggtaagcgttctctcgttcgtcatggcaacatcctttgatgtatacacctgtaaaaaggtgttaaaggggggaataaggacaaaggcacatgtgttttatcatttatcataattaaggttctaccaatttttttttactagaaaaaaaagtaccatgcctacatgtcaatttcaaacccatcaattactgagtcctgtcagaacaactgtctcctcaatagctctcatgtctatccctacttctccatcccataccaccagcctgccgtatctcccatggattactgcaatggcctcctaactggtcccccaggctccagtcttcttaaccctcttcaagtatttctcacaccatcaccatcttactctttattaagtagaaacttaattgtgtcacctgt

SEQ ID NO: 119904 - DNA, 1000 bp, Homo Sapiens
agctttatgaatgttatgagtttaaaatatgtcaatttaatactatgatttaaaaaacaatagcagatttcgtatgactgtggggacatggaaaaatcaagatcctattgattgctagctctggctcacttattctccggtaatgatactattggatatataccaaaattatataagcaaaaagaaaaaaaataagttttcctggcccaggtcttccattcttctggtccccttactatagtaattctagttactctcatcttattctgaggaaaaaaaaaaaaaccaaaactttttaaacttattttttgacatagggtcttactgtgtcacccaggctggagtacagtggcgtgatcttggctcactggagccctgacctccctaggctcaggtgatcctcccacctcagcctaccgagtagctgagacatggtggcacaggccaccatggcgggctaatttttttatttcttgtagatacagggtttcactatgttgcgcagaatagtctcgaactcctgacctcaagtgatccatccgccttggcctcccagagtgctgcgattacaggcatgaaccacagcgcccagcaaaataaactttatttattttcaggtctagaccatcagatagatttactcaaatattttctgggaacctttatgggtagaacatttaatactgtttagaagacttttaggaatactatagatttcaaatgcatcatttaaaataaataaattccactttctctctcctaggttgtatttaaatttgactgaatatctggatggctaagaacagacatttatcttacacatggaaaactgacgaaacctataagcctatgtgtttgacagtgaagtatgttttatggacttaaatgccacaaacagttaagtccattggcttggagatgacaagcacgagtttctggtatgtctagtgttctcattcactgattcagtcagtacacagataatcactatagagaactt

SEQ ID NO: 119905 - DNA, 1000 bp, Homo Sapiens
gaattcatagccacaccaaatctatgaagagtttcaagagtgtttgtgtttggcattttaagaagaaggaaaatataatctgctaagagatgccagaactaagggtctgatcagcccttgaaaggacaaagcaagggcttttgagaagtctacatctctgttctacatatttcttcagagaaagagtgacttttgtaagcattttaaccatcctacagttcacacaagtaactaagaaatatttaaatgcttactctgtgctgtttccaaaataacaaatatccaggcttgtttatatttatcaaatttattaaatagttttactaaccaatctacatagcactatatttaacattcaacataataataaatattttgggataaataagtgaaaccattttagagcccctagggcacaaaaagaatcataaaagatccatatttatagttttaagattaagaataatagttacaataggtagcaaaccatacattcaacaataaatataaaatttaaatatttaaataaatagaaggcctgatatgttttaagtgggaagcacttaattatcaagtcagtgttgagatgatgctttgacaaaaggtaatccatctgttcagaaattctacaatggttgctgtctcatcagcatattcacacatgaatgttgtttcagatccctataaaagaaaaatgttaattttttaaagtacagagtagtttaccttatatacagttattcccaattgaagtcttataggcctgttgcctttattttcaagcttaccaaacatattaattattcgcattttcttgaaatgatcaaaatgaatgccaaaattacatattttgttatgataccaaatgatagtaacacagaagctgagattttcctcatttgttaattcagtcaatgaacacaaaaattttttccctaaattgggtgcaaataaagatttaaataaaaatagatctagacaaatattaaatgctggatgt

SEQ ID NO: 119906 - DNA, 1000 bp, Homo Sapiens
tttatgctctttttttggttctaaaactgatgtggtttcatttggagttctcttcttttcattaaccacatcaccgtctgcttctcttgcttctagtagtgataaactattttgctctttatggataaattcattcatctcttttgtaaccctttctgtttgctgcttttcttcttccatctgtttatcatgtaatagctgctgttctttttcttttctccaaaaagcttcctgtttttgccggattcgatgccgtaattcttcatcatcagtgtcagatgactcagatcctctgtcactcctctcatcttcactgtctcctgatccataaccacccagtccaccgagtccagtgagggaagccagtgcactggactgtgccagctgttttgcaggagctttcgttgctttgcggtgtgcatctttggctacgtaataaatttcttcatctgtgacatccagcagaatttctgttagaagcatttttgtcagcaacatcatttgatactctttctcctcttcagtcatctcagggtcactgtgctcttcttgaggaactggggatggacttctggtgactttcccactacttgcagcctcaacattttcagtgtcttcttcttcctcatcactatcaaatttacttctctgaggtaaacgagggccatcccctccttcagcatcttctgtggcctttttttcttttttggacaattgtgaacgttgttgttccattctttctttctccaatttcttctgcttttcacgttccattttttcaagaccttcgcgaatccaagcgggaagagtcctgcgttttactgcgtcaatttgtggaggctcctgcttcacaggaagtgcaataggtgaacgctgacgatccctgaatgatgatggcctttctcttcgattctggggaggtgctggaggtcctggaggtcctggttgccaataaggaggatgaaatccaccttgcggtggaccaaaagcagccccatgc

SEQ ID NO: 119907 - DNA, 1000 bp, Homo Sapiens
aagggtgaacaggagtcagctgatcaatgttctccatcaagcagtacactcatttatataccatgttttggtgctcatgactcatggaataatcaatttagataatttgggattactttgtagtaaaatttaagagaacttagctacttaaaataggtcgtgaattttgtgatagatatggacaacttctgcagtattgatgaaaatatcagaaaacagtattaaaatctacagattatagttgcagtaataaagggttttgtaaagacagattagatgttcccattcaatcgatcttataatgcagaaattagtggaaattttttgaaattaataggtatgaaacttaggaaagttagcacaattgcttcatagatgatctcattaatcaagatgggcatttttcttttatagaaaatagtgaattatctgaatatattgaatgaataaatgaataaggcagtgtctctatactaagatgattgtttgaaaagtgaaaaaattttaataaactttattttagtatttgtagtcaaaactaccagttttaaaaaactatgagcaaagccacatttaacatgaatcttctacaagcatattgtgaatgtataacttttgcatggctttagattcgtgacttacatagtatttcagaaattgagagaacacatcatacattaccctagttattataaagaatgcaggtttctttaggaatttttttctgtttggattgagaaagagcaatggtttatgatacatttcattttttgtttggtgcatttgtcaaactgaaatttatctctgtcaccatgttctgttggagaggttttttgatagatacatatttagatatatagggcacagaggcagtaacacgattatatcattcttaatttccccaattttatatcatttttcttgctttgtcattcaagcatcaatttgattatggggattacacacagagaaaagtgttgtttttggaatgcataaagac

SEQ ID NO: 119908 - DNA, 1000 bp, Homo Sapiens
gacttcttcattctacatacctgctattttgtatcctctgacatacatttcttcattcccccaccctgaccccataaccactgttttgttctctatctctgattttttagattccacatgtgaggtcatgtgatttttttcccccgtgtctgccttatttcacttagccctctagtcccatccatgtcgtggcaagtagaatcttgttctttttaagactgaacaatattccattgtatatttgtaccacggtttcttaagccatctgtccattagctgacacttaggttgtttccctgtcttggctgttgggaataatgctgcaatgaacatgggagtgcagatgtctttacaaagtggtgattttatttcccttgggtatatgcccagaagagggattgttaggtcatatggtagctctatttttgatttctttagaaacctccatattcttttccataatggctataccagtctgcattcccatcaatagtgtatgagttccctttttccatacctttgcccacattggttgtcttctgactttttgataataaccattctaatgggtgtgaagtggtatatcatggtggttttgattttcatttctcttatgactaatggtattgagtatcttttcatctatctattggccatttttatgtcttctttggagaatgtctattgaggtctttttaaaattgagttatttgttttctactattaatatatgaattctttatacattttagatattaactccttatcagatatatagtttgcagtattttttttcccaatctataggctgtcatttcattttgttgattgttttctttgctgtacagaagctttttagtttgatgtagtctcatttatttttgtttttgtggcctgaccttttcatgtgatatccaaaaagtcatcaaggccaatgtccatgagctgttgctccttctcttctagaagttttatagtttctggtcttatgtttaggtct

SEQ ID NO: 119909 - DNA, 1000 bp, Homo Sapiens
gatcttgccagacttgtgcatcctgggatttccggatgaagactcctgggggttgtgactgataagacagagaccttctagagaagggacaacagtggccactagagggcgctatcgactctggctctggccagtgcatgtgagtgggtgtgagtgtgtgaatgcgtgtgtgtgtgtgaatgagtatgaatgtgtgtggataaatgtgtgagcatgaatgggtatgtaagtgtgactgtgtgtgtgtgtgtgtgtgtggatgtgtgtgtgtgtggagccccttgtacaggcacagttaggatatgtcagccaaggatgcagctgggatgccttcacgtggtgacatccctgttcaggtgacactgcagtgcacggttaccacatggctggactcctgaacactcagccatcctgctctggggcaatcttcctatagcctcgagctccctgccccaagagtggtcctgaggctccttggtctgggggtgggcacaggacagtggagtcactctggctctagcgctggaaggaggggaggcaggaggggatggctgctctgctcagaccctgcgtatccctcacattcaataaactgggctgggatgtttagtgttgagcaagcttcagccacgcatgccctgaggaaggaacacgtgcagggcctgtgtgaactgcactggggccccctatccagagaggaaccccggggccgggtagactggggtgggggtgccagctctctaacctccccaaagacccaagggctcctctgctcagagtggtcaatgtggagtcttggggtcaatgtggagtcttggggtgctggagcccagcaccctttgcagcctcggggtgctggtcatggggctggatcccagctaagaggggacctcatcagggccaagtgtgtgtgacagcatcctgtgggggagcactgggccttaagactggcagccaggctcacagctggacccatgacaagtcctttgtcccctctggg

SEQ ID NO: 119910 - DNA, 1000 bp, Homo Sapiens
gatcacgaggtcaggagatcgagaccatcctggctaacacggtgaaaccccatctctaactaaaaatacaaaaaattacccgggcgtggtggcgggcacctgtagtcccagctactcgggaggctgaggcaggagaatggtgtgaacccaggagacggagcttgcaatgagccgagatcgcgccactgcactctagcctgggcgacagagcaagactccgtctcaaaaacaaaaaaaaaaccagtaagctttccaaagggtgtgtacattaaacctttattaaaatgtaattgtgtcagcaagcccaaaggaaagacctgcagcacctctaaatacatagcttagaatagcaaccaggggttatcatggtctcttcaatattgatgagtaccctaacatagctctttagctggtactcccaaactaaggcattttggggtaattaaggacatctttgcaagtattctttctggatttaaactaacccaatcaacattttcctactcttttaaaaatagtgatatataagttattcctacttgtattacctacttatatcattatcagaaaaatctcttcaatgaaactataaaatttgaagcaagcacaaagcaagacatatacagcacaaagtcacttgcaagtctttatattaaactgagcaaatattcattgttgctttagatctcagttgtcctgaaaacaacagaaattccctcattaatgtggaagagatcatttgaaaacaaggagataaaaactgattttgaaaagacaagtaaaattttttgtttcaaaaagtatttttctagcttttgtattagttgctatataacaaattatgccaacatttggtgacttaaaataataaacatttgtaatcttgcagtttctgtgaatcacaaatctgggagcagtttagctgggtggtttggctcaaagtctctcatgaggttaagggctgcagtcatctgaagtcttgactagggctgaaggatct

SEQ ID NO: 119911 - DNA, 1000 bp, Homo Sapiens
cacatcctgagattgaatttccaatcttcaggcaagtggggctcagagtcagagttcatttgatttacaaaaatacagaaatgtgatatttcttggaaccaaagctatggaaactcatgtgaacacattcacgatttattaagcttaaatcatctttattcagctcaggagtgggaggctggaagcataagcttcaggtccaggaagatgggtttggatccagcctctgccacttgctctctggaataatactcaaaacatttaactcctccaagcttcagtgtccttataaaaaatgaggaaacaatactggtcccgtgacattgtgtgaagattgaatagtacataatatgctgtattagaagtgcttgtcaaggttcttggcaaatgataggtgctcagtcaatagcctctgtgtatagtaacagttctggtagtaattttggtagctggggggatggtaataactgtgacagcaacaagtatcttattcccatttcacagatgaagacataagctctgggaaaaaaaaatcttcaactgtcactgattaccttgcccaccccacgacatatcctaagacctggcacgtgataattttaatgaaatatctgggtgaatggattaatgaaaggagaaagcagagccagtggtgtgggggtgatgtgaatgcccactgaaatctgaagtagggtgcagatttgttcatcagttgaaagttactcgggtcacatctgaaggcggctctaggtcacctagaggcctaggctggctgtcttcaggtcagggggctgagttgccattcaaagactcaaaggagtgaatcgtacacatcaatcatggggttggcttggccaccaccctgctggaacaactacctggccttctaacctcatggagagcctgaccaggcctgccacagagacctcagagtgccagagaatctccactgtgtccttagctctgcacagtcagggcttccccgaagtctgcctctctc

SEQ ID NO: 119912 - DNA, 1000 bp, Homo Sapiens
gatcgcggctactgcgcggccgggctccaggggttcccacccccggcctgcggtgggcagcagctcaggttctccaaatcattgcgtagttccgaataccctcggccacacctggccttctccatgctcggaataacttcctgcagcgaccaacaggctaaagagggggaaggtctggaggttggaaagaggactggaatctgattggggttccaacaaatctgtaacaccgctgggaacgactgggtcccctttaggtcctttaggacagcgtttgaaatcttgctttcccctgcagggatccagcaccggctcctcctccggcaaccacggtgggagcggcggaggaaatggacataaacccggggtgagtggctggcgtgaatctcccaccaaccgcgggaaggaaaaggagagcagctggtttcactcgcaggatcggggagccaaggctccgcggagatggggctggatggccgcggaggtggagcggaagcggctcgccccagggttaaaatgctgccattttggggctgggactggtctgggaggggactgagggaaagtctcccctttctctccccggcagtgtgaaaagccagggaatgaagcccgcgggagcggggaatctgggattcaggtgagagccaaagtctcttaagtctcctggggactgcagttcctgcccaggactgtgcccactcctcctaactcaactctgctcaaccccctcctgccttgtctgcagggaactgactatttcggcagaagaaaccaaatgcactcctaaaaatgctaacgatttccaaagtactaattaattgcaaatcttgctgtgatatacctcaccttataccacagatggggctgggagaaattccatgtaaaccggtccttttagaagcacaattgtcttaaatgtcctctatccagccggggaacagactgtggtgaactctgggggattcagagtgctttggaaaaacattccccccagtta

SEQ ID NO: 119913 - DNA, 1000 bp, Homo Sapiens
gatccagccattcctgaagcccaccctgcacctcattccaactcctaccgcgatacagacccacagagtgccatccctgagagaccagaccgctccccaatactctcctaaaataaacatgaagcacaaaaacattatgccagatccttgggctgatgggatggggacatgtgggggttctgagggggccttggatccagaaacagttcatgggagggaggctttgggaactctggggttctttgagaaagaatacgactacaggtgtttcaattgttttattacaatccaaaagttggggcgggggttcctgtgccaccacacaccatccaggatgagagggtcagaagtcaaaggtccaagctgcaggagggtcagcccctgcctggcatgttgatgtagactttgccatcttctggggataggggagagaaagcatgaagcttgaccacccatatctccacttccctggggaccccctgcttcaggggtttcctcaggggttcccccaggcacctcccccagggtttccccagcacctcctccagggcttccccaagggccccctccctgggaccccctccctagggacactatacaccttccaggccccgcccatctccgccctcaccttgggcggggctgcggcgtgggcgtgcgcacaggaacaccgcccccacgatgagcagcgatgccaccgcatcagcagccacgaggcctgccaggagcggcagagagagggacccacatccggaacaagagcctggagagtgggggccggaacagggagacaactcaagctctgcgtcctggggctgtgctttggccacaggcagagaggaagtcccctgcgagggggcgggtcccaggttccttggagttgcgcttggggaatgaaacgggagacagatgcagagaggctggggtgtcccaggaccctcggggctgtgcggcgggcacacggggtgctcctgaacacaggctgggggtcgctgattct

SEQ ID NO: 119914 - DNA, 1000 bp, Homo Sapiens
gaattcctgggctctaatgaggtaaatgtggaggacttttgggccacgatggagacagaggtgattgagcaggtggcatttcctgccagcatccctatcaccaaatttgatgcgtctgttattgcccccttcttcccaccactcatgagaggagctgtggtcgtcaacactgagaaagacaaaaacctggatgtgcagccagtacctggtaaggccacctggtggctgactggggtcaaaaaagggctcagtcaagagtctgggacattgtccatggcaagatagcacagtggtagcgagagggccaggccccgctgcaggactcctttcagaaagataataacagcccgtgtcaaaatcccctagagtttaaagttgtggtgcagagttttgaagagctgtcctccatcttacatagcaggggcgcacagctcattgtcagccttctgggatacacacactgagtagcagaactcctataaaaaatgctgataaggctccatccccaaaggttttcattgagcaagtgtaggggcaggccaaggaatctgccttcaaaacaggcctcccagagggttttgcagctagttttatggattagacattgagaaaccctggactagcgggtaagaggataggtttctaacagcttgagtttgattcccagctttgccacttagctgtgtgaccctctgtcaggtcccatcattgccctaagccactgttgcttcttttacaaagagggtgcgataatagctacccacttcctagatcactgaagataaagtgagctaatgcggttagagtgatagccgccttttttaactgtaacccatagtgagaaatacattttgtgtcatgacgcagaatgatattcgtacatatgcaagtgtgtataactgaaacaacattcccaaaacagtatttttctttattttctatcttatttcatttttgaatttttggatatgacccactcaattgatattgtaatcactta

SEQ ID NO: 119915 - DNA, 1000 bp, Homo Sapiens
aggagatgttcatcctaggataagtgaacataatgttcaaggcatcaacttcttcataaagtgaattagagggagcttttatatctcctcatgatgacaacatccagagctacaaaaataatctttgcaatgaatgtgtttaaatccctttgagcatgatatggaaaaatttcaaaaggaaacagggctcttgagtacacattcaatgtttcatactatagcagagcttttccaattttattgtgaacacgaatcacctggagatcttgttaaaattcaaagtctcattcagtaggtctggggtggggcctgaaattctacatttctaagaagctcccaggtgatgctgatgctgtgggtttgctgatagcactgagtagcaagattgtagagaaaacttagtaccacagttactgtagtcaatactgttgaatttatcttttgcaacatgaacatatcttttataccaaaacatataagcatttgttttcctctagaggaaatttggaccttaaatttaatttttaaagagtcttcatttctggtggccaactggccactgagaggtataaaaaagggagggctaaacaaggcagaccaaagccatgcatagatgatagctgcatagttggaaacttcataattggaaagtgtgtggcactcacataattctggaacccagccaattggccagctatgacttgaggacccctggtgcaccagatgatcttcagtttatgctgggattggtgtgcgtgacaagttttgggcatgtcattttgagatacctgttggacacttaagagagaggtcaaataagtaagacatgggtctggaactcactggagagatttagactgcatttataggtttggagtgggtatgaagtgaacacaaaagagtctaggccacatcctaaggaatgctaacacttaaaggatgaaacaagggaagaatagccaacaaaggagatagagatttaagaggaaaattggagagt

SEQ ID NO: 119916 - DNA, 1000 bp, Homo Sapiens
gatcacttgagcccaagggttcaaaagcagcctgggcaacatggcaaaaccctgtctctaaaaaaatacaaacattacccagacatggtggcacatgcctgtagtccccactactcgggaggctgagatgggaggaccacttgagcccgggaggcagacagccttgattttgccactgcacttcagcatgggtgacagagagagaccctgtctcaaaaaaaagggaaaaaacaagacaaggtttctcctggggctgtgcttcagaccccattaggcagttgctctgcaaaatgcctcatgagtcacagctctgtcaaacagatgtgcacatgttcctaccactgtagcatcccttgggggtttggttctgttcacccaaaatgagtgggagtttggttctgaacacgcagcactaaggggacctcaaaaaggacaccttatagtacgagaactcaaaaaggaaggcagagtgtcaccttgcttgacctcagctgggaatgtgtgttcatgtctggcaactcaagtttttcgctgctctgagcatgtcaatggctgtgaaagtgccaagtgtattaatttgggggttacaaatacatcttagcaagtaggtgaacttgcaaatacagaatccaggagttatgagggtccactgtattttcagtgtcgaaattatcttccatcaagttgataaaacctcatttactcaattaggccctagtcagggtatgtgaagtgttctagctttttcctattacaaatgatgctgcagtgaataccttgctgcaaagagagttctctcattataaactgtttctgtggcgtgagttccccaactgggctctcaccagtaaggggatgtcgctgcccatgccattaggctcaccacattccctactagggacacatatttggctttgtcctggtcaacgagacagagggaaagtctacctggtgcctaagaagggggtacagggcacaatggtccctttcttgctctggc

SEQ ID NO: 119917 - DNA, 1000 bp, Homo Sapiens
ttttttttttttttttttttttttttttttttttttttttttttaaaatttcagatgttttttattcaaaggttctcaaaagaaataaaacagaaaagctaacaatctgatcaaatgtacagttcaaaaatgtcttttggcgtttaacaacaagtcctaggaaagaaaactacagagttatcttgaaccggacaaataagttaccactggcaagtctgtggcactagtaaaacaaaaataaaaaattaactctcttgatcatatagatatctctatgaaaatctttttttttcaatctgtacaaaaggtctttcttcataaattaatttttttataatttaatggctgtctactatgtgatgtttaactgatttttttttttttatgtacagaggttatgtttcccaaatcttacccagacgagtatggcacttagttcagacatttctagcagcagatttcccctcccctctaaccgagctatcaaatttctgtcttaactaatgcaaaaatatcaagtagtgagagacccaggtttataactgtactaggtacacagagggtgctgcgttcagtctggactttcacaaagcagtaatattccagggagcatagaaccaataataccacaactttaaaaaaatgaaacaaaaacaaaaacaaaaacacatttctcttatgactatgtaattttcactagaatctacacttctcagagcagcaaggacttttgaaactatgaaatgtcactgacatctatcatcaaatacaagcataaaatttaagaactaaaaaatacttgaaagaaataactgcttagccctagctcctgagctaggaggatttggtctgtggaaacagggagggccagcaacctgtcccagcacaaaagaaaatagactctgaggtagataactgatcatacacagctgaccagacaagtacacagttttggaagacaacttaatttaccattgcttttaaaacatatgcaattgcc

SEQ ID NO: 119918 - DNA, 1000 bp, Homo Sapiens
acacctgtaatcccagcactttgggaggccaaggtggaggatcacctgagaccaggagttcgagaccagcctggccaatatggtgaaatgtcatctctactaaaaatacaaaaatttgctgggtgtggtagggcatgcgtgtaatcccagctactcaggaggctgaggcaggagaattgcttgaacctgggaggcggaggttgtagtgagctgggattgcgccactgtactccaccctgggcgacagagtgagactctgtctccaaaacaaaaaaagaaagaaaagaaaatttcagacctagaagaaagtatttttaagctactctttggttcatatttgtgtactttatttttaaagtctcttctttagattatatgtgcaaaaattataaacttgagaccaggatactcccatattggtgctgagggatactttagtatattctataaacatcctctatgtcttgcaaattatataatacattctcaatcttatatccaatttttagtttagcaggcaaaagaggaaggcaataacaatgggagaaagaggacatccaccaatttagtaatggtctatatttgtggttgttatgacaacctaatatcatctccaaatgtagggaagatacaaaaacatctcagtgcttttaggcccttcaaactagctagaaagaaatggacttcttccattatccagtatgcttataggcccatcaccttgcctttctggtgtcccatctttcccttaatttacttgcacggagagttccttctaccactgttctctataacatataccctcctctcactttaactccccaccctggccctagccaaaccattcattcattcaatgtttattgaacggcctttgtgtgctgtgtattgtggtagattcttggtgtatgaagaagcattaattgaatataaattgctttggtattttaaaagtcaacatactaaatgtaatgtagtactttagtcaaaactatctata

SEQ ID NO: 119919 - DNA, 1000 bp, Homo Sapiens
ctgggtatgccctcctgggaatgggtcctcctggacgtagaccctcctagacatgggtcctcctgggcattgatcctccttggttggcatggaccttcctgggcacagacccctcctggtcatggaccctcctgggcatgaactctgctgtgaatagaccctcctgaacatgactctactgggtatgggtcctcctaggcatgaaccctcctgggcagggacccctggacatggaccttcctgggagggaccccgagacatggaccctcctaggcatgggactgcctggcatgcagccttatattattctgttttcatactgctataaggaactgcccgagactgggtaatttataaaggaaagaggtttaattgactcacagttcagcatggctggggaagtctcaggaaacttacagtcatggcggaaggcgaaggggaagcaaggcaccttcttcacaacgcagcaagaagaagtgccaagccaaaggggaagagccccttataaaactgtcagatttcatgagaactcactctctatcatgagaatagcatggaagagactgcccccatgattcaattacctgcacctggtctctcccttgacatgtggggactgcaattcaagatgagatttgggtggggacacaaagcctaattataccattctgctcctagccccttccgaatctcatgtctcttttacatttcaaaaccagtcatgccttcccaaaagtcccccaaagtcttaattcattccagcattaacccaaaagtccaagaccaaagtgtcatctgagacaaggtaagtcccttctgcctacaaacctataaaatcaaaagcaagttagttatatcctagatagaatgggggtacaggcattgggtaaatatacccattccaaatgggataaattggccaaaatgaaggggccacaggccccatgcaagtccgaaatccaggtgggcagtcaaaacttaaagctccaaaatgatctcc

SEQ ID NO: 119920 - DNA, 1000 bp, Homo Sapiens
aaataaaagttttattggagaaaaatagaaccaccacgtacacagggaaaagagcacaaaaattcaactgatacagaacaacaactgaaagtcacaattatccaatgtagtttgcaattacttttcagtttcttaaacagctcccctcaactttttttttttaacagtcttgctaatttttcagctgaaacagcatcaagttttcaaagaattaagagcctcggggaggggacccgctttcaagatactgaaggtgacatcaagagtctcctcctaacaggaccaactctatctaaaagttgcttacgagtaacttgaatcttgtgtaatagtctacatctcacagaccatcagggatgagttagaacactgttgttgatggtccggtatgaagagagggtaaacaaaatagctgcatttgcttgtcagctgagctcatataaagaaatcagtgaggagctgagaaaatataggcaatggctgctcaataagaattacaagttccgaataccacatatagttagacaccagtgtgcaagttgatgcaactagaaagaaatagacgactttttaaaatacctggccacaggtctttgagaactcaagcaaacaatcaacagtagacacaagagtcaaaaatcttctcaggttgaagattaggacataggtaatcttcctaacggctccaacaggcaaggaaatatgctgtggcaaaaagcattaagtagttctgatttttaacaaacataaacaaaattttctgcttctcctcccttcaaagcttcaaggaaatagaaacaaggaaacaaaataaaaacaaaaaaaaatcagtgacagtaaagagaagcctttgcttgaattatcaattcgaaaaacagtacttttgccattttgtatatataaacaatcttgggacattctcctgaaaactaggtgtccagtggctaagagaactcgatttcaagcaattctgaaaggaaaaccagcatgacacagaatc

SEQ ID NO: 119921 - DNA, 1000 bp, Homo Sapiens
gattacaggcacctgctactacgcccagctaatttttatattattagagatggggtttcaccatgttggccaggctagtctcaaactcctgacctcgtgatccaccggcctcagcctcccaaagtgttgggattacaggtgtgagccaccgtgcctggccacattgtctttttaaatagtcatttttttgagacagggtcttgctatgttgcttaggctggacttgaactcctgggctcaagcgatcttcctgtctcagtctctcaagtagctggagcttcaggtacacaccagcaccactagctgttaaatattctttatcaagctaatgactagtttctccagtcttttttttttttttttaaataaaattttgttggaatgaagcagcaaattctcacagctgttaaaagaattggactctggcatacctaactggagaataccatgctgttttttctataaaccgctggcattttatgccttttttgtttgttttgtgttgtcaactacaaagtaattctgtaaacagtacagatagccctggactgccaccacgggccaggccagggtagtcaaggttgtccatatgcacatgggcagataacctgttttcctttgacatttttttccaagtcaaattcttggaggattgtgtatttgtattataggaagtccagatcatagacttttaaaactaaaagcatcactgctgaactccagctcagtcttcccattttataatgaggactctgaagtttatagaggtcaaggacttgtccaaagctttagatatgtagtgtctgtgcccttttcctctaagtttctcctagagaatgtgggggctcaggaacagagaaaataaggtgcaaaaagtagaaatgggtggtgtttctcaaagtgtggtccatctgcatcctagtgactggggtgcttgttaaaatgcagattgctgggccttatcccaatctgaccaaatcatctcaggatctaccttttg

SEQ ID NO: 119922 - DNA, 1000 bp, Homo Sapiens
gatccacccgaccttagcctcccaaagtactgggattacggtcgtgagccactgtgcctggccagcaaaataaactttctacattaactgagacctgtctcagattttcagagttaatactctgttgcccaggttcatcttaaactcctatgctcaagtgatctatcagccttggcctctgaaagtgctgggattacagaaatgagtcactggaactggcccaacataaaaatatgtgttgcatttccaaatagtaacaacaaactttccaaaaacaaacaaaaaaaaaagaaacaattttcatttgcaacaatttaaaaataaaaaatttaatcatagtaaatttaaccgatgagattaaatatgtatacactaaatacaataagatgttaatgacagaaatttcagtagacacaaataaatggaaaaatattccattagaataactaatactgtcaaagtaccgtattatcataagtgatctatatattcaaagtgaaaattttagtgtcatttttcacagtaatagaaaacacaattttgaaacttaagtgtaaccttaaacaactttaacactgattggctgggcacggtggctcacgcctgtaatccccagcactttgggaggccgaggtgggcagatcacgaggtcagatagagaccatcctggctaacatggtgaaaccccatctctactaaaaatacaaaaaattagccgggcgtggtggcgggcacctgtagtcccagctacttgggaggctgaggcaggagaatggcgtgaacccgggaagcagaccttgcagtgagtagatatcgcgccactgcactccagcctgggtgacagcgagactccatctcaaaaacaaaacaaaacaaaacaaaacaaaaaaactttaacattgattgatggtgattgttagtgcctgagggtggaaaatacggaaatgttgttcaaagagtacaaatttttagttgtaacttgagtaactctgaaaaatct

SEQ ID NO: 119923 - DNA, 1000 bp, Homo Sapiens
atcgttatccagcacatgactctgtgtgtgtatacaattttatatatacgtacattatatgtctacacacacatatgtgggggagagaaagagagggagggagagagagagagagagagagagaaagagaaagagagaaaatacttattttaaggaattgtctcagaaaatggtgggggttgacaaattggagacccagggaagagttgttgttgcaagacttgaatccaaaggcaatctggaagcagaatttcttcttccttgagggacctcagtcatttctcttaagctcttcaactgcttggatgaggaccacccatattattgaggataatctgctttttcaagtctactgacttaaatgttaatcatatctaaaaaatacctccacagcaatatttagactggtgtttgactcaaacactgggtaccacagcctagccaagttgacataccaaattaactgtcacattatcccgtcatgcctgaggggttctctgaccctcagttttctgaggatcaaatttaaattgagggatctatctttgtttattggagccatatagctcaaagtataatcattttctctccacaggaactagacctagggataagggtaattgcttatttcagaggaatgccatctgaataaaagaataattatatagtaagctctctgttcaaaaaatgtaaatattaaagtttgaacatctaaattccatcttggtttcccccactgccgctgcccaatacctgttctctttcagttgcagtatgcaggggaattctaagtttaatattagtctcagcaaaatacaatggtgaagatgactctttctagcataacaatgggtatgtggtattccaaatacttttggaatgcggagtgactattggctatgtgctcttcaaaaaattaataatgaagaactgagcatgtaatttcacttatattacttattttatcctcacagtggcctttcaaaattgggattattac

SEQ ID NO: 119924 - DNA, 1000 bp, Homo Sapiens
gatcacttatactgacaagtaacagctctcaggcagctctcaggattgtctttgactttgcctttcaaaaatttgattatataatgtgtcttggtggtgttctgtttgagttgatcctgaaatcccctttgcaaaattatgattgagacagtgaaaaagacttaaacgaactgactctattttggtttcaatctttaagttgtccttgttccttcttgggcataggttgaactaactttgggaggaaattagtttatagtttacagtttaaaacaaagacaataatagccctttcccaaaagaaacttctttcttgtttggggactagactgtgtttgtaggactaacaaattagccacaagattagaaattctggtttaggagtcgtgtagttggaggctacaagattctgaccctccctaaattgttcttaagatcagtgcttgagatattttgcagaccctgtaccttatggatcagttggtaccacccagatcgataaaattgcttcatctgatcttgtggcgcccacccaggaacagtcagttcaagaggacagcttcatcgtcccatgattttatctcttgcctaaccaatcagcactcctggctcactggcttcccctgactcaccaagttgtccttaaaaactctgatcctcaaatgctccaggagactaatttgatcaataacaaaactccagtctcccacacagccagctctgtgtaaattactctttctctattacaattcccctgtcttgataaatccactctgtctaggcagtgggcaaagtgaacccactgggtggttacaaatttcgaggctcatcaggattgcccttgcagctacctgcccgtggtttggtagcccctctctagcgatggatccagaggctagcccaagcatctgcctagttctcttggactaggggctgactttggtactctctactggtggggtgctgccaacccaatgtgcatggatttaattgcaatgga

SEQ ID NO: 119925 - DNA, 1000 bp, Homo Sapiens
ctggagatggcagcttattggacacatggattttcttcagatttgcacttactgctagctctgctttttatgcaggagaaaagcccagagttcactgtgtgtcagaacaactttctaacaaacatttattaatccagcctctgcctttcattaaatgtaaccttttgccttccaaattaaagaactccatgccactcctccatatgcctctggctctgtttttattctttgctggtatcagaatcctttttttctcttcagtcctctgtgctgaactctttatgagttggtaacttacagctgtgaacctgcctccttgttttcattaagtatatttgaagttaatggcaaaaggcagtgctgacaaccctgggaaatggcagtcctttgtcttcttcctggagcaggtaatcctttactaatccttcgattgttacaggtgcttccactcttatgacagtgcattcctggaactgcatcattatgcactctgctagaaattgaactaagtatgtgctaccacatttacatctgtttcaacatgttttagtggtaaaagtgaaatatatttctcttaggcagtgtagacagagtgaaaaatgggggttatgtatgtgttgacttataagatacaatattttccaaagcaccttcacaaatattctctcattttattcttgcaattatcttaggggttcctgtcctcattagttaggtgaagaaattgaaactcagatttgtgacttgcttaagatcagagttcatgacaaagcttgggtggaatgtaggtctgctggctgaagtctgtcatgttcgcagccctgttttcatcttgggtgctgttgggttgctatatatggggcggaagctatgttgagaatgccactacttaaatttagccaactaccgagaatgatgagtttcaagcttctccaacttggctgcacgttagcatgacttgggtaatgtaaaaagaaaatcccaacgtccaggccacaac

SEQ ID NO: 119926 - DNA, 693 bp, Homo Sapiens
gaaagatgaatgtaaggttttattgagtggtggagctggctcttggtgagatggatggggagctggaagggggatggagtgggaaaatgatctttctccgcagtgtggccgtctagcagctaatctcctctctgaccatccccaaccaaagtcttgtcaatgttcagtcactccttctcttctctttgccactccattcttctgttcttctgctcttctctttgtctctcccttatttgcaggaggtcacagggaagtagagagggggatgaagaaatacatttccatcctgaggtggtctgccatctcacttgaagaggtgctttttctcgttgtaattcaagggcaatattccgggttaggaattccatctctatgagcaggtgttgacattgtttctttgactggcaacttggcaactgtattcggctttccttgaaaactcagatttccctcttaaaaacagatgaggagtcaattgatggtgaatgcctttcccttgtttggcttactcgtgccacaaggcccatcctactcttctgctgaaataagatgagcttccacggattttcacctttggtgctaatgatattatcctcaaccacatgaaagcccacctggaatgctgtataaccaggagagatgttctcctgaccttctatatccgcatttcccagggcgctctctgccaag

SEQ ID NO: 119927 - DNA, 1000 bp, Homo Sapiens
ctgtgtttttttccattgccctggccagttcctcaatagtcattccaatccatacttctaccacctttttagattttgttgaagataactgagatttccatggtccttcttcctattaaaaaaatcagaacatataaacaaaaaggaagaaaaaacttaagtgacaatttagatttactctcaaatatctaccacaatcatagctacatttctttctttttttttctttttttttttttttttttgagacagactcttgctctgtcacccaggctggagtgcagttgcacaatctcagctcactgcaatctctgcctactgggttcaagccattctcctgcctcagcctccccagtagctgggattacaggtgtgcaccaccaagcccagctaatttttgtatttttttttgtttttttgttttgttttgagacagagtctaactctgttgcccaggctggagtgcagtggcacaatttcggctcactgaaacctccacctcccaggttcaagcgcttctcctgcctcagcctcctgagtagctgggactacaggcatgcgccaccatgcctggctaatttttgtattttcagtagaaacagggtttcgccatgttggccaggctagtcttgaactcttgatcttgtgatccgcctgccttagcctcccaaagagccgtgattacaggcgtgagccaccacacctggcctaatttttgtatttttagtagtgatggggtttcaccatgttggccaggacggtctcgaactcttgaccttgtgatctgcccaccttggcctcccaaagtgctgggattacaggcgtgagccaccacatccggccatagctactatttctaccaacgaacactcccataagtagttaaaccttaagctaaaattaaaatcctgtatccttaattcactgttttacactgatttccaaggaaccaaattcatcagcaccacacaattaaccggaacttccctttctcacaaag

SEQ ID NO: 119928 - DNA, 1000 bp, Homo Sapiens
gatcatgcctcaataaactgggtttatttaagttgcatacagaatcaatttactataattaattgtgcagtaatctatgtagcctgatccactcagcacttgcctggactttcctggttttagcactgaacattcagcatcccaggtaccccttggtatcagttttaaaacccaaagttccctgtcctgggcaaacaggggcaattggtcaccctagatctatattaatggttaatgtgccttaaattattattttccattccacccacggtgcattcattttgaaaatgtggaactgaagataatttctagtcaaccagccatcatcagacacattaacaatcatcttttactgaggacatggtaattatgttagacatttacctaattcaactcattactttaattcatagttaaaagcaatgaagagtaaatctgaaggattaaccaaaaagtaaaaatgtcataggttaatttacaaaatgacatcctcaatgtcaaaaataatgatgttttattattttgaaatttatcactttttcatcttttaaaatactagaaaggagcaaggtaataatgactttcaggaattgagacacattagctcgcagggataaacatatttgtaagtgcattagcaataacttccttcattctgatcacaatgagtatgtttccatgcaagaatatctgaactcattattttgctttcaggtgaacacataagatcagaaaaatagattggacttgcaatttagcctttactaactatatgccaaaattaagccattttcactgacatgaccagttgacttctttaaaaagtaggtatcagattattttggtaagaaatgcctaaacactcaaatagatcttgaatagtagtgtggtatcttgtaatgtagattaaatttatacaacagtggaggaaaggagtccattcaactttgttacgtattagggtaaaaaagtgacagcatctttgagagagctaaatgct

SEQ ID NO: 119929 - DNA, 1000 bp, Homo Sapiens
cattgtgatgcttttaattacaaaagatgtaaaatgatgcattataaaacttggaagcaactttatacaaattccaatttttaaatatggttgaacagggtgccctgggggttaggacactggcaggaagtctgattagttgctgggatggtcccatccatgaagcactggacacatgctgggaaccatctgtgcataaatcagaagagccaacaagagtgggaacaggaaaggtctgcaaatacgcatatggacttgaagatacaacaccagctcaggtaatatacagcaggcggaggagaaatgaaacaggagaaacaggacaaaggagaattcatgacatgatcaagaaaccccttctcctaaccccctatgtcctaaaacccacaaccatacagaaagaaaaaatggaaatgcagacaggtttttagttctatgctgtttaactgctgtaagtgagagtagtacaatggtcgatttcttgtgacaaaactaaataatgaaaaatagtttactctgaagtatgcagctgcttcaaatgctgaggaccacaactggttttgttacaaaggccgcagtgagtgcaggctcacgtgctgtgggccagggcgaccctgcccgtggtgagtcctccacaccttctaggcagagtgggttgtacgatgcccaaaacctttcacaagaaaagatcggactcactcatagacctaaggacaaattgaattcagtgctaaaccatattgcccccagtgtacacccccaataaatcacttccccggaggtctgttttcacaagtcacctggagaacgcctttggggcagtagggttcactgtgtaggtcttggggtctctgttgccaggcagggtggctgctgtgcagacaaactgaactgggacccggatatgacgatacccatgggtaaggcactatgtgaagagtgactatgctgagacctctgttttataaaaacacaattcttgaaacatcagcaccatcgc

SEQ ID NO: 119930 - DNA, 1000 bp, Homo Sapiens
atgactgtaggccaagctaattgggaggctgaggcaggagaatggtgcgaacccgggaggcagagcttgcagtgagccaagatcacgccactgcactccagcctgggtaacagagcaagactcggtctcaaaaaaaataataagttacatttaaatgtcatatacatatttaagaaaaaaaaaaaccaagtacttctcatttaagacagagtagaaattatttaaaattaggagttggtgtaaaggatgagctacatattcaagtcaaattatagtaagtattcactattccactaccaaagtaggtcaattatactaaagagaagaaatctatgtgaattgaggcattttctcactttgatatatgtgaataaatttcaggttgtctaaattcctagggttatatagttagaaatatataattctcttatagacaggtcaactaggggaaataagttagcacaatcatttgaattggttgtctacatactgggcagggcttattccttttctttagcttctttgcacatgtaaagcaggccataagatgtcctgttttgccatggacaatgcaaccatttttaggtcgaccttgacaaatcacacaaggttcaatggcattaaggggcaaactagattccacactctcttctttgtcttgggtttcttccctttcaaactctttcacatcttcttggctgctataaataatgctactagaagttgatggctgagaatagtcttcactttcttgtgattgtgaagcttgtgtaattttatcatcattttcctcaacacatgactctctggaatcattcactatagtttttttacaatcaggaacatcaaagccctcttcagcttgtgttgagttttccagtttggctttctcagagatttcccctttatctttccctttatcttcaggaagccaattctcacgaagggcccaacatctgttgcaatgtgatggaagggggggattcatttcattgcatga

SEQ ID NO: 119931 - DNA, 1000 bp, Homo Sapiens
gggatgtgacaggcgaggacgaatgggatctcaggggctggactggagagtggggtacagggatgtgaggaggaccccgcgagtccgcggtgggatcccaatagagctgtggccaaggaggaggggagcagcgggaaggctgtgggcactcctgtgtgagggaaagctacaggctcctgcaggtccgagatcggccgaaatcaggcaccccaaggaagccctgctctggccacatggtgtcccctcagaagactccaccagccggtgggcatcccggggcttctgacaggaagagggcagtagatatattggtgcttgtaccggtttttcgagggctgcagggtgaagatggtaggagagtctggagaacgggtctgctctggtggcttatggactactctgtggaaggggctgctgttctggtagcatcgaaggagctttctacgggagcgctgtcaagaggattttggtgaatttgacgtacttggtttgataactcactttgcttttttctctaaagatgaggctgctgtcatttgtggtgttggctctatttgctgtcactcaagcagaggaaggagccaggcttttggcttccaaatcactgctgaacagatacgccgtggagggacgagacctgaccttgcagtacaacatctacaatgttggctcaaggtaactcgaggccctagagttacagattaagcctatttctggattcttagttttcagatgggaatagggagcatattggtgggtagtggtttctctttgggacacttccagcatcagatatattgagtgaatgaatacacttcgggatctacttttggaaaggaggacattcttacctaagctacaagaaaccatctttcacgtttcgggttggaagaattttagagtagggaagtggcaagaattgtggaaaaactaggagggaaagataaagacacagaaaatacacaatcccttgttacctcaggggtttaaagtgtcatct

SEQ ID NO: 119932 - DNA, 1000 bp, Homo Sapiens
tatgtagagagatatagtatagcttttattttttttttgaaccaacccaacatttccactggcaactgtcaacatagcttatgacatgagcactgtttcttttttaattatttttttcttaaaaaatgtgtttaaaattaacaggtgttttttaatttcttcccccccccccttagaaaatgtatttatgtcaatgcagaaagcctaaagatccgtgggcagtttcgtgatgacatcttatgtctgtttatttgtgtgtttgtgtgcgtgttttaaagccaggtccttcccacattcgttgagaaaaggtctgtagggcacggagatctctttctccaaaaacccaggctccaagggattatgacaactaagattcctcttactggagcaagaactaccccataggctggaaaaatagcttcatgaagtttaagaacaagcaggaacatgggagaaatgaggaattccagttcctatcttgtaaaaatgctttcatatgtgacctgagggaccaggagaggtgaagggagcccctggttctcttataaaatctctaagtttttacaccacttcaagaaatatagtcagccctctttgtatagagcattaggaagcaagagcgtggtgaagctgacatttctcaggcacattgacatttaaaatacaaacttttctcttaaagatctcactggttggacatctcttctctcctgcctcaggtacaaagccaaagataatcaagaaggcctgtatcccttttgttcttccagtagccctttgtcgtcacacaccattcctatttttgtcccatctcttctatttggcgggtcttcctgcagaaggatacacaagtggacactgacacaacaagacacacagaattggaaaggcttgggcaaagagggacaattgctttttgtatctgacttgattcaacataagcataaaaagctcctcctgctccagttgaagctcctgtaagatctttagtaccctgcgt

SEQ ID NO: 119933 - DNA, 1000 bp, Homo Sapiens
catgatcagggatacaagtgtgagaactctttcttcatggccttccctggctccatttatcagggttttcttaacattagtgtctccattttgattttcacaactttaacaccatattaaatcctcctaaatacttaactctcttttctagcatagttaattgagttcccttaaatattttaaactacaaatttgatatatctgattctttcaaacactgcaagtgcctgccaaggcagacttaaaaatctgatgaataaaatctttctagccatctaagcaatccctaaaactccaaaaaaaaagaaaattaaaaaaaaatgtagtaaatcagactcaaaattcacacaccttttacaaacttaaccacattgttttagacatttcaaattaaaatagaagtctaatgtcaattacacatttcaaattggaattacaaggtaatattttatattctttaatgtgcagaattgtctcagacacattaaataacaaaggcattacctggaggattctaaaacaacacttatttgtaaacttaacacaaaagcgttgctgcaatgggtttcctttaggtcatcagctctatgccttccccctccccgcccccggtgttgtaaagccctgaactaaggggtgcaaattgcagttaaccactacaggtggttcctaggtcaaaggttctgacactgaggtttctgagtcaaagtttcaagtacttgatatgggctgttggctagtgactctgagacaggatcattggtctacactagccacagggtaacacactgagtcattctcagagttgggatcaggctcctaagtcagcgagaggtcctaagactttttagttgtgagttggttttgtaaccacgtcccatgaataccttttaaatgtcatgcttacctattttatcttatctgctttcaactttttccatctgatttatgtaggtacaattttgcacctcctatctggtttgtagttaatatcttttat

SEQ ID NO: 119934 - DNA, 1000 bp, Homo Sapiens
gatcccgggcgcctgttggggtgcggagggcaggaatgtcctggcgtccccgagagccgggccaggactccggagtcttcggaggaccaggctcagggccgcctcccggccggggccccttagggaggggcggggattccccgggtccctcaaggccagagcggcagccgccgcggtcccaagcccccttcctacctatgccgggcgccacatagacgaagtacagcagcgaggacgagagagaaaagaagaagagcgcggcgagcagcgagcggcgcggcagccgcagcagcccccggcgggcgcgcatgctgcagccaggcggccgctagagagccaggccgggcctgctcccgcagctccccgtccgccgcctcctgggccgccgccgccaccgcctgggcctcggccaccgcctcccgggcctcgcgggccgccactcgccgccgccgccgcctcgccgctcccagccgccggccgtcgcgggccgggccacatgaagcgggcgggggccagagcggccccgagcgggcgcagcggcgggggcggaggcggggcgcacgcgcgggaggcggggccagtgccgccgggcaccgtcgcaaaagacccgcgcgcttgcgctcgccgccgaccctcgctcggcgcccacagcagcccgcatggagtaatcgccaaatggcgacagaccctctcccagtgcggccaccgcccaggctttcggggaatgtctcccaagtgctccgcgctagctcgtcccccatctcgggggccaaggggccatctacaaagtctgactcatctcgttgcccactgcagcagaagagtggggactgcaaggcttgggggttcggcctggtatacaccctcattcattcattcattcattcattcaattcaccatttatttattgaatgccagacacagttgttggcgctgggcatgctacagagaaaaaaaacgataaaaatctctgtctacttgaaacttacattatgtgag

SEQ ID NO: 119935 - DNA, 1000 bp, Homo Sapiens
ccaaggccatttctacaatgattccatatttcactgttaatcagagactgagcagctattatactttttaagatttcttgaatttgtgttgcttgctcagtgttttgtatttccttatttcttaaaatatattaatataaaaataattctttaatatttcttaaaacaaaaggacattaaggaatcaagtcttacttagtcttgctctagccagacttgggctaaggaaaccctaggaaagtcgtggctgctagaaagaacaggatgagacaaatgagagaccagttctctgtggtgctctgtatcagttaagctagatttgactgcaagtcatagcaaacccagtgaaatggcttaataacagtagcatttcttgttttcttaaaatctggaggtaggttctcggtgtaacaatgttgtcagagatgctggctctttttctccttccactctgcattcttcattgtgtggctctgacttcccagtcgttgcaagttgctgaccacagttctaagcttcacttcctcatagaacatatctcattcaaggaagaaggaagataaaggaccatctatatggctctttattttatcaaggtagaaaatcttttccagaagttgtttccagatcgacatctcatttgataggattaagtcaacgtgacttagtcatgtaagaatagaatgaacataatcttaaaccaattggattcatcaattggggaagggcatgttgacttctcagtgaaatcagggttctgtcagtaaggaagaagaagagatggcaattgcatggacaaacaacagtgttcaccatatacttctcttctccctttgacatcacttttaggattttatctactacatacctactgatgtctttcatatctatatacagttatttttctgagttccagataggttatcatctccccattgtacatctgcaattgagtgtccttctagtagctcaaattacatgcctaaaattttactcatca

SEQ ID NO: 119936 - DNA, 1000 bp, Homo Sapiens
gaacacatcagacacatccttcagcctgcatactttagcttcagatagacttttcttttactagaggcaaagtgatctcactagaagaatgtgtttctcaggagctgctagatggcctgtcgctctgtgcccgctcactgtggacggctgccccacgtggatgtccataccacagtgggatccacggcctcactcaaaagagagctatggttcccagatccctgacaagagggccacaatctgaaaaggggttcctggttagctcttttaggcttagcctgagaacagaattagcctcatatttttaggccatttgccatacacattttctctcattctcaactgatacgggtggggggagattttcgaaaacagtgatgttggtaatttatagttagtaaataaaccatgtttccatatgcaaggattcacaccaggggatcctgcccacaggtatctggaggtcaaattcgtatgtgctttctgccaatctgagccactgcctctgtgtctctgagaataatatactctgcaagaaggaaagacgcacaagcaatagtgcagtcttcttagcaggcggaagtcagcacggtgtgccccctgtgtaaggggagttgcgctaagcaatgtgtttggtgattgacagattctctgccccagattctggttacctctgattagtagatgcggacatggaattaagggtaattgaaggatatttatcgagtcagacatacaccttagaataaggcttttactgttctagaaacaatattccagaagatgaaatcatccaggatgccccaaaaatatttatttatacaaagattttgagagtaatattcatacttgtctttatacctcagtctatgcgtctggggccaagtcactgtgtggcacatgtgcagcttccccgaatgcctcacatgttgtagcacctgcttccaggaacaccaaatgaacacagggtcttggaggggaagtgggggaagaacccata

SEQ ID NO: 119937 - DNA, 1000 bp, Homo Sapiens
ggatctcagggtgctcacagactaagacacagaccaagttgtccctgtcttcaggagatgtcagactctgggtgacagccagtggggtggcagtgtggtgtggcaggtacaactaaggaactgaagttcaagtgccaccctgccaccagctcacaccatggccgtggtggggcaccagggctctctcttcctctgggattgttggggccaggagttctctgctggggcttggtggccatttctgcagctcccttccgtgtccctcatcctagacacatcgttcatgtacatgatcgccggactctgcatgctgaagctctaccagaagcggcacccggacatcaacgccagcgcctacagtgcctacgcctgcctggccattgtcatcttcttctctgtgctgggcgtggtgagggcctgacctgctctgctcagcctgtatgataggaaaggtgcacgtgcgttcagacacgtagtgcacaccctccgccacctcctgcatgagagattcctgctccttccctgagatgccttcctgggcccctctcagagtcccagcctggctgagcagccagccccaggaagggtgggccatccgagccacttccctctccaccctcaccgctgcccttggtggcctcccgacaggtctttggcaaagggaacacggcgttctggatcgtcttctccatcattcacatcatcgccaccctgctcctcagcacgcagctctattacatgggccggtggaaactgggtaagggcacgcccggggcagggcctgggggaggggtctggggggccttgggaacccggacgcacgggagacgctcaggttctgtcttgggggccctggagtcactgggtgaggaattagatcaggcctgggctcctcagctggcacatcccaggggtccagcaaaggagggtgccccgtgcctgtcagcaccactcccttctcttcgcagactcggggatcttccgccgcatcctccacgtg

SEQ ID NO: 119938 - DNA, 1000 bp, Homo Sapiens
gatcccgagaggcggaggttgtagtgagccgagatcgtgccactgcactccagcctggatgacagagagagactccgtctctaaataaataaataaaataaaataaaataaaataaaataaaataaaataaaataaaatgatatggaagaacagtgtagcacaacaatcgaaagcataggttttggggatagatctgaattcaagtcaaagctccatcactggccatatgattttgggcaaatcacctaagagtcttcctaagccccacttttctcatctataaaaataggaccaagagcagtttctaacccactggttttttttttttttaaatagcattattcatgtgtttagcacagtgcccagcagatagcttagtaaacaggaactcacaaggctgggggcgcagtggctcacgcctgtaatcccagtactttgggaggctgaggcgggtggatcacttgaggtcaggagttcgagaccagcctggccaacatggtgaaaccccatctctactaaaaagacaaaaattagctgcgtgtggtggtgagcgcctgtaatcccagctactggggaggctgagacaggagaatcgcttgaacctggcaggcggaggttgcagtgagccgagattgcaccattgtactccagcctgggcgacgaaagcgaaactctgtctcaaaaaaaaaaaaaaaaaaaagtaaatggtaactcacaataaccccaggatgtaggtttttactactgaggacatggaatcagagagaggatgagtcacttgtgcaatgccacatggctagtaagtggtgaactgggactcaaacacagaaagtttgatttcaaaacccatactcctgacaacaacactaaaatgttagttgtcatttacactgttattgcagctattgctgctgcttaataacataggaaaatgcttatggtaaaatgttgagcaaaaaaaaaaagaatacaagtttttatgtataggattattctgat

SEQ ID NO: 119939 - DNA, 1000 bp, Homo Sapiens
gatattatgtaccatagttaagtttaaggatctgggtgactgaacggcacaaaaactggggtttctatctagttcttcagataaaaaccattcttttataaaattaaaatgccacagccagttaagagcatgtgctacactgatgtgtcttaatatagtcaaagtgacaaaacaactgctttatgaagaaagagtagtaaggaaatttattggggggaggaaagacactcaaaattctaaacacagctgtcttataggaaaaatataatccatagactccattaagagctgaaattctacaagagttgtttaatgaggcagcaatagagcctccctgaaagagtatgggcttcagaatcagacgtggtcaaattcgagctctgtcacagctgtgttaaattagccaagtttctgaatttctctgagcctttcctcatctataaaatggagacaattagcacctaccttatagaggattaaggtaaaatcatgtatacagcacaacggcaagtgtgggcactcaaaaaaaaaattggtagtttttttaatcgtttttcagaaaaatgaatctaaacccttcatgctatgttcagaaaatcctaaaaaatataaataaagcttactaaagttttaaaaattaagatttttaaacctattttccatcacactttcccccgtatgatactactacagtgatattcaggccgtttacaccattttgtattaatataaatgcccaagtcctaatcctttcatttcctattttctccttcctttcccccatcttttcttatttctttttcctcttggttcttatctattattaaacaactttaagatgtgttatgcacctattatgtaccagtgttctaagcactttacatgaattaacgcatttagctcactcttctccattaggatagctgtacctaacccagctagtgtgttttccccaatttcaaagctactcattactgttcagtttccctttcctataacg

SEQ ID NO: 119940 - DNA, 1000 bp, Homo Sapiens
aggaggaggaggggctgggagaggaggagctgaacgagaaggaggagccagaaggaggagtggaggagaaggaggagcaggaggaggagctgggggaggaggaggagctgagagaggaggaggagatggaggaggaggggctggatggtgaggggctgggaaaggaggaggggctgggagcggaggtgggaggaggggctggcagaggagaaggggctgaggaggtactggaaaagaaagaggagcaggagctggaggaagacgtggaggaggagctggaggaggatgaagagaaggagtgggacgcccacaaccctgttagtaagacactggcggactgtatggtcttatcatcttggttttcgtatttctgcttgtgtggttacttttgccactgctgttactgcttttattagtattcttactctcagtaattgatacaattatttttaattaattaaatgtccgggcttactatctcaaaaataggtcttgaatttctccatctcatccaaccaagccaggcctctatactgctcatttggactcctcaacagccccatgaaagcaaggtctatttccttttctcactccacctccaatcatactccaatagcactcttttagtatctacccttttcccctaattttatggttttctccaatgccaattaagaaaactagcataatggaacctggtgtggtggctcacctctgagtcccacctacttgggaggctgaggcaggaggatcccttgagccaggagttcgaggctgcagtgagccataatcatgccactgcacttcagctgggacgaaacagcaaaaccccatctctaaaaaaaaagaaaataagcataacagacatccaaggaagatgcttagtgtgagcactaagcccacagctgtggaacgcacattcttttttttttgaaagggaatctcactctgtcacccagggtggagtgtggtggcacgatctcagctcactgcaacctcc

SEQ ID NO: 119941 - DNA, 1000 bp, Homo Sapiens
atagtagctgattgctttgccagtccctcaacaacgctcagaaatgttgttttggtatttcaagtgacaacatttttgttttctaatataagattgctttttaaaacattttgctaccactttacttggaaaaattagagaagacatgacaattctccaccctatgtaaagagcaaaatggaactgaacatcatttcattacaaatcctgaagaattatttggagattcttgctctaaatgtttgcttgtcctgaatgtttttgggtagcagtggcttaaagagatccacgatgggtccaaaggactcccgctccagttcttctaatagtttgcctcttggggagcaagcagaagttctttatcatacctagccacttgcttaattaatgctttaagcactaaaagttgttatttttatcaggatgaacaatatcagatttggttgtctttaaaagcaaaaaccaaaaacttattctttaagtaagttagacacgtatcacttcatttaaaattatctccctaatattatggatcattaatatttgatacatattcaaaaagagaccacattgactaacatccagttgagaacaagatgaaaataattgaaatattttttccattttaattcagaacaaggctatatcaagggaaagcgactgggctaaatcctcaatttttttttccaaaatgcaggcatatcaaaatccaggatgtacatggtcttactttgagtgaaatagtagtcatagctgaggtttcttagcctacaatgtgacatagggcctgttgactctcttgaatatggagtagggtttcaaagtgttgacagttgagtctgcaaactaaggctgagttatattttagttttttttttttttcctggttttcactaagtctaattccaatgtctactggcagagattgtgtttgcatttgaggtagtggagggcggtactttccaagtgctgttggaatccagataaactcaaggagccc

SEQ ID NO: 119942 - DNA, 1000 bp, Homo Sapiens
agaaacagtaaagttttaaacgtccctagttctcaaggatccaacattacccaagattaagggcttaaaataatttccaggaagaagaaatggacatgtgtatgttaaaagagatcttgattgcttctcagccttttggctaagaccaagcaaaagagatcctgtgtgattctaatttcccaggatctctcctcatacccccaatagccactaattttctcctctctctgttgttttactgaaactgtgagggtttggggtttttagccaattagaaaaaaatctatttagtaacagacatctgttccaacagcaagaggttccagcatttgggtacctgactcaacagaataaagtattttagtctggctttgacatgtcaggatatgggccaataggaagaattgcaaatattattctgattctgacaaattgcaggtgctgtgatttatgtggtggcatcctctgtttattagtgggaccgtattgaactccatggttttcctgtttatataatacacacaactttgcagtagtgagctggtaaatgtttcacaaccagctctaggtagagagaatcgcatggggaagcctgagttgttctgccaatttccatgaaataaatactcccaccatggccaagttcaagctagcagtgagatatcactgcttgtggagctggggagagagatgcacagtagcatggcattatgtagtatttctaccataaagacacaagagatatcagtaacctcaaaaacatggataacagtaaaatgtagttgaatacttagaaagcgatgcattttgagtatttattatttttgttttgatatcatttatttaatcttatgattatgtaatttaatgtttcataatgtccctgtttgacaaccagctcaaaaaattcctgaacgttttgcaacagatccttccaagcaggtaaaagctggctctgacacagcactgtgagtgagtagccttcttgaactgatcatca

SEQ ID NO: 119943 - DNA, 1000 bp, Homo Sapiens
gttcaccccatcccttcctttgagaattaccatttgtggtatcacattcccattcagtctttgataactttggtcttctatcctcaaattttactaggtttaattataacagaaagttaaagatctcacatgttaactgtcctttgcaacaacctgttaataataataaaaacataccgattatatgtaacctgaatgttcctggtctgtggccctaggacatttcacaagggacttttgcctatgtcaattgggaaaggacctcagaattgcccagtatctttcctgtagccaagagagtaaaattctgtgtttgcttttggaaggcagttatctttatattacacctaagttattcagggacttgggcaaagagtctgaactatttttaaagttttgaggggtcatgtttctctccctagagcacatggaatctttgcagctgtctctaactccatttttggtaatgatgttgggagattttattgtgcaattagaaataagagcatacatctgaactttgtcatacaaagaaacaaattccaagtaatgtaaggtaaatgttctcagtttaaggtttagggtcatcaatcctaataccaatgttactattattactgatgatgatgacagtgataagaagaggaacaacaggttgtactttctgtatagtacttaccatgtgccacataatgttatatgcagtatattattaaataaatcatttaatcttcatccaaagcaacactatgatatgaatactacttttatcccatttaacaggtgaagaaaatgaagcaaaaaggagataagtgactttggccaagatagaaactgcctcaaccatttggaggctctgaaagaatctgatttgggaatggctagctgctatcacaaatccactggaagaaaatgctaaagcaaagaacagatacttgttgagtgagaagaagaggctgagtctagcaagagatgtattgttgagcatcacaggaagtca

SEQ ID NO: 119944 - DNA, 1000 bp, Homo Sapiens
gtgacagcaaccttccttaccctgtgtgtccttgcccctggggtggtcacccagtctttctgctggctctgtactctatgtgaggcagatctgggtggctgcacctctctgtttcaagagcttttgagatgattagtccacaatgctaatgggcctttccaattctcctgtctaacctcaaccaatggggtgatatcatgtttgctgagtggtcatctgccaggctcaatgatggattgccatactctgcataaatgggattgttccagctccacacgcaaactccatgtttatccttcctgctggggatcaggtgtgtggccagcagaggcatcgtcaacatgggaagaggaacatcctctacatacagcaattatgggttacagatttccacagagcacctgattggaaaattgttctgtgttcacactctaaaagttgaaaaagttaaatgtaaacttaacataaccagacaaagaattagtgttcacattttgctatatactttggattggattgtgatcatgatcgaagagaagagtccttgaaactcagaggtcacaggcagcaggatggacaatgccaagtgatgagggatgatatacccagcattgaaacaatgatgtcaagaaaccacagggaaaaggccatctatattgttcaagtacaaacacaggcctaacaaggagggtaataggagggttgctaactttttttactggtaggagatacaaaattagcccagcactcaatatttgacagttaagaacacaaagagatagttcccgcatcagacaagaaagacaaggtagctggacaatggacagatatgtaatccactctgctctactcattgatataaatgtccagattgaatcattatatttcacaggagctccaacattttgtatttgttattgcagtaaattatacataacataaaatgcaccatcataaccatttttaaatgtacagtttgttggcactagggcattcacac

SEQ ID NO: 119945 - DNA, 1000 bp, Homo Sapiens
agctcggtacccggggatccctttcttacaccttacacaaaaattaattcaagatggattaaagacttaaatgttagacttaaaaccataaaaacactagaagaaaacctaggcaataccattcaggacataggcatgggcaaggacttcatgtctaaaacaccaaaagcaatggcaacaaaagccaaaattgacaaatgggatctaattaaactaaagaacttctgcacagcaaaataaactaccatcagagtgaacaggcaacctacagaatgggagaaaatttttgcaacctactcatctgacaaagggctaatatccagaatctacaaagaactcaaacaaatttacaagaaaaaaacaaccccatcaaaaagtgggcaaaggatatgaacagacacctctcaaaagaagatatttatgcagccaacagacacatgaaaaaatgctcatcatcgctggccatcagagaaatgcaaatcaaaaccacaatgagataccatctcacaccagttagaatggtgatcattaaaaagttaggaaacaacaggtgctggagaggatgtggagaaataggaacacttttacactattggtgggactgtaaactagttcaaccattgtggaagtcagtgtggcgattcctcagggatctagaacgagaaataccatttgacccagccatcccattactgggtataaatccaaaggattataaatcatgctgctataaagacacatgcacatgtatgtttattgtggcactattcacaatagcaaagacttggaaccaagccaaatgtccaacaataatagactggattaagaaaatgtggcacatatacaccatggaatactatgcagccacaaaaagggatgagttcatatcctttgtagggacatggatgaagctggaaaccatcattttcagcaaactatcgcaaggacaaaaaaacaaacacctcatgttctcactcataggtgggaattgaacaatgag

SEQ ID NO: 119946 - DNA, 1000 bp, Homo Sapiens
gatcccttgcatttccacatgaattttgatgatttttgcaaaacaggtagttgggatttcaataggaattgcactcaatctatgcaacccctgaatctgtagaccagtttggggaatactgccattttatatttaaagtcttacagtctatgaacatgggatgtctttccatttatttatgttgcctttaatttctttctttacttttttcttttttttttgagacagggtctgactatcacccaagctggagtgcagtggcacaaacatgcctcactgcaacctcaacctcccaggctcaagaaatccttccacctcaacaccacccccgactcccagtagctgagaccacaggcacatgccaccatgcccatataatttttttacctttccgtagaggtgaggtctccctatgttacccaggcaaaatacccaagtattttggctattctggatcccttgcatttccatatgaattttttgttttttgttttttatttttttttgagacagagtcttgctctgtcacccacgctggagtgcaatggcgccatctcagctcattgcaacctctgcctcccgggttcaagcgattctcctgcctcagcctcccaagtagctgcgattacaggcacccaccacttattttaatttatttatttagtagttttggagacagggtcttgctttgccacctaggctgaagtgcagtgacaggatcatagctcactgcagcctcagactcctgggttcaagtgatcctctcgcctcagcctcccaaagtgatgggattaccggtgtgagccactgggcctagccaaatactgtatttttgatcgacatttggttgaaaaatatctatgtattagtaaacctgtgtggttcaagagtccactgtgttttgctggggatttctacatctatattcataagggattttggtctgtggttttcttttcttgtgatgtctttgttgagtttagtgtcagggtaatcctgg

SEQ ID NO: 119947 - DNA, 1000 bp, Homo Sapiens
ggtaaggtagagcgcggcgagcccccgacgcggccggacggccggccggggggcctcgcgaggacgggcccggcgccccgcaagcgaggaggacgacggacggacggacggacgggccgcggacgggcggacgggagggagcgagcgggcgcgggggcggcggccgggaccggtggggccggggcggggcgcggcgaaccggacgccccaaccacccgccccccacgcgacacgaccaccgggggccccgcgccacagacccgcgacgcttcttcgtcgcgcccgcccgcgaggaggcggacggcccgacccgcgcccggcggccgggagggaccggcggccacgcgcgcgcgcgcgcggccggcgcccgcgggcggcggcgaggcggggacggcgctccgcccgccccgcggggcggccccgacgtccgggcggcgagcgagaggcggaccgcggtgcccggcccggggacagtcgcgccgtgcggccgcagcgcccgcgcagccggtccggtcgagggcccggggcccggccgaagcccggctccgagccccgccggcgggcgccggcgcaggggtggcacacgccacacgacggccaagggagggcgaccgaggccggccggcgcgcccgcccccgcccgggacgggaggcagcgaccggggccgaggccccggcccgggccccaccccccgacccggggagagggcgagcgaccggcaaggcggaggtcgacccacgccacacgtcgcacgaacgcctgtccgggagggaccaccgggccgcgctcgggcgcacgcgcgcgccgaacggggcgacgccacgcggggaggacgggctctccccgacgccgacgcccgggacggacgcctcggggaagggccgcggcaggcccgggaagcgaggcgcacccgggggacgcgccgacccggttcggaagagcgggccgggagaagacgagagaccacgggcgaggccggggcgacggggaaggcgcgag

SEQ ID NO: 119948 - DNA, 1000 bp, Homo Sapiens
gatcctgcagggcaggatacccaccccacactctgctccccaaggcaagcctcggtttccccatctgtagagtgggagccgtcaccaaggctcagggcgttggaggttgtccctggatgtggcttgagtgcaggaagcagtaggtgctcagttaacaaaaaaactacagccgggcgcggtggctcatgcttgtaagcccagcactttgggagggcgaggcaggaggatcacttgaggccaggcattcaagaccagcctgggcaatgtggcaaagccccatgtctacaaaaataataaaaaaaaattgccaggtgcggtggctcacgcctataatcccagcattttgggaggctgaggtgggccaatcaaaaggtcaggagatcaagaccatcctggctaacatggttaaaccccgtctctactaacaataccaaaaattagccaggcgtggtggcgggcgcctgtagtcccagctacctgggaggctgaggcaggagaatcgcttgaacctgggaggcggaggttgcagtgagctgagattgtgccactgcgctccagcctgggcgacagagcgagacttgtctcaaaaaatatatatatatgtgtgtatatatatatttttattattttataaaaatatttttatatattttatatttattattttataaaataataaatattataattataaatgatatttataattatataaatattattataattataaaataattataaatattatatattttatttaaataaaatatatatttattatttataatatatgtatgtgtgtgtgtatatatatatattagccagacgtggtggacccacgtggtggcacctgtggttccagctaccccccattccaagctgagagggtggcttgagcccaggagatggaggctgtagtgagctgcgatcgcgccactgcactgggtgagagctatgagaaaacttagtgacaaggaaactctccctctaacccttc

SEQ ID NO: 119949 - DNA, 1000 bp, Homo Sapiens
ataggccgggcgtggtggctcacacctgtaatcccagcactttgggaggctgagacgggtggatcatgaggtcaggagatcgagaccatcctggctaacacagtgaaaccccgtctctactaaaaatacaaaaaaattagccgggagcggtggcgggctcctgtagtcccagctacttgagaggctgaggcaggagaatggcgtgaacccaggaggcggagcttgcagtgagccgagatcgcgccactgcactccagcctgggcgacagagccagacgctgtctcaaaaaaaaaaaaaaaaaaagaaaagaaaagcttgatacaccttacaatccccaaataatggctttcttcaacagtgagtaaattgaaaagcaatttgagcaaaaacccagaggctcaaatatgaataggtgcatcacaaaagttgaagagggggctaattaactccctcaaagagttaaaagaaaaagcaacaactgcgagaagagtgaaaaataagaataaaagtatatgtagttgcaaaaagtctgaatgtttacaaaccctgtgaccacaaaaggggccacaaaaggggccacagggagtgttatcacaggaggaaaacggttgcttcaaaaagcagaggagcaggggtaataaagattccatttagttgaaaagatttaagtaaagtttgaggacagttaggtgacatgttgaaatgtggaaaaccacagtggaaggggaaaagacccgataaagttcagtttcagcaaccaacatccgatgaaatcctcaggacccagtgactgcattctatgtcaataataatattggctgaggtcccaggaatgtcattagataccattttggatgattcttatggacttgaggtgaggtctattttgttccaaatcagtgcctccatttaacaacagacgtacacaaaaatacgtatccatgaccaagaaaactgaagaattttaaacttgctaagcaggactatactgggaagcat

SEQ ID NO: 119950 - DNA, 1000 bp, Homo Sapiens
ccaactcattgctctgacttgaaagatgaacgtatatatgaattctcattttattctcctgagaaattatgcatgatccattataaaacatacaggtaatacaaagtccaaaagcctgtcatgtttatggcagtggtgtgatctcagctcacggcaaccttcacttcccgggttcaagcaattctcatgcctcagcctcccaagtagctgggaccacaggcgtgcgccaccatgcctggctattttttgtatttttagtatagacggggtttcgccatgacggtcaggctggtctcaatctcctggcctcaagtgatctgcccacctcggcctcccaaagtgctgggattataggcatgagccaccatacccagccagtttcatttattttcataataggttatgagtacgtgatgtaaatgcttaaaagtcatcatcaccatactgtgctaaagatattgagaaattatgcagagaaatctgtgcaaattcatcttcttagtatcagatggttaaaaaaaaaggaaacaaaaaacaaaagcaatccaaattatttctttaaatactcttatttatactcaggaaaacagatttgaaaaactgaacaagtagacatctgccccgtttatgattaaataacaatgccaatgaaggagattccacagaaaaaactgagatgaaaaaatccaaataaaagccaacactgctattaagatttttcttttaatatgccatgagatatcttgattgtatattttccaaagtactttccagccacatctcccaacccatccaaaagactttgccagtctttccaatgcaataaaagatgctggattatagttttgtctaccatttctttttgaaagcaatattatactaatgactttaatggtaatacactcttatctaataaagaaacacatttacaaatatcagaaacccagttttgaaacatttgcattaattttgaactgaatcagcattttgtgggtttttt

SEQ ID NO: 119951 - DNA, 1000 bp, Homo Sapiens
cgcctccgcggagccggcgctcagatgccaaaggctggagtcgttggtgacgtcatccagggctgggctatgcggggtggggccaagaagcaggaccaaagttccggtatgcgcgctttcagtcttcaattaggtccgaattcccggcatataagggcgttgctttgccttggcgtttaggtttcttaagttggttttagaagttgcttagtcatgtctggccgtggtaaaggtggaaaaggtttgggtaagggaggagctaagcgtcatcgcaaggttttgcgcgataacatccagggcatcactaagccagctatccggcgccttgctcgtcgcggcggtgtcaagcgaatttctggccttatctatgaggagactcgtggtgttctgaaggtgttcctggagaacgtgattcgtgacgctgtcacttacacagagcacgccaaacgcaagaccgtgacagcaatggatgtggtctacgcgctgaagcgacagggacgcactctttacggcttcggtggctaaggctcctgcttgctgcactcttattttcattttcaaccaaaggcccttttcagggccgcccacttttttcataaaagagcagacatcttgttatcctgctttgttccagatttttgctgagaagtagttactgtgcacatgtgtagatttgcaggtaacgtttaattactcgtgcttaatctcgcatgtttaggatttgggcataaagtacttaaagccactgttttctgcttgagggaagttggtatgttgaatatgtttagctttcttgtggcattttaacactagatatcagtgagtaagctggattgtgacagtttataattcccgtgggccttcctccttcagtttaagcttgaagcgttcgtaaggttctcaaagactacagaagttggaaacttcgcggagagactgcaagttaccctttccaaaatggcgggaagggctaaaaacaaagaaagctcgcacccagacg

SEQ ID NO: 119952 - DNA, 1000 bp, Homo Sapiens
tttcccctgcccagcctcatgaagccaggataccaggcacgtggatcactcaggcctcagaatgaggctgctttattggaagctattctgacatcactttccagactgtctcactgtcttgggaccaggcatgggaggcaggggtgggaatcttcttgtgattgtgggtggtggctggaggagtggagtggtgggaggcggctcagtcgcgggcactcctgcgactggcggatgcggtccggatggaataagccttcaggagcccaggacccgcactgctggagaagctcagggcattgctgcccatggttcccccgagggtcagcccaatgccaccgccactgctactgccaccagtggaattcatcacagctgggagagaaaagaggagggctctcttcagcgtgaggctccctaccagggaccccatcccttcactgcaccccaccctcctgccccagctgcccctctccctcacccctgcccccctccatgggccaacccagaaggagcatctgacaggggtagggctgctccccaggtgctcctggccccaccctgccctcttgtagtgcttcccaggccattgagcctggcagtatgtgctccaggggacctgtcaatccctgtagaaaggaaggagtctcctggcccctccagcagggccctgggccagtctgccattctctagacccagccccatctaaacagcacaagggatgcttcccatgggccgcagccaaggacttacagatattcacggctcccactccatctccagccaacctgggggcagaggacagacagtgaggacggctctttcctagcgtgggagggaagcgctctcagccctctctccttccaggccccaagcaggatcattgatttttccttcttgccccacacttccagcctgccttcagccttgtaaaaggagcgaggaggcatgcaggaagggagtgttcaccttggcccttctatccactggccacctgacccc

SEQ ID NO: 119953 - DNA, 1000 bp, Homo Sapiens
ggaaataaagattttattacttacaggtcctgggggcacaccgcacacccaaaggtgacctccccacccgtcccaagcacacacacagacacacacacagagacatacagaaagactatatattttttgaagcaccatttcacatctaccaacaagaaaaataacaaattcatattctcattataattctgttatgaaggataataatgaaatatacaatgccatatttaaaatataaatgctatcagtaaatgaaaatactgacagagcttaaatctctgttcagaaatatttttaaagtaaggctcaaataaacgtgtagattacaaacactatttcctgatcaatcctaatatttaaatgaatgcaaaagaatttatttcaagaccaaataaatagaatgaagagagaatactaaattaaactcagctgatgaaacatccattgttaactgcacccatgcaaaactccacaatacaactaactgcttttacccttatgacccgatgcaaaatgcaagcacaaaacggagaatatgtatgtacttaactttttagctttctatatttacggctaaataattgtctaaggaagacctttgctttaaataatcttggcacattaaagggtaacacagctccctaatttgaagaacaagacataaaattcagataatttatgcattgttataatttagaaagaagcctgtatctaaaccaaactttgagaataaaggctgattgcttttatttatttgctaactgcttgactttaactacggacattaaactcaacatcagttcaacatctgtcataggtaagaagctgttctagatgctgacattagccagcacttgattatgagccactgtgttttatcaagctgcctatatttttcagtagcaacttacctacatattccataagttatcaacaatcaagtttaaagtctaggctccctcctactacccagtacatgacaagatgatctcccccaatt

SEQ ID NO: 119954 - DNA, 1000 bp, Homo Sapiens
tcaatatggttggtccaagagaacaaagaaagactacatggctgggaatttgcacaaaagaagacaggagataccgacgtagattgaaagggtgacgctgtgcctctggatccagaagaaaacatcattactgtctgtagagtcagtgattgtgttcctaccaagagtgcaatgcttttattctaataatacttattacttcatgtctgaaatattttacatttattttaaaagtctcaatcctgtctgaaaatgagagtgactgatacatgccatttcctgacaggacattttgtgccattccatagttggagtatatgtacacagggaacgtattatccccaataaaaactgtgaactttcatgatcttatctccttcctgagaagtgagttatcattttacagggagttgaaattatctgtgaaaatacttgtgaaatgaaaattacagaaatctattaataataactgttaggttttgaagggaaggcgagggttaaagaaaggcagagttggcagctctacagcaatgcaggttttatgtccagcacgagacctgtgatggggagaactagcttagtgccagaacccctcactgcttacaggctggggcaattataggcctggatgagaggggtcaggggtggggggcagggggcgcggcgggagggtatgacttgctgcccaggaggatggtgggtttttttttgtttttggaggagtctcgctcttgtcgcccagccttgagtgcaatggcgtgatctcggcccactgcaacctccgcctcccggagttcaagcgattcttgaactccgcctcccgagtagttggctttacaggcgcgtgccaccacgcccggctaatttttttgtatttttagtagggacagggtttcaccatgttggtcaggccagtctggaattcctgacctcaggtgatccgcccgcctcggcctcccaaattgctgggattacaggcgtgagccacagcacccggcca

SEQ ID NO: 119955 - DNA, 1000 bp, Homo Sapiens
gatcttgactcactgcaccctccccctcccagattcaagcaattctcatgccaattctcatgtctcagtctcccaagtagctgggactacaggtgcacacccccacgcccagctaatttttgtatttttagtagagacaggatttcaccatgttgaccaggctggtctcaaacccctgacctcaagtgatctgcccacctcagcctcccaaagtgctgggattacaggcgtgagccacagcacccagcaaaagcatttacttaccatccttcctggggcctttcagggacccttgagggatgggcaggggttggggggcccgtggaacttcttctaggatgaggtgacctcgtggacccctggttccggctctccttccccaaatcacccagtgaggaatatgacaccagcccagggagcagaaaagcctccttcaccttccccagagaagcgaggctcccctgggtctcacggtggaaaccatctctgtatttgctggcttgactctaacaggaagaattcctgagacacggtgtcgctggctgcttgctacctcccaggtgactgctgaggggaggcagagtttaacctgatgccagctaagagtaatttcccccaaaagggtcttccattttgagatgaggaggatgtgaggtgtgcctggggccacacatgccagggaccttcgtgacaatgtcctggacaccatcgccaggtgatgggcatcggcttgtgtgagccccgtggccaccagtccccttgccgggtggctgttttctgccatcgtggtctgggttaccactgatatgcaagcagtatcctcctcgcccctgtgtttctagcatcaactctgatttctcagcaaatgacagagaatagacaagaaagagcaagaaagatctcccaggacagtgctcaggcttggcgaggggccgttctcatggtggggcagacacaaaagtagaacgagggctcccagtggccctgtctctgcagggac

SEQ ID NO: 119956 - DNA, 1000 bp, Homo Sapiens
gatcagttcttcttgtccctgttccatcttggtgggggcggcaggaaacatttttgtgcacttgtaagcttctgaaactggtataaatgagaaaaaaataagctttctttcttattataaacacaaaatacctgtggtgtaaaagataaaaaggcaaaactattcaccaccaatgattccaccatccagatacaaatactgttaacaactggagcatatcatactcctatctaggtatatatattttacacaaatagacaatataataagtgctattgtatgacttttttcattacatatattatgaggctgtgtttatgtgactaatatatcttgtcatctgcaattataattttaaatggttgcatgatacccattatacagatgtgtcataatttcttaagccagtcaccttttgttggattaaatttgtttttatttttgctattataaggattgctaaaaagaatatgcttgtagcaaatatttgtacctaccttgactttccttcttatgataaattattaaaatagaatggttggactaaagcatgtatacattctattttatttattttattttattttattttttgagacggagtctctctctgttgcccaggttatagtgcagtcatgtgctctcagctccgctcagcaacctctgcctcccagattcaagcgattctcctgcctcagcctcctgagtagctgggattaccggcgcccaccatcatgcctggctaattttataattttagtagagatggggtttcgccatgttggccaggctgacctctaactcttgacctcaggtgatccacctgcctcgatctcccaaagtgctgggattacaggcgtgagccaccgtgcccggcctaaagcatatatacattttaaatgcattcccatatattaccaaattgctttccagaaagtttgtaccagtctatactcattgaaatttattagtgtctatttccttgtacccttgccagcac

SEQ ID NO: 119957 - DNA, 1000 bp, Homo Sapiens
gatcccatctaatgggcataccgtcctaacagaaaggtagtgatggcaaagctcagcctaaaccccaaacctgctaatggtgggacttcaggccacgttgcagcttcttgctgtgctctgggaaggggcttctgttcagactccagggccgtatggggaggctgcccctagacaagccccggccccaggcctctgccgagggttgcagggaaggctggtcctggcctgcagggcctgaaagagcctgggccaacaccaggaaggacccgagggcccatgtgacttttaatagggcagaacagctgggccaggagggggtgggagggacagccggaaatgggggtgacgccagcctgtccacctcaactgtccccgaggctaccagaagtagtcgggagccaccctgggtggaaaaatggggcaagaaggagtgccaggcactgggcagaggcctcacctgagccttggtcttcccagccctagcatggacaaacggggccatgccaagctctccgaccttcagcagggaccttgagctggagctaggtgacaacaatggtggtgatggtcactgccggtttctggatgaggaaacggaggcggagggacccccctagggccacctacgagggagggcaatggcagcaccaaatccccaagccccgtggtgggaaaggcacaggtgcccctgccccataacaaaccccatgtggcagggctagaggttccccagagtcaggaatgcgaaagacacctgctctccgaaagacctggggcagagcctggtaaaggacctgtgccctgaacgtatgcagagctttccaaactcaacagcaagaaaactggcaacccaatctttgaaagatgggcaaaaaacaggaacagacccttccccgcaagatccacacacagcaaaaaagcacatgaagagatgctccaccttgccagggaccaggaaacccaggtcaagctgcagccacatgccgagcgcacccagtgg

SEQ ID NO: 119958 - DNA, 1000 bp, Homo Sapiens
tgtgaagtgttgcttccagtctactaaggtaataagcaagtaacaagatagtattgtttgatactcttgaacgcactctgattttcaattccaattttgtttgaacctgtcagcattttggatctggccccgtcatgtcctaccgtcattttattcttttgggaacctgtctggggggggggtctgcccccgctatgttctactgtcattttgctcttttgggttttttgtttggtgttgtttttgttttgcctttggcaggacaaattcctttggatcccaggctttgaacttggtgaaaaatgtccttcttcctttcttatctcatagaatttggtgcagcccctcatttcagcttgaacctatatattttgtgtgattattttattttgttgctcatgttaactagagtataatcttcatgaagccaggatatatgcttgctcaccactgtatcttcaaagctcagcatgatgctctcacataattgtgctcaataaatattttccatggccagacgcagtgactcacacctgtaatcccagcactttgagaggccgaggtgggcagatcacgaggtcaggagttcaagaccagcctggccaacatagtgaaaccccgtctctactaaaaatacaaaaattagccgggcatggtggcatgtgcctgtaatctcagctacttgggagactgaggcaggacaatcgcttgaatccaggaggtagagtttacagtgagccgagatcacaccactgcactccagcttgggcaacagggtgagacttcatctcaaaaaaaaaaaaaaaaatcacacttgatgaattgtatagttgttggcacagattgaaagctatgtggtgacaattcaaattctaggttattgaactagatcacaacaataatgagataaatatttgcacgaaacagaaaatcccagtgcttagaatacaggcagctgcttgctgaagactttactgtaactatccatttgcgccctaat

SEQ ID NO: 119959 - DNA, 1000 bp, Homo Sapiens
tgtgcagaaatgttcatcaaatctgatcagtcaagggactaagcccataaccgagcatttgaaaaattgcagggaggatgaaaatttgggaatcctgttaatgaggagattgaatcacaggttcctgggccacagaatgtgagcattcgtgtcctctgctcaccttggtctccgcacgcctttgcaacatgaacaggtcagaagtctctcccatctaccttctctgtagcatctggggttccaggcatggtttatgccccattccagcaataagaaccaatctgttgtacaatctgaggtcttggttctgttattcataaaatgatgctgtggtcctgagattattcgggacatttttggctctcctttagtggacacctagagccacagattttcttctttactaaacaaatcccatggattatgatttctgggtcttaggattttaaaaatgaagagatatttttcatatatttgttaagttcagttctgatggtgcccgtggccaagagttagaaacatggacagttcccattcagtcttggcactttgagttgtcttggggaaaagcttacattttaatttaaaagaaaggtcaattatatccatgcttaacaggatcagcaggagctttataaatggctttacagcgactaataagggctttgatctttcttttttgttatcgaggcttttgaaatgtggaacgtgtgtgttctgctatgtatattatattcaatatcttttcagatgcagtctatattttatgctgagctttttaaatgaaatactttatgtggacaggcaaaactggtaccaaagggaatccttcaaaatggggaacaacatttgtgtaaggagaacaggtgacaacatatacgaagtgtgtgctaattgtaaaatgagaaacttcatccttaaagcacatcagaattgaatacaaataatctatttgtcaatgaaataaacacagctctttgaggatttgagactacattca

SEQ ID NO: 119960 - DNA, 1000 bp, Homo Sapiens
tcggaatcttctagtgagtcagggagccaggctggagtgtttctgtctggagagggaagggcatcccagctggagggaacagcatatgcagagagagcgggtggggaggacaaggagttctgtttgacctgagcatggagagaagatgggcaatgagcctagggtgggtggcagggatgggatgggggctgtgtgccaggctaagaagctgccactctggattgggaaggggttgggcaagcaggcagaggggagtagctgcccagtgagccctggatgcaaatcccgaccttgccgcttgaacttgtgcaagtcataggccctcttggagcctcagtttccccccttcattatttgggggtggtgcccactcctaaggacccttcgagccctgcacactcttattatgtggttgctgctctcttgcactcccgacaaacagagagactccttgggtagatatgaaatctctttgatgccctgatttcttgttgccatgcatggctttgctctgcaatgttccaccagccctttgagaggcgtgtgtcccagtgcctccagttcacaagggagcctgggtcgacatgctctttcttactttcaaacccttcctcttgtggagtcccgcccagggcaggccagtctcgtgggcctgggcctgggcatggacatggcccagctctgagggcgggggcatcaggggcatgagtgggatcagcatggccattggcatcagtggcatcagctcctccgaggccccaggggggatgaagggcagctcattaggatccaagtgggcgtcactccagccctcggagctatcactgcggtcctctggattggtggcttcattctcagatatggtgacaatctcagtggtgtcttctccagggttgctgtctaagtcccctgctcctcggctggtgcctctctcaagtgtgctggctgtgtgggcatctgctgcgccctcctgcttctgcctagagccagccgaaggggc

SEQ ID NO: 119961 - DNA, 1000 bp, Homo Sapiens
tgttccaagatgaatgtacgtgtgtttgtttgtgtaggtttgtttatcagggtgtcatatttgagtgtctccccgataagtatgggggaggcagaagaagagtgcctggagggggtgcctaataaagtcctgctgctccataaagacttactgctgttatactgttattcttattaataataaaactgatgatagagtatctgtctctttgcctgttttctttgagcatgtccgtctgttcctaaataatactggacatttatcccagtgatattcaatgcatatgaggctattcatacacattatatttagctgtgatgtttgtattacatgaatgcttctgtctgcaagtttgtgcacatttgggcatttggacactgatggatgcagacacatgttatataacagtgtgggtgatcatagttgtagacatctggatgtttacttatgcacaaacccccatgagtatccagttagctaggcctggcattggaagggtagagaagctaggaagaggagggagcagggaggaagaggagaggtggggagaggagcaggtaaggagaaaaagagagaatggaggtgaggaatgaaggcacaaaggaacaccagaaaaaaatcaggaagcaggagggggtcccagggatctgcaactgaaaaaggcagggttgagtcacagcaagaacacaagtcagaagaccagggtagggctccacttctggtcattcccttgctatgtgaccttggctattccagttctctgggcctctgtgaactaccagagttgaaatagataataccgggtacattccaaagaaggaaggaaagagaaaactggtaataaaatcacacacggggaaaaacagagagaaagaaccagaaagagagacttacgaagaaagtaaggagaggccctgggagctggccagaggtagagctgaaagagctctgccccgactccctgaggccgaagtgtgggcgcctgctccccaccccttac

SEQ ID NO: 119962 - DNA, 1000 bp, Homo Sapiens
tatttgcaagagacatacctaacaaaagattgttattccaaatattcaaagcactcttaaaacttaataagaaaacaaaacaacaacaaaaggaagatttttaaaatgggccaatggtataaacaggcaccttatcagagaagacatacagatagcaaacaagcataataatgttcaacattttatgtcatcaggtaattggaaatcaaaatgagataccacttcataatagtataatccaaaatactgacaccaccaaatgctggccaggatgtggagtaataggagctctcattcactgcttggtgcaaatgcaaagcagtatagccacttggaataatttggcagtttccttcaaaattaaacatacttctaccatatgatccagcaaattgtactccccagtgttttttgagggggtagtgaaagagtacaggtgtagagttgttacctgggtatactgcatgatgctgaggtttgggatatggatggtcctgtcacccaagtgatgagcatagtacccaacagttagtttttcagcccatagcctcattctcccttctgtctagtggtccccagtgtctgttgttcccatttttgtctatgtgtattcaatgtttagctcccacttataagtgaggacatgcaatatttggttttctgttcctgcattaatttgcttaggatgacctctagctgcatccatgttgctgcaaaggacatggttttgttctaaaatttgtaataaatgcaatagaaaccaagtttgttttatgcctactgtattccagtactttttataaatgtagctttttagatagtctgatataatctcataaaatctaaaacatctagttcttcatttggatccctaggtctgcaatatttaatcttgctgtattcatctgtgacttagcattttcccatggacaatgtaaacaaaaaagaaaataattattttagcatgaaataaatccaatacaatatgtagcaaactact

SEQ ID NO: 119963 - DNA, 1000 bp, Homo Sapiens
ctagggttgttggagaaacattggtcaaaggatacaaaatttcagttaaaaagggggaattagtgcaagagacctattgcacaacatagtaactatagttacaattacaagattactattaattttgaaaaataagagaatggatgtaaagtgttcttaccacaaaatggtaaccatgtgaggcatatgtcagttagctagatttagtcattctataatgtatatatgcttcaaaacagtatgttgtacatggtaaatacatacaattttatctgtcaattggaaaaaaaaatcaattgtaaaagcaagtgtttggaaaacatttagctggaaaggtctgataggaggtctaacccttatacacttaaaaactcaacaactggctgggtgcagtggctcaagcttataattccagcactttgagaggccgaggcgggtggatcatttgaggtcagcagttcgcaaccagcctggccaacatggtgaaaccccatctctactgaaaatacaaaaaaattaaccgggcgcagtggcgggagcctgtaatcccagctactcaggaggcttaggcaggagaattgcttgaacctgggaggtgaaggttgcagtgagctgagatcaaaacactgcactccggcctgagcgacagagtgaaactccatctcaggaaaaaaacaaaaaaacaaaaaaccctcaacaactgtttacttttggtattcaagctcataaaagcctcatttactagtctactgctggtaaggatcaggaagggaaaattaagattaccttcatgataatcacgtgtgggttgacacagacggagacaataacatagaaattttattacagcatttcatgtttaagccagattccctgccaggatattttctgcttgaattaatgaggcaggatttggtcataccttaatgagtttcacagaaaaagagttcaagcattagcgcaaactgccttctgacattaaaataaaataaagcaaaca

SEQ ID NO: 119964 - DNA, 1000 bp, Homo Sapiens
gatctaatatatacaaaatcctaaagactgtaacaaaaacctgttagaactaataaatacagcaaagttgcaggacacaaaatcaatatacaaaaatcaatagcatttctataaacaaaaatggactatgcattaaaaacaatcaagaaaacaatcccatttataatagttacaaaacctaaaatacttaggaataaatttagccaacatggtgaaagatctgtacactgaaaactataaaacattgatgaagaaaattgcagacacaaatgaatggaaagatattccctgttcatggattgaacaaaataatatgttttaaatctctatactgccaaaaacaatctacaggttcaatgcaatccctatcaaaattttaatgtcatttttcacagaaatagaataaacaaccctaaaatttatgtggaaccacaaacacacacacacaaatatccaaggcaaacttaagcaaaaagaacaaagctagaggcatcacattacctgatttcaaactacattacaaagctatagtaattaggacagcctggtactagcataaaatagacacatcgatgaatggaagagaatagagaacccaaatgttagcccatgcatttatggtctattgatgtacagcaatgatgccaaaaacatgcaatggaaaaaaggcagtctcttcaacaaagtgtgttggaaaaactggatattcacctccagaaaaatgaatttggaccctcatctcataccatatacaaaagtcaactcgaaatcaatgaaagaattatgaaacataagacatgaaactgtaaaactactagagaaaaaacatggggaaatttacattagtctgatcactgactttttggctttaactgcaaaagctcaggcaacgcaagaaaaatagacaaatgagattacatcaaactgaaaagcttctgcacagaaaaggaaacaattattagagtgaatagacagcctacagattggaacaaaatatttg

SEQ ID NO: 119965 - DNA, 1000 bp, Homo Sapiens
ggatcatgttgtgattatgttccagtaaaactgccttaaagacaaataaaaaccttaagctaaataagtcaccctcagaattattcagactctcatgaatggtggggctcaaatacctaacaacttgctttctttttcaactttatagagaatctagtgaatactctctcccatttaaaaaaagggtgactcttttctcccacaattacagaactattatcttattagacttccatttataatatatgccagcttcatgatagaaggcttttgcaggcctgtgtacacaagaggtttcagaatcacctggggagttgtttttttttttttttttttttttttaagacagagcctcgctctgtcgcccaggctggagtgcagtggtgcgatcttggctcactgcaagctccgcctcctgggttcatgccattctcctgcctcagcctcctggtagctgggactacaggcaccagccaccacgcctggctaattttttgtatttttagtagagacggggtttcactgtgttagccaggatggtctcaatcttctgacctcgtgatccgcccacctcggcctcccaaagtgctgggattacaggcgtcagccaccgcgcccggcccacctggggaattttttaaaagcatagattctaacagcttcccccagagtgtctgactctgaatctaagaggggcccaagaatctattcccaagataagcaaagttttgaaaaccaccattccacaaacatatgcttagagaacagttattcaacttaagtttgtataagcactcaaacatacttttaaaaacatttgaaagtataaaatgaaaactgtcctaaatataaaaagaaacagagtgactggccacccactagagaaattatgacatttatttacattcaagaaaatctctcccgtcttaaacaaaacacaacaaataccctccacccctaattccctctctaacaactaccttacccttctaccaacttc

SEQ ID NO: 119966 - DNA, 1000 bp, Homo Sapiens
tattaaagagatggacatggaaagtatcacagcaaaatatgctatgtactaaaatataatacacacttaccttggggaccaaacggaaagtgaatttattatccagtttactagtcagaacttgataattctctaaataggtaggatagtggagatggaagagctaaagatggtagatgctgtctactgaaatggggactatctaataagcatgattaccgggagcatgtcagaacattctgtgtatccatggtggtcaatgacttaaatctacatccattttcagagatcaaattccattcctggcccattacagaaacactacctgggcctcgagtgagcaaatgccaagaagctatttaacaataggcaagcacggcaaagagaggcttaaaattggcgaaaagtgcttcctttgcagtcatcctattcaacttgtggcagctttgaaacagcatcatgaattattattttaatattacaaataaactttattcttctcagcaacttgcctcctgatatgttaaaaatatacaaaactcagtttgtcaattcctgggaaattattgtcatagcggggagccataccaaggaagtttaaaagaacaatgataacaatataaaaaactgcaggagaaaagccataaagataggtttcaaggcacacttttctatcttccttttcactgttgatttgcagtcagtgatagatcgactttttttttgtttgtttcatttgtcctcttcctttcactaatctgggctttatttttgtttcaattttccctagctttcttcccagataataactatttccttttcccaagccctaattcacactttatcattctctcactgaagtgcctttcacagcaatccaatcaggacacttctgttcagtttgttccaaggggcttatttgatcatcatcaagaagataattgtctatccttagagctgggctaaacaaaagggtgaagcaggttgtgcacaaattcac

SEQ ID NO: 119967 - DNA, 1000 bp, Homo Sapiens
ccctttactttcagcattcagtgcacgtttctgttgcttgcaaccaaaagtcctgggtgaacaaattccctgcccagaacagcaagtgcagtaagacaccatgacaggagcgggagggaaggcctttgctatgagctctccattaccagtttgggcttgaggggtgtgatttggacccatggtataaaccaattgtggaactggattttaggaggaggcttgaagacatgttatgtacttactgtatcttaatttttgttctttggttgtaaaatggcttagcgatgattaatgacttaggatttttcgacaaaatctacggatttcccaacatttggcagagggaagaactttagcacccgagcccccgggctgggggaggtggtcctgggctggaaacagaggaagaaaaaggcgaggggagaagcacggggaactgtttctcttcttccttggaaagcaaaaaaattttggattccttgttgaataaggagaacattcctcacatttgctcccactgtgcaaatcctccagtgcatccgccgtcctctgggcagcgtaaggccaggctcggttttgacttcccagcattttgggtggattcactctgccaggctcaccaaggtcccttcttctctggcttccctgtcaagaccccattcgtaacttctccacttcaacagaaaactcggcttcctcccatcccctggactagctcccatttctgtcctagctcccatttctgtcctagcaccttgtcccaccacttagacaccaggcaggacagggtgaagaacaaaccacgaaaccctgccaaccatggctgctccagtgagaggctcctcaggagtgtcttagcatttcctgtctgctccctcaggcgccctcctgaccccgagaggggccctagtgtcccatagccggaagcatggggagtgctggaaaccccactgcagtgggggtcctgggggtggccacggcgctgctcgccttggccgca

SEQ ID NO: 119968 - DNA, 1000 bp, Homo Sapiens
gatccaggagagaactcacacaagaacaaagccacagtatctgtcattaccttaaactgaaagtgatgagccgtcatttctgctatatttcataagtaaccctagctaatcctggttaaaagtggaagagaactacacaaaggtgaaaatagggatttgtggggcgttttcttggactctggtgaccataatcctatatggtttttttctttttctgttttagttgtttaatatgaattacattgactgatttttttaaatgttaagccaaccttgcatttctgtaataattcccatttggtcatgatgtattagtcatttagtatattgttgaatttgatttgctattttgttttgttttgttttgtttttttgtaacaagttttgcaccaatgttcacgagtgatatttgtccctaactttctttcttgcttgcttgcttttttttctttgtaattttatatcttgcccaggtttggctttggtatcagcataatgccagctttatagagtaagttgggaagtattcctgctcttcagctctctggaagagtttgtgaataattggtattatttcttccttaaatgtttggtagaattcaccaaggaagctgtctgggcctggagtttgttttgtaggaaagtttctaactataagtttgatttctgtggtagatagagggctgtacaagttatatgtacatctgtctgtgtgtgtgttgtctgtctgtcactctggccctgaagtgtgttttgtaggacagcatctaactacaagtttgatttccatggtagatggagggctatactagttatatatacatctgtctgtccgtccatctgtttgtcactccatccatccatctatctctagagtgagctttgatggtttgtgtctttcaaggagtttttctgttttatttaagtactcaaatttttcaaaatattattttcatacttgtagaatttgtagtggtgcaacctcttctattcctgatac

SEQ ID NO: 119969 - DNA, 1000 bp, Homo Sapiens
atttggaggggaatatcaggagtttaattctgggtgcattgagtttaagaagatgcctgttaaacatccaagtgaaaatgtgcaggctagagatctacatttgggaatagtcagcatgttgagcatctcctgtgagctggatacgaaggcattacagttcccatttatgaagcatttcccaattatcatctcatctagtcttcataatagcctgttgagaagtggagacaggctcagagaagtcctgcacgtttcctaaagccacacagttagcaagtagcagagcccctcaaacagctcatcttctgggaggtagtggctcttgaccctgaacaaggtactttggctgtctaagcctcagttttcctcatccacaattgggggcagtagcaccaaacatgattatcttctgaggcttaaatgaataaaaggggctctgaacaaatgttgagtccctcttctcttctttccctctgattccagcatcctggctctctccagacgctgccttcaggttgagaggcttcttcatcaatgaggacccccaggctgtatggcagtgctttttgatcacttcctacagatgctcatttaagatgcctcagtttcacccactttcacttgactgtgagcccccagaagacgagcggctgtatttccctcatccctttagccccatagtttctacaatagtgctttagattctgccactaaccaaccaggtagactcaagaaccagaatcatcctttttggcctcatttccctcacttattccctgtttctctcccactgttctccccctgtaggtcaaggccatgttctaggggtcctgggattcctgtgaccccactcagaaggctgggggatggggtagagtctacaacagaatgctttcccctcagcctgtaaccatctgggcaccaaaagggctgagcagccctgcccaataaaaatataatgcgagccatgttcgtagttttagtttctagtaagcaggaa

SEQ ID NO: 119970 - DNA, 1000 bp, Homo Sapiens
aagccctctgcctgcatacataacctggaaacccatatttacagggaccaagaccttgagttattgtcctaagttcatgtcctgtcatatcattgccagctgggtagtctttagcaaattacttgatttttctaagccttagttcgctttcctagaaagtgggtttaatgaaaccccctcctagagctgttgtaatgaccgaataaactgttttctataaagtgccatggagagcagaaaataatctggtgggtaaatgaataggtatcacaactgtcattctgcaaactacttgactgagctcactgactccagacatgactaagtagaccataaaagaaatggaacttttatgttttaagttaagaattgacttttgtggccaggggcgttggctcacgcctgtaatcccaacactttgggaggctgaggcgggtggatcacctgaggtcaggagttcaagaccagcctggtcaacatggtgaaacatagtgaaaccctgtctctatctctactaaaaatacaaaaattagctgggtgtggtggcgggcacctgtaatcccagctacttgggaggctgaggcaggaaaaatcgcttgaaccggggaggcagaggttgcagtgagccaagatcgcaccactgcactccagcctgggtggtgacagagtgagactcagtctcaaataaaacaaaacaaaaaaagaatcgactttgtaacttgagtgttgtttcttaaaaaaaatatgaaagagtgggagtgggggcaaccccatgggtggcttctacactaacctatcaacatacattttacatcttttattttttagcccttagaatctttctactcaagatcaaattttaatattaatagagccaaatatatttgattatgggagaaccactgatgttctgtgttgtttataaattggaaaggcagcaaaaatggaggagaattattctggtgacccaacctaagtgacacagttacccaggcagatg

SEQ ID NO: 119971 - DNA, 1000 bp, Homo Sapiens
gatccacccatcttggcctcccgaagtgttgtgattacaggcatgagccactgcgcctagccccaaatacagtacaattagagtccctggagtcctgatgttgtaccttagggctctagacttgctcattctccatatctgctacttgctatcctctgacctccatctccctgctccctttccccctcaccccctctgccctggtaaccactgttttattctctatctctgtatatttgactttctttctttctttttttttttttttgagactgagtctcatgctgtcacccaggctagggtgcagtggcgtaatctcggctcacttcaacctctgcctcccaggttcaagcgattctcctgactcagcctaccaagtagctggggattacaggtgcccaccaacatgcctggctaatttttgtatttttagtagagatggggtttcaccatgttggccagactggtctcgaactcctgatctcaggtgatccacccgcctcagcctcccaaagtgctgggattacaggcatgagccactgcgcccagccttgacttttttttgtttagagtccacatataaatgagatcatgcaatatttttcattctgcgtctggcttatttcacttagcgtaatgtcctccagtttcatccatgttgtggcaaatggcagagtctccttttttaaggctcagtaatattttattgtgtatatatatgcacacacacacatatgtatccacatatacatacatatatatacctatatgcatatatgtatacacacatgtatacatacatatacacatacatatatacacacatataagtatgtgcatatatatacacactcacacaccccaatttcttgtttttgaaacaaagtctcactctgttgcccaggctggagtgcagtggcgtgatctcggctcactgaaacctctgcctcccaggttcaaatgattctcttgcctcagcctcctgagtagctgggattac

SEQ ID NO: 119972 - DNA, 1000 bp, Homo Sapiens
gggtttttattggggactggtcatgtgggcctcttctgcctagtaggtagcaaaatcccagattccccgaaggaaagcaggtgttcagcataagccacgttgtttgtatatacagtttaggcacagcaaaccacttttatcagttatgaaatgatgcagacaatctcagaatccaagtcccaaatgcaagccaagggcctaccttgtaagcagggccttcgacggcttagtagtctcaggtctgttatattaactcttttcttctacccacttggtcattgtccaaggcattttttacaaaaagattattatcaataggatcccacatggcagggtgagatcagcctacattattggcctcagttatgtcctccatggcttctagatttggccaattaaaacaaatcctgggaacaggcacagtggttcacgcctgtaatcccagcactttgggaggccaaggtgagtggatcacctgaggtcaggagttcaagactagcctgaccaacatggtgaaaccccgtctctactaaatacaaaaaattagccgggtgtggtggcacatgcctgtaatcccggctactcgggaggctgaggcaggagaattgcttgaacccaggaggcagaggttgcagtgagccaagattgtgccattgcactccagcctgggcaacaagagtgaaactctgtctcaaaaaacaaaacaaaacaaaaaatcccattaaccataaaggtctatcttagaaagccaggtgtctttctcctttagtttttatattaacctttttttttcttttaatctggcccaaggcatcaactcaggcacagcacatctctgaccagtaagttaaagttaatccgaatgccttgtagggctgagacagtgtcatgatagtcagggtacccacaaaagaaatataagcccagagggcacacacagtacccctggaaacaatgagtttacagttgttaggacaccccaagcaggacatacagtagt

SEQ ID NO: 119973 - DNA, 1000 bp, Homo Sapiens
atgagaggcttgtaatttggtgaaagtgatgtagaaaactttttaaggattgtataggttaaggatggcccctgtgtaggagaataataaaatagaatggcaattgaactccgggactaaaacacagaggaaatgcagaccaagatgattctattcaggacactgacaaatggtaactatttagagcatcacaatttataagagtaaataaataagaaaccaacaaaaatattttctaagtattatttatcagaccccaggtatttaaacaattcactccctaaattttactgaggaccctgttcaaatatctcttaaagaagatttgctggactattctatttaaatagcagaatataggtttagaatggaatgggattctagaaaagagagaaaaaaaggtcaaaatttagagaaatcaaaagttaatatatttgaaatattcttactgccaccataaatggataagtatatattctgctttaatcacaatcacttaaaagattaggtattttaatatgggctatagaattagatacattagtcatcacttgagatcactagctatgccagaataaattagtacagcaaccttttgggggaaaaaggcagtaaaatacaatttgaaataatcagtggtgttatagagctctctttgcttagatcattgaggactagttcttccaatttgaattaaatgaatccattggattcttatttattcttaactgaatgcacactttaaagagatacccaaagtgattcattaaataatttaaaatcacctttgtattatatagtggcatgagaaaggaaattaggtgaaaattcatgggaatattttgtatatattggcaaataacaacatagcaccattctagcaaatatgaagaataaacaaatagttacattttatggtgggagaaactaaagtgcatagagattaatggtttactgaagaccaactatattgctgtggatattagttggaataaaataa

SEQ ID NO: 119974 - DNA, 1000 bp, Homo Sapiens
gatgtgagccaggtctctgtggttcacacgctacagacagatttccggggtccagtggtgcctgcctttgctctctgggatggggagctgctgacccattcagggcttgaggtgcccgagggcctctagtatgtccattactggagtccctaatcacgcctttggccagcctccttttgaaagtgtccgaagcctttttactttgcctcaagcaacctctagctcccacaattcagtgttgggtcctctgtgcaatatcatgatcatcttcctcatcccctaccttgtgaaagctaggcatacagccaaaccctccttttccccacccaccaactactgccaatttcctaggctaccatgggtgtatcttccttgacctgcttccttcagtccctctgcctccctttgcccaggcctttctcagactgtattccatcctggggtcttatcattcagctttgtttgaatttattaatcaccatgatacctctccctccctttgtccacatgtaacttgttcttggggctctaccagatggctgaagagtaaatcctttctacctctggctgaaggagtggtgcagtcaatgacttggccctttttctacagcacatttagagtttgggctctggctccctcagtaagtgctttattaactcagtgtgtcaaaatgaaaacagagccctccttccccagtagctcagtgccacagaccttcagccccacacagctgtagctatccttaccctgagtccatctaccttaaatctgtacctctgacacccagccagtctgtcataatcattatcccagttataaccttgaccaaaggggaagagagacacttgggggatatctaggggatgagtgctagaaactatttatttatttttgagacagagtctcactctgtcacccaggctggagtgcagtggcatgatcttggctcactgcaaactctgccttttgggttcaagcgactctcgtgcctcagcctcc

SEQ ID NO: 119975 - DNA, 1000 bp, Homo Sapiens
gatgtattcttaaaccgcatgactattcagatggctactgagttatcagtggccatttattagcatcatatttatttgtattttctcaacagatgttaaggtacaactgtgtttttctcgattatctaaaaaccatagtacttaaattgaacagttgcaaagatgtcttaattgtgtaaagaattggtgtagtcatgactttagctgatactcttatgtacgagatctgtctctgctgtttaacttcattggattaatcagctggtttcaactctactgcgaaacaaaaatagctccttaaaagtactgttctccttcagtggcatgtagttatctaatcaagacacctcattcaaacaaaacctgccttaggaaaatttaatatattttaaattattttaaaagaaatacaacatcttattctttagctttcttaatcggtgctttatggaggccagtgtaacgttacatgactcgttgagaaagttgaggaatttcctctaccacctttgttgcttgaagaaaaacatgtcttttcaaaatgagaggctttcattgaagaaaagaaaaaaacaacagttaaaagcttttggctctctgtttcatttttttccattaagaaaaaaaaaagtccccttttaaaacaagcagggctgggtgtgacggcacatgcctgtaatcccagcactttgggaggctgaggtgggaggactgcttgagcccaggagttcaagatcagcctgggcaacagagtgagataagacccaatctttatttaaaaaataaataaataaatagccaaaaaaacttagtgtggtgctggtgtgcatggtagccccagctactcagggggctgaggatgtggtggcatttacctgtggttctgtggttccggctactcaggaggctgaggtgggagaactgctcgagcctgggacatggaggctgtagcgagccacgatcgtgtcacggtattccagcctgggtgactgacagagca

SEQ ID NO: 119976 - DNA, 1000 bp, Homo Sapiens
ggatcatgcgtggatgtaagcaaacaaaaagatagtaggaatgagaaataataagcggctagataagacttgaattaggattatcagctttttgtcatactgagagtcagaggggatatgtggagctgggccactgttagactacctcctaacccttaaattctcatgtaggaggggcatagttgtagacaagtgctagttcttaaaattgttgcaaacaaccctcccatgacacttgtccaggttgcagtcatagtggagtacagtggtatctaagcaggaatgattgatacagatcttttgtggaccatatggactatcttttacctccccctcgtcagccctgtttatactccaacactacatgtcctgcatgggaaaatgggtgtttgatgtttttcagtttatgggatctttagatgttttcacatagcagtctctcacatcttacatatttggccttgtagttcctgaagactttaaacaatcctttagactcactgccagtttccaaacctatcccccttggtaatgataatttttccaagcagctcatttgccctttccagagattttaatgcactgattctctaggcttctgcactggccctggtaacaataaccttgttctttgcaagggataccatcttccttgtatatatctgtgtggcaccactcggaggtgccattaaagtactctcagaggtcatattcacctccactgaggcagcagggtgtggttgctcttggaaatttgcagtgtctgctacagaatccaaatgcacaatctgaacccttcttcagctattgtgagggcagacaacagtgatccctttcacaatcaatgagagggattctttcacaatcaaagaatgccacacttgcattcttctccttcatcactatcttgtccccacaatatggctttccaaaggagatttggtgctcaagtttattaaacagtcttctctgtgcctatgcaaaaactaatggaatcagt

SEQ ID NO: 119977 - DNA, 1000 bp, Homo Sapiens
cgcccacctcagcctcccaaagtgctgggattacaggcgtgaactactgcacccagttcaaatatatctaataaatctaataaactaagcttgtagtattttattttttatttttgagacagggtcttgctctgttgcctgggctggagtgcagtggtgcaatcactgttgactgtagccttgacctcctgggctcaattagtcctcccatctcagcttcccaagcagctaggactataggcacacgccactacacctggctaaaaaacttataatatgttgaacctcaagttatcttaaatatcctaataatatttatacagctagtgagatttcaatctaaaatcacaagtttaacttaattgattcaactttacattttaaattagaatcataaatttcccgttggacactaatatgagaagttgtcataaggatttcaaatccgtaatatatcaaatctataaagattatgtatgaatgctacataaaaagactaatataaaattttaatttatctcatcacgtctgtatttctgaaaccccctaggatcattcattcattcaacaattttttaaatttaattaattaatttatttatttgagacggagtctcactctgtcaccaggctggatgcaatggcacaatcttggcttactgcaacctccacctcccaggttcaagcgattctcctgcctcagcctcccgagtagctgggactacaggcacatgccaccacacccaggtgattttttgcattttaagtagagacggggtttcaccatgttggccaggatggtctccatctcttgacctcatgatccacctgccttggcctctcaaagtgctgggattacaggcatgagccaccgagtccggcctgaattgttctataatttaataattaaatccaaaaattagctgagcatggtggtgggcacctgtaatcccagctgctcaggaggccaaggcaggagaattgtttgaacctcggaggc

SEQ ID NO: 119978 - DNA, 1000 bp, Homo Sapiens
taccaaacatgtaaagaactggtaccaattcttctcaaaggcttaaaaacaaacaaacaaacaaacaaacaagcaaataaatgaagaggagggaatagcttcaaacacattttacgaggccagcattactgtaattccaaagccagacgaggacacgacaaaacaacaaagctaaagaccaatatccctagtaagcatggatgcgaaaaccctcaaccaaacaccagcaacacattaaaaacatcatccatcatgatcaagtgggattcatcccagggatgcaaggttggttcaatatatgtgcaatgtaataaaagtgatgcctcacatcaacagaacaaaggacaaaatccatatgctcatttcgatagatgctgagaagcattcaaaaaatgtcaacatcccttcatgatagaaactcccagcaaagtgggcaaagaggtaaaaaacatacctcaacaaaataaaggccgcatatgataaaccgaaagctaatatcatactgaataggaaaaagttggacgctttttctctaagatttgtaacaagaaaagaatgctcactttcactgcttaaattcaacttagtattgaaagttctagccggagcaattaggcaagagaaagaaataaagagcgcctgtattagtctgttctcacgctgctgataaagacatacccgagagtgggtaatttattttttaaaaagaggcttaatggactcacagttgcacgtggctagggagtcctcacaatcatgatggaaggcaaaaggcacatcttacatgtcggcaggcaagagagaaaatgagagccaaacaaacggggaaacaccttataaaaccaacaggtctcgtgagacttattcactaccgcgagaacagtatgggggaaaccgcccccaagattttattatctcccaccaggtccctcccacaacacgtggcaattatgggggcaacaattcaagatgagatctgggcggggacacagccaaacca

SEQ ID NO: 119979 - DNA, 1000 bp, Homo Sapiens
aacatctggagagaaacaagacttacggccctagaagaaatcaaacaaggatgcattgtaccttttaattgcatgggtagttttaaataaatggagaaagcacctttcagaagctacactagcaggaaaaaattccatcaagcatttacatagtaaatttctataatttcacaaaagattcttgatcttacttgaagtatacatgagggaaagagccccctcagcaggtgttcccgttgcttacagaagcaaactaaaggacctaaaactggaggcaagccaggatgccaaaaagggggaagagaaatgataaagaaccattcataaattccatgtctacttcaagacatttgtctaatgacccttacataataagtattttagggaaaactaccacccttttaagataaaagtacaatcttaaaagctgtagttctcaattatagtaatatttcttacttccagtaatatgtctcaataccttggactgctggatgtcaaaagacaatacctgggggtcatctatgagatctgaacaaatagaggaattctctaggactgtatactctctattttggctttttgaatgaagtacagacaggcttctctgctatcctccaggcagtgtaatagtcaaccaaaagggcaacagtattggatcattccttagacactaatcagctggggaaagagttcattggcaaaagtgtcctcccaagaatggtttacaccaagcagagaggacatgtcactgaatgggaaagggaacccccgtatccacagtcactgtaagcatccagtaggcaggaagatggctttgggcagtggctggatgaaagcagatttgagatacccagctccggaacgaggtcatcttctacaggttcttccttcactgagacaatgaattcagggtgatcattctctgaggggctgagaggtgcttcctcgattttcactaccacattagcttggctctctgtctcagagggtatctcta

SEQ ID NO: 119980 - DNA, 1000 bp, Homo Sapiens
gatcaagaccaatagtggccattttttacaatttctacccagatttcagaaacaggaaaataaaaccaaatcattgtaaggcaaaagtctactataacatagtgagataatagatcaaatctctcagaactaagtttttttttttaaattctagtgccctataaggtacctcatataaaaattgatatttagtacgctggtcatagtggctcacgcctgtaatctcagcactttgggaggctgaggtgggaggattacttgaagccaggagtttgagatcagcctgagcaacacagaaagacccaatctctatttaaaaatctttaattaaaaaatcagtttttagattggtatttagtaactatttttaaaaatcagggcagtaagtgatgtaatgttggggagtgggatgatttttagactcaggctctagcctgtgggatttattagttgagatgtttaattgtaatgataaaatctttatgaggctgttgtttaaaagtgagaacatttatgtcctttgcataatatactgacattcaataatctttatatttttatttatattattattaaatgaatgtattttcctgctttagagaatctacagatgccttcttttccctagaatagaaatgtcaaccttgagatttgttctttctccatacttgttgtcatcccatgctttcaaaattaatgtaccaaagaattacttgtttaatgctcataaaaccacttcttaggctatttacttggaaatgagttccatggaggggaaaacatcaggcaataaggcaggaggagaatttcctctatatatgatattaaggaagtgttacaaatattgaaccagcaggtatttcagatgaagtacatgcctttcaaataatgacgaaattcatgtgaagcagaaaggtagagacaagtccaatttgttaaacaatcttaaaatatagaggtatgaataacacttcaaacatatacagcttctgccttcaca

SEQ ID NO: 119981 - DNA, 1000 bp, Homo Sapiens
gatcctcccaactcagcctcctgagtagctgggactaaggcacgcaccatcatgcctagctaatttttattttttatttttgtagagacagggtctccctatgttgctcacactggtcttgaatccctgggctcaagcaatcctcccacccctgcctcccaaagtgttgggatcacaggtgtgagccacgcaccacatgacatttaatgagcttcttttttttcttatttttcttttcttcttttttttttttttttttttttggccaggtaaatattaatgagtttcaaaagcagaatgtgatgccttacactggcgatcttcatactaacccacaatattcagtaaatctcatttggaagagagaagaaaagctgaattccctgttttcgtgacaattaaattaaatattagttgctggatgcccaatttcagtgacataacagccttctcatcccattccccttctataattctgagggtttggtgtggaatgaggtaagtcacacaaaatttgcttataaacatcctttattgtacatagacagtggatactgagaatgatcaagtaaatggaattttgaacaggtaaagaggaaacaaagaattaaggtatccctgtggaatagtgcaagaaaggagtgccccacccatagtgttatctacaataggtactccggggaaaggaccccaaggagtcagaccacaaatgtatgaccagcacaattctatgatcaaactctacctctagcaaggcgtctcaacaatcaagttctatttaaatcattcgctcgtgtcttctttcagtcatgatgaaataatgagaatatcataaggaacagaaggtaatgcattggtcaccacccttggagaggctggtgggatgtatctggattagtcctcacggggggtgctattttcctgcatagtcttcattatccagtcaacatagttctttacccgtgtgtagagcccataggtcccacactggggcccccag

SEQ ID NO: 119982 - DNA, 1000 bp, Homo Sapiens
ctatatcttacaatagacctcaaagagggaggcagctgcgtgcattcgatagaaaatagaaaaaggcatggccaggttgaccacaattatccagggttcaaagccaaagacaatctcctccaatccattgtcatactcaggtcgacagccaaaggcgggaggtatccaaagctgcaagagaagagaaaatggcatgtggtggggagcagcttccaagccaccacggaggccccactcaagtcccaggcctcatgggagctgaacctaatgcacagggactgagtcacccctgacagaacaataaggagacctcatggcatttcccatctccacagaaaccaccaaatccatgtctgccatgatcctgctcacttcctcaaccacccttccctgcaatccatcctgaatgagcactttctgaacccatccaactctttccatccctacagccctcgcccagcctcggtttcctcatttgaaagatgggaattctaacacgtgtctgagagggcttagatgagaattaagtttgcaaaactgaaagcaatgacttttgtttgtgttgttcacggaacctacacactgttccctgcttctcagactcttttgtgtcccagttctctccccctgtgccacctcttgagttgtcaggctcctcactcccgcttccggctgtagccttcttcagcttcctccactccctggctgtggcaggcagcctctaggatgaccctcactgatccccagctcctgcagtcacccccttgtggagtccccaccccttgagtgtgggatgcacctaacgactcacttccaactcacaaaatttggcaaaagacacaggaagtcacttctgaaattaggttgcaaaaggacctgctatccctcttgctcatcttctcctgtaagacaggtggcagagctgccatgctgtgaagcaccctatgcggcaaggggcccagggagtactcccgtcaacagccagcaaggaactcagacc

SEQ ID NO: 119983 - DNA, 1000 bp, Homo Sapiens
gatctctcacaacaaggattgcaactcacccaaaagccaaaggcacccatgaatctcttcccacttcccttcagtcttttacttacataaactgagagacaacactggaatagataactatagattttgccatcactaattcttctgtcttttagaacgattgagagaaggaatccatactctgtggttagcaattttcttcatacttaagttttggtttttaagttaaagaccaaaaaaaatttccaatagatagtacatagtaaatgttcaataatgttcatgaaaactgaatctgaatatctttagtttacagaataaagttacgtttttatgatattaatgatggacattccatgtctaatatctatgtttaaagtatacatggcaaataacacaagcttacatattatattttatttatgactaaatggaaactttgaaccacctaatttggtgactgcaagctactctagaaattacctagttgaactacctattccaaaacccccgaaatttctgattcttagaaaggttaataggagaatatacctaagttttaaagtgtgttacctcaattaaattttgagccaagcttggaatctgaatatatgtgtgcatgtgcatacatacatacatatatatttgttttgttgcttctccacttactgattctctgatttctgaacacttcttttatctctttgtacctatttcctcacccatgaaaaagtattcataatagcaatcaattagtgaacacgcattaaacacaaaataagataatagaattatattataactcacttaaggtatatagtctatggacaatatagtacctaaaatttgtgtcacatatcatagtttacagaatgttttcacatgtgttctctcaatatctcatttaatcttatacaatccttcaatgcagttctgcagcttctgtgccattgctgcattatagcacacttcatacacttactcactgtgcgtcaataaa

SEQ ID NO: 119984 - DNA, 1000 bp, Homo Sapiens
gatcccttgaggccaggcgtttgagaccagcctggccaacatcacaaaaccctatctctactaaaaatacaaaaaattagccaagtgtggtggcgtgcctgtaatcccagctacttgggaggctgaggcatgagaatcacttgaacccgggaggcagaggttgaagtgagcccagattgctccattgcactccggcctgggcgacagagtgagactgtgtctcaaaaatcaataaatatataaaaataaaaaaagaaagcaaaagctgaaggctggattcatcctgggtgaattacccatctcattataatgcaaagtccattttaaacccaagtttctggctgggcgcagtggctcatgcctgtaatcccagcaccttgggaggccaaggagggaggatcacttgaggccaggggttgagaccagcctgagcaacatggcgagacccccatctccacaaaaaataaaaataattagccaggggtggtggtgcacgcctgtggttccagctactttggaggctgaggcaggaagatcacttgtccccacgaggtcaaggctgaagtgaactatgattgtgccactgcactccagcatgggtgatagagcaagactttgtctcaggaaaaaataaatttttttaatttaaaaaaagtttagaacacccatatttctaaattgaaataaattcttactaagctgcaaagtctgtttagagttaaaaaaaaataagtcagccaaaagaaaatcatttagtgctggacagaccaaaaataaaacctgcctgtttcaatgaatctttctcttatcactcagatgcaatggagacagccggtctcagacaagcgagcgttttaattcagagaaaggcagagagagaaggttctggaaggtccttcacactgctaatctcagagtaaaaatatcttctagagttttattatctttttttccaaagactgggggtgggagagaatgaaatacacaggtagaaggaggg

SEQ ID NO: 119985 - DNA, 1000 bp, Homo Sapiens
atgccactgcactccagcctggacagagcaagaccctatctccagaagaaacaaacaaacaaacaaacaaacaaacaactggaaacaccctcctccggaatggtggtcaggaacatcagcctgccttgttcgctgatgtctctccagcacctagaacagcgctcagcacgagaacacactcattagtgttttgttgaataaatgactcctttgacacagcaattcaacttctaagaatctttcctaaagaaatattcacacacgtgcagagacctgtgcgcacattaatgagaggagcaaacaactggggaacgtttgcaaaggtgtattaactgtcagtgactgatatggggaatcagaggaggggagtacatgctgaacaggaaacaaattgagggggggcttgaccaggatgcatggcaatggggaaaagcagatgggagatgcttatactggtacttggtgtgtgtgtgtgtgtgtgtgtgtgtgtggtgtgtaaatgcagaggagaaaatctgaaattaaacactcagatctgccctcagtagtcacatctggggagagaggaaggtagtgctgttctatggagagaatacctgacaatacttcttttctaagtaggtgcatggatacacaaaccaaaaatgcattaagtatgtcttgctcatcaatgaaaaggataatatctaacagaatggcacactgtaagaaaatacaatggaaacgctaacatcgaactcttggcacactaagaaaaatgatgctcaacttttcactgttgtgaacacttgctttcacttgctatacacctgatgacgagggtctgcagccatgcccatgttcgtgaaaggtcaccacattctgcttctcatcatgggcatgtgtcatatccctgaggctgaggcaagaggagagaaggaaagtaagtggcagtgagttcccaccacgtgacaactcaatctcaactcctcctgacctgcagaccctgcacattccgatt

SEQ ID NO: 119986 - DNA, 1000 bp, Homo Sapiens
ccctaaccctaaccctaaccctaaaccctaaccctaaccctaaccctaaccctaaccctaaccctaaccctaaccctaaccctaacccctaacccctaaccctaacactgttagggttattatgttgactgttctcattgctgtcttagcactgcatggcagtgtggggaatgccgatcttatattaatattttgttttgaggcagtgcattagcattacaggtgcttgttacatgagcaatggggtgtgttatattttcggtgtcatgtctgcatttgtaatgctgcatttgtgttcccacgctacggtgtggatctcccactgctgccgcctcaccttggctggggagaatctcggtgcacaggattcagacgggcttttggtttcccgttttccacactgaacccttctaactgttctctgaccctgaatattcagcgctgcaaacagaaaggattgtattcaccatcaatgaagccccgagtcgtgtcaaagcgaggcagtgcccccaaggtctgtgctgaggagaacggtgctctgccttcgtggtgtctcctgggtctgtggtgagcagaacgccgctccgccctcgcggagccgccgtcccacccgaccgcccgcgtctgtgctgaggagaatgctgcttcgcctccgtggtaccccaaaaggctgtgcagaggagaacgcagctccgccctcgcaaaggcgccccgcgccggcgcggggcgcagaaaaagatctatggcaagtaaacgtgcaaaaagacgctcaacatactagagaattgaaaaccacaatgagatagcacagctactctatagctcttagaactgctaagctctttaaaaaatgacaaattgctgcaggaaaaacaagaactcttttcgttgcctgtggaacacagtgtataagaccaaaatatgccaccccaaaatataatggtaggaaaccagaatatgctgtcccaaaatatgtccctttggcttaagaattattcca

SEQ ID NO: 119987 - DNA, 250 bp, Homo Sapiens
ctgcagccaagaaaaaacagaaagaactaaccagtcatctgaaaaattgagtttataagaagtcatcacctttacaaaataaaaacaaaagccccaacaccactggattccaatttattcatgtttcctttttttttttttttcctctcttttaaagtctggttcagccccaatcacttggctgatgggggggaacacgggggcacgttggctggtggacatgggcatgcttcagagaaaagtgtctgaa

SEQ ID NO: 119988 - DNA, 1000 bp, Homo Sapiens
aacgtttcctccaatatctcagtaacccagctggggatgagtctcacttggaaatgcagttcagctgtgctgatctcttccccagcttggaggaggcctgccttccctcaagctggccgcctggctggcttcctgatcatgctggacaatctaccctgtaaagttccacgttgtcagctgccagacactgtgtgctgccactgccaggacacaatgctcctggaacccctacctgcttcagtgttgatgctggcctggaccaagcaagagggagaggtggctccagatgtccacctggacattaccagtgattgctggtccctgcagctccctctggcatgggcatgaaattcctggagttatctccttttctccctgtgaggtgaggttacagcactatctttgaaatcttgttagaaaaaatataagacatttacagttatatagagtattggaacaattttgttctttttaaaatttaaagcgtacattccaactaactattttgacagttttgagaatctgactatacgttcatatttctggaggggtggtagaatcaatcaaattacatcacactctaactccaataaggttgagagtcagatagctaaagagtgactgactcaaaagtgaagccacaacttggggacactgtattgactcctgtgtctggctggggtcattgctgggatcactgaagataataatccagaagaaggaattaaaaatatgtccatcaaatgtggggaagacatttaactgagcagaaataataaaagagaggaaaataggatggagagcttttgtgcaagatcatatatttagaaacaaaaagaacacatggatctgggaagccagattgtaagtgctgtaaaaaacccagggacacagttgagcacgtgttaccctaaatttgcaggaagggagcactgttatgaatcaactaagctataaggctcattactgggaagatgatacacctgatatgttaatgaac

SEQ ID NO: 119989 - DNA, 1000 bp, Homo Sapiens
gaattctctctgaggaggaagcagaatccagcactggaaaacaggaagtggacaacttattcctttatcgcctttagccaatcatctgagggcaggatcagactccccctccctctttagtctcagcatgacagcccaccagtttcacaatgcacctcttcctgataactgaccaccatttctggtctggttttggctgaatctcagaggacgcacactgaggggcttcatgtcctctgcttcaccttttgacatcagagggccaaaatgtctaccctcggatcatgccaccaccaccattttttgaacatgagacccatgaaggggcacgaagctcagttgcacatgtacacatgtctttcctttcataaatattcatgactcctccaatagcttattgaatatgcatattcatcccccgactcagctccctctacattcccattcctgctccctctacccttccctcgaagtgctttgtctctgcgtgcgctggaggctacccttcccagcctgcaggatggccacctgttatgagaaataaagctctcctttccaaatatatgaacctcacaattcttcagctgacacagggaatcagcatttaggcctcgatttaccaacaaaagaggtttcttcttgcacttcatagcaaatacaatattttgtctcaactactgccttgatttttgaaaactttgctttgtgaaaattacttgatttagggacattccatgtagaaaatgccaaattgaaaggttcaaaaagaagtcattcttgttaatcagagaaagccatataggaaaaaagaaactagaaaaggttatgccacagtcatttgccttattaaagcaaactcaaaatgttcaaaattgagatttaaagtattagtgatgctggtaattataaaagggttctctggcccactatactcttcctgggaatttattaagaaaattattctacaggagactaaggagagtggcagcaggtcgtttca

SEQ ID NO: 119990 - DNA, 1000 bp, Homo Sapiens
aatcacccataaaataacttttattttaataaataacagtgggctcaccaaagggcagggattttaacgtgtcaggttttatgcttattggtagtaagtcttaaacaggtgaaatgaactattcaataaaacccaaaaggccctaaaaataaaatactttaataataaaaattaaaaagaaatttccaaaagaaaatagttcactccttgaccatgcttatttattcagagtaccagcgatttcagtaagtgcttcatttttcctgcaaatctgatgttgcacagggaatgtacacattttcataccatcacaatatcatcaatatctcaggccaataatattgtgaatgcaactgttttataacaaacacaaaataaaaaaaaacaatgttactatttacggcaaacagaaacaaaagtaaatattgcaaagatgttttcttatgtttctactactgattttagttggactttaaatgaaggtcatcaactctcctggaataacctctacctctcgctgtgaatccacagtataaatatggtgaataaagctaaactgtaagagctaactatatactgaataaccaaaataattataactaatactgttcttgaagaccaatctaatgaaaaaagtatcattagatatggtgagaaatacagacaaatctgtacaatctaacatctataaacagtaaaatcaaaacatccaacttccttatagaaagtgttttatctatgtaattataaatgttaaggactcttgtattttataaacacaagatgggctcactttgatgatatcaattttaagatttataaaaatgtttaaaaaaatctttccacaaaactttatacagtttaaagctatacaccaatctataaatctcagaaaatggaaaacaaaacaaaacaaaaaatctttataagatcacatgtataaaacaagaaatgaaatgtgattttatttaaggcaatactgggctacttcacaaatcac

SEQ ID NO: 119991 - DNA, 1000 bp, Homo Sapiens
atgaatgaaataaagatactttatttattacacaggcacttggagattcacatgcccaacacatctgatacacttaacaactatggaaacacgagtggaaaatgtctgtttgtaggatcaagagagaactttcaccatgtaaaggtaaatgagtgcattaacaatttttcctttactttcctctaagaattttcaaaatccactaaatttttaaaagttacacttgaaataataggcaaaaaacactgatccacattccaactggtaggctaacttgaactgtgagcaatttaaacttttatcacaatgaaacatatttatagtcatgcttgaacagattaggttagtagcatgcattccattctgcaatatgaatattgttaatctatttcccaacaaaagtcaaaagatgcccagtgcatagaaaaatacaaatcactgtagtcaatatattacgggactgatcttgggacttacatggtgatgatgaagtcctgaaatgccatgcccacaaaagcacattaaaaagtggataaacatattttatcagacaatctctaaaaattaaagatgagagctttaaatttggggatgttcttgctgtgtgctttgaacagggcctttctgctcacctccttctggcttgactggtccatcagacatcaccttcctgagggctagctggctttggtcttggttgccattggctggtggaggcagattatcagactgagttctttgaatggggaggactcctgctatgctgtgtctgtgctgcttcctggcatgattagactgaccgcttttatgtgctgctgtggcagtgtgggtgaaatggaaacccagagtatgtatcctcagatggaaccagcttaaatgttattcatgcaaacagaagtgctcttttgctctatttaaataggttgtgttttcaaatgccaaaatgacaccacatgcacagcactaaaggggtttaaaactggctgtttctttgaaaatg

SEQ ID NO: 119992 - DNA, 1000 bp, Homo Sapiens
ctgaaatatacaaagaactcctaaaattcaacaaaaacaaaaaaaaaacctgatttaatgagatatacagatgacaaataagcacataaaaagatgctccacttcatagtcgtcaggaaaatgcaaattaaaacaacaatgagctactactacacagtccagaacactgacaataccaaatgctgctgaggatgtggaacaaaacgacctctcattcattgccggtgagaatgcaaaatggcacatccactttggaagacagtttggcagtgtcttataaaactaaacgtacttttaccctatgatctagcaattgtacagcaagtgtacgagggttgcttcaaaagacattgccttttgaaaagacatgttgaaaattatgtccatgtaaaaacctgcacgcaaatgtttatagcagttttattcataattgccaaaacttggaagcaaccaagatgtccttcagtaagtgaatggataagcaaactgtggtacatctggacaatgggatattatttagcactaaaaagacacatctatcaagtcatgaaaagacacggaggagccatagatgcgtatcactaagtaaagaagccgatctgaaaaggctgcatattctatgattccaactacatgacgtctggaaaaggcaaaactatggagataatgaaaagatgagtggttgccaggagttgtgggggaggaagaaatcaataggtgaagcacagggggctcggggggcagtgaaactaccctgtatgattctgtaatggcagatacatgtcaccttacatttgtccaaacccacagaatgttactgtaaacctacaatactcataacgaaccctaatgtaaactacggactttgggtggttatgatgcgtcaatgtgggtttgtcaatttaacaaatgtactactctgatgggggatgttgataatggggaaggctatgtatgttagaatgttgggggcatgtgggaaatctctgtaccttttgct

SEQ ID NO: 119993 - DNA, 1000 bp, Homo Sapiens
taagcattaaatcatattaataatttaaagtagtgctaattattgggcactaactgctattaccaattttaatatttgaaataaatatatgaccttcagaataggttttcaccttccactgtgtcttttaaaaaaaaacttctcctatcagtgagcacataaaagtagcatgacgggaaaactcaacattcattgtagaatttaatagattagacttactttttctttctctaaaatgtattgaggtataattgacaaaataaattttttccattttaactttttagcactctgaaaaagaaattttttttctgttagccctaaaccaaactttttaatgttccctgttcaagtgggagaaaattgtttctgcatcaagtaatgtattcttgggtaattacttggtcaaataagttatggattattttagaatttgcatggtgcctaaaggtagttaattacggacagttcctcagggacctgtaagtgggctagggaacttagacctactaaaactccaaaaaatgtctgatcttagctactactttcaacttcaggctttcttcctggcttccaaaagtagagacttgactgatttgtgttttgtcacctctttccacctgtgcctacattgatgtggaggcattaataagcaacaattgaaagtaagtggttgaaggaaagaagaggagaaacaagggacctatgtaatcctcaaacttcagcattagtgtttttagtttcctgcgcattttactataagtaaaatcatacctttaaaaaaaagtacagtcagttctgctgtaacgcttgttctgagaatgggaatttgttccaatatgatatattagggaactgtttgagcataaggccaattttgcatgagcttatgcatgattttgctgggaagcaacactaggtaaatgcagaaaagtgcacccagcagaactaagatggctagaaatatgtacaacatataaaacacacatacacatatgca

SEQ ID NO: 119994 - DNA, 1000 bp, Homo Sapiens
actatatcaacaaacaaattagtatatttgatactcaaagtacagaagtactttatcaagtaattagtttctgataatataccagctgacaggcagttaaggtagctattcaatttcaggaatttaatttccacaatctctataacttctgatagaagaacctttggcttgcttgggcagtaagataacttttaaatgtttaactttgctctttaactatataaataggtagactggcaaagttataaataaatctgttgtatctgaatacaaccatgcactgcataatgatgttttgatcaatgatggactgcatatatggtggtggtcccataagattgcaatgcggccaggcgccgtggctcatgccagtaatctcagcactttgggagggtgaggcaggcggatgacctgaggtcaggagttcgagaccagcttggccaaatggtgaaagctcgtctctactaaaaattccaaaaatagtcatgtgtggtggcacgtgcctgtaatcccagctcctcaggaggctgaggcacaagaatcgcttgaacttggaggcagagattgcaccactgcactctagcctgggcaacagagctacactctgtttcaaaaaaaaaaaaaaaaaaagattgcaatggagctgaaaaattcctatcatctagtgacatcatagcaatcataatactgtagcacaatacattactcatgtgtgtggtgatgctggtattaagaaacctctgtttcagtggtataaaagtatagcacatacaattacatataccacataaaactccataatgataataaatgactatgttactggtttatgtatttgctataccagtagtccccaacctttttgacaccagggactggtttcatagaagacaatttttccatgaactagggggtggaggatggtttgaggatgattcaaatgcattacatttactgtgtactttatttctattacaattacattgtaatatataatgaa

SEQ ID NO: 119995 - DNA, 1000 bp, Homo Sapiens
aagtagcaaagcaggcagaaagaaacaggatataggggtcaggggtccccctgggccacctaggtattccatttgaaatgctggggcgggcagggccgagggtgagtcttgcctggcttggggtggagaagagaggcggccaccaaaataataattaatttgatcccgttacttatggggaaacttcccacccttcaccccattcgctggcctccctgtatccttattctaactcccagggtctttatctcctttccagctccaatcccctgctcattgcctccaacacacacacacacacacacacacacacacacacacacgcacacacatgcacacacccatacacacacatacactctctcacacacacgcacacatgcacacacacgcacacacccatatgcacacacatgcacacacatacacattcatgtatgctcacacacatgcacacacgcacacacatatgcacacagacgcgcgcatgcacacgcacctgcactttttcctttgtaattttaagctccatgcaactgtaagggtgatttcaggaagggcgggggtagggttgtggggggaacaacgagagaaaggctaagaaagttggtccaaacaagaacatgttgtcaagggaataaaccttggtgagggtaggcatgaaaccacagctgctgaatttggccagcctcagacgctggtggtaatgacaatgattctcagtggcagggccccagctcccaacataaatagggctcagcctgaaaggggaggaaatggaacaaaacatttccttgggtaccactggcagagaaataacatcaatttcaatttggggagggcgggaggcaaagaatctgcctgtttccccacagtagcaaaggcaaattcataactcgccaacaaagtacctttgaaatgcagctgcactccacgaacacactgcctttttccacccagagagacaaccctgtcttgaccagaaagaaggggaaaaaga

SEQ ID NO: 119996 - DNA, 1000 bp, Homo Sapiens
tactacagtagcatctaaggttttaaatgtgttttactattttcagattagatttttagatataaagatgaaaaactcagataactcaaatgagatatctatatccctacaacctaattgtatattgagcagaaactgaattaatatgcttccttgcaaatgggaaatcacatagcagttaccccatggcattgtgactaatggcatcagggcaaaaatatgttactttacgatttacctgttagcaggttcttgtttcataaaggtagaaaataaatacagacaacatctactgagctagttgattggtgatgcttctaccttaatatctttcctactgatttataattcctttattttcacatatactaaaactttttaaatgcatgttaattcagataaaaaggcattttgtattccacatagaatagtgttaagaattgtgaagtacactgagctgtcacggcaaagtagtatttaatgtgcttataggggtgtgtgtgtgtgtgtgtgtgtgtgtgtgtgtgtgtgtgtgtgtgtgtgtgtgtgtgtgtgtgtgtgtgtgtgtgtgtgtgtgtgtgtgtgtgtgtgtagggggggactgtataattcacatttttaaaataaaagtgcttaaaaatcaaaagcattgggtaaagaaataatagtatctaagtatttgttcactttataacccagaaaataaaacaccacgtttattccagagaagtttgtatttgggccttaagcttttgaaaataaagtttagagacatagcatatgaataccactgtaatacacatgaaatattctatcagaccctaaaaattaacataaacttttaactttctcatagtcaacaaaatagtggctggttgccaattttattagataagttggttacagcattttaattatcattttacgtctatctaggtgtagctgaaattcaaaatgcacatcaaagtaaaactatatcacaactcaatgccatactaaa

SEQ ID NO: 119997 - DNA, 1000 bp, Homo Sapiens
actcaattcaatccctatcaaaatgccagtggcattattcacagaaatagaaaaataatcctaaaaatcatatggaaccacaaaagactctgaatagcaaaagccatcttgaccaaaagaataaagctggaggcattacactaccttactttaaaaaatatttttaaaagaattactgcaaaagagtttttagttcctcagggtggtagtgtaaaaggtattaggaagacagaacaaacttaatagtcttacatgttgtgaaagtaacccaatgtattccgaataccacaataatgcaagtttccagaaagtagccatgtttcagaaaagaccttgtctcggccaggtgcggtggcttacgcctataatcccagcactttggaaggccaaggcaggcagatcatgaggtcaggagatcgagaccgtcctggctaacacggtgaaaccctgtctctactaaaaataaaaaaaaattagccaggcgtggtggcatgtgcctgtagtcccagctactcaggaggctgaggcaggagaatggtatgaacccgggaggcggagtttgtagtgagtggagatcacgccactgcactccagcctgggcaggagagcaagactcggtctcaaaaaaaaaaaaaaaaaaaaaaaccatgtctcatatgtgaaatggaagaggtagaaagatattattttccatacacatttcagagagtgctgaagttacctgatttactaagttttaaatgatcactcatattcatattatcaccaagttttttattactttaagcatagatagtagaattttcatatacagtattggtgattattagaaagatttgtggcaagccaaaatcattcttccataaatttagggattaaaagtaagtgttatatgtaaatcagtatttcataataattatgagagttttgatcgtgaacacaatccagttttctctcttgtctgtcactaactcctaaaacatttaggccaggcacagtg

SEQ ID NO: 119998 - DNA, 1000 bp, Homo Sapiens
cctaggagttggaggctgcagagaaccatgattgcaccactgcattgcagcctgagtgaaagaccctgtctgttttttgttttttgttttttttgagacactcttgctctgtctcccaggctggagtgcagtggtgtgatatcggctcactgcaatctccgcctcccaggttcaagtaattctcctgtcagcctcccaagtcgctgggattacaggcacccaccaccacgcctggctaatttttgtatttttagtagagacggggtttcgccatgttggccaggctggttttgaactcctgacctcaggtgatctgcccgcctcggcctcccaaagtgctgggattacaggtgtgagccacagcgcctggccagaccctttctcttaaaaaataaaggaaaaatgttctttccattttacccaataacaaaactcctgcaaatctgccataagaaaataatccaaaatacaaagatatatgtccaaaggcattcaccatgactttatttttaacaattaaaaacttaaataatcttaactgttcaatagcataggaacagttaggtaaattatgaaacatccagccaggcatggtggttcacatctgtaatcccagcactttgggtagccaaagtttgggaggattccttgagcccaggagtttgacactagcctaagcaacaaagtgtttaaaaataaataaataagtaacaaaaataagaccaaaacattagctaggtatgggagcacatgcctgtagttccagctacttgggaggctgaggtggaaggatcgcttgagcccaggaattggaggctgcagtgagctacgatcgtgctattgcactccagcctgagcaaaagagcaagactctgtctccaaaaaagatatatccatataatgaaatatatgacaattaaaaatataaaactttatatgaggtatttgtccattgtgtttaagacacagaaacaaaatatatcaaaaacttgtaagctgg

SEQ ID NO: 119999 - DNA, 1000 bp, Homo Sapiens
cctgtggttacatggtcagtctctattaagacccagtagcaggccaagagctgtctctcaaaaggagagtaattaccttcagataatggcagggccttgctccaaaattttaaagccctgtgctgtaatttgcctacaagggcctgccaaaaactccaaacagcatccccatctgccactgacacttcaaatgccattggatctgctggatcatatggcctgagtagcagagcagcaggcacagcagctgggatctagtgcagtgttttctttttctaggtcccactcaaagctagcaactttttaggtcacttgggtaaatggccgctatctggttaagtgtatcataatccactgtcattctctatgatctgtcttctgcacaggccaaataggaaagttgaatggagatatagtgggaatcactacccctgcatctttcaagtccttcatggtggcactaatctctgcaatccctccaggaaagcagtattgcctttgatttattatttttctaggtagagaacattctaatggctctcagcctttcctaccataatagttctcactcaacatgttcagggaggcattgtgaggattctgtcagctgccagctggcagaatccattccagtgaattctggaactcggggaataaccacaggatggattaagaggcctactcaacccagtggaagatggacctgagttaaaactccattgatcactcgaccttgataatccatacagaagtttgaggtctctccattcagagccaatgatatggtttagctgtgtcctcatccaaatctcatcttgaattgtagctcccataattcccacgtgttgtgggaggaatctggtgggaggtagttgaatcatggggcaggtctttcccatgttgttcttgtgatagtgaataagtcttaggagatctgatggttttattaaggggagttcccctgcacatgctctcttgcctgccaccatgtaagatgtga

SEQ ID NO: 120000 - DNA, 1000 bp, Homo Sapiens
gctgctggaattaagcacatgggggctgtggtaaacaataatgggaggtgctgatgggccctggagggccgctctgaggatatgatttttaaactcagctcagaagggggtggtctggacctctctggtaaggtccaggcagaggaaatggttggcacaagggcctctggcagacagactgtggtgtgctaacacaggaagccagtgtgaacagaaggtaatgatcaaagggaaatgggtattgaagaatattcagtagtcttctgcatcaatcagggttctccagggaaacagaaccaataggatagacatagcggtagatgtgtatatagatatataaagaaatttatcatgaggatgtggcttacataattatggaggctgagaagtcccacagtctgccatctgcaggctggagacttgagactggctagtccaaaggcctgagaaccacggcagctggtggtataaatcccagcccgagggtgggagaagatgagatgagctgtcccagctcaggcaggcgggcaggaaaagggggcagactccccccttttgttctcctgccttttgttctcttcaggcccccagcagattagatgatgcccacccacattgggaagggcagtctaccttgtagagtccaccaattcaaatgctgatctcatccagaaacacccgcacaggtacttccagagataatgctcagtctgcacacaccggggccagtttgacacacgcaattaaccaccacatcttctgaactgctctaaatcttctcttattttttcaacgatcatgtccttttccaggaaaattagcatcctttacctatatctccttcttaaaactttaattaccaatcctgtaaagatagtagtaagatcagagtttaaaaagccttccagttttagcactttgctatccacaaagctttttcacaactgaagcctaatgaaaagcagtgggagaccccatttaatggatctacaattaaata

SEQ ID NO: 120001 - DNA, 1000 bp, Homo Sapiens
gatcggaagacagtcttcggggcagaccaagcttaagagctattgtttgatatgtagtaacaaagccttgctttcgtttttccctgagcttatctttccttgggggcatcagtcctctttgatattgcttgtcttttataagagcatttttgagaccctttatacctaaaggtctagcagcagaattgctgcaaacagcgtcaactggagcctccagtgtcctgtcctttgttaaaatcccataatgagtaatttatcatccgcagggtggccgcccttactgttcactctgtactgagtccgcccactccctgccccccacccccaccaccgctgcttttgcttacacctcgctgctgttctcccagacttggcaggagcacttggattctgtgtgtgcacctgttagtgtgaatgtatgttttccccaccttctttgtgaattttcaggattttcatctgttaaatatttttgtctctttttccccctttgcgcttcctgaggatgtcagccaggaccctattctggatttttatttgagcaactcgatttggccattttttttttttccatgagagtaaaagtctgaagaggcctcatctgctgagactgcttccctcctgtcccaggatctagcttgttttggtttgggcagttttgtttaatccagtgagggtagtagacctagaccagaataatacttaaggtgcaaggacaggggaacctatgaagccctgcctggcttagccccaagtttcctgtattagaacactcctgagaccagttgagtggggacaaggaagccttctcttctcttataatctccacagggttcctggaggcagaactggattcccagggagttaacagaacatacagaggaggcacaaaagcattgccacaggttacatattcctcgcccatgccagccttatagctcatggttgaacttgacttcttcctgctttattgagagatacagaaataagaaatcaaata

SEQ ID NO: 120002 - DNA, 1000 bp, Homo Sapiens
gatctacccgccttggactcccaaggtgctgggattacaggcatgaggcaccgcgcctggccatctccctcttttctttcctcccccctcaaccctccttccccttcatccttccaccaacaatatgtaatctttaacatcagttttgtgttaaaaaccgatgaatggataaagaaaatgtggtaggaatatacaatggaatactatttattcagccatggaaaaaagaggaaattctatcatttgcaaccatatagatgaaactgaaggacattctgttacataaaatagccaggtacagaaagacagataccacatggtctcacttatatgtggaatttaaaatggccaatctcatagaagcagagtagaatggtggttaccaggggctgggggcgggaggtgggtgttagggagatattgatcaaagaatacaaaatttcaattagatgggaggcataattcaagagatctattgtacagcatagtgactatagttaataacaatgcattgtataccagagaaactcagagtcaattttatgttctcaccaccaagaaatgataggtacagatgttctgaggctgataatggggtcatacattgaaaatgtcataagtcagacctggcgtggtggctcattcttataatcccagcactttgggaggccgaggcagggggatcacctgaggtcaggagtttgagaggtcagcctggccaacaaggtgaagccccgtctctactgaaaatacaaaattagctaggcgttgtggtgcatgcctgtaatcccagctacttgggaggctgaggcaggagaatcgcttgaacctgggaggcagaagttgcagtgggctgagattgagccactgtactccagccttggcaacaagagcgaaactctgtctcaaaaaaaaaaatatatatatatatatatatatatatatatatatatatatatatataagtcaaaaatgcattgaacatacctaacctaccaaa

SEQ ID NO: 120003 - DNA, 1000 bp, Homo Sapiens
gatccacccgcctcggcctcccaaagtgctgggattacaggcatgagccaccacacccagccaatcttaaccatttttaccgtacagatagcagtgttaaatatattcaccttgttgtgcaaccatcatcaccatctgcctccagagctcttttcatcttgcaaaactgaaactgccctcattaactccccactcaccacttccctcagtccctggcaatcaccactttactttctgtctttatgagttggactactctaagtacagtatataagtaaaatcatacagtatttgtctttttgtgactggcttatttcacttagcataatattttcaaaagtttcattcaagaccgggtgcggtggctcacacctataatcccagcactttgggaggccaaggcaggcggatcacttgaggtcaggagttcgagaccagcccggccaacatggtaaaccccatctctactaaaaatacaaaaattagctgggcatgatggtgcatgcctgaggtcccagctacttgggaggcagaggtgagagagtcacttgaacccgggaagcagaggttggagtgagccgagatggcaccactgcactccagcctgggcgacacagcgagactccatctcaaaaaaaaaaaaataagtttcattcatgttgtagcaagtgtcagaatttccttttcttttcaggactgaacaatatttcattgtacgtatagagcacattttgctcatccacgcatccatcagtgaacattgggttgcttccaccgcttggctactaggaataatggtgctatgaatacgggtgtacaaacatctcttcgagacccggatttatattcttttgtgtgtatacccagaagcaagattgctgaatagatgtctagtctgttctgcacactactattgtcccagcctagttcctggcattcaagaatgcttgggaaatactgaactgtgtttagaataaggtcctgggggacagccatggtg

SEQ ID NO: 120004 - DNA, 1000 bp, Homo Sapiens
gatccacctgccatggcctcccaaagtgctgggattacaggcgtgagccactgtgcctggacaatctttgttttattacagcaacttgctgatcaagtgttgcaggctgtgacactgttgaatatagtgcaatctggtgttgaaatgatcaattgccttgtgctgatagttcctgcaatgccatctgagtttaccatgacatccccaaggcacctgggcactcagtttgggaactacagcattgtctaaccttgcttcatccttttcttctacactgggaacatgatatagggtttctgttggaagtagatacaaaagtaggacatcaagttcgattatgtagccgcctttggattggaaacaataagcgaaattcttttccttttccttgaccttcagctaactcttaacgtggtgaatggtggctcctgctttttggccacaggtcagtatgaaaatggagagggagcagcagtttttaatcttttcaacggaaaactttgaagatgttgtctcctgttatctatgccaggcatgccttctcttgccactgcctgcctgacccccaccacagaagcgcacacactcttcccccgcctctggtctcattctctgtcccttcttcagagatgccgcctgtccctcgggtcagtgcagatccctctccccgtccatggccagagcagccctgcccttctcctccacagtattcaccccatgtattgcctaatcactcgggagaatgccatgtcaaccgctgagtcctagggcaaggcatgttaggacctgttgcctgagcgagtgactgagtctggtggtctccacattatccatgtgagagtgtgaactgttttgcttttccagagctttgagattgagctggaagccccaggatgacaatgtgggtatggtcactaagggttcacctcctgtgtgctgggaagataaaagtgaaataaagatgagcctgccttcaggttcctagggggctgaccatgga

SEQ ID NO: 120005 - DNA, 1000 bp, Homo Sapiens
acttgccactgtgtggattagataatgctgcttctcctcacatggaattgtgggaaattccccaaaactgtgaccggagccagctttaggcaaggctttttctccttctggaaagaacacctgaactcagtcaccttggactctgccttcctactctttctcctcctttatgtggaacatttctccttggtgattctcttaatgcattttaaaaatattgaaaatagatgttttattttgtttatacaaggtacaatgtcaaaatacaaataatatataatgtatagatataatagacaaggaagtataaatataaacgcatatattcgtaaaatggcactgagttgagttttcttcttcctgaatccttcaatggagaggattcgctgggctcagcatctctcccacctttcccaggtccctgtccatgtgtgcagagcagctggagacagggtggttagaagcccaaacgctggtgtcttccctgtagacgtctcttgtaattgaccacgccaggagaagccttgtaattgacagagagctttgggtatgtcacttttctctgtgaactgcaagttaggatgagggacggaagattcggggcagggtttttatttcattaccacatgtattccaggcagctcacactgtaatgaaataaaaatcctgctcagaagcctttggtctctcctgggaagctgggccctgggtccaaggcacgacaggcaggcaggtggtgcccatgggaatgcggagaacctgctccctcgcgcaggaggcgccgacccggcagtccgtgagatcctgctgggacttctgagaggcctggtgagcttgctcctggagcccgcttccttgcacctcttctcagtcgtctttagctaaagcagagaggctccttcactccggacttagctgggctggtttccccgagtttcataggtggtgagagcagttttccaagtcttcatctctgctgctggtcccccaagtcaccggc

SEQ ID NO: 120006 - DNA, 1000 bp, Homo Sapiens
gtgaggatggcttacactgtcttcccctcagggaatctttcaaaccaactggacatatgttttctgctagaatgtctgattggtggcccacagatgctctgctgaaaccccttctggtcccagaattcttggacattttcccacaggtgttcttcccttagtcacttcctggtgaagtggcatcctttgtctggggaaatacccaagattcattgtcttatgctaaggaaattgaagtcacagacacaggaaatcgaagacatggacacacaaaaactgggtttaacagtggaagttcaatagttgaaagaaagaagagagagcttccttgtgcagagggagggggtgcgagtgggtccgagtgggtttccgggtttggggcaagatacggttggttttacagatgagcttgaagaggcagtgtttgatttatatagggcatagtggattggttgggccagctgtgccatttacatagcccacaaagaggctggccatcccaccctaatcttttattctgcagatggggtctctacctggccagcaccatgacacctgcacacatgacgacaaagagaagggaggaggaacctccatattggatgtacttggcttccaggtatcccttttctattggcacagctgccgcattcacctgtgcaagcttccagcttgcttatctacgcttgcagcttgatttttcaggcttgtatcctaaccactcatattttccattcttttgtttctctgtactgtgccctggataataacttcttttttctttaaaaaagtgtaacaagatcttaaaattcaatttcaaaaataattttttattttattatttatttatttatttagagatggagtctcgctctgtcacccaggctggagtgcagtggcacgatcttggctcattgcagcctccacctcctgggttcaagtgattctcctgtctcagcctcccaaatagctgggattacaggtgtgcaccaccacgcct

SEQ ID NO: 120007 - DNA, 1000 bp, Homo Sapiens
aagtttcttggagtgagcagaaaggggagagggtggacctgaaggttttcatagattaaatccacaaagatcaagaacaaaaaaaatagcagcttttttttttctgtacagacgtatagatgaatatctgaaccgtaaaaaagttataaaagtgacattaaagacgatgtgtatgcaaatgtttcatggtctaacatagaactgtaagacccatgaagaagtcctaggaacagagaaaatgtcaacaaagcttagaatgcttgaatccattgactgcttttcttcttactgctgttgtggtgtttgaatttctttccttgcaaacctgcatcaacagtggggctgagtccctggaaaccccttcccatctgtgtccttgggggcgggcgggggagctggggctgggagagaagcaggcatggggccccttgactccaagcctgtccgccaggctgcttcggggcccatggccaccagattcttgggggttgggcagggggctggggaggcagggcagggaagccggttcagcttctccccaccttcactgagagaaagacctattgtgtccagttcccccaaataataatctagtcagaagcaatgagacctgtgtgcctgtggccttgagcagcacagcaggggcagtcggatggacggagtgtgtcgccagcgtgtctctcaaatggagcaaccagctgccatgctcacccatgcctccggacacgaggaatcagcgccgggccgatgagggagaaagttcaggattttggcaaaattaggcagcgttaaaatggtaacagccttggatgaacgatggccctttgtaaatttcatgtccctagaaaggtgaaagataaaggtaaaaatttccatctccacgtgtttttttgtaatgacccacggtgtcaggcgggtgtgtacagtggttggatggggccacagggacagccacttcctcaaactgataaaaagggcttcccagctggacttgtggcaa

SEQ ID NO: 120008 - DNA, 1000 bp, Homo Sapiens
agtggagtaaccagtgggcctttaataatctggaatggtagataaatttattggatcttaaatgcattccttggaaacttgaaagcaccaaagttagtggcctttggcagcctgatagtaattacctctactcgttaggaccccagggctgagagagttccccttccttgtcacacagacaaaatgggaacaccccacagcaaggcttcagccacatcctgccctgattcagttctgagaattggtagggcacaggcaccatggtttcccagtgttccttcagggtatcagccacctttttaatcacaaaataatggagagttggagagtctccttgtcaggcatcagtggggaaggaaaattaaattaagtaataaaatttaaaataataagcataacataggtaatagttaacatttagtataagctatttagaagtcacacataggctaaaattttaagcagaccctcccagcattgttaacaagttgcagatgcaagcttacttcaaaagcttttcacctgcctcggcccaccacctccccgccacttccatccccccacccacttccacccccgtaccgcatcccgcacattgcactgtgcattgtgccattgcactccagcctgggtaacatagtgagactccatttcaataataataataataataaataaaataaagttgatataaattgagcaagtggataatactactgtcttcatgggtaaaatgctgatgaaatttgtccaaaaatctgatagctatttcttggcttatgactttgtgggtttttggttgttgctgtttgtttgtctggagatggagtctcgctctgtcacccaggctggaatggaatgcaatggcacaatatcggctcactgcaacctctgcctcccgggttcaagcgactctgctgcctcaccctcctgagtagctgggactacaggcgcatgccaccacacccagctaatttttgtatttttagtagagacaggg

SEQ ID NO: 120009 - DNA, 1000 bp, Homo Sapiens
atttgaatccacctccttctgaaagcaggaatcacttctaaatgtctctcatatctttcttcaaggagtggttttccaggaggttcccagcctcctcaaatctttcccaagtttgatgcacttcacctcataaaaataatatatatatatatatatatatatttttttttttgagacagggtcttgctctgttgtccaagattgagtgcagcagcatgatcaggactcactgcagcctcacctcacccaagctcaagtgatcctctcacctcagcctcccaagtagctgagattacagatgcacatcaccacactcgggtaattttttttactctctgtagagatgcagtcttgctatgctgtgcatgctggcctcaaacttgtaggctcaagtaatcctcctgcctcggcctcccaaagtgctagaattacaggcctgagccaccgtgccttgccacaaactatttttaatcattaaaaaagaaaaaagaaaataaggcaggccggcttctcacattacatgcttttagaaaaaggtctcatccttgaagcagctttgttatatgcagagcacagtactggcttcaaaaaatatataaaggttctgtgcactggcactgtttacatgtgaagaattgccatcaacttctgtgaaaattagcaagctggcacagtggctcacgcctgtaatctcagcacctcaggaggccgaggtgggcggatcacctgaaggtgggagtttgagaccagcctgaccaacatggagaaaccccatgtctactaaaaatacaaaattagtcaggcatggtggtgcgtgcctgtaattccagctattcgggaggctaaggcaggagaatcgcttgaacccaggaggcagaggttgtggtgagctgaaatagcaccaccgcactccagcctgggcaatgagagcaaaactctgtctcaaaaaaaaaaaaaaaaaaagtagcaagttctattcattcaagtacattaagttaat

SEQ ID NO: 120010 - DNA, 1000 bp, Homo Sapiens
tttttttttttatggacagggtagtcaaatttatttcaaaacaaaagctttgttgggctgcatcaaatgcaggagaaaaggaatacttaggggcatggttaaattaccagtgtgcgtaacagtgaggtatgcctcaaataagcctttaaaactttataaactgaactagaacatacccatgcagtaatattttttcagtgctactaatgaaaaaaaaaaattaaagcctgcactggaaatttacaatatggcagaatttgttacttttaccttttgaccctaatgtacagattttatgacagggtctgtgttaaaaatctaaacattttcacaagattttaaacatcactggaaagctgaatttagaggaaacaatatcagataaaagtacaatgcccgtgacagccaacattatgtaactgggctgtatgaggttgtttagaaggctagggttaaaaagatagatagacaaaaagatttttaaaaatcacccccaaagttgatgcgctgatttgaacataagtacaccagatactacagcaaggggatatacactgcaaaaaggtcatctatttacagaagagtgatttaaagacattatggttttctttacagatgtaagaacagcaactgttcactttttaaaaactctacatctcaaccctccactattattatagtccactgaattgcctgtatcaaaggcagttttttgtttgtttttttcccatttgactctccaaatgaacttccatcatttcttcatcatctgtgggctggctctcctgaaaagtctcagggaataagtcacaggagggcaggtttttgacctgctactaaaaattaaaccacaaaaactagagatccctctcctgcaccctgttcccctcactttgtgcagttcagtcatcactatccgacagggtctcgtactgtgctgagagcagtggggcaggctctcgctcccagatcctgttctgttggtgaggagctgcttggt

SEQ ID NO: 120011 - DNA, 1000 bp, Homo Sapiens
gcaaaaaggcttggagagagttttatttcagttacttcaaaatacaagtaggctattattttcctttggaagaagaaaccagaaaaaaaacttcctgattgtaacattgtgacaaatttcagattatataacacataacacaggataaatggctgtagcattaatttttttctccagttacattcctttatactaaaagactagtattaaatcttagaagaaaatttcaattgttcttacgtgttacatattaaacacaaaagcaatttattattatttggtacaacatgaacctcagtatttgctcaaatgtagaaaaggattccttaatatgctgagaaatatccttagataaatccaactgtgaaaatatagaaaaactccttactgtaattactgggaaccacaaagttaatttttacagggtagaaaaactccacaaaaatggagattcatacttaaaaccttcttttactgatagaacattctttctggtattataaaatgaacaaaagtgtacagatatgggcttggggctagataatatccatagaactcgccattttaagcaataaaaattggcatgtgggtgcatgcctgtaatccctgctacttaggaggccaaggcaggaagactgcttgaacccaggagttcaagactagcctgggcaatgtagtgaggccactgtcgctcaagggaaaaaaagacatgtttttaaacacacttctaataaaaagaatttttaaaaccaacttttttgcttctagatagtctcaatgccttggatttaaaacatgactccttcttgatacaatgaattataaaagcaaactagttccacatattaattatacgttcaagtctagttcctaaaaagtcatttctctttaacctttcttacctatcaatcaatcattttcatataatctaatgtctaaggactccaaatattggtacggggtgagtatccctaatctaaaagtcagaaacaagaaatgt

SEQ ID NO: 120012 - DNA, 1000 bp, Homo Sapiens
ttttttttttttttttttgagttttctttaactttatcatttataaagccatacaatgcattgcaaagaaacaaagcagctgtacaggagtggggacgcgtcagtgtacaatacattcatgtccaggataaggagcagacaccaggatttatacacggtggcagcggctataggcacgatgatacaaaatataaagtatatttccatctatataaatacacagctggggtggggaaggatgctgggtgatcttgtttcccccgcagagggcctgggaggcagggagggtggtgggaagggatttcttacatttgttctcaatgatgggtctgaagggaggagagaaatggggaaacacagcctgcacacactgatgtgctctcacacacacgcacaaacaaaacacagacacaggagagtttcaaacagcttaacactgattggaaaacaagcttgggacatccctctacagtaactccactgctggcaagagcccaggcgtgggatatgaacagaggtcctccaacattttggacatttgaggacagaggggccaagagggacagatctgcccgaggcccccaccctgcccctctgggtgaaccacttctcacctgggctatcgctgagactccaccaattggttggcctacaggcctcacctcccgactcccctcactgctgggcgacattgaatttgaagttccattgcccagcacctccaaccccgactcccaagttccctaaagaaatgagcaaaacacacgcacacacatacatccacacttgcacatgcgcacacacgtcctgtgttaccactggccaaggaaacgcgagtctcaggattccagggcctggacctggggtaaagggctgctctgggactctgccccccaacctcttggaggaccccgagtgtgggggcaggattgggtgtctgccttgactcacaggatctccccaggtcctaaagctgaaaaaaaaagtgggagaagatcca

SEQ ID NO: 120013 - DNA, 1000 bp, Homo Sapiens
catcgtgatgtcttatttaaggggaacgtgtgggctatttaggctttatgaccctgaagtaggaaccagatgtcggatacagttcactttagctacccccaagtgttatgggcccggagcgaggagagtagcactcttgtgcgggatattgatttcacggaggatggtggtcaagggacccctatctgaggggggtcatccatggggacgagaagggatttgactgtaatgtgctatgtacggtaaatggctttatgtactatgtactgttaaggatgggtaggtttgttggtatcctagtgggtgaggggtggctttggagttgcagttgatgtgtgatagttgagggttgattgctgtacttgcttgtaagcatggggggggggttttgatgtgggttaggtttttatgtactacaggtggtcaagtatttatggtactgtacaatattcatggtggctggcagtaatgtacgaaatacatggcggttgttgatgggtgagtcaatacttgggtggtacccaaatctgcttccccatgaaagaacagagaatagtttaaattagaatcttagctttgggtgctaatggtggagttaaagactttttctctgatttgtccttggaaaaaggttttcatctccggtttacaagactggtgtattagtttatactacaaggacaggcccatttgagtattttgttttcaattagggagatagttggtattaggattaggattgttgtgaagtatagtacggatgctacttgtccaatgatggtaaaagggtagcttactggttgtcctccgattcaggttagaatgaggaggtctgcggctaggagtcaataaagtgattggcttagtgggcgaaatattatgctttgttgtttggatatatggaggatggggattattgctaggatgaggatggatagtaatagggcaaggacgcctcctagtttgttagggacggatcggagaattgtgtaggcgaata

SEQ ID NO: 120014 - DNA, 704 bp, Homo Sapiens
actccgggaggcagtattcccccgactcaggtggcaacacagccattctcaggcctggcttagttagagagcacttgacttctacagatcccagggttaaagccagacctagaaacctgatggctggcctgaacgggcagaggcaaacaaattgccaggaagccaccagggcagtcctgggatcaagatgcttcagcctgcctctcccgtaacaggggaggtactgagattgcaagtggagagtctcctagccagaggggtcgatttagcccaattcagcactctaaggtaaaaaagggaaactaaaccatataattttcaaaattcctagaaatgacgaaacctgaaaaacaaagaaaaatgctaacaaggggcctccgtgccacctaccatgtgcatcatcatctggatagcaatttcagaatactggctgatatagttcttgcactgaggagagagaaacagattgctaaacaaatcactgcaacaatgcaccaaaacccaaccaacaaaaaccccccagcatttccaacagtgtcaactggtgactatcaagcaagtttctaaagtagaattttatgaatgtctgctctgggccagctttaataagatgaaaatgacaatttggttactctatcatttataggaaatgtgtgcaaaagacgttttgaaaagtttcttaagggaccttaaagattccaccc

SEQ ID NO: 120015 - DNA, 1000 bp, Homo Sapiens
aacatctctttccccatcctgtccccacccctccctctagcagccacctttctactctgtttctatgacactggttttatttttttggactccacagataagtgacatcgtgcagtatttgaagaagaaggtgaagaagatgggagggtcctgcagatatccaggggcaaacaggatgatcaccccaagtttcatcattattcattcattcacaacccccctactgcacacccaatcttccttgctgattctggttctgactgcgcttcagcaggcctcagctttctttcgtggtccaacagtgacacctagcggtgacttctgataagcacctgcggagatgctgtgggcctacccatgaggggagtccgaagacaacagccactgaggggacagccggccaggcagtgagaccccaggtcctctccactgttagtccagcgaggaagggggaagtgagtgggacgtggctctctggctgtcccttcaaagtgcatccaaatcaaaagaacactgtagtcccttcattttcagcatcaccccattctcaccctcccatgtattcccctgctgacgtgcgcatgggctctcctttggccagtggtgctcacccctggctgcacattacaatcacagaggggaggggcaggctgtattcaagctagaggtcctctccagagatactgtttaagtgaagccagggcagcagcatattgtttttaattccccctcgtgaaagagctgatggaaatcaagtggataataaagccagctggtcaaaatcagattaaagtcagcccagttgggctcctaggtcagtcaatgaatctaagctgtgccgttatcagaacatctattcctgttctgagtttcttcatttaccctatttatttctccttcctacgagccaagaaaaatgacacactataaggttttatcaatctactctaaataaggacatcaaaattcatagcaaactcccacctggcccaccttcaaa

SEQ ID NO: 120016 - DNA, 1000 bp, Homo Sapiens
gatccttaagaataatttttttttttttatgatcttgaaggctgagaagtattagagtacttccataaattttttactaagttttaaagttttggggttagtggtagacttgatactgtcctctgaaggtattattttttcctattctatagtcatagaattttaattttcaagaaaccaaaactataaagtctaaccttcacagttctccttcactgtactgaaagtgtaaataacacgggctgattacctgctcacttatttcctcttattttggtattaactctactcattttgttcagttctgaataagatatatggataaaattctttaagtcagaattttaaaattaccatagcctcaagattagattatgtacattttttatgtcttcatttttgcactgcacccttccccacaacacacacatgtacacatgtgtatataccccctcacccattacgtgcttacgtgaatacatgcctctctttgcttttggaaaggcttgaaatctgcaacagtactgcatagatacaaaaatgcggtgcttttgattgattagtgacttcccactaaatatatttcagaaaagaaattccttgaataagttttattttatggtttgatttcttattagaaatctacatttgaaattattgcttgctatttcaggcagcttgcttgaaaatgtttttgactcatttttgtcaccaatattgattttgggagatggatgtgaactgaaggagagtaagaaataggactaagtctgtacttgatatccaaagcacaccaaatagcagcttttattagccactgtatttctcacattttgagaaagagttgtaaatgatctactctttccacagaatgtaactcttataaaagttggaaaaagcactgtagagttctgtcctctggccctattgcattataatttcgttttaggattcagcacagtttcttggctactggaaaaaaaaaaaaaaggaacagctt

SEQ ID NO: 120017 - DNA, 1000 bp, Homo Sapiens
aagaaaaagttggcccagccccagggaataaattttgactgctctaaacagggttggccaactatagaccaagggccaaatctggccctctgactgtataaattaagttttactggaataaaaccaggtccattgatttatccattgtctacataagcttttaggctacgatggcaccactgtgtcactacgacagaggttatctagaccaaaagcctaaaatattaccgtttgcatctttatggaaaaagtttgccattccctagtctaaggtttagattctgagcttatcattttagcctaaccccccttaccagtgactggctaaaaacaagtctgtgattccattctgactgttctactgagggaattcccccttcttctcatgcagagctgatgagggttagttgtattaataggacatacactcaggttttctgaaaaatacttttatctagaaatgcataggaatatgctggtgcctgaatgtaccatctgggggcctggagattgactcatctgcctccagagctagtgctcacacttactactgagaggcctgaggaaatgcctgcctacccaccaccagaacctgcatatgtcacctggagaactagagatcagcctgccacgcacaccacccaggagcccagtggtgcacctgcccacttggcccagtgctgccactgccagcaaccaaaggagccacctggaggcccagggattggcccacgcagacaggctatcatcagtgcccacaaacactgcccacagtccctagtattgacacacctggtccaccaccgctaccactgatgctgaaggacaagacttcctggcatccccatcctcagcaaagcctcaccacagcctccaataacaactacagtctggccaagtgtggtggctcacgcctgtaatcccagcactttgagaggccgaggcgggtagatcacgaggtcaggagttcgagagcagcctggccaacatagtgaaaccc

SEQ ID NO: 120018 - DNA, 1000 bp, Homo Sapiens
acaaatacaaatgttcaattctttattagtgtacgtgtcattacagttggtttagatggttaatataggaatacagaaaataactacagttcattcaaacaaaggaaattaaaatgagattaaagagccctgattaaaaaaaatacaactttcagctgaaaaactgtaaaagttacatacatacatacctaatggcactaagaatgtacaatatcaattattggaaaaataagtgagtgactcacagtcataagaaataatttaatattagtatttttcttttatagacaaacataacatacacatggtttctaccttttataaggcaaagtagaaaactaaccgttactgcatttacctcaaacacagcactgactgtgccacagataacatggtccaaaatattcaattctatacataggccatggtagtggatgtgtggttaagttttaggaaaggcatatatttccagaagtaagtatgttaaatacacaaatgtctataaataacaaaaagttatcagcaaaaacgcttaggttataacattcccaaacgttctaacattttaagtgttttagatatgagttgtctgaccagttcatttggttacagttttaaactagcaaaccattgccctataagaggagctaaactaaactgttaacactacacaaacttcccaagaaaggtaacttgaaaagtctaaaaagtgattccaattattctaattaacatttgagatgctaaaagaatcaatgactcaagaaacactttgaagtaattccatttttctttatcattttctaaaaatgtattcacataaatttaagatccagattgcttaagagtatgtcttcaaagtaggttaatcactaaagcattctgatccaaagacatagtcttaatgcttctaatatgtaattctaacctaaaatcacaatccttggtttgaaaacatcaaaggtaagaaacaaaaaaataaatcagggtgaaaatgtgc

SEQ ID NO: 120019 - DNA, 1000 bp, Homo Sapiens
accagttaaagcactttaatgctttaaggtgaaaacgaaatcccatccgtgtttttcgtgtaagatcgtgcttctccgagcagtattaatggacgccctccaatgacataacaactgtttttggtaatgtaatcttgggaaaatgtgttatttttttagctgtgtttcagtggggatttttgtttttgtaacataataaagtgtatgttccaatgaccggttctcatgactcaacctaaatctccaaagggctcagacaaacagggcggctcgtcacaggcaggaagcccgtggcctctgtggccggccctggcaccccacttgagtttctctgtgtcgtgagtctgatgggtccctggggtgtccctctgccctgtgcctcggaggacctgcgggccaagccgagtagcctcatgggactgaccgggcctctcaggcctcctgaagtacaggcccatgagccctcatccaagccctgtggggcccaggccttctggactttagctaggccaagcagggtctcagggcgtcacaaacaccgacacagaacgcactcccgtttctcagcaaaacctaagaaaacaaaaggcagcagagagcctcatgttggctcaagccaggctgagaccaacgggcttcatttcagttctcttggttctcaggtttcttggtttcagagttgtgaacagggactagggacttgtcacagcaaaaacaaggctctagaaatctgttcaaccttgaaggaggcctcagtctttttagaaattggcctaaaacaaagatagaaaggaccaaggcaagagggggagatgccgccaggaagctccgccgagttcccccacaggtgaggtgccatgcccagccctggccccaccttcctggctagcgctcacgccgtcacaccagagcccgcccacccctttccctaggctcctacctgtccccacgtccaccaaggagggctgggcggtggtgggcccaccccctcatagccgca

SEQ ID NO: 120020 - DNA, 1000 bp, Homo Sapiens
catttatggaggataatttatttttataagcctccttataaggctacaccaactcatccttttcattctgctgcaaagccagcatattatagctcagcctaccatggacataaatgcaaatgataacctttgtagtaagagcaacatggaagtaggaggggatcatgttagcacagcatcaactagtaacagctgactgactgatccagcagagaagatcagtcccctagcataccttttacaatcctgtcatcttccattaagaagagtcacaaattacatcaacaacagtggtatatgttttaatagttttcagaatataagctgcatagctttttagaataaaaaatgatataacttcaggtacatgctttgggacacttggttaaacaaggaatctgtgtctttgatgaccacctcaaaagggtcgcagacttcacagtgtaacttggaaacagacaaggagatagatgattacatcatgacatactgcctacaaaagaacattctgacagaacattaagtagaacagagcacacagtttcaagtattcagcactgctttctggccaagtaaaaactgcctaaagatcagtttctttcgactggaaaaaatagatggagctgctgagttctggacacagcgtttctttcccagaatgagactggctcagtccagcttgaaagcagtgtgaggaatcactcttccccttgactgttaagaaaaaaaaaaatgaactaaacaaataaattactacaacaacagggaccatggcactgaatgaaataaaggggcaatcaccttcccatcattgcatagtctcccgaagcagcaagtgtgaaagaggatactgaaaagccacttcatttttacacagcccaaggatcgtttttatagatgacctgggcacctataatgtccagttgctttatgagaacacacacacaccacattcttcctaccctctaagagaaggtagttcctttcacaataagaaaac

SEQ ID NO: 120021 - DNA, 1000 bp, Homo Sapiens
aaagaaagtacagaacaaaacataccaacataatgtgtggtgtattagcataatttaaaaacaaatgcagagaggtgatctttaaatttaatatcaaaatatgctgaccattagaactgcattataattttgaagaaatgattgacaacctttgtcaccaattgtgtttgcttcatagaaaaaacaagacttgctaatgttttcatatacacaatctgaagaagttatgttgttcataagaaagtgatatttaattctaagcacagagtattcacaaaaacaagtttcagtaaaaaaaaaaactaaaacaaacactgaagtagagttttgtaaatacaactgattttgttcttgtagataattagtgaacgtacaaatagaaattttgctagactgcttccaagaaagctaggtagactcggcgactgtgaattcaagtcagcaatgcaggtaggaggcgaacttgggctcttttgtgagcagcactgtagaaaggatttttcaagggggtacagcctgcataaaagcagttatcttggcatgtgcaaacaagaagggggaaagttgtattgaaggaggggtgaattaaagtccctaaaattcaagtcccttctttagggaggtgagaacctccttggcatatgccctaccttaatctgagctgtgttatagaaaagtacagactctggtgtttgggactgacatctccaaaccaagaaaattaaataaataaaaaaggcaagggaagtttaaaaaatggttctttcactagtggaatagagtctgaataccagaattcactgagaatctatttacaccacagtttgattgcgcgcacacacacacacccatacatatgcatactctcacatacattcccaatctttaatttaaaaaaaaaagtcaaacaatcaagaatgactgcttgaaaaataatttgtaaaatgcctagagctgggctaaatttcaaccttatagcagatcctgaaaataaatttca

SEQ ID NO: 120022 - DNA, 1000 bp, Homo Sapiens
aattagaaacactttaattcctagccacttggcagcacttaaatatcagagccatccaagcatgccagcctttgaacttgctcagcaagagtagatgatcacacaactcttaaggtaaatcaaaattagatgaaggttatttattggtgtgacttttttcctttagtgagcttcctttacacagcatggtgtaaatagcatcagattgaatgaaaagtttgttaaatgcaaccataaataattataataaatatacatcaagtaactttacagcacacattttttagggccaaggtttggatctgtctggacctcaatgtgctctcggagaagcagccacgttagcagcagataccttacagcttgtcatctactcaagtgatggccaacagaagcttctgaactcctcctggggaggtagctgacaagtccattcaagggatgaggactaaagagaaccaagaatttaaagatgtagggaggaaaaaccacttctaataaatcgaaaggctctttcattatgcagaaatgaaaataaaaggatccttattgtcaggaatacatcctggctgtgaccccccacactcaaaggagctgtggccgctggggaggcagcgggctgaccatcttctttcaaagcaggggaactgcttgcgggcactcacctccagagttgacttgcatccaatacaactgatgcagctgtcatgattaaccctaggtcgatttcatccttaggtcaggggatcctttctataatggtccttgatgcatttcctaagagttacagggaggagatggatgctaacggctctatctctagaattcacaatctttccagcaggccagggcacatcttctttcttggaccagcatccacactccaaaaccttctagacagcactcactcaaaacttccaatattcacaatattatacaataaatacagcgatgtgattctgtgagacctggcaaggcccaaagtgacagtgtccaacaa

SEQ ID NO: 120023 - DNA, 1000 bp, Homo Sapiens
aagcttggtatgaagttgcttttgttttagaagtgtaatatgaggccagtttatctgctgagagcagaggagggtggaggataagggggcagaggaggaggctgaatgtgtgtcttgaggctttgaagagagaagaggaaaagtaaaatagtaacagtcattttggagactagggacataaaaatggaaggattgtagagaagtaactaaaatggtcaggcagacttgagggctcatttgagatttatggttatgaatttaaagtgagacctgtcagcatgcttgtgaatttttctccagcaatatctgactatttaagtgaggtaagtgacgatataagagatattaagagcaccaaatcatattttttcaaatatctgtattcttttcttcagagacactataggagtctaaataaaaacagacaaggcatgtgttgcaaagcctttaattagaatgtttgtattttttacatcatgcataacttcacatttgtgattaattagtaattatttcaatacttgtaagctcatctgcctcagatttaatcataatacatgaattaaattaatcaaattaaggaacagcaatttagaaagaaacacactttaaaaaatcaaaattctcaattcaggcagtctgtttctatcatttggtattctactcctttaaaaatttcatattgcccaacaaaaagtggttatttttactgtttttggagatgactgaacagatgaaggcatcagatgccttcatcagctggtattttgcctaagatctatttaagataaccttttcttatattttttacttaatattgggcataatcgtatcattcaagattaagtctgggttatttctttgataagaactgaatgtggccgggcgcagtggctcacgcctgtaatcccagcactttgggaggccgaggtgggtggatcacaaggtcaggagatcgagaccatcctggctaacacggtgaaaccctgtctctactaaa

SEQ ID NO: 120024 - DNA, 1000 bp, Homo Sapiens
taacccaatttatatgtgaaaattgattgtaacaatgaaaaaaacacttcaggaaataaactctaacatttaggctaaaaacaacaccaggttttttgttaaatatatcttattatttaaagattttgtaagctgggcatggtggttcatgcctgtaatcccaccactttgagaggctgaggtgggcagatcacctgaacccagatgttcaagaccagcctgggtaacacagagaaaccctgtctctacaaaaaaaaaaaaaaaaaaaaaaaaattagccaggcatggtgcactggccatgcaggcatgttcctgtagttccagctactcaggaagctgaggtcgggggagtcgcttgagcccttgaggtggaggttgcagtaagctgaggtggtgccactgcactgcagcctgggcaaccgagtgagaccctgtatcagaaaaaaaagaaaaaaattgtaatcatgaattgctaagacatagatgactctccctcagagatcttgatctgctcccatccccttgtcaatcactgagtctcagagtcccctggaggaatgggaatcataactagcgtccctgagcactcaataggagctcaactgtgctgtgcatatatcacctcatttaatccccaccacagccctaggacgtgggatgtggttagtgcacccaactcacacataaggcaatggatgcccagggaaggcatgtaactggcctgagaccacacagccagagcaggatggggctggaatttggtattggagtctgcattcttatgatccaactgcatgataaccctcaaggccagtatggcacaaactcagatcttttccagtgaactaaaagcttcttgagagcagggacaatgttattcatctgtgtctcttcagtcctggaaataaggcctaaacatatttagtgcccagcaaagatttcttgagttaatgattaagagtcattttataattaagctgtgactgcctagcatgcccta

SEQ ID NO: 120025 - DNA, 1000 bp, Homo Sapiens
aatacaaaaattagccaggcgtggtggtgtgcacctgtagtcccagctacagggagggtgaagcaggacaaccacttggaccccacaagtggaggttgcagtttgcagagatcatgccactacactccagcctgggggacaaagtgagactgtctcaaaaaaacaaaaaagagagctttccaatgacacacacaccccgccccatttctcccccagcccagctcacagccaattactaaatagtggaaaggaggctacttaaaaagaagttccctattttcctgtgggggttactgggctttttagtaggccactcacccactaccctcgcaccaatcccccaaagtccgtaccctacttgaagattatgctgtaattatgggtgctgtgtttatagaccacagatttaacagaacaagcccacagaacacccatcttttttcccaatcaagatttttttattccaaaagaaccacaacaatttagagcttctccatttttattacacaaaattgttaagttttcagcagtagggcttctcaaaacaccagctgcaggctattacctgaaaaagacaaggcagttatattaggttctcgtgtaaatatgaatatacaatcaagtcaagctcctgacaaattatacatcaaggatgtatatagttcaaagatattgtgctgttacctcccacctccccaaaactccaagaactagcacctgcagagaaaaggagaaatacagaaagagtcctgaagacagattagtagtcaaagcaaagacaccgcagggatttgaaccccgtcctggaaaccaggagtgccaaccaccagcatcttttgctttttttttttttaagctagaaaaaggccaaaaagcaaaacctgagaaaacaatacgtgttgttttctcaggaaaagaaaaaccttcatgaccctactgaagagcattggagatcagcttccgctaagatgctagcttggccaagtctgttatgttcacc

SEQ ID NO: 120026 - DNA, 460 bp, Homo Sapiens
  misc_feature (430)..(431): n is a, c, g, or t
  misc_feature (447)..(447): n is a, c, g, or t
  misc_feature (450)..(450): n is a, c, g, or t
aatatatattatatttatacatatgaatatatattatatattatatataatagttgtatgtataatacctatattaaatatatattatatgactatgttattaattacatgtcacatgtgttatatattatatattttacatagaatataccggtacatacaatatatactatgttacctataatgtataatttattacatgtaaaataaagaatgcaatatattatgtataatttataatatacaatatgtggaatgtgatatatataacatataatatatgatatatgatatacagtatatgatatataacatacaatatatgattctaatatatatggtatacaatatatattttatgatatgtattctatatgttttatattctgttatatataactatttggaattatatataactgtatagtanntatgtratatgtgatntrntatatatagc

SEQ ID NO: 120027 - DNA, 1000 bp, Homo Sapiens
ggatctcagacttccagcctccaggactgtgggagaatcaatgtctgttgtttctaagccacccagtctatggtattcttttatagcagcctgaaatagactaagacacctcataagaagaagagatgaggacacagacccacacagagggacgaccctgtgaagacacagggagaagacggcatctacaaggacaggagagaggcctcaggaggaaccagccctgcccacactttgatcttgaacttccagcctccaggactgtgagagaataagctgatgttatctaagccaaccagtctgtggacctttgtcacggcagcctgagaaaataaatactttatatgattacttgtatatgaaattctaagaagagacacatccatagagacagagggtacatttgtggttaacagggcatggggataggatgggaaatgggggtcttctttgtgggggtgacggttgtccaacactgtgaatgtaccaaatgccactgaattgttcactttaaaatggttaaaaggtgattttttttttttttttaaacagagtctccctctgtcacccaggctggagtgcagtggtgggatcatagctcactgcagcctcaatctcccttgctcaggcaatcctcctgccccagcctcctgagtagctgagaccacagacacacgccaccatgtcccagtagatttttttttttattatttttgtagagacggggtctccctgtgttgcccaggctgatcgcaaactcctgggctcaagcaatgctcccaccttggccttccaaagtgctgggattataggcttgagccgccatgcctgatcaaaaaaggccaatttttaaatgtaaattttgcccaacaatgaaaacgccaccaccaacagctagaatctaaggaaactgggaggttaagtggtctcctgacattttgcaattttccccagtgacctctgctattcctgccgataacatcagacaatgacttctctc

SEQ ID NO: 120028 - DNA, 1000 bp, Homo Sapiens
gatccgttgattcaaagcaatcctatcaaaatctcaattttttttcagaaagagaaaaatccattcttaaattcatctcaaggaaccttgaggtcaaaattacatagacagacatatagatcagtaaaagacatggagagcccagaaataaacccttaatatacagtgagatgatttttgacaaggatgccaagaccattaaatgggaaaggacaagtgtttttcaacaaattctgcggaaaactggatatccacagcaaaatgatgacgttggaccctgtattagtccattttcacgctactaataaagacatacctgagactgagaaaaagaggtttaattggacttgcaggtccacatggctggggaggcctcagaatcatggcaggaggcaaaaggcacttcttacatggcagtggccagagaaaatgagggaaacacaaaagcagaaacccttgataaaactatcagatctcgtgagacttactcactaccacgagaacagtatgggggaaaccgcccccacgattcgattatctcccactaggtccctcccacaacacatgagaattatgggagtacaattcaagatgagatttgggaggggacacagggccaaactacatcattctgcccctggctcctgccaaatctcatatcctcacatttcaaaaccaatcatgtcttcccaacagtcccccaatgtcttaactcaattcagcattaactcaaaagtccacagtccaaagtctcatctgagacaagcaagttctttctgcctataagcctgtaaaatcaaaagcaagttagttatttcctagatggaaatggaagtacagacattgggtaaatacagccattcaaaatgggagaaattggccaaaacaaagggctacagaccccatgcaagtctgaaatccggcggggcattcaaatcctaaagctccaacattatctcctttgacttcatgtctcacatccaggtcatgctgatgcaag

SEQ ID NO: 120029 - DNA, 1000 bp, Homo Sapiens
aaccagactgagaatgaaattataatgtatcccatgggtctgcatgttatggatctgaggggtggcatcaattgctttgtctgcttttcacaaaagacacagaaacagtccggccaggttctgaacaacctccatcagaactcacagggaggggccacagccgtctacaaggcctcccagtgtcacagatggggaaaagccgaggcccaggggaggatgagccagaatgaaagagcagacccggcgccctcaccctccttcccctccagcccctgctgccccaagcctcacccagatccctcccataggggctagaaatgagggcaagaattcacccacaccaaaagccctcttaccaccccctcatccccgcaggacagcaggccctccaggaggcagctctccgctggctagcacacaggtgaataatcaggtagctccagggaggccggttcacaaccaggcagagcctcttccttccttatataggagcatgccaacttggtgaccacatccaacccccgtgcccacttaagagacatttgatgccagcaaacgcttcagaaaggggggcctggctccatggatggtgagcagagagagagaggctggagccaagtggcctcccacccccatgggggagacctgtcctgaccaggcatctggagaggcagccacattacagggcacaggctcagtcctgggagctggcctggagctacctgccccgccaacctacagccacataccttggaatcccagggggtgggcaggggcaggacctggccatgtccaaagtgaccagtgtctcctccctgagccaaccccgtgactctcttggttgtggggaagtcaggggtcatgggatttgaacccctgagatgtaacggcccctggctctggaagaacaggtgggacaagagtttggggaggaggcctggagtctgtgcacacacctgtcggggacgtgggggattcctgcccagggggccagtgctca

SEQ ID NO: 120030 - DNA, 1000 bp, Homo Sapiens
  misc_feature (215)..(215): n is a, c, g, or t
  misc_feature (226)..(226): n is a, c, g, or t
  misc_feature (264)..(264): n is a, c, g, or t
cagcatccatcacattccaagccccacagagttgcttagaattaaaatttagttggttatattccttgacatggagaaaataaataatctttagcagacaaatatatatataacagacattcttctggttctcttcctaattctctgaaggatatgtacatttcttcttaaatgactccctttccttctccttttcctaaaatgtagtatttctncaatgtttggncctccagtactattttgtcttgactacaccaatctctncctagtgatatcattcaggcttaagacattgactatcattttcattattattatatgtactatggggagtcccatgctaaagagttttccaatcttctttagcatgggactccccatagtaaatataataataatgaatattacatattcattatttatatatatattatatggactccccacagtaaatataataataatgaactattatataacatcttattaggtatcaaactctttcatgaacatcaccatatttaatctttacagcgattctgtaagataaatatctcagttaatagtaacatgagtgggtgcttagtataaaccaagcacaattataagaacattccacatattcaagaagcacaattatagtgtagatatcaaaatacaggtgggtgaaacacaaagaactgtcctattttacctgtattgtcccgccttaattattaatcgtgctcccctttgctcttaaagtgtcctagtttgaatgataatttttagctgcctagttaaggtttaggctactggtgcaaggaatactttctgcttctgtaatgatgggaagccgaggctcagagaatataaattactggcccatagtcacaccaccaagtagcagaacttgagcttgaatctttaaacctctgatttaagtactttttaatattctatgatgtctcttttctagacaaatgtttggatttgaatagaatcttctaggaaagctata

SEQ ID NO: 120031 - DNA, 1000 bp, Homo Sapiens
ggatcacttcaggtcaggagttcaagaccagcttggccaacatggtgaaactctgtctctactaaaaatccaaaaaataaaaataaaaaataaaaagccaggcatggtggcatgtgcctgaaatcccagctactcagtaggctaagacacaagaatcacctaaacccaggaggcaaaggctgaggtgagccaagatcgtgccactgcactccagcctgggtgacagagtgagactccgtctttaaagaaaaaaaatataggccaagtatttgattatatgtttttccaaagaagacacataaatggccaataggtatatgaaaacatgttcaacattactaattatcaggggaatgcaaattgaaaccacaatgaaatatcacctcacacttcctaggatgactattataaaaataaaataaaaggtaagtgttggcaaggatatggagaaactggaactcttgtacactgttggaagaaatgtaaaatggtacagccactatagaaaagtatagaggtttctcaaaaacattaaaaatagaactactgtatattctagcaactctacttctgggtatatggaaaaaaaaaagaattgaaatcaggatcacaaagagatatctgcacacccatgttcattttagcattattcacaatatccaagatttggaaaaaaaccctaaatatccataaatggatgaatggatcaagaaaatatggcatatacatgcaatggaatattattcagccttataaaagaaggaaattctgcagtgtgcaataacagaaatgaatctggaggacaatatgctaagtgaaataactgctgcttacatgaggtatctaaaataaactcacagaagcagtgagcagagcagtggtttccaggggctgcggagatgggggaggggaaacaggtatcaagtttcagttacgcaataaaaataggttctagagatcttctgtacgacatagcgccacattgtacacttaaaatttg

SEQ ID NO: 120032 - DNA, 1000 bp, Homo Sapiens
tatccatctcattagaaaaggctttatgtaaggctgtgcatggtggctcacacctgtaatcccactattttgggggactgaggcgggaggactgcttgaaagaaagaaaaagagaaagaaaaagaaagaaagagagagagagagagaaagaaagaaagaaagagaaagaaaaagaaaggagggagggagggagggagggagggagggaggaaggaaggaaggaaggaaggaaggggaagggaagggaaggaaggaaagagagaaagaagaagaggaagaggaagaagaaggaggaggaggaggaaggaaggaagaaggaagaaggagaagaagaagaatcagaagaagaattagtagtagtagtagtgaaagcgaagagaaagagaagtctttatgttaaggaaagctgtcaagcttccagtggaggaacacaacttttccaaaattatacattttgctagaaatctccaattttatcattggcacaacaaataccagttgttttccgtgaagaggccaacttagttcaattttgagaaaatgtctgccaaacatccaaatctaataaccaatcatcgtttttcattagtcattcttttcagtgaaaatggcaagccatgaaaaaaagcagcaaattcaattggcaactcaaataatcaaacaagtgcttctcctggagacagcctcgtacctaggcatgcagcagacgtgtctgtgcgtacttgccactccatcacacaggatattcacagggtattgcagatgcacacacaaaagcatgcaaatgcagaagccatggctggacaacaacatatcacatatttaataggcgccactaccttctggtaatgcaatgcagaaaaatgggaatatacgagacttttatattttacctaaaaacaaatgaatataaaaaagtctggtgggatacacaaaagaggttgactgtgattagctactagtaaaactatgaatgatttttattttcatttttctcact

SEQ ID NO: 120033 - DNA, 1000 bp, Homo Sapiens
ggatcataaaaccatccatttagtgccaacattagcatgataatgctcagattctgttacaaatggaattaattcatcacatagccattctgtttattcagttttcacacatcacgataagagctaacactcaagtggcccttcacatgagcttgctttgcatgtattgagtccatttaatcctcacagcaaccctatgaggttactatttttattattcctttttaaaggtgagagacagacatgaaggagttaaggtttataaaaatagtaattggaagacataaaattcaaactcaggcaatttggctttagaggccacatttcaaaccacatcactagtctgcctccctgtgtgcgctcctaaaaatatgagacccaaactcaatttatcaaaaaacaccacgttttggtaaactttttttctttcacgaaaccacatttaatgcacttcattccagcaggatcatagtactctgatgagatgggtttatttgttttgcacttaatttatgatatgtattaagtgtaagtcacagagaacacaaaatttggggtggaaacacaaaaaggattgtgttatgaaagaactaattaaccccacatgactcaaggccagagtggtcactcagaggtcattttccatcgccacagtggtagtgacagcagaattggctcacatggtctgtgtaataacaaaccagacagaatattccatgttttctgtttcctctttctttatctctggagctttgttggtttctaccacccccagtgctagtctcccgccatgccaccacatggctgtgcctacacatcctcctgaacatgctcctattctcagaggccagagccaatcagttacttacaatccacaaagcagaaattgcactaggcaaaattaaacagacttgtttaatgcatgacttgtgcaataggagagaagggccagaacttagactgagctcaactcagctaaaacaaaggttgtgaggatttt

SEQ ID NO: 120034 - DNA, 1000 bp, Homo Sapiens
gatctgtgcatacgtcggggtccttgagggcctcgctggtcactgcaccttttcccgatttggcccccttcataactggggagacgagagggagagtcatttcagcccagcccctcctctggaagccaaacttctctcacagaaccctgtctcaggtggcctctgcccctggctggactctgctacactcaaaactttctttttttttttttttgagacggagtctcgctctgttgcccaggtggagtgcagtggcgcagtctcagctcactgcaagctccgcctcccgggttcaagccattctcctgcctcagcctcccaagtagctgggactacaggcgcccaccaccacgcccagctaattttttgtatttttagtagagacggggtttcaccgtgttagccaggatggtctcgatctcctgacctcgtgatctgcccaccttggcctcccaaagtgttgggattacaggcgtgagccaccgcgcccggccactcaaaacttttttttaaagacagggtctcagccaggcatagtggctcatgcctgtaatcccagcactctgggaggccgaggtgggaagatcacctgaggtcaggtgagtttaagaccagcctggccaacatggtgaaaacttgtctctactaaaaatacaaaaaaaaaaattagctgggcatggtggcatatgcctgtgatcccagctactcgggaggctgaggcaggagaatcacttgaacccgggaggcggaggttgcagtgagctgagatcgcatcgctgcactccagcctaggttacagagcaagattccatctcaaaaaaataaaaaatctaaaaaattaaaaaataaagacagcccggccgggcgcggcggctcacgcctgtaatcccagctctttgggaggccaaggtgggcggatcacgaggtcaggaggttgagaccatcctggctaacatggtgaaattccatctctactaaaaatacaaaaacattagccggg

SEQ ID NO: 120035 - DNA, 1000 bp, Homo Sapiens
aatatatacccaggaactagatggttaccaaaggccttcacctgcccagttccctgccccagccaccccgcaacaaggctggctgagtttggctctgaagatctgcagcctggttgtttattgtagacgctccgagaaggccttatcagtacctttggggctgaggagctcggggttcctcttccacgaagtgtggaggtctcgccggggctgcccactggggtcaaagctggggggctgcagtctgtcgtctaggctgcgtgccgcctcaaacacaggcacggggtctgtgcagggagagaaagacagggatagtgagggcctgatggatagggacacccgggctgtggctgcagggcctggcaggttccacaggagccatcggagtcaccccgctggcttacaggaagtagcatggactttctgctctacgagggagcaggcttgtccaggcacttgttcaggggagcacctgctatctccagggtatgggtatcctgcccagctgggaataatactaacaataataatagttggccaggccgggtgcggtggctcatgcctgtaatcccagcactttgggaggctaaggtaggcggatcatttgaggtcaggagttcaagaccagcctgaccaacatggtgaaaccccgtctctgctaaaaatacaaaaaaattagccgggtgtggtggtgcatgcttgtagtcccagctattcgggaggctgaagcaggagactcgcttgaacccaggaggtggagattgcagtgagctgagatcacgccactgcactccagcctgggcgatagagcaagactccatctcaaaaaaaaaaaaaggttggctgagtgcagtggctaacgcctgtaatcccagcaatttgggaggccaaggtgggaggatcacttgagcccaggagttcaagaccagcctgtgcagcatggcaagatctcatctctgcaaaaagatttaaaaaatagtctgggcgcagtggcttatgc

SEQ ID NO: 120036 - DNA, 1000 bp, Homo Sapiens
gagctgtagcaacaaaactccctgctgtaccccttaatcaggtcatggcattagtcagagcttgacctcccttgtccctgatcaagagcaggaattcaaggcatgaggcccatggccggcaacagacataccaacaccagaaagggcaaaataacctcaggaaagtgaaagagctctagataggtcttccagaggtgctaaaccgacacacctttatcccaaccccaacccgggaaagataagcaaactgaaagaaaatgcacagcaaatagacataatcttgaagatttttaaagaataaatatttttttgtaattaaacattatgcaaacacgtgccacgcttgctttgtccatgcatatgcgctatatacaattttgaaaaatactgtgttgtcctcttgttttaaaagtcatatacaaagtttttatgtttttcgtttgttgaatcctcttgctgcctacccctttccccatcccaagattttctttacaaggaactaagcatcattcactcatgaccttggggtatgagagaaagagagtcagtctgtgtgtgggtgtatctgtatgtgtaagggaaggaaggggaagaggtccctttacccaaagtacaacaaaatggctggtttgaacatgaaaagcagtgtcaaggagctgtttgaaattttaactgtactacactcaggaaaaggaaaaagaaaaaaaaggagtcagctttgagaatgaagctacgttacaagttaaagttggagggcttttagtgtgtctgtcacacttttgttggcggcctagaatactgttgtacaatggtttatctacctttttattacaatataatttacttaaactttccattaacaaaacaattctggtactacagaccagtggtgtcagaataggcttagtgcctccttgtttgtgtttgttttgttttaattgcatgagcactctagatggtaaagttttcagagttcattttatgcagggccattctcagt

SEQ ID NO: 120037 - DNA, 1000 bp, Homo Sapiens
gatcctcccgcctcagccttcccagtagctaggactacaagcatgcagcatcacatccagcctcttttcctgcctgacccagttctggtttcctttagttttctaggtgttcatccattttatctaatgtttaatgcatttggcataagggtgctcagtgtcctttcattgtctgttgtctgtaactgttgccattttcattcctatttatgagtactggcgtcttctctcactttttcttaataatcctgctggaactttgctttttaaagaacatcttttgacttgttgattcttttttcatacatattaactattttcttattttttgcctttatatttatttcttttcctgtttgaaacattgctcttttcttactataaaaatgggtaagtagctcatgaattaccacctcttttaaaaatcttttctactgtaagcattttagcagtttacatttgcccacaagtaccacttcagctacaccctatgtgcttttacataaagtcttcatttttggtaagacatattctcaaattttaattatcacttgtttttaaatccatgatgttttatttgaaatgttgtttctaaagatacattttctggttatacttttattcttctaatttagcacagtggccacaaaacatggtctgtgcagtgcatacaatcgatgagtaatttctgagctgtagtatttggcataatatatggcaaaatttcctaagttttccatgtgtgctttaaaaaacttccagtaaaatacataaatctgttagatcaagcttctcacattgttcaaatagtctatatgtttactgattcatttgactgcttgatttatcaattacaggtaggaatgtattcaaatctcctattaaagtgtgacactcaagtggctttttaaagacagagatgccaaaccaatgaatacatgattttccccaaagcctgcacaaattctctaatgaaattttaccatgaaagtttgtttaa

SEQ ID NO: 120038 - DNA, 1000 bp, Homo Sapiens
aaaaaaatggacgtaaattctgctactgttaagcaggaagattaacagatacaagcttcaaggcacagttacacagcattgaagaataatggagcagaaatcaatgccttactaacactataaccataagtaagtcactaacatctctgaacttcaatttcctctcatgaaaaatgggaatgataaaatccacctcatctgccttaacaggagtgtgtgtatgtgtgtgtgtatgtctcacagatgtttcataaagtttactaacaaaatactatttttaaaatgtgattatttcagacaaattaggtaaatattttggactgtattaaaaggcaagaaactattaagcagacttttttggatttttctttaaatacaacagaaatatcagaacagaacagaaactgtttctcaatttttaaaaatgtattctataatccctgtacgttattctttctttcaacaagtggtaaaacaagtcattgaggagtctatttcaactattaggactagatttatcagctgtattacagaatgatacagatactaccatttctgaaacaactatttgatttacctgcttgtatactcagaaaaagcaagtctaaagtgataggaagatgctgctattattctcaagaggcttttcaggttcctctcacagcactcaaaactccagttcagtaatgtgctaatgtttttcactcatgagtatgctaaagtaatttgatactatgctgtcaaaaaaaaaatttttttttttccagatcagcacaaagtttattagcaatttctgctcagaagagcccccttctgaccaggactgttcctctgacataccagacaggaaatagccacacgtacaggccctcactctcatttatatctcaagtcacatcaaaaggacatcttagagcaatggcagttgcccccctggggtcccctgggaatagctaaggtgtgtggctgtccagagtcctatgacagaccttcaaagttt

SEQ ID NO: 120039 - DNA, 1000 bp, Homo Sapiens
  misc_feature (156)..(156): n is a, c, g, or t
  misc_feature (320)..(320): n is a, c, g, or t
ccccagcctactttatcctgggaggcaaccagtctggggaaggttgtgtgattacacgagacagaaaggaatcattggatgtatatgagtaagtaggtttgttaaagcaaaagaagtagaaacaaaagcatacactgatatactttgagttttaangcatgtacctaagaaggaatctctccttttgtatctagactcgatgctaagcagggtagatggtatgtggtacaaacaaattatgaccgttggaaacatcccttcttccttgatgatcgcagaacgcctgcaaagatgtgtttgaaccgcaccagccaagaggnacctttgcagggtcatctatagaaagaaactgttgccattaaagattcccttggttctggcatttttctttggccttcaagtaatttataaacgtcctatttttcatagtatctctagccactctccactgatttttttgtttcgttttctaaacttaaagagcaaaattgtgctgtactttccttttctggttctaatgctggataccactctgaagttgaataacaaacaggcaagaatttaaaaaggggaaggagagagaggaaagtaatccattaaaactgttacctgtatttctaacagtgactcccacagaaactccactgcggggatggaggggaggttgattaaagaatgtcttggtttctggtggcccatgtgtgtagataaggctgttggcttctgtatttaacttactgaacaaaactattttcttgtgttttagaatatctcatttgaaaccatgtatgatgtcctgtcaacaaaacctgtcctcaacaaggtattttaaatgttatatgtatatttgccttttagggaaagaatttggccctatgttttatctttctctgttatctttgatcagtttgagcacaaaaggtgtgttcagcttaggactgattttttattaaaaaatgtttttgtgtggctaaaactgtattttggaatacaagaaaga

SEQ ID NO: 120040 - DNA, 1000 bp, Homo Sapiens
tggcaggacaatgtcagagaaaaccagttttatttaaatggtaggtttaaataagatccagatttttacaaaacaatctccttgtttaatttaaaaccactcatcatgtcaaggattaggatgatctcaaacagaacaaaaaaagacaataaataataaaactaagataacagagatgttagtatcagctgacaaagattttaaagcagcataaagagaggtaagctttttataccttactccacctagtaaaatgatggcaacagtagactgcaataacttctgtataaatgatttaatatattacctagaggaaccaccaaagatacactcttaaaaatattaaaggtatatcaaattgtaattctaagaaatgttcagtaacccatgggaaggctggggaaagaaattggaaaaatgaaaaacattacaagcgaaaccaaaagatcaaatcaaatcaagtagcagacttaaggtctaacagcaatattacatcaaatgtaaattatttaagtacaacaattaaaatacaaatattggcagagttgctttaaaaaatatgacccagtcatttgctatatataaaaaactccaaatattaggggtttatgcaaaagtaattgtggtttttgccattaaactaatggcaaaatacaggcaggttaaaagtagaaagatgaaaacaatatatcatgtgaatttttattgaaggaaaacaaaaatagctatgttaatgtaagataaaatagacttcagagcaaagaaaatcatcagagacagaaaacagcattacacaatgaaaaagggtcaatctatcaagatgatataccagacctaagtgtgtatgcatcaaataacagagttgaaaaatatatgaaacaaaaactgatggagaattaaataactgtacattcatagttggagacttcaacacacctttttcaataattgatagaacaactagacagaaaatcaaaaataatatggacaaattaacatc

SEQ ID NO: 120041 - DNA, 1000 bp, Homo Sapiens
ctacagtattattacttctaggccctctcagcagacaaaaatgaaaaaaaaataagtatgcacacacacacatctacatcaatttaaccgtatatatacacaaatgtgatttatgtgtgtgtgcatatgaatgtgtgtatataaatatatacacacatacatatattaatatatacatatattgtatataatgcatataatatatacatatataaatatatacacacatacatatattaatttattgtaatacctctgattcaaatccaacattacacagttcattctagccttcaacctttaattatgattcctttcttcaaaaatgagaaaactggctttcattatccatgatttgatagcaagtttatttatttgctatcttagaatgcatttaaagtcattccaggattactaacgttatggaaaacaaacttattaactagagtaaaattccatgtacagttatttttgttgttagctttgcaatttgtagtcgaaatcctgttttccagtattacttaggttagtccttaactttcccactcccttcagtaaaatgatttcatctattttttgtagagttagttcatttgttaatgtttgtattctgcttaaagtttacctccttcccaattctccgttgattttgtctgtctatttgattggttggtatttatttatttggtatgtgatatactatcactctttcaaaagtcaaagctttacaaagacatatactcaaggaggtaccactcatcctttattccttccaaccaatttccattcccttattctttcctacccactctctgcaggcaatccatcttgttagtgtctggtttaccttcctgtatttctttttgaacaaatgtacatatacatgcatattgatttatgccaccttatttttacatgaaaggttgcatactatgatactgtaagagaatgaagcctcaatccctaatctttccaagtactgaattattaaagttataaa

SEQ ID NO: 120042 - DNA, 1000 bp, Homo Sapiens
tgacagcaccagcgccccaggggcagctcgcaaacccctgactcatgcccccgcctcctaatctgcccgccccactggccctgggagccccttcccacaccccccaccccgctcccactgggtgcccagtaaacagagttatctcttacccacatctggacagctgtgagtctggcccaccccacccgcctggccagcccccaaggcctctcggggccctcctgggtccccatggttctcctgactcttcctttgtggatgaaggtttgatcgctctgtcctcagggctccagtgcctggcaggaaggcaccagcctccagaggtccctgtcctgcctctgtccatcctccactctggccaggcccttctgctctggccccaaggtgcaagggcgcctgctcctctcgtctctcttggtatccacgctaggactcactcctcctctgcagttttctccacagggaactgctcagcactcacggggcacggacagccccctcccctccttgatccagactaggatgccccagccacattctccccaagaccctggctggttctaaagagctggctcctggacactaagacactgacattcagtcaacctgaaacaatgtcagctcaacaaaacaaccatccccacaccaagctcttcaactcacaaagctctaatgtctgggcatactggctcctctgtaggcagcctggctcagcccccaggccagaacagccgcattctcagcccctgccatgcccctccccttcagttcccacccctacacccccagtttctctgctctggggggtgaccagagcctggtcacctcttcgtaggctctggttgctaaagaggcagagactgaaagatgagtacagatcagcaagaatgaagaggggttttcaagcagacagaaaggggtgttgtggccatcgctctgggcacagagaggagggtgtcctagtacagctccggcatggactggctgaaggaacctggac

SEQ ID NO: 120043 - DNA, 346 bp, Homo Sapiens
tctgtggctcagttacctcgttacctcacctgcccacggtggtggggcctgaggaatgacagggccccttggcggggtcctcaaaggctgcataagcacccaggaaccttcccatgaagagaactcaggaagtgctgaggccaggcacaggctgaaaggctctgggtggggggctcacccgtgggagggggcagcaggctcaggttgtggtgacactggtcaccgtagagcttccacttctcaaacaggaagtccatcacctgagcggaggggacctgtggctgggggacacatgcacaagcaaccagacagacagacagacaggcaggcagacagacaggcagac

SEQ ID NO: 120044 - DNA, 1000 bp, Homo Sapiens
ccatcttctattaccagcacttacaagcactgtgaaaactgatcatgacaaataagtaaaatttgctacattaaacatattgcctcagccattactaagcgtccacttgtaaagctggacacagtttttactttatgcttcattttgattttttatccgtaagacataaattagaaggcatgaggtggccctttaaggataatctgcaaatatacacattttaatagtcatccatctgaaatcgatccacattccagagaagattcagtattgtgctgtgtgaaataagcattcccagaaaaaaaacatttatgctaataatacaacataacctctgcattaaagaaaaagatgcttttaggccaggcgccgtggctcacacctgtaatccctgcactttgagaggctgaggtgggtggatcatgaggtcaggagatcaagaccatcctggctaacagggtgaaaccccgtctctactaaaaatataaaaagttagctgggtgtggtggtgggtgcctgtagtcccagctactcaggaggctgaggcaggagaatggcgtgaacccggaaggcagaggttgtagtgagccgaggtcacgccactgcactccagcctgggtgacagagtgaaactctgtctcaaaaaaaaaaaatttaaaaaatttaaaaaagatgcttttagaagagtaaaaagttggaagacaaaatgtgcatcttttatgttctgtcattctgtgggggttttttcgtttgtttgttttagacagggtctgctctcacccaggatggagtgcagtggcacaatcaccgtttactgcacccttgacctccagggctcaagtgatcctcccatctcagcctccctagtagctgggaccacaggcttacaccatcacactcagctaattttttaaatcttttgtagagatggaggtctcgctttgtgacgtagcctggtcttgagcgatccttttgccttggccttgccaaagtgctggga

SEQ ID NO: 120045 - DNA, 1000 bp, Homo Sapiens
gatcacgaggtcaggagctcgagaccagcctggccaacatggtgaaacccagtctctactaaaaatacaagaaaaatttggtggtcatggtggcaggtgcttgtagtcccagctactcgggaggcgaggcaggagaatcacttgaacccgggaggcagaggttgcagtgagctgagattgcgccattgcattccagccgaggtgagtgtgagactccgtctcaaacataataaaatcataaagtctcaaaacaaaatatccctcatctgactcctttacaaaaaaaaacgtctgctcagccctgagagcctaaatttacaaatggtcatctctgggacgcaaagtgcagggagcggggattgcttgtaaaacatcaaccaaatacatgatgtgttcctgtgtttttatcacatatgtgattagatgctacatttttttttagatgggatctcactgtcaccaaggatggagtgcagtggcaccatcatagttcactgcagcctcaaactccttgggctcaagccaaccctctgcctcagcctcccaagtagctgcaactacaggcccacgtcactaggcccagctgattcttctagttttattttttacagagacagggtctcactacgttgtccaggctggtttcaaactcctgggctcaagtggtcctcctgcctcggcctccaaaaatgttgagattacagttgtgagccacagtgtccagcctacacttaattttttttaaaaaacacggctccttggcacctgtcttgagtgtagcagcgaccagtattgtcttcagctgcgaggcctgggcggggccagcccaggtcacaggtggaaaaggggcagaaccacattgggcccgggtttcccttgagggctgatcccaccacatgccctcctcaccgaagtgcttttcggggggcccttgggtctgggctggtccctagaggtcatcttcaaggcagtagcctccaagactttagccagagtctaa

SEQ ID NO: 120046 - DNA, 1000 bp, Homo Sapiens
ggccgagctgaggggtaggagagacggagtgtgccagaggctcctggcctgacccccaccctccgtccgaggaatccactgctattaataagaaaagtgcaggacacctcgagctacacattcagcagtattgtaatgcgtaaaagtttaatcttttcacccatttgataaatacacaaggtttataatttaatgttttaaattagcattccacaaatatacaggtaattcaataattattgtgcatgaatacatacacaatgcttatatatacaaattccagtttgttttcatgtgctggcaagggatttgtatacaatcataagctgtgttcatattggtcccattgaatattcacaatacaaaagcacaaaagaaccattgatttacaaaaggaaatctatttaaaatcacttcaattaatgatgtttcaaaggattatcttctcatgccagcatgaaattgagtagttgaacctatgagagaaaaacaggaaattcaactgatttcaaattacattgctacctgtatcagacccaccagagttcacacaaaggaaattattattattctccatttttttaaagccctttttttccttaaaatgtcctcttcatacttaaactgagtctctccccactacccccaaggtggagtgttactctgttgcccaggctggaattcagtggtgtgatcttggctcactgcaacccccgcctcctgggttcaagtgattctcctgcctcagcctcctgagtagctgggactatccacacatgccaccatgtccagcaaatttttgtatttttagtggagacggggtttcaccatgttggccaggctagtctcgaactggttggtcttgaactcctgacctagtgatccgcctgcctcggccgcccaaagtgctgggattacaggcatgagccaccgcgcccagcccatatacttaagctgacttttaagagattttgaatatatatgtaaaaatcaccatgac

SEQ ID NO: 120047 - DNA, 1000 bp, Homo Sapiens
gtcaatagggaaagacaggttttttggatcccacctaaattaattctaaagcacattaatgggccaaatgagtaggatttaaaaagcggtggggggtgtgggggaagttgtgagatattctgcaaacaagtttttgaggagctatccatctccacctttatagggagatataacaggaagatgtggcttggcagtcatcaaataaaatgtatttttcatatgttttgtggaggtcaaaacaaagttcatttcattggtttggtaaggaaacaaaaggttaagtactttcgtcttgttattaaaaagaaaccctaataaaaatttagaaccaatattaaaaagttcattatttttggtttatttgagaaaagtataaaaattttaagcaagtgtttctccgtcttgtcttcaggttggaatcacctggagatcttgtgtaagcattccaaaacccaggacacatcttggatcaatgaaaccacaatctctgtgggtgggacatgaggatcaggaattttgacactccccaggtgatttcaatatgcagacaaatttggggaccactggcgtaaaaataaaccacttataaacaactggtgaaaataaaagtgatcccttaaaaagataatgcatttgtcagaggtacttgttgtttatgtattgagaaagacaacatgctgaaatgtcaaaatcctacttcattttcttttacacctatggcaaccatgataaatatgtcagtaccagaaaagttgtcctgtaagaattttaagttataaaaacagcaagacagttctaacaggaattctttaaagtgtgtgtgcgtgtgtgtgtgtgtgtgtgtttatgcctaacatattttacaatgaggacctcttgtagaagattacagacatgatttttccttttaggtttgtatcttgcattgtttgtttcagtcccatccaagcacttaaaaaatatcaaaagtaaaacatgtcagattttatgttgaactgtt

SEQ ID NO: 120048 - DNA, 1000 bp, Homo Sapiens
ttttcacattataaacatgacaactgttctagtcacgtatttcaagtttaactccttttcctttccaaaacactaagtcgttactatagttgcaaaatagcatcctccctactttaccatccctaatccacagtctagtgacaccgtcctcccaattcacatcctcccaacacacaattttaaggccttcagatttggtggatgagattgaaggggagggcaggagggctggggccgagggacgggggggtcgtcgcagcagcacccatccctccggcttccctacattcctcgtgatccttctccccaaaaccgcttccctaaaccactttgtaaaacctaagatcaaaacgcagccacaactttctcagagagagaaaggaaagaaaaaataataataaaaaactcttacacataaagcatgagatgaaacggagggtccgtcccaaagcaaacacgaatattgcaaatgtgctttccaaaattcaggagggtcgggggaggttggggaaaagagggaggaagagcagcagaatgggaggcgggaaaggaacaaaagaacaactggacaaacataagaggtagcttttagaaaaacaacacccccaccccaacacaacaaaacaaaggctggatcccgcccccctccccaaagaccagccgtgaaaatagaccaattctggcaatgagaatgcacgcacagaggtgagaccacacagttgcaaggatccaaacacaggccctcaaacctcaatggcccagcaaattgtaagaaaggtgggattctctccagagtgttttaggcggaacggatggtggccacaggtgacttcatgcaccagcggagccaaaagtgactccctagtgccctctggggaccatgagaccccaaagcaacatcccctccccacccacactcttcgccctcctcggccctcacattcagatcctgagtatcaactcctcctgcacagttcctgccagctgggaggctggtctc

SEQ ID NO: 120049 - DNA, 1000 bp, Homo Sapiens
acagtattcaattcacaggcaggaagaacatgaactgcaccagcgtgctcgtccatgtgcctttcatttgctcctcaatgaagttccgcagctgtagccaaatggctcctctccagcttatggcatgacataaaatttagtgtctgtgagcttggctcatctttcaaacaaagcgtgattgttgaaatcaggacacaaagttttccaacagctttgtaaacttaaggatttgggtcagcttgttctatcatacttaacatttaggaaattaattaaaaaaaaaaacgccagtgtaaacatgcttcagatacataggtctataaaatattgcacataaaaatttgttcagtatttcttcatagtaatttttcattattaaaaaaggatacaaaattgtgcagactacctataaatttggctggtcaattttacttcaaaaatgataatattacaagattatgaattatttacaagagttttaaacataaaaaatttgtgatggttaaattcaagatgatgggaaaatagcttaaataaaagattattctccaaagttacatattataaagattagcagtaaaaataagtaataaagttggaataagcaattttaaataaaaatctttaggaatcagttttcccagtttggctcatgcctgtataattttatgtttttgtctaagttatattcaacatgttttctctgtgtatacaagtacaaggcatagcaggaaaaacgggtatttaatcccaagctaaatatctataagaagtgttgcttcttatagatattaaaaataatgtttacccataatgttaaattgctttttaattaatgaactctagacattttaccatgacttttaaacactccaaaggtagagagtacctcgaaattcatgtattaactaagtcaatggaaagatatacaaggaaatataaatgcaacatcttgcaaagctaaattaagcagatgtgagtccctggataatgtgagtga

SEQ ID NO: 120050 - DNA, 1000 bp, Homo Sapiens
gatcacctgaggtcaggagttcgagaccagcttggccaacatggtgaaacccagtctaactaaaaatacaaaaattaactggatatggtggcaggtgcatgtaatcccagctacttgggaggcagagggaggtgaatcgcttgaacctgggagacagaggttgcagtgagctgtgattgtgccattgcactccagtctgggtgacaagagtgagactccgtcaaaaaaaaaaaagaagaaagaacaagaaagaaaaaaaaggaaggaaggagtgagagaaagaaagaagaaagaaaaggagagaaggaaaggaagaaaggagagagaaagaaagagaagcaagaaaaggagagaaggaaaggaaggaaggaagaaaggaaaaggaagaaagagggcatccctgtcttgttctaggtcttagagtaagagcttacatttcactgtttaatatgttgttagctggacatttttttctatacatggcatttattggcttgagatgcatttgtcctatactaattattttttagagattatcatgagggaatgttgaattttgtcaaacttttgttttttttttttggctggagtttcactcttgtcatccaggctggagtgcactggcacgatctcggctcactgcaacctctgcctcccaggttcaagcaattctcctgcctcagcctcctgagtagctgggattacaaacgtgagccaccacgcccagttaatttttgtatttttagtagagacagggtttccccacgttggccaggctggtctcgaactcctgacctcaggtgacccacccgcctcgacctcccaaagtgctgggattacaggtgtgagccactgcacccagccaaattttgtcaagcttttattctgcatctatttaaatgttagagttgtgatatcacaactaatttcacataaatagtaaacatcctcagagactactatgcacatctctatgcatgcaaactaaaaaatttagaga

SEQ ID NO: 120051 - DNA, 1000 bp, Homo Sapiens
attggattcaggtaaaaagagggggttgctagaaggaaaaacaggtgtgacctgatcctgccccttccttctgcctgtagctcctgctggaggaagaggattccagcctgttggcccctgtcttcgacccagcccagccccctctgttgctctgcatattggccgtctggggttgtctccctcctgagctagaaacccagacagggacccccacttcctacagcaaagaggtgattctcctgcctccacgtccagctaatttttgtattttttagtagagacagggttccatcatgttggccaggctggtctcgaacttctgacctcaggtgatccacctgcctcggcctctccaagggttgggattacaggtgtgagccaccactccaggccaaggtctcaaactcttgacctcaagtgatctgcccacctctgcctcctagagtgcagaattttaaaaaagtgcaattgccagctgggcgcggtggctcacgcctgtaatcccaacactttgggaggctgaggcgggcggatcagaaggtcaggagatcaaaaccatcctggctaacacagtgaaaccccgtctctactaaaaatacaaaaattagccgggcatggcggcgtgtgcctgtagtcccagctgctggggaggctgaggcagaatggcgtgaacccaggagatgggaaaagggcaattcccatccacgcagaagagcctgggcctcaagagtccaggattcttttacaactcagctctgccaactgactggtcatctgaaactcagttttttctcctataacatgggtacaaaccccccacttgataagactgcaagaatattctgcagtgcatttggcacagtatctaggacagttctgtagccctgggaaccaggaccccaggtgttctgctggggtcactagcccctctgcacttcaattccccgttacaaccccctcccaggaataagcctggctccagacctggaagccctaggaa

SEQ ID NO: 120052 - DNA, 1000 bp, Homo Sapiens
gctcactctgtcttccgcgctggagtgcagtggcgcaatgtcagctcacgataacctctgcctcccgggttcaagcaattcccctgcctcagcctccccagtagctgggactacaggcgcccgccaccacacccggacaatttttgtatttttagtagagacgaggtttcgccatgctggccaggctggtctcaaactcctgacctcaggtgacccacccgcctcggccttccaaagtgctgggattacaggcataagccaccaagcccggccaagggagaattttttttcttttgagacggagtctcactctgtcacccaggctggagtgcagtgacatgatctcggctcactgcaacctccgcctctcgggttcaagtgattctcctgcctcagcttcctgagtagctgcgattacaggcccacaccaccgtgcccggctgattagtgtgtgtatatatatatatatatacacatatatatatatatacacatatacatatatatatatatatacacacacacatacatacatacatataaatacacatacacacatatgtatatgtatatatagttttttagtagagatggtgtttcaccatgttggtcaggctggcctcgaactcctaacctcgtgatctgcccgcctcggcctcccaaagtgctgggattacaggcgtgagcctccgtgcccggcctgagatttttttttcttttggatggaatacaatttccaagtgtctaggccgacacccctccaccctcctttgcctgtcattcaagtcaataccctggagaaaagaggctgtgggggaggccatgttcgattaggaggtttaagagtccatcaaagtgtcatatgtgttaggtgtgaaatggcgacactgggaattactgttaataaggggtggctgcagcacggtgattgttatgagaacatccccaccgccccacttttgtttgaagactttcgtactgaactacatgttgtttactt

SEQ ID NO: 120053 - DNA, 1000 bp, Homo Sapiens
gctggtccacaattggataagtacagaaattaagagcatgggatttttgaaatattttttagcaattagacgttgtaacatccaagcatgtgatcactggactcatctcattgaaaagggtgaaggccaggttgggtgttaccaaatacaagtggtactgctacatactagccacatgcaataggaccatacatgggtctttgatgcattggaaatgtaaaaagcaaatcaaaatgggactggcccttcactgtagatggtttgaggagcactggactaggtccctaaaagctggaaagaatcaaaggcagagtggcctatgtgagaatgggcacatttatcttcctgttggagtattaattacaatagtgacaataccagtagccaccactcagtgggccagagctgatgccagacatgaagctcagtccttatctggttgaatcctcgcaacctcctatggggtgtagatcattctccaattttatcagatggggaaactgaggctcatggagaaactcagtaacaggcccatggccacacagataggtctatttgaatccaaagcctgtgcctctaacccactcttgagcctcctgctgagaatgccctgggatggccccatatgtgaggctggtcctgggggaggtaggcacccatgatctgcctctgctcctctgacttgcagttccggtacaaagaggctttcctgcgggaccgaggcctgcagatcgggtaccgcagtgtcgacgatgacccaaggatgaagcatttcctcaacgttggcaggctccagagtgacaatgagtacaagaaggactttgccaagagtcggtcccagtttcacagcagcacagaccagcccggcctccttcaggccaagaggagccagcagctggccagtgatgtgcactacaggcagcccctgccccagcccacctgcgacccggagcagctgggcctcaggcatgctcagaaggcccaccagctgcagagtgat

SEQ ID NO: 120054 - DNA, 1000 bp, Homo Sapiens
aggctgtctagagtcttactgaatctattgatcttttcaagaaccagcttttggtttcattgattttctctattgattttctgttttcaatttcattgatttttgttccaatttttattatttttcttctgcttaaatttaattttctcttcttttatctagttccttaatggaaaacttaaattattgattttagatctttcttcttttttaatatatgccttcaatgctataaatttccatctaagcacttcttttactgaattgcgtaaattttaagttgtgtttcactttttagttaaacatatttttaaatttatctttacatttcttcaatgatctgtatgttatttagaagtgttgtttaatctccaggtatttgggggattttccagatatttttctgctattgatttctagtttaattctggtgaggtctgagagcagacattgtatgatttctatttttgaagaacttgttaagatgtgttttctggcccagaatatgatcagtcttactgaatgttccacgtgagcttgagaagaatgtgtattctgctgctgttggatgaagtaattgtatatgttcatggtatacagttgattaatgccctggttgcattcaactgtgtcttaactaattttctacctgtgagatctgtccatttctgacagagatttgtgaaagtcttcaactacaatagtagattcatctatttctccttgcagttgtttcaggctttacctcacatttttgatgctcattgttaggcacacactcatgaggattgttgtgtcttcttggggaattcaccatttatcatcatgtaatgttcctctttatctctgaaaactttctttgctctgaagtcctgctctgactgaaatttatgtagccactcccacttgttaaaatttaagatcactgttagcatggcatatatttttccgtctatttacttttaatctatatgtgtgtttatatttaaagtgagttact

SEQ ID NO: 120055 - DNA, 1000 bp, Homo Sapiens
cacattataaaccagccagtttattattttgtagtaagatttagaacttttaccatgcagactgaaatatctgtgtcagcatgaacagtacattttcttcctagaggcagttacatggaaaaccaggttattatcaggttatttagcaagtatggaatccaaacaagaggagactaatcttaagacctataactcgtccatgaaggcttggggcacacttttctaccaccagaatgccttagcttccagaaagctgtggactcttccctctccgtcttggtctggctgagtaccgctactgctcagtcacttcctgcagccataccgtcaggccagcttggcctaaaagctgttatctctggtcactggtttgtgttgttacagccactgctactaacagttaaggttctgaagggggcatgtcaattgctcccaggtaccaactaggagacacaataatcctattagtttgttctcccaaacccactccagtttatcaggtaatatgctctgtaaggttctttccaaccccattagcacatacatagattacctataatttcacctaatgtaatctaccttcctactgaggattgaggttttaacgtttgttttttttccccccactttcttgatcagtgattctcaaccatgtaggaattaatgaaaccaattctgtatcaccactgcaaccaagacagcaataccaagtgatatgtatttttcaaactaatgtcattttgttctctatactgtaaaaaacgagaagatgcagtcctcaacttagaactcaatactaggaagggtcaagttgtcaaaaaatgtctttcaacagtagaaaagtttgctttcaaattaaaaaacaaagcacgtattgcaaacatcgtgtaatgataaaattacagaaaaaaatatattcagaatgacccatggcattcacgccataccagaattttgcctgtaacaaaacagagaattttatcccaaaaagtaggttagg

SEQ ID NO: 120056 - DNA, 1000 bp, Homo Sapiens
caggtcgccatgggctactcacactccttggtgatagcacaggtcgccatgggctactcacactccttggtgatagcaagagatgaaagtgagactgagaaagagaagatcaagaaactgccagaatacaacccccgaaccctctgatgctcccggagactcctccgactccacacctctcgcggcagctgtcatttccatgtgcactgggacgggaagtcaaacgaggaatttaaaaaagcaaaagttgaccgaaggtgcatttttgtttagactccctgaggttccgttttacacatgatccaacgttaactacctttttttctgtatgctttccaaagtccttttttttcccttaatgttgaattaaaatacttgctcatagttgatttaccattcctacaaaagaggcagaaactttgagcaatctaggttttttttttttttaagttttttctttcttcctttcctgaatacactccccaaaacacccctttccagttacaattagcatcgtgatccaagcagatgccacatggaagaggaatcgccatttactcagaaaaaatgtcccttacaggaaccggcagcagctaggcagtcaccggcccgcctccatccaaaatcacgctcgcgtgcttcggaagcatccgggtcactccttctccgctttttcttgcagatgggcctaggccggtgtcggttctgtttctccccttggctgcctgtacgcccacagccttctggctgcgacattatagaatcggccgtgtcccccctggtgggggattggggatctgtgtttagccatttatatctactttagctgttaaagaggtccaaatgaaaatcaggtgattgtggaaccatggggacttgggggtggggcagaggtgggaacatttgtatcagttgagtcagcttggtggctccctgtggagccagggctgagccttgtcacgcgcactcgccaattaagagatggaccagccagcagtca

SEQ ID NO: 120057 - DNA, 1000 bp, Homo Sapiens
cacagaggtctgtagaatccccgaccaggccctttccaatggtgggtggggcaggaacaggggtgaatgcaggacacgccggtcaacagtagggttgccatgggaggaggtgctggcagctggttgcctggagtaccacagcttggctctagcccctcgtcctggctcctctgccagtcccagcgcagctccctacagagcctgtacccaccctgctggcctggcagcctgcccagaatggtgctcacaaccagcacctgtgccagcccctgctgggggcactctgggtaaccttcctcctccaggggctgtgtggcctgggagtcagtgctggcccctgccaggcacctcggaatgggggtgtctagagccatctaacatagccactgagagctcactgtttttagccttgttctaggcactttgaattaacacatttttgacatttgacataaagctagaagcagaagagagcagctgatgaagggggcatgctgcagggaagagctctaagcccagccggaagggagacttggtatctgccccaaactggacttgggggccctgcccagaaatgtctgggccacatccagtggcagggagtctcctaggtctggccaggctaccatcatggagcagtgggagaaccccaagaatgcaggctcagagtggcttagggcagctgctggaatgtgtggcagcttcctgggagctgctgtggaaccagccggtgggatgagttacagggagaggggccccacggtgcagaggtcctcagcaggcctgacctgtaccccacctgggcctgtacaacagggaccaagaatagtccccaagcttgggagtgtgtgatcccagagctgtggccctgggcagagccaaaaacaatggtccttacactcttgcacctggccaccgggactgggtagtaccaggtctggtgtgtttggtcagaagctgaggcccaaggctgcctgggagggcattcctaagaaagcct

SEQ ID NO: 120058 - DNA, 1000 bp, Homo Sapiens
aaacacatagaagacagagaatcaacagaaaattcacaaaattcataaccgggttctttaaagaattaaaaaaaaattgataggtccctaccaaatggatcaagggaaacaggaaggcacatgaattgccaatacctggaacgagagaggggttatcactccagtttctaaagacacgtaaaaagataagacaatattttgagcaaacttataccaataaatttaatagacaaagtctttgaaaaatacaatttattaaaactggctcaagaaggaatagaaaagtgagcaggcctttatctattaaagaaattgaatttgtcatatggaaccaaaaaagagcccaaatagccaaggaaatcctaagcaaaaagaacaaagctggaggcattatgctacccaacttcaaactatactacaggactacagtaaccaaaacagcatggtagtggtagtaaagcagacacacagagcaaaggaacagaatagagaacccagaaataaggctgtacacctacaactatctgctcttccaccaacctgacaaaaacaagcaatgggggaaaggattccttattcaataaatggtcctgggataactgcctagccatatgcagaagattaaaactggactctttccttacaccatatacaaaaatcaactcaaaatggattaaagacttaaatgtaaaacccaaaactataaaaaccctggaagacaacctaggcaataccatgggcgcgggcaaggatttcatgacaaagacgccaaaagctgttgcaacaaaaacaaacaatgacaaatgggatctaattaaactatagagattctggacagcaaaagaaactaccaagagagtaaacagacaccctacagaatgggagataatttttccaaattgtgtgacaaaggtttaatatccagcatctgtagggaatttaaacaaatttacaagaaaaaaacaaccccattaaaaaatgggcaaagggcgtgaacaga

SEQ ID NO: 120059 - DNA, 1000 bp, Homo Sapiens
gatctccatgaccaacagccatgttgggaagagctcccggatcaggaaggctcggcagccaccgcacagtgcttcatagtagagggtcacattgacaagcggtgcattggacttcttcaggggcccccgcaggtatagattgcctgtctgtggattaggaaggcgtgggaggcaggtgtagccctgggcagttccccacttctctcaaccccacttggtagtcttgtagaaagggggctgtgatacgcaattcatcttgcacgccttccagaacttgccaggtggaatcttgactttgagacttttttttttttttttgagatggagtctcactgtcgctaggctggtgtgctgcggcacgatctcggctcactgcaacacccgactccctggttcaagcaattgtcctgcctcagcctcctgagtagctgggattataggcacatgccaccacacccagctaatttttgtatttttagtagagacagggtttctccatgtaggccagaatggtctcgaactcctgacctcgtgatctgcctgcctcagacttccaaagtgttgggattacaggcatgagccaccgcctccggccttggcccatgctcatttcttgtcacttcacctggagaccttgcctctgagctgagcaagggatccacgtgaaccctttccaagtccgactgaatagaggcggcacctaataggtgctgacttccggcttcagctgaggggtggcgggtggcccatgtcgctggagcggtgagcaagtcgctcagcctctagggcatctgcctaataggtcccaaagacacgcgagccctgccctggctggaatgaatgcatcaagggtagcagcaagaatgcatgccggcggcccttggccagctgctgaacttgtgccctgggccacaaaaggagaccccagctcctgccccaaaagtacacagtaggcgctcattgaacccttgggcgggactaggcgggtggaggcagctgc

SEQ ID NO: 120060 - DNA, 1000 bp, Homo Sapiens
gatcccgttggacgtcagtttcctcctctggaaaattagcgttcattccctaagtaatccacaagtgtttcattcatttatttacttagagacagggcccacctctgttgcccaggctggagtgcagtggcatgatcatagctcactgcagcctcacactcctgggcccagcggattctcctgtctcagcctccccgagtagctggaactacaggctcatgccaccatgctcagccaatttaaaaaattattttagagatgtggtctcactttgtttcccaggctggtcttgatctccaaggctcaagcgatccttctgccctggccccccaaagtgctgggattaaggcatgagtcaccacccacagccttcactttcaatttttatgtttaattatttatttttttgagatggagtctccctctgtagcccagtctagagtgcagtggcacaatctcagctcactgcaacctccacctcccaggttcaagcgattctcctgcctttgcctcccgagtagcagggattataggcgcctgtcactatgcccaactaattttttgtatttttagtagagacaaggtgtcactatgttggccaggctggtctcatcctgacctcaagtgcccgcttcagcctcccaaggtgctgggattacaagcatgagtcatcacacccagcccacttttttttttttttgagacggagtctggctctgtcgcccaggctggagtgcagtggcgcaatctcggctcactgcaagctccgcctcccgggttcacgccattctcctgcctcagcctcctgagtagctgggactacaggcgcccgccaccacacccagctaattttttgtatttttagtagaaacggggtttcaccgtgttagccaggatggtctcgatctcctgaccttgtgatccgcctgcctgggcctcccaaagtgctgggattacaggtgtgagctacgcctcagtgccaaactggtaccaggtgctc

SEQ ID NO: 120061 - DNA, 593 bp, Homo Sapiens
tgtgggaacctagagcgggagagattaagctgaggggagatcttgtggtaaggagtgatattgtggggatgttagaagaaatgtttgtcgtatagaatgattggtgatgacctggatacagttttggatgaattgagaaactaaacggaagatacaaggtctgaataaaagaaggagaaaaatgggtattaaaggactaagaattgggaggacctaggacatctaattagagagtgcgtaagggggttcagcgtaattacttgcttggttggcaagtttttgggctctatgcttgagtttttttatgttgtcatacatcaggccagattgatttaggtaaaaacaacactcttcatttaagaatatgcagagtcctcttttttcaacagtgagtaagcaaggcctcggtggttttggaggacaactgcagctaaagagtcaacttgggcctggaggactgataaagtttgtgacatatctgtgatgctagcagagaagtcattagacaggctacggaaggtcatgacagaggttgaaatgcctgctattccagtaccgagagcaatagtggaggcagaaagtcctaaaccgac

SEQ ID NO: 120062 - DNA, 1000 bp, Homo Sapiens
cccaacacacacaaaraatgataaatatttgagatgatggatgggctaattaccctaatttaatcactatacattttatgtattgaaacatcactatgtacaccatgaattgtacaacaggcaaggtggctcactcctctcatcccagcattattcaagggaaggctgaagrtgggaaggatkagcttggagctccaaagagtttggagaactgagtaccsaggactrcaaaaggcgaaggacgcctgrtctgctgagaaaacgaaacgaaacaaaaattagcccaactgtggtggtgtgcacctgctgtgcacctggtgtggtcccagctacttgggaggctgaggtgggaggactgcttgagtccagatcaaggctgcagtgagctatgattgcaccactgcactgcagcctgcacaacagagtgagaccctgtcttaaaaaaaacaagcaaacaacaaacagaaaataacaagtgttagcaaggacatggagaaattggaacccttgtgcactgttagtggcaatgtaaaatgttgtagccactatggaaaacagtgtggaagttcttcaaaaagttaaaacttgaattaccatataatccagtagtcccacttctgattatccaataaaaatgaaaacagtatctcaaagggatattgcatatgcccatgcttattgcagcattattcacaatagctaagaagtgaaagcaacttaaatgtccatcagcagatgaatggataaagaaaatgtggtataggcatacaatgaaatattatttaaccttaataagaaagaaaatactgtatccatgctacgacatagacaaaccttgaggatattacactaagtgaaagaaaccagctacaaaaagacaaatactgcatgattccactaatatatggcatcaaaagtcaaactcttagagagtagaatggtggttgcaagtggctggggtagagggtaaaggggagtttgtttaatgggtatagagttt

SEQ ID NO: 120063 - DNA, 1000 bp, Homo Sapiens
attcacacttgcatttttttaataaggaatttaagatccatagtatctttaatgcttggaagagacacaaattcaaggtgataaaaatattaattagaagacacataacatgcctcaagtatatcaacacttgactccacaaacaaggcataaccatgaaaacaacactccctttattttgggctcccaaaatcaaaagttagaactaatttatttaatcacagatatttagtatactcaataatgcactaacaatttctttaaaaaaacactaatactgtacagtatttctgtgttttagtttttcccacagctgttgaaaatttcagccttgatttgaaacatgacctgcatgacaggctataagttgtcaatagttctttttctttggaaaagtacagttgtggcatttactcgctttagcagatagctaaaagggaaaaataaggaaaaatatacactggacctgcagttaagtttttgacaatgccaaggatcaaaaacagatgaaacaacatttgctgaagatgaaaaggtattgcattggtcttaatagatgttgccatctctgggtgaggatgctgactgagcctgttctgtgtcttcatcacctctatttgtttcttcttctacgacagacctccaagagacaagatccatgtagtaagccacactaggtccttttgacccttctcattcttctgtagtctcttccctgtgacttttgacaaaaatactcagttcacaatattagctgcctgcttctgatgggtaggaggtaatcaaaatactcccaccaaagcactctatggtctagacttgatacttaaaatttagttttcagcattcctcaacaaggataccttgaggtaataggagatattttggtaagtgaaaataattcctgcttggaacacagcctactgaactcaggatttaatttcttgagtattaggcagttctcaataaattgatgtatactgaggaatgattctaaaga

SEQ ID NO: 120064 - DNA, 1000 bp, Homo Sapiens
tccacccacctcggcctcccaaagtgctgggattacaggcatgagccactgtgcccagccgaggtcttttttttttaattaaacaaaataataagagtgaatccaaccagaagttatggttaaataaatcctggtatatccatgaagtagaatactgcttggccactgaaaatgaattaaatattatacaaaaacaccttgggagaatcttcatgacagagtagaagaaagagtgttagcaaatactaggtatacttaatatatctgcaatatttataagtatgtgtatttgccacaattgtaactggggttatttctgggcgatgtgattactggttatttttcttttctcatgcatttatgcatgcacacgcaatgaaggcgtgtgtgtgtgaacctctatattttccaaactttctgtcataatcatgcattacttttgtaattagaaaatgcaacttaacaagaaataaatgcgacaccagtgaaaacacttaaatagaatttatataaatttattaatttatttttagttgtaggaaacatcagaaaaaaagtaaacttgcccagcacttcatagctgtattttgggtttttatcaaattcagctccatttgacataagcaatgattatcttctcaaatacaccacccaccaatttcatagcatcattctttttccccaaagcaagaaatcatatgctgttctcagtgcactccaagccattcattcatttcacctacactctaaaggtacaaagcttcccttctttaaacacacaaggtggcacctatgaagcacgacagagatgaggactgaccattattggttaaggatcaattgcaaccatctgcagaagccaaaagataagattaaaactgccatttgcagtaggggcagccgtgggaccacctttgaatcccgcactcccaaacaggccatgtttcagagtaagaaaagtaatctagaatgccagcctgtctgcacgtcctctgaaaaa

SEQ ID NO: 120065 - DNA, 1000 bp, Homo Sapiens
tcggaaacaaagaaatgacaattccggggcccgcccgcccagcaccagccagccgcctgccccgcctcctcggctccgacggacggcccgggaggccaatagaagccaccggtaaaccgctgtcggccaatcccagggcccgctgaggcaaaactgactctagaacccgcccctttgaaggacggaagaatgcgccaatcattatagtgtctgggtccccggctgagcctatcagaaaagatttaaatagaggcttataaataggccctataaatataacatcctatattacgccttgttgcgaaggtatgctttattattattgggttgcgtttcattgtattgtaatccctactagagcataccgtacggcatggcattgtaggctctcgtctagcaatgtatgaaatcggaaggcccgggtttgcggcatgtgcggtgtctgcgctgacgtgcgcttcagccagtcgcgtcattatgtaagggagcatcccaggaacagcgccggggacccttctgcggatgctggagagctcggccaggccgaccgcgtcagcgcgcaccgggggtacgaatgacaaagcaaaccccacacgcacacagacacacaccctgccagcttcccgcgacgtggtgacagcgcgccggccaatcggaggtggcggccccgccccgggttacgccacggggcggagccgtgggggcgcgcgacgtagcgcagagatgcccggggcgtgtgcggcggtgcggcccgggctccacgtccacaggctgggcagcgctgtgggccccgcgggcgccgagtccgcaggacccgcgagggcactaccgcgaagcatcggcctccgggccgggccgggccggaccgggagcctgctcggcgggtccgggctcctgcaaggcggggacgcggggccggcgacccttcacgcttcgtactcattgagcgccgattttatgccaggcaccgtgctgggtaatttgcgtgtatttgctcatt

SEQ ID NO: 120066 - DNA, 1000 bp, Homo Sapiens
gatctcattcactttcagccaccatttgccctagatgtccttcactcaaaacaagtttttagcttgtgtttttggagtggaaactcacatggctactaagaaacaactctaaaaatgtaacttagacactcaaaattccatgtgccatgttaacatgtaatgatggttcatattacagcatctcacaatgggtaagcattatttccaaagtaaaattaagtcacatttgtggttgctagtgaatgcggcagaaatggaccctgaagattcaggcattgttctgctctggagtaggacatctgtggctccagcaaactgtacaaaggctttttttttttttaatgtatcttccgtgatacttcaattatttcaccttattaatcattttcttgcaaacaaaactgaaaatatcagttcataatgtgtttccatacaccttgcccttattcaaatggttatgaacaagtggtcttccattttctattgccgctgtaattatttgttcctgatctggcaacaccttcttcagctcctttctctggccaccgagattaacagtccaacaagcggtcttttgattcactaagtggcttaataggacaacgttgatttgagccaatacttctggcatgttcatttcaatttgtaacttttttctgaattcatccccacaaggtgagctggaaaactgcaaccataaccaaagctagaaaatactggaagtagccaatatttctcttcatcaccaaagactggtctctaatttttactattgttctattttttccagccagccaacagtagtagctgaaaagcgagagcacactgatgaagaacactgcgggcacaaagaaaaggaaaagtatgtggagctttgctgtgtatctctcagttcattctactcactagaacgtggcgttctcaggaattgacgtcctccaggcccccagatgagggtagtgagcaccctgagagccagctggactcccctcttggtgtg

SEQ ID NO: 120067 - DNA, 1000 bp, Homo Sapiens
  misc_feature (8)..(8): n is a, c, g, or t
  misc_feature (47)..(47): n is a, c, g, or t
  misc_feature (82)..(82): n is a, c, g, or t
  misc_feature (377)..(377): n is a, c, g, or t
gaattctnagaagaaaacttatgtgcataataggaatagatgatatnccaccatttatatgaaaaggaagaattagggcttntatgtatatatatttgcagcatagatataatatactggcttattcctaggttacctcaggaaggatacacgtgacacgcgtaaacgtgaccacaactttgcaggaaaaactgcaggactaagagtcaagaattaagaggagattttttcgggagtctgaggcgggaggaccacttcaggccgggaagctgaggccacagtgagctgtaattgtgccatgcatttagacccccacacctaaaagttgcagtagggaaaaactgatttctaggtcgacaacttatgacagaggtacntgggagcagaagaaaggtaggcagaagagtccatggatctacgatggcagagatgagtgagaagacaacgggaagtgtgagaacaggtgtaaaatataattctgagcattcagccactagaaaggatgagagaaggtagtaacaaaaaggaacctgaatatcagacaatatgtaagttttaacaaagtataaaggacaatgtgtgagaacaggaaaaggtatgtggatgaaggagaacagccaccacagtggcggcacagacgaagcaggaaggctgacttcagaacagcaacaggaggggcgcctggcccctctagaatctggtgaaagaagaagaataatgaaacacacaaaaatgatgactggaagcgtcattcaggaatctaaaaatctcataccaagcaatactctatatgtctacagcctggaagaaaacatcctttgaagcacttcagaggactcaatgctgactgaaaaactgtggcctgcctgtcatttactcacccgcgcagatccttcccacttctttctccaccatacagtttgtcttcttgcttcaacagaggatcatattaactattgggaaaatgacacagtattacaatgttaatgctgggtccaaa

SEQ ID NO: 120068 - DNA, 1000 bp, Homo Sapiens
attttcccaggatgtacccggaacagaaaatggaaagtaaaacccaatgatcgctgatttggttcttttccctttggacaggattaacacttcccctgggaatcaggcttcaggaggaaacctgagagtggtcatgcctggccccacagtgtgctttatctgaataaatcctgaaaacttaagatgtttaggtttcaatttttttttttctgtgacaaagatcttcttatcacttcaaccttggaataacagatgtctccatttttatgtaagataaaaataattatgaataattctaaataaaaaagcatttagttctgaattacttatttccaactaaacatcaggcaaacaaaataatgtgtaatactatgatggatctgaacatggccttccagaagctggaaaataggtattcaacatagaacaggtcagtttaaatagcatccctttgaaaagtgtcatacaagaaagagtgagagctactgaaaaattctggcttgttttctggcctccttgactttccttcaaagggacaccaggaagaatcctcccagatttccattggtttgaacattgtgctcttgtgcttgggtaaggctggaactatgtgctctccttgggtggctgggtgaccggtgctggctgcaatggctgggtgcccgtggccgttttgatagagttcagggttttgctaaaccaagagtttttcgcagcttggatttcattcataagggctcctctctgatgttcaagttcctgaattttacacttggcctccaccaactgcagtttggtttgtgccagttccagttccatctctctcagctgcttcttaagtgagtccttctcatcatctgtttcaattccctggtcctctctgcctgtggctgctagtttcaaagcaccctccttgctgaaaatgtcactgcagtgtttgcatgccatcatcttaccctttaccacttccagctcctccttgctggctgcttgctgtttc

SEQ ID NO: 120069 - DNA, 1000 bp, Homo Sapiens
ttttttttttttttttttaaaaaaaagatgcacatttatatatttgaaggaagggtagcacatacagatggggattatgagggagtcaaatacatttgtctttttattcacgcttgttgcttctttgttctgaaatataaggaagataaggtcctcagtgaaatgaacaaagttgtttaatatagagtataataaacttagctatcacttccaaacgaaagtaaagcagtccatcaaaccctgaatacttcgccagacacatctggtaagatgaactgaacaacagcttcttttaaaattgtaagtatgctgttagtcaatctaaataagataatttttaaaaatccaaaaactcaaaacaaaatccaaatctagttctttgggaatgcttgtataaacaaaagcaacatctaattaacaattagtatactttttataaggtgcaaaataaggagctatttgggaaagctaagttttaatttctacctagcagtcactctgaatactttataggtcaaatgtaacaacagcatttgcttctactgcccattttcagcaatacattgttctctctggaggaggcagtttgtgaagtcaaaacactgcagtggaaaatagtggcactgaaggtagaagcaaaaaaagacaaacttttgaaacaggacttactgaaattaacttttaaagccgaggtagcccattaggattggccttatatgagggctctgtggagcagtgcaattgaaggtgaatctcctcaacagcatcacaccccgcaacatcccctttacaaatgatggctccaggcctcctgcaatttccttccttttcccagatgaagtggtgggtgcttctcctttgctgtatggaatgccatcctccagcctccagctgctcgtcttcagaacatttacgattcatacagtagtttagcaggcagcatggtcccactgcttcacattaatgtcaaatgccaaacttggaacagagttttttggta

SEQ ID NO: 120070 - DNA, 1000 bp, Homo Sapiens
tgatctgacacatgatacaaatgaggctctcacaaaatctcacacttaggtccttaccgacagaaccaagagacctagcagctagaagttcattcacaaccacaaatacacacacacacacacacacacacacacacacacacacaaaccacctgtgacatataatacacagatacatgctaaacaaacaagaactctctggtctcatctccaaaatgtaggtctccatgatgagcaagctatgcatgtttctttgcttacactcttatagaccaatcttttccactatttggacagtttctcatctctgcactgctatctgtataaagggggctatttacctaaaagttctgaatataatcgagacctaagagaaaactgttgtggcttcataagaaatgaaaaacatcagtaaggtaccgataaagcgttttccagatgatcagtgttttcactaaagaaatgtttttctattttccatggcagagaattccacatccaaatgttccactgttgtcagtaaaggtttcccagcccagaatgaacaatactcagttaacaataacccagtcatgtgtatattgagttctcagccaaaaattataatgtgagagactcttgcacttggatgatgtatgtggcagaatgcatttgccagcattttgatgctgtttgctgagaatgaccaaaacccttgctttcagggttttcagtctcctggcccccctgttgaatttctcccaggttatctgttgctacatgacaagtcacaccaaaccgactgggagtgaaacagcagccgtcttattgttctcactggttctgtgggtcaggaattcagacagagcacaagcagggatgacttctctattcttaggtttctgggacctcagctaggaagactcaaaaagccgaaggtggctggaaggactagggaattggaatcatctggaagatccacgtctagggctggtaacatctgaaaggtccatagctgggg

SEQ ID NO: 120071 - DNA, 1000 bp, Homo Sapiens
  misc_feature (918)..(918): n is a, c, g, or t
ttgcagagatttatatttaaagtctcccctaactctatagatagacagcaagttgcacaaattcttccatttttctgttcacttctaacagcacaattttgatgtttcccttcgaccctcagcgtattcatattgagacagggccctctgagaagacacgtgtcggcatgaactgtgctgctccacttccttcttccccaaaacaaggtcacacgatccccgagggtggtttccccaccacagtgcccttgcctgtgcttctccactgacctgagcagcagcctggtgtaacccaaagactgagaccttctgcccaaatccaacgcttactaaaagccatcgtttaactagactgggcggtggtgccccccgcagcttcctcttcaggtcctcctgggacgaccaacggcctgaaagtacttggagactgccaagggctacgtgtaggtgacgtatgtaactaaactccacccagctcaagctctagccactctgtgactctcttgcccacaggaatttctctgtcactcagtactcggccgcacactctgtgggactctggctgctttgcggtgatgaccgatacccacagcctgtgtgtaagccgcgtggggaaaggatcatactttaaactttttattcctaatccgaccctactttattccttctcagcagctctgtgctaagcacccgaaggtgcgcattgaatccttcagcactttaaccgaagggtgcatttggctctaaacattcagcccaatcctttatcaataggccacgtgcttccttaagctggcgctgtttacttcccaagtcaagtctagggtgtgtaacagtaaactgcaaggattggaggtggggtcgggaggaaggaaaaagcttttaccacaatgtatctaccaccgacaccagctgacncggttcagccatcatccagcaagccacgattttaaacacaatttaaatgaaatgctcatttattgggatgcaaggtaagacc

SEQ ID NO: 120072 - DNA, 1000 bp, Homo Sapiens
actatggacccagagcagaagtggtggtaggtgtctgtattgacggtttggcgaaagaagttaataaggacagtgccctgggcccaggatggtctaatttcagagggtcatgagtttctgcagtcacttctttctgtagctagtgtgggactgatgttggggcatttggacggtgttgtagcatcatggacatcttgcctagagaccgttctgtagccctggcttccagggtctgctgtgaaggcactcccgggatcagagagaaactcactgtcacccgcattagacaagatccccaggcttgggattgaactggagcacctgacgttttgcttactgtggcctgattgtgtgccttgggctcaggtgatgctgtcagagtggacagaatcctccctaagatctcaagccctttgtgaggggaccttcctcaacccctccccggctcacctgcctcacaccgtcctcagccaaggctgcctgattctagctctcaacacagcacgctccttacccctggcctctgcctgctggcctccattcatccttccagcctcacttcctcacaggtttctttgatcacatctcctagaccgatcaaggtctcggagcaaaggagtttcttttcattgaagcctgatctccgtgtgcggctgtattctcactggtgtggctatcggtcagcggctgcttttgctcattaccggtttacgcagtgccacgcagtgcctggcatgtagtaggtgcttcctaatgtggtatggacacttattcattggaaatcagccccgaggccccatggcacagaccccttctctgtggctggtcttggcaatgctcctcctgctgcccggttccctcgctctagggagcagcccctggaagcagtgtctatggtttgtttttgcttaagcaggagcaaaaacacaattttttgggcggggggtgtaggggtatatttggggccaggttggaaatagggtctattctgcgataggaa

SEQ ID NO: 120073 - DNA, 1000 bp, Homo Sapiens
ttgcaaatggatctatttttgtatgaaaaaaaaaatttttttaaagaaaactgttccttccccctttcccctccataatgtaagaagctttggtggcaggttacagagttctgggatttcttctcacaggcccaatcctgaatgtgcccctggaccttctggacccttgagtccaaggcagatcctctctcccagggaatccgacacaggaggaaccccttctctggttgagctgggccaggcctaagagtagcaggaactctaagaccacagagttttttataaatgtataaatgtatcaagccaaatgtgcagatgctaactggacattctggggaactgggcaccaggagtgccttcatacactgtaccccagctctcttctaaaagagaagtgggtgggcacactgaactgtttggtggccccaaccacaggaagctgcaattctctggcttagggtgatacttttgccctccttgtgcccctctcagctttccatccccagctaggaagaaagaatggcactcttgggcttggcccagaattagagttattagagcaagagagagcttaggaagcatgagggcaactatagtgaggccttattgccaggagggagggttttggttgctggcgcttgtgtataaaggggcaagagcagctcctttggactattcctgggaggactctgatgcagggcgtctgttgctcccctgggtcacctcctccctgctcgctgacatctggggctttgaccctttcttttttaatctacttttgctaagatgcatttaataaaaaaaaagagagagagagagaggtgtgagggacaaaatgcaaacctatttcccttgcctcataggcttctgggatgtcatcacctccagtttgttggttttgtttccaactgttaataaagcattgaaacagtactgccttacagcttcctgtgtgaatttctgagctgttttcttttcactctagtccaggctcctctag

SEQ ID NO: 120074 - DNA, 1000 bp, Homo Sapiens
tgaaaaaagtaaatttatactcagattctaattttaatagggaagtaagaagttacagctcagtgcaccatgaagttgagacagagatggagacatcccagcaccacttctctggaacaggaaaggtgatcggggaaggaatgtaggtcagtgtggggaacagggtcatggtggacacgggtgtgggctggtctccccaccacctcacattatgcctatagggacacagacacattcagatgcctttgcagaaagagaagtcagggttcttgaagtcacaaagggaaggcatgaacaaatcttgcctctcagtcccacacaaggcagctgtctcacactatagaaaaaatattcatgaacaaattcatatcactcacagtgaggggtcacaccttcaacagcccatcatgtgctgaatacatccaagtcaaagaaaccccatagcacagctatatccactgttaccccaacaacccacacacatcagcctccccagggtctcacctttacaagccgtgagagacacatcagagccctgggcactttggctgcctggggtagaacaaaaacagaacctggtcagatcccacaggagatgtggctagaggaggaattgtggggtgggtgagctcccccatgggctcccaaccacaatatcccaaggatctcagggatcagcctccttcatacttacttgcagcctgagagtagctccctccttttctatctgcgggaagaaaacgtcctgtgagaggccaggaaggtagcagggccatgaggtcctagaggaacctcctagtcttggaaccttgagaagtttccagaaatgtgtgactgcaaaccaagggcaggatcaggaaaaacaaggaaagcagatgtgggtcctggaccaactgccctcctaaggtctgtcctcagcagggaccttcccctgacctgtgattactggggtcagatccccatcactacaatcatcaaggtgagaaatctgtccttcatt

SEQ ID NO: 120075 - DNA, 1000 bp, Homo Sapiens
aagcttatttgatgggccttaaggaatattcctgtactccaactgttatgaaaataaaagagagtagatgaaaagatcgactacacagctacaagacttaactaatgtaagatccggaaaagatgtttaggtgatcagggtggcacacttgatggcaggtagggtgcatcatctgagactgagggtataacccatgacagtcagtggggttgaacggagtccacaagctctctgggtggcctgctccattggcaagatgagggccacctcctctaagaattcttcatatctttaaaactgctctcttcacatttttatgttttttccaaatttattgtccttcctcaaagacactatgttgtgtccatatagaattgattattacatgattgattcatctagggaaaagcttgagtagaaagtgagaaaaatgagagaaaacaatgttaaacaactttaacaaatattaatgtttcacttaattcattaaacattaaggaaatgtttaatgaagttatttgatgtctctgagcttctggctccttttcaggtaaatgaaaacatcctaaagaatgaaactgtttcttcagccatacttaaattttttttttctgtgatctgagagacaaaactttattaatagccaatcatctaaaaaggagggaaaattatggaacacaggaagatccttacaagaaaatttcttggtaaaatagttccaaatttcagcaccctccccgatgagttagtgaaacagcaaatggacctcactaaaaggcagttaagctacagactctgaggacagttacaaaggaggagctttcctgcagaaaacagaaccagagacaggctgagtgtgagctagttttaggcattcatgttgaataaccatttgttaatatggctgtatccaattataatcaatcaatcaggttaaaaatggttattgtgttgaaaatattgtgtcaagttactatgatgagaaagagatgatgtgtgt

SEQ ID NO: 120076 - DNA, 1000 bp, Homo Sapiens
agggccagccccagggcccagaacaggagcgacgtccttaagctagagccttcgatggcatcttgcagcccctctgaaccctgacctactcctcagtacacggacatagcgttcctattccacagccacctgggcactgcttccaggggaactgcaggggtcctgtctgtgagagaccccatggatgccccaggaaccaaggtgagagcagtgcccagcccagcctgtgattctccacgtttattaggaaaagcttgcacaattaataatcaaaatcacactgtgaaactcattaaaacacagatccaaatcaccacaaattattgatttctatgcgatgtaatgcccagaaggaacccctgtcctgtgtaggaaccgtcacttctctgcggctcagcagctggcaaggggaggtggcagtccccttctgtgtgtttggctggctgctgggactgggcgaggggttggaggcgggagccccacgcacagtgggctcaggggcggagaggcagggctcctctccagctaggaagagctggcagtctaacccagggaagtgggcgttccccccactcaaccacgtgccctggggaaatggtgagactgtccctcctgctggaagctgggggctcaggagcagtctccacagtctcctgcccatgggtcagcatttcctgagagtgagggagccaggcccaggccctccaaatgggctcctgggcttttattgccggtggccctgtagtcagcgtgggctggtcctgccctgcctgtgcctggcagggtcctggatttgaggctggggtccaggggttgctctgtctcccctcaggaagccccctgggccaagcagggtgggcctgcactcagcctgtgctacttcctggccatacatgggccaggccctgtgccctgccactgggtcccaaccaccatgccagtgatgtcaacatcaccatgtgggggccagggcgcttggggtaacaactcagacctgaga

SEQ ID NO: 120077 - DNA, 1000 bp, Homo Sapiens
ttgtcattcaaagtgtgcttcaagatctaggaacatcgagcatcactgggatgttgtagaaaggcaaaatcccagatcatcctctaataagaatccccatgtgattcatatgtacattaaatgttagaaacactgttccagactagtggctctcaaagtgtggtcaacattacctaggaaactaggtgaaactagatgcacatttttagaccccaccccagaactacacatcagaaactctgggggtagaggccagcaatccttgtcttacccagctctccaggttggtaaagagtggcatctggtccactatcattactacatgcccaaccatgagggcagcagcattgacaactgttgggcactaggaaataaaaccttagaagaacttttacaaatctatcagaatttgtatctgcttagctttctaaactcatctgtgccactctccccatagctcactaagctccagccacaaagctatttcctgccttaggaaccccagactcattgtttcctccccctagaaggttctcatccttctctttacctgggtagccccttcttaacctttagggcccatcagaaatctaatctccctagaaaagctttctctgagccatcctacatttattctttctttttttttctgtctgaaccttgttttcctcatagaataactcaccactcataattatggtatttgttaatttacttgtttactatctgtctttcccaccagccattaagctccatgatgtagggcccacctctatctggaccaccccattttcccctagtgcctgacactatactatactactgtatagtagcctttaatgaacctgtgctgtgccaggcatggtggcttatgcctgtaatcccaatactttgggaggctgaggtgggaacatcatttgaggccaggagtttgagacaagcctgggcaacatagcaagactccatctccacaataaaaatttaattaaaaaagaaaatt

SEQ ID NO: 120078 - DNA, 1000 bp, Homo Sapiens
gttaaattcatattacaaatatgaaaatcacataagcttgcaaatctcaaaatatgcaatgttcatttagaatgaccagtaatcaggaagccagtaagaggcatacatttgataaaactgaatcctaccagatgcacagagtgaaagccttagtttcagagtgcaactatttttaaagccgcaattgttacaagcttgcatcaactttgctagtctctagttgaaactgtcatctgttataatgtaaatagttcattaagaaattaaaaattatttgaaaatctatagattgtattcacaaaacgctccaatatattgtactaaagccagtaatttcaaatgttacagaactagaccccgctaactggcaccatatacccatagactgaactgcataagtatttattctccaacggtatcgcggacttcgaaaacttgaggtgtaaagatgttttccaaatttttaaaactactttaaaaatccaaaaatcttaagagacttcatactcccataattttcaaagtagttcgaattacctgaaagccccatagtataaccaaataccttaagactacccttcacaaacaacatcttaccaacataattcaagtattatcaactctaaataattttcaaaccacataaattgcgttagcctattacagagagataatgccgccaaacagactctcttctttctattccactttcccccgtttctgacagttgccaaaactacctacctaaggcttgtgaagataaagtagcactcaattcccaggacctaaatcgttatcactgctgagggaaaaaaaaaaaaacaagaccaatcacaagtaagatgtttttctctaacagatctggaatgagtatagaggaagattctaaatttaagcccaaattgctgcacccttccatcgcacacaaatacgaacaccatacaagggttcccgtgcttacatcaaatggtaacgaggggtacagcctattgtctgagtc

SEQ ID NO: 120079 - DNA, 1000 bp, Homo Sapiens
ggatcatgcctcactatgagtaataggctttaggagcagctagaagctgaacaagagtcccattagaaggttgttgtagttcagaggagcaataatggtggtctagatcagtaaagtgacagtgaaggtggaaagtaataaatgttggtgacatcgtgcatgcaagatcaatctgaccttggagctttgatccagaggacaagtgggcatgagaagcaagagaagtacctcagcttagcactagggcacctagaaggatgggatgactattaaccgacaccaaaacagagaaagccgcacaaatttagaatccagaagaaaatgataagagggcttatgaatgtttccatgttttcttttccagtggcacatttacttattacagcctgaattttcatgatgctaaataagcaatatgtttacacctgatcaactggtcaggttgatgcatcggcagggcaggttacttgaaatatgcagagcagcccatgaatgaatcctcaagatgattacatctgttaaagtggatattcttgaggtcagtgtcctctgacatttgtaagtccaggaactgggctccggcttcagggctcagtaaaccaatagattcagccaatggctacttcccaaagaagtgtcagaagatactttaacaggaactaagaccttcaatgtaatccaaatgatttattttcacagcagctaaataaagtatgttatcttttcatacagaaaagcagataagtatatgagggcaaatctctaaaacttgccagttcctgaacaataccggaaatggaaaagcttttgaatactgggtcttcaaacactgctgttctcacccgtgcaggcctctatctcctcagaaagcctcctaaaggccatctccacaataaaatgcaaaacattcaaatgaagactgcattctaagggggtttgtcagaagacaaaattcggactgcccagttttttcatcctgttatcagttcagatagagagt

SEQ ID NO: 120080 - DNA, 1000 bp, Homo Sapiens
tgaatacaacacccactagcagcagccatgctgttatgcttaggtcctgatgggtcacaagcctatattcttgtgattatgaaaccatttctggtgaaaccgagaaaaaaaagtgaatactgctatttaaaacagcagctgccttctaaaggggactgggggacggatcttgttaaaaatagtcttggggactctgctggtcttttctgctgcaatgttgacttcaccttaatggattttggtgcaaccactatgggcctggaacggagttttggagtagggactagagagagctctgctctgtattatagtatgggaagaattcagagcccataagagtgagggcggatatggcagagaaatgagtgagaacgagatgggaagaaagataggaaggaaaaggagcttgaaacagggaaaagcctttgcaatccattaggtgccacaaaggaactacttttcaaggcagtgtggctacaataacctagggcagggacgaccaacatgcaaatcatcttttcaaacttgtagtaaagtctgatggatgccacatgtgagaaattggaagcagaaaaaatgcagtctccacaccaaggtgaacacatgaatggggacgtatgttttggacttgaagcagtctagaaactcaactaatgcagcaggagcaagaggcaagtatgagaatataaacctctgagcattcaaagaaagtatgggcaggcattggccttccagtaagttgtgaaattggggtttcgtaaagaatggttactccagctaaacactgagatgtactagcaatgactgctcctaacatgtgtgagttactgggaagtacaaattgagtatatttgtatcaatatacaatataagtcaagtgaaaaaaattggtagataaaatatgttctaaaatcttaggcaaatatatcttcataatatcaaaacttaaaatatggataaagttatggttttgatatgactgaaagttgtcaaaacatca

SEQ ID NO: 120081 - DNA, 1000 bp, Homo Sapiens
gatcacttgagctttggtggcagaggttgcagtgagcctctatcacactactgcactacagcctgggtgacagagccaggctctgtctcaaaaaaagaagaaattatctcttgtgataaacctcatagttctctgggtctgtgcaagctttaaggatttcaggaaataatgacaacatagctggggaaaaacagagagaaactggaggaagaggtaagcagaaatggctaaataagaaaagccgagagcatgatgggtgaacctatgaaatttaggacaagacccgagtaagagaatgagttcccaggacttgctcattgactttcagccctatgagatgtgaacaatgtccacattgtctcggtaactccactcagagtatatcgtttgaatcttagcaaatttctgatatttgactatttttgacttaacaaaaatagaatttcatataatttttcctacattgactgaatctcttcttgtggagtctagttagagcatgtaggcgaaggtaatatacaaaggttaaaagagattcataataaacactaacctgggccgggttttcagaggatgccttaagttctttaggcaccaaagaacaccccataggtattatttgcctgtagggtgacgccaagtactaaagatctcagcttcagttccagggatttttccccataagaaagaaagagcagtaagtataacttttgtcagagaacctacatacgctacagggatacaggctttataaagattgtgcttcagaaagaaaagaaaggagataatggggaggccactgaatacatcctcacatatgaggaagaggggccaataccagaggttctgtggaggacataacactggatcatctaggagagaccctttgaattcccttgactcccacaaaattttcagtaaaaacctccttttgtctgacataagtcaacataataaagggaagtgctgtatggggaatttattttagcatccttatttc

SEQ ID NO: 120082 - DNA, 1000 bp, Homo Sapiens
agcttgtacataatttacatataatgtgactgcagaatctgttatctctttgaggtagcaacagaaagagaaaactacctaaaatttagacaaaaaaccttgtgtattcacaatgcaatttccaataacaccgaggtctgtgtattattttcagtagaaagtaattcaaaggacaaaaaaaaattgtaggtggacaatctaacagtgagaacatatgaataagatttcaaatgggttgagagttagttgaaggggaatactgagggatttaggtcaaagtctttggaataaacctagaccattgggataatctgaaacaatatcactggaattgatgtttttttcctccaaatcatttgggaggtgttcatagtgcatcacacgccctttatttacaaaaagtgctttctatttggcataatattttcacagaccagttgaagttacagaagcttcatatttaagaaaagaattaaaactacaatcaacagccagataggagaaatacattctggtattttattgcatggtagggtgactatgattaacagtaaaatattgtttattacaaaataactagaaaagaggctattgaaggttttcaccaaataagtgcatgaggtgatggatatactaactaccctgattggatcattacacaacacggatatgtattgaaacatcaaattgtaccccgtaaatattatgtacaattataatgtattcattaaaaaatacataaacattaaaaaaaatcttcagttaactgagaaaatgttcaagacttacctaaagcaaatactaatcaagtttacctgttctaattttgcctgagagcccctgtcaaacaaggtggtgcctttgtaactatagccaggtccctcagtctctccaagctccagaatacttgcctgtaaaagcaaaaggcaaagttggttggagaaatgaataaaaataactacctccttgggttattatgagtgttcaatgaattgaatga

SEQ ID NO: 120083 - DNA, 1000 bp, Homo Sapiens
tgtaatagattcattttaaggttcaaatctctctgtgtcttctgacttcttcctcaaaatcatgccacagaaattctggcatctccacctcatatgccacaggacatcattgtgtccaagatttgagaatccatgtcagcagagtattagacaagctcctggtttcctttctaggaaattgattcccaagtcaagaatgtgtgtatcgatgtcaataaattcttctctcttcagccttacatcccccaacttaatctgatgcctttcagatttactcccatatgtgtttccttgatttctgatgatacttaatgcccaggtcctataattcttttggttagtaacctatatttcctaccatagctaggatctgaactatgctgagacctgatcttagtcatttgcctgaaaataatgagcagagggaagatcaatctgggatgagggcaagcactatcttgtgaggtttttgtctcaaatgaggtctttatcaattctccatgcaagcatagtttgtgctcctctggcaagagggaggtactacttctgcctgtgtagagcttgcttctgcctgtgtaaagctacttgcaagactcctgcctacataaactttcctcccaaattagtcatgataaactagtgattatcttgacaaactatattatgcagcattaatcaaatagaaaatcttagtggcttaggaaataaaagttgtatatatgtttagagacaagaatctcattctgtaacccaggctggagcgcagcggtgatatggtttggctctgtgtcccgaggcaaatcttgtgtggaattgtaattcctcagcgttggaggagggatctggtgggaggtaactgaatcatgtgagtggatttcccctttgctgttcttgtgatagtgagtgagttctcacaagatctggttgtttgaaagtgtgtagcacttccacctgctctctctcttcctcttgctccagccacgtaggacatgccggcttc

SEQ ID NO: 120084 - DNA, 1000 bp, Homo Sapiens
aagcttctccacagcaatatgcaaggctgaaggacagcagtgattgaagcattttatacctgtcttttcaaacatgtcagaatccaggtattagggcacctatgagttcttatttctcacacacacagttggaaactgggcacggtggtgcacacctgtggtcccaactactcaggaggccgaggcaggaggatcacttgagcccaggagttcgtggctgcagtgagccatgatcatgccactgcactccagcctgggtgacagagaaagaccccatctctaaaacaaacaaacaaacaaacaaacccacttggtattgaaatgtaacagcaaaattgaagtgaagcccgtgtaggaaatcctggattgcccaacaaacagtatcctacacacacccttaggcacaagcaaaacagggacaagaaaagggatttttttttttttttgagacaaagttttgctcttgttgcccaggctggagcacaatggcacaatctcagcccactgcaacctccgcctcataggttcaagcgattctcctgcctcagccttgcgagtagctgggattacaggcaacccccaccatgcccggctaatttttgtatttttagtagagacagggtttcactatgttgaccaggctggtcttgaacttctgacctcaggtgatccacctgccttggcctcccaaagtgctgggattacaggtgtgagccgccatgcccagccgaaaagggaacttttatgaaaagtaatttgacgttgatattcatccattcgtgcatgcagtatctgctgggtgtctgcaacataccaggtcacacctggggacaggacaggggaaatccagtctgtctctgccctactggaccttgggttctgggggcagacagacaataaacagctccagcaatgagaggcaccgtggggctgtgaatcacagagacactcccgcgaccagggaggggtgctgggcaacaggcagaggctttcagacgcg

SEQ ID NO: 120085 - DNA, 1000 bp, Homo Sapiens
gatcacaccactgcactccagcctgggtgacagagcaaggccctgtctctaaaaaaacttttatcttagatgcattaaagaaaaaaaatcataatttaattgtttgcacttgagggttacatctctagggtaggtgaccagagatagccaactcttttttatttttaaatcaaaacatctttattattactataaagcaaaagtgtgctttgatcctatactgggatagagatggaaaggtgtttattttacataataaggttaacagggcttggaggtttctgcattccccaagcagggaacaggcccagaactgagaaagaaagacctgtggggtttggtgggagacggtctcagcacaaaatagcctgagaagagagacagcagcatgaagtctcctgtggtagccagaggcaaggaacctgcggacggtgatgtctcagtcactgttgcccattttgggttgtgctataacctcttcccccgtgtccttgaccttcagcaaagtctgttatacacaagcaccctgggaaaggagggaaaagcaatagcccatgtggcatgaagtgggacagagggagggcagaggggcaggaggaagagggagagccggcacagagttcctgggattagattcccaagagaggtatctctctggaaacccttgaaaacctggtacaagtgctgagtttcttgtctgggtaggaacagggacccaggctattttatttgggcattaaaaaacatttgggttcatctgagttatcccaaaattgcactcactaccttccttgtaacaataacagcaaaaaataataattttttaaaaaaatcccacagaagatccttcagcctcttcttgtccaggaatacttgcgtgtgtaaaatgatcttggaagtggaaaggcctggaattggccactttgtcgtttgtctaggcaggaaaactcatgcatttcagagagagagtaaaaaaaaggtttttttgtagttcaaaaaa

SEQ ID NO: 120086 - DNA, 1000 bp, Homo Sapiens
aggcggtatgaaatactacacccttggtaaacccgtttatggaaatatcagtatttttaacagtaaacctctggaagtttctttattttgatgggaagagcaaaatagcataacacccactatcatatgcaccaaaccaacaaacaaaaacaagaaaaacatcgaactaaagttatcaaaggcttacactgcctgctattccagggcctagaaactgtgaaacttaccccagaaacactgggttgtgggagagccaagaccatggtggcagcttggcatccttggcactgggttactgatctatttctaaacacagttctaatttcagcttttttatatagtcatagttgctctgtcattataaacattttcttctaatgcagcctctacaatagtttaaaaacaaaagtttagtaaattgcacctgtcttcagtatttccaacaattctatggtaaactcattaataatactaaggttttctttcctcttattttggcaaataattcttacttttcccaggactgtaaacaaatttaaaaaattaaattcttgttatttctgagtatcaaaaccaattttatttacattaacatattacattgttactgtgtggataaatgtgaaatatattattaaaatcagaacacttaaatgtaccattatttattgaattagctgtggaatttaatttactgaaatcctctaatgaaacagcactacaggaaactcccctctcccctaggtttattttttcccccctcaaagccattatatcttaacatataaagggaacctgggagtagagggattaatatctttttgtaataaatatggtttagttctaaattggaacatccagataccaatatgctcactgaagtcaaattattttgtaaactgcaggtaccacaaagaaattggatctgcattactatgaaaattccaatgccatgataatccataccaccagtatagcagcaattctaacagccccccta

SEQ ID NO: 120087 - DNA, 1000 bp, Homo Sapiens
atataacccggcggcccaaaattgccgactcggagcgaaagatatacctcccccggggccgggaggtcgcgtcaccgaccacgccgccggcccaggcgacgcgcgacacggacacggacacctgtccccaaaaacgccaccatcgcagccacacacggagcgcccggggtccctctggtcaacccaaggacacacgcggggacagcgccgggccggggagccctcccggccgccctggccacacgcaggggccggcccgtgtctccagagcgggagccggaagcattttcggccggcccctcctacgaccgggacacacgagggaccgaaggccggccagcgcgacctctcgggccgcaccggctcagggagcgctctccgactggccacggggactcgccagaaaggatcgcggcagagggaccgcggcccggcccggggaccgctccccggcacccgggggacgggggcgggacggtccccggctccccacggggatctcggaaacgaattcggccgccgcctcagacggccaggatgagcggaccgcgaccgggccgggaagggcgtccccagcctccgccacgcgcggcgggtccgccgggtcgcggctcgggcctcgggagctacggcgcgctggtcgaccggcccgggcagccccacgcccgccgcgggcccagaagcgcagcgacagcctctcccccacataaacctgcacgccagagctgtgactcacaagcgaccggccacagctctggcgccaccgggccagccgggctgacgaccgcgggctttccggagctctgcctagctcacagcggggacggtcccctccctcggcagctgccaccgcagctccggaagccgagagcacgatctcaaagcggccgccagatggagcccgacaaccgccgcggacgtcagcgagacagatccggctggcagggcggcccgtggaccgcgaaagcgaaaccgtgagtcgagaagctcttcccgaggc

SEQ ID NO: 120088 - DNA, 1000 bp, Homo Sapiens
ccggcgcgcgctaggccgcggtgggcagcccggggtctgcctgcgaacagcgcggtcggcgactctgcagcctgcggcggcttctctcggcggcgccccctagtccagggccggagaggctggcctgcccgcagcgcagacaggaatgtcaccgtggtctcccaggctgaatgacaaaagttcgtggactgccccctccccgcctatcctccacccacgcgtaccgccccgttcccccaccgtttccgacccggcagcttctggaaaacagcgcccttgatcctcccgggcaggaagaagggccaaggaaggggttagaagggaaagagttaggatttcccaagaaccagccctgaaggcctggaggtgggggatttcgcttcttagttggacgggagccccttgggttcctcacttcttagcccgcgccctgcgaggagcgactctgcttgtccctcaagatgcttgtgaaggtgcccgctgcgctctgacaccggcgatctcttaggtacgacccagcggggttgggctggcggcagaaaccggcggagtgcgcgacctcgaacccgtttcgcgcccacctccttcacccccttgcatcctatttgctcacaagttttggttcaggcctgctgtgtgcagaggcgcgtgccagagacacggaatacaaagacctaggccgtaagcctttagaagtcccgatgaggcacacagtacaggaagagagtgagacaggtaaaaagagattgcagaacagcgtggtaggggacgaaagagaagtggttcaagtactacaggttgtactcagaaagaataagggagaaacttttaaaatacctttttctgagtaatgaccatccactgggtactttacccacgtttttactttctatttttaatgtgtattttatagaagacataatgagactcagattaagtaactgaacttggttgctcacttgataaatgtttaccattcccactgataaatatcggccgt

SEQ ID NO: 120089 - DNA, 1000 bp, Homo Sapiens
atctctttaagttgccctgctctctggtgtggccatctggcctctgcagttagcctgcaacagttccctcctcgtggcatctgagctaggccacctgggacaacccagctctgcagcttccatgtcatcactactgctgctgagcctgattctggctgggtctggggacccagtagactgggagcagactgtgtttcaattgttttccaggacactaggcaggcaaaagagtgaggataaagggaggtgaggaaggggaggtgagtggccagggagtcaagcttagtatagacagcccctgggcccaatgagggagaaaggaatgagttaccatcatccttcccccacataggcacctgctctctaggaggcctcgagagccctgggctcatcctcttctggagccttttcaccccaatgagtgtctatgtgtaggttctggtgcctcctctgtgctcactggacagtgatctgtgctcccaaacctggaagatgtgggtgctcaaaaacctgaaatggcattgccacaggaagggatgttagaaaccatttacctgagtgtttccaaaatgtgctccgaggaccacttggtccacgagttcctagcaggtatcgtgtgagcaaatggggtctctggttcaacatgcttgggaaaggctatgtgcacagctcccctcccaccagtgtcagcatccacactgggccagtgaagacgctgaggagcctgcactgctttcactttacatgatacatcattttctaaactgacttgtgcatattcattgggcctatttatcgccatttttgccacactggtgttctgaagatcagtgtgggccatgcagatacagccaagccctttatttcatagatgaaggcctgcgagctcgggtcaccaggaaaaggtctcacttttggaccaggcttctgccatcactgcttctgtgagctcccagctcatctcccccaccacggccccaggattgccagctcctctgac

SEQ ID NO: 120090 - DNA, 1000 bp, Homo Sapiens
skrtttwkgwgrsrcymtakwatactcaagcyyggagtaaagaattatgaattcctttgaaaataaacttcatattcagaatgaatttaataaatagaagtagtagaagccaaaaataatgggatttattaatttagaacaaatctagagtagactatcagaaaaaatccagcagatcacatgattgtaacatagttagtgaataaatatgcaccctcagggaaaatgatcagggggtcataggggaccacgaataataagkcagctatgtagcgctaatgaagagcaagctgaattcagaaataaatcaagaaaatgaaaaacattttctttacttcatattaaacctgtatagacatttctagttcttgtcctgatttgaaagggattcagaaaaatttcaagtaagtttggaagattgtcacaaatatgattaattacatatgaaaggaaaaagccaaagtgtgatttttatgagaagaaaaccattagctacctttgcactttcacttgtggcattaagaaagaattgatttatataatagtgaagcatatttggttagtcattggggaaaattatcacatgaaattaagtggcagaaatttttttttaaaaaaatagaaaatgtgttgaatcacattctggggaagtcttaggaaacaggttttatcatcgggcctttacaactgtggaggcaggaaaaagaatgctgtgggtttatgtgtgtagggttttttcctgccctagagtcaatgattttatgaaatacctaagaaaatctattccccaggattgcacaaaatgccttcattcctcttgttgatatacatgatttatttcttgtttctggaacttactacttctgcttttcaccaaaattttaatcggttacctaatcaataaacttttctcctgtttgtctcatttaacatttgtccaaatcagaatgggtgaataagattctactaaacactatagtatgcctttgtattatttata

SEQ ID NO: 120091 - DNA, 1000 bp, Homo Sapiens
gtttccaggttgccctggaacaaatgtttattttttgtgttttgttgtttttttttggggggggaggggggaagggagggttcacaagggcaaagttttgggttttatcatttttttgagacagggtctggctctttcacacaggctggagtgcagtggtatgctcatagctcactgcagcctcgaactcctgggctcaaacgatcctactgccttggcttcctaaagtgctgggattacagccacgagctaccacacccagccaagggcaaaggtttcataaaggcaaagccgggatatttttaacaacagcaaccaaaagactgatttggagatgttctttgtctgaatttctgcagataatgtgttcgttcagccacccaatataatcagcaaaacaagcctgggtgtggggtcttggtctggaaggagggaggctgccctctttagaagcatcccacaagagatcaaagagtccccaatttacagtccagctgcatttgcatttcagacaggtacatcgtgggacccactctgtttcttatttgggtgttggtccacttggattgagcctgtctttgaagtctaggcagctgggtggtgggcagagcagggtcagtggacagtaatcaggcgcttccaggaaaagctgcagtaggtggcaatggtggctgccccaggccctccagggttacgtctcaaagtacttgtagatttgggccacgtactgcatcacactctgccagtcgggccggtctgtgtacagcatctcgctgagttcctgcaggggaagggaatgggggacagatcacaaggcaggacatcacagaccccttcccctcaaggacttcagtccaggttagggcttacactgcctggaaaccctccacttacacagacagaacgtgaaggccagcacaggtggtgctgaaagcgatgagttaaaggacttttcctcccacttattcaggagatactgtccctttccaaaaacggaaaa

SEQ ID NO: 120092 - DNA, 1000 bp, Homo Sapiens
agtccaggggccagaagcgctccggccgttcccgagttgagctgcgaacagcggccaagcgtgttttaaatcgagcttccgtgtggcgagctatgacctgctggttactcttattttttttctccattcgttgagctatgattgacaaattgaaaagtgtgtatttttagggtgtacaatagagtgttttgagatgtcagtggtctttaaatcacctcagttaagctagttagcctgtctatcccctcacatagtgaatacgcctctgtgtgtggtgagagcacctgagatctactcttgcagcaaatttcaagtacacagtattgttaactatagtcactattctgtacgttaggtccccagcagttactcaccttgtaactgaaggtgcgccccttccatggaaatcttcccactttccccacttcctagcccatgggaaccagcgttctactgtttccatggcttttttaaatttttatttacttttttagattttacatacaaacgagatcatgcagtagttgtctttctgtattcagcttatttcacttagcataatgtcttcaagatttatcaatattgttgtggatgaaagagtttcatttttattaaagctgaaattatgtctctcagtttatctgtatcagaggaatgcagatacccttgatgatcctgattttatgtcctttggctatatactcctaattgggattaatggtagttctagtttaacaattttaaggaacctccatactgtttttcataatagctgcaccaattgacatcctcagcaacagtgcacaagtgttctctttttccacaccctaacactttttatcttttgactttttgataataggtatccaaacaccacgataaggtgatacctcattgtgattttaattactgtgataattagtgatgttgagcattttttatatacctgctggccatttgtatatctttggaaaaattgctatttatatattttgcccaa

SEQ ID NO: 120093 - DNA, 1000 bp, Homo Sapiens
gatcattaaatgtgaatatacccggaaagactagagaaaataccagcaaaaatacagtaaatgctgtccagatttggtcccagtaaagacatttcttggtttccatttatatcactttaaactggaactgttgctatttctctcatatacaagaagtgctcttacacagtaacacattctaattcgtagaatgatactaaggcaatgagactagagatcctttgtgaccaaatcagagtgacattaaaaaaaaatagttacagactaatctgacattgttcatcccatccaaataacaaaaaacaatcactacactttctattttcaattccactacctcatgattccaagtgtttgttatttcaggagcatctgttatgtctcgcaaagcatttctcaacctggcgattgctaacttggaggtcaggccactgaagcaggaacaaaaaagagctgttaaaaaacaaaagcccaaggctcccactgtaaatttggtcttctgaaaaacactatcaaagctatgaacatttcaataaccagaatttgagaattccaaacttttagagacatcttttctgcctatgagaaaactgcactggagaaaaaagaccgcaatgcataacaaatatattttgcagagtaatatgaatttcttgagtacaagtatcaaatagcagtaaaaaatataatttagttgccttttttctggctaagtccttttgctcacctgcggtatcactccaaaggctttcctccactgttgcaaagttattgaatcccaagacacaccatcgatctggatttctccttcagtgttcagtagtctcaaaaaagctgataacaaagtactcttccctgatccagttcttcccaagaggcccacctataaggtaaaagtgatgggatcacttctgtgacatataggtaccatgccataaacataattcagtattgtacttcaataaaaaccattggaatattttatcctgtcaccagtgga

SEQ ID NO: 120094 - DNA, 1000 bp, Homo Sapiens
agttcccggggatagtagcaggatgacactcttagcactccttgggagtgagatttaaaggagggagaaattctcagcaatggagagaggcggatggtgcagagaacttgaaagatgtcatcacaggaactatgacgtcacttggccttgagacacagcagcaagtccagtgccactgtatgcgtaggctggtgtccccactggccaaacccaatcagcaggtagagggcaaaaaatgtcttgataccacctagaggcaggttagcagagtttaatccagaaattttaattttataaatcttcccaatttaagcctccccttacaaggacaaagcatagttttataatactgacctagtatgaatcactaaaacatgcaagccgtgcacagtggattgcgcctgtaatctcagcaactcatgaggtgagtctggtggatcattttggtcaaaagattgagaccagcctggccaatgtggtgaaaccctgtctctattaaatattcaaaaatttgccgggtgtgggtggtgcattcctgcagtctgagctacttgggaggcaaaggcaggagaattgcttgaacctagggggtggacatatggtttaggagatgcatgttttcattttattctcttccaatttttcttcttttagtagtaaatagtcatccatctcttaaacattttcattcagcatatgtttgttttgttattgccaaagactgtgctttgacagacattaagtcaacctgaaacttaaaaaggaaattttacaattgaatgatgacttcatagtgagcaaaaataaaagcttgcaggctcctttaggcatagtgtcacaatttaactaaggtcagtaaacagatgtctgaatctctgcaaaaaaaggccaaactacagtaacagaaattgtcttctgccctacaactggggcagaggaagttttatggaccacatcccatgaagcaagtccttctaagattatcaccccatttttcaga

SEQ ID NO: 120095 - DNA, 1000 bp, Homo Sapiens
aaatcaaaaaggatctatgtaaggtattgaattatcagacctttcttcttcagaatcaagtattctatttggatttagaatttaattctttaacgttttaatatttcttcttaagtaatttagtttcatcttagagtagaggaagatttcatgtggatgtctggttgataggagagttttatggaggcataatttaggcagatttatgcaaatttaaatgcacactttattcttctattttcacacccacagcactacttaataagctccaatgtggcactgggaaagtttaaggctgcatgccttctttatgtaacttagaaattctcttgccatccactgggagtgacaggatgggagttagtaacatgagtgtgaaagaaatcctgtttgttggcattgctctagtcaggaaatggggaagccttcagtcttaattattgaagtttaaggcacatagaaattaataatggaatatcttaactgagaccatattttaaactcaaaatagagacttcgttgtgtattgaatgccagatgcatgggtaaaatttatattagattgacagataatattgatcctggatcttgtctatgcaggtatttcattaatcacggagccagtggaggtattgtcaatggtgaaggtgaagttccctctgaccttgcagaagagccagccatgaaggatcttcttctggagcaagtaaagaagcaaggtaacctcatggattggagggggccaggaaagattcttaaacactgccatttacagaaaataatccttttgctgtgcagagcatttcactatcacacgacaggagaggatttgatctgtctgcactgcattaatcattaatccagcatcatgtatcctcataataactcagacaagaataggccagatgtcaaaaggatgaccagtcattccttgtttttgccattcagaggttgcatacccatcatacaattaagagtgacctgatgaggagtgtgaaca

SEQ ID NO: 120096 - DNA, 1000 bp, Homo Sapiens
catgtgagcaaaaggccagcaaaaggccaggaaccgtaaaaaggccgcgttgctggcgtttttccataggctccgcccccctgacgagcatcacaaaaatcgacgctcaagtcagaggtggcgaaacccgacaggactataaagataccaggcgtttccccctggaagctccctcgtgcgctctcctgttccgaccctgccgcttaccggatacctgtccgcctttctcccttcgggaagcgtggcgctttctcatagctcacgctgtaggtatctcagttcggtgtaggtcgttcgctccaagctgggctgtgtgcacgaaccccccgttcagcccgaccgctgcgccttatccggtaactatcgtcttgagtccaacccggtaagacacgacttatcgccactggcagcagccactggtaacaggattagcagagcgaggtatgtaggcggtgctacagagttcttgaagtggtggcctaactacggctacactagaaggacagtatttggtatctgcgctctgctgaagccagttaccttcggaaaaagagttggtagctcttgatccggcaaacaaaccaccgctggtagcggtggtttttttgtttgcaagcagcagattacgcgcagaaaaaaaggatctcaagaagatcctttgatcttttctacggggtctgacgctcagtggaacgaaaactcacgttaagggattttggtcatgagattatcaaaaaggatcttcacctagatccttttaaactagtgaagttaccatcacggaaaaaggttatgctgcttttaagacccactttcacatttaagttgtttttctaatccgcatatgatcaattcaaggccgaataagaaggctggctctgcaccttggtgatcaaataattcgatagcttgtcgtaataatggcggcatactatcagtagtaggtgtttccctttcttctttagcgacttgatgctcttgatcttccaatacgcaacct

SEQ ID NO: 120097 - DNA, 1000 bp, Homo Sapiens
gcctgggggtctgcgcgagactccgtctcaaaaaataataattaaaaaaaaataaaaaaataaacaagaccccaaaagcacaaatcataaggtgaaaaaaaatgaatggaagtaattacatgaaaattaggattaaaaaaaaacggattaggcaatatctgtttttttgtttttgtttttgtttttgagacggagtctcgctctgtcacccaggctggaatgcagtggcgcaatctcagctcactgcaacctccgcctcccaggttcaagcaattctcctgcctcagcctcccgagtagctgggactacaggtgcgcgccaccatgcctggctaatttttttgtatttttagtagagatggggttttaccatgttggccaagatggtctcaatctcttgacctcgtgatctgcccgcctcagcctcccaaagtgctggtgattacaagcatgagcactgcgcctggcctatatctggcatttttttaaatggctctttgagttagtcaagaggctgagaaaaggagtcaggaggatccatgcagctcatgaagggtctgcaggcataactgcatttcccttctgtgtcatcctcttaagggaaaatggaaacagttgaaatgtgtgctgctttttatttaattgaagacttctgttcctcaaaggacatcatcaacaaagttatcacccaatagatatttccttctatactagcaactctagcaaatcaacaagataaaaaacccatttttaaaaaagttctgaaaatgaaaggctggaggaaatgagcaggcagttctcagaagaggaagccaaaatgactaatacatgaagaaatgcccaaacctgccaggaatcagggacacacagattaaaacaagataccgctttcacacctggcagaatgacaaatattagaatggtaaaaaacccagtgacggtgagaaggtggcagacaagaacagcttttctggaaagtaatctgatggaacagaggtagg

SEQ ID NO: 120098 - DNA, 1000 bp, Homo Sapiens
gagataaatggattccacagtgaagttaagttgcctatacgagaacagaattactcctagccattcaatcttcgatggatcttatcaacctacttaatcaatctgtcaggcagaataggtaacagtaaattataaagaaggtgccacagaggtaaaaactggctgtgcccaaattgacactgcagagcagaaaattaatgtatgatattaggtctaaaacattttgagcttttcagtcccactggcaaaatgtattacaaaaatagatgctccagggaaactaacaaaagcaaccttttgatttcggcttccatgtatgtcagcttacagcaattaggttgctcactgatttctgatattaacgtatcagaatgtgattctcaaattagtatcatagcttggtacccaaggtcagagaatgtgctgcttttccaatgcaaaaatccctatctaaataagtccatcttagggcacatgagattagcacctattgtcctgtcaactcatttagtttaagtgtgagatttgttgatccctcatctgggtaaaggtagtcagtgaatcctactgcctcccttcaagacagcctctgaggcagtaatcaggttagaaatactgaatccatgattcttcctaacaagagcctccaaatattctcagcaaagacatcctaaatttaagcagatatgcttttcatttggataaaattggaaatggtgtaataccttgagagaatggttttcctaagacgttaccatgttaaaaaagtccccatgtctatagaaaatgcaaaaccctgaaatatctaatcaactaactgtactcatgaaatgcataatattcatgcagatataagcagtggtttatttctaaggttgcttaacgaatacaagtcagcaatttaagttctcaaatagaaaagaaaatgtgcttgaaaccttttaaggcaatggtattttgtactaacaaaaacatttcatattggttctctgaaatagcc

SEQ ID NO: 120099 - DNA, 1000 bp, Homo Sapiens
ttagtggattttccatttaatgctccccatgttatttcaggacctatttaaaagtaataacaaaaaggaacataatccaaaattacatgttttattttcatgtttgtaaaacgaagagcttttttctggatggttttcttatcagcttttcacacaacagtcaagtaaacctcgtggcactagccctagaaaaggaaaaacacgagattcttacaagactacaaacattacaacatatgtaaaagcattaaaagtattaaaaaaaaatattgtccttataacggtccatctcagaagccagatccgtaaaagtttttttttttcaacagaagttcaggttcgggataagatcatcacagataagaccaaggacacaatattcactgatctctaagcaaacagaaaaactccacttacagaaatcgttgcaactttggaacttccaagacaatctggcctctatcaatgggcagacagcgaccctcactgttggcagaaaaaaaaaaaacccaggattttataacacaactgttataaaatcacggcaacaaaatttactccacctctgaattactggtcttaatctcagaagccgaatccgtacttatttttcttcaggttatcagcttcgggataggtttcatcattgattagaccaatcagaccttgtatatgtacacataatacattaaactgcacttctgtgacactgactacaaaccaaggtaatgctaaaaggcaagtattatagtacaaatactacagaacttttaagccatacaacctacttcaaaatgaagctgctagtcagtcacattcgacattcattatcttcactggctactcgtccacactcagaacgctgttcactgacaaaaaaaatttgatttagtctaggtgtggattaaatgctatgctcaatcataaagtactaaaacaacacatacctgttaaaagtgtcaggttttaaccaagcgattttccattaaatattctccca

SEQ ID NO: 120100 - DNA, 1000 bp, Homo Sapiens
acaggcacccaccaccacgcctggctaattgtttttgaattttttagtagaggcgagattttcccgtgttggccaggctggttttgaactcctgacctccggtgatctgcctgtctccgcctcccaaagtgctgggattacaggcgtgagccaccgcgcctggcctgaattaatattttctaccccactttcttaagtcgagacaatcaataaagcaataaatgacacctggatttgtagcgaatgtctatttccatggtgtaaatagtggtaccctgagcaattttaagttataaatatgagatcactgaaagtggagttggggaacacgttattatatagtattttcaccacacacaggatacagtcaatgacttcaagagcataggtaacagtaaaatgtagtaaaacaatttagaagtcatgagttttgagtacttagtactttttagtatgatttatttaatagtaaccttatataatgtttttcttttaattgttttattgagatgtatttcatacactttccaataagcccatttgaagtgtaacattcaactttttttagtatattcgcatggttatgtaattttcatcaaaatctaattttagagtatctttttgtccccctaaaagtaactctgtgcccatagttggcagtttgtcatatcactcaatcactgtttcctttaaagagcttatcattaaagacagcaggcagttacacaacatcttctacatgccaagaatgtttctaatacatgctttatggatttttaaattgtggtaagatttacataatgtaaaatttaccactttggggctgggcgtggtgactcacgcctgtaatcccaacactttgggaggctgaggtgggtggatcacttggggtgaagagttagagatgagcctgggcaacatgatgaaaccctgtctctactaaaaatacacaaattagccaggtgtggtgctgggtgcctgtaatcccaggtattcagga

SEQ ID NO: 120101 - DNA, 1000 bp, Homo Sapiens
ttcccacaaaccctaaaatctacttgaacaccacaaattcatattccttctaatcccaagtcccttcagcattcttacagatttattgttagttaccttacaaagtaactaactgtccccatgtattttatcccaatttaaaaaatacattacagtctcaaggtcacataagattttccaaaatgctctattcatagtcaatataattttcaggccgggtgcggtggctcatgcctgtaatcccagcactttgggaggccaaggtgggcggatcacctgaggttgggagttcgagaccagcctgaccaacatggagaaaccccgtctctactaaaaatacaaaattagccagacgcggtggtgcatgcctgtaatcccagctactcaggaggctgagtcaggagaatcgcttgaacccagaaggtggaagctgtggtgagccgagatagtgccattgcactccagcctgggcaacaagatcgaaactccatctcaaaatatgtgtgtgtgtgtgtgtgtgtgtgtgtgtgtgtgtgtatatatatatatatatatatacacacacacacatatatatataattttcacctagtgttttattaaacagaatgcttctgtatttttatgtttatttgagacaatgcttctgtatttctaaacaacagctagccttgttcagttagccaaacaacaaaaccttaattcaagtcttcaatgaaattttctgatttaataggctgaattaagaaagccataattttcttctataaatataagcctttaacttctatctttacaagtttatatagaaaaatttactgtggggcttgagatttactaatgcatgggttttcaaccttagctgcactttggaatcatttaggacgcttggaaatccctacacccaaaccacatcccagatcaattacactagaaatctctaggggtgggacccaggtgtctgtaaatatcccccggtgattgcaatgtgcagccatgg

SEQ ID NO: 120102 - DNA, 1000 bp, Homo Sapiens
gatcatactgtttaaatttccagattgtgtgcaacaatggaaagaaaatgctgattgttctcaaaaaccaacagcatgtcttaagctggaccagatgcgcctggaaccttcccagaggaagagagaatgaaccccaaattcaggagattcatattacagtttgtcagaacaaggttcaggcatatttgggagaaggaggattgtacatgcaattagttagggatgacaaaaaggggtacagcgatccacaagagagcctagagctcccaggaaaaaagagagaaatgggcaaagcaagcaggcaattctttctttgattttcgcgacagacaagctgaggtttgtccccagtgaattttactccaggggtattatttacttttttggctttaaatgtattaaaatagtttaataaatttgtttttgtgttgacaggggtagggggtccttgagcgtaactcagaacttcaacctattttaggaggtgacacatagtggctaagtagttcccagatttccacacaaccttcaacagtcttggccagagctgtactgagtggtgagaaagttgtcccagttctcttctagactgtgagggaagagagaagactgggcttactttggactctgaggtggtcagttctgtggtctggctaatttgaaggtgccacaagttaaaattaattctcttacacagaccatactctggcaatgagctgaaattcatagttatttcagaaacagatatagataaaaataagtcaatgtaggaggaaaaaaaatactgcaaattgcaggagggtaaaaagtctttgaagagccacaacctccattgatctggaagaaaataaaccttagaatgtaaccactattgttttcgggggatatttttctttctttccatttttagttatttttggttatgttggcatttagatagaacaatgaacagttggaatcacaacaagtcctcatgtaaagaccagattttgagtagaca

SEQ ID NO: 120103 - DNA, 1000 bp, Homo Sapiens
  misc_feature (177)..(177): n is a, c, g, or t
  misc_feature (237)..(237): n is a, c, g, or t
  misc_feature (563)..(563): n is a, c, g, or t
  misc_feature (601)..(601): n is a, c, g, or t
  misc_feature (625)..(625): n is a, c, g, or t
ctgcagccatattctgctgcacaagcctgtccttgtagccacagctgatgacacagggagagtacccatgtaaggcaggctgaccaagtcctgtccctgggaaaagaagagccaagaaacagacccagaaagttggcctgaggggttggatttgtaccagttttacctggaagatgntggaggtcttgtcatttgtcccatcaactggagaaggcgccatggagagaagggcagtgntgccgtacagagagggtccaggtgacatttaatgccggctccagctttcccaaggctctgctgcacccttccctgaaattctgaatccactctggattctcaaaacaacgcccctcacccactcttgttttcacctaagtcatttctagttggtgcgttcctttacttgcagccaaaggattcctagcaagtacaagcttctgacttcacagagaggccatggtaaacatcccaaggagtgcatcagccatgggttcagggatttcagccactgcatagaagacaagctgtaacctaattcaatcacacttggcagcaaccggtgnagaggcagtttgggctctggggagctcccccgtgacanatggaaggggcccctacatctggngaggctctagaacctcctcccagtgaggctaacgtggtctgaaggggtctctttgcccagtgacattctggggttgggatctgggatttcctccattgcttccttacatcaacatttgctaaagctcaaaagaagaccttccacgtaatgacatcaaacagatctgaaaccacagttaaagtaacgtccacttaacacttggtcagcactcatgtttcattttgtgtgccgtggaaagaaatacaggctcctgtgccatgggatgttaactcttttattaatttagggttaacattgtacttgcttcattgatttctctttcagagttgtagattcaataaacaacatctgggttctctccagctcacaggtgac

SEQ ID NO: 120104 - DNA, 1000 bp, Homo Sapiens
tcgaggctagagtcccgcccccgatcgcaaggagaggacgctgtctgtcgaaggtaaggaacggacgagagaagggagagccctctgcacctgccccacctgaggcccttgtagttaccaagttccagtcctactgacctctctctttcatccttgctaacaggaagagatcctgccatgctggggggaaggggagaaagcagccaggaggccaaggcaggaggatgagggtcagctatgagaaggagttgggctcttctgccccaggcctttcctcattctgtcctttccttggtcttgtgtgcaccaaatccccaagacaccaccaagagtgttttccaggtcctgtggcctgtgagcatctcctggatcagcctgaacccatggcgttgatgggctgcttgtcccagcatgaagttcccccagccttggggctgtgatgccaacaggacagtgtggcccagcaggctgcctggtctcacccttgcagcagactctctcccaccatttcatgagtttgtcatgctgctggtgtgcctcagatccaggctagagagcatctgcctggtgctgcacaccaatgatgggtggagctgggctctgcagcccctccgcgtggctgcccttggaagcatcttgaatgcagtgccgtgggttccaaagggccaagaggatcctcttgtattccctgcggaagttttggttcaagagcccatagacaatggcattcaggcagctgttgaaataagccagtaagtagctagtgacaaatagcccctcagggatctggggagccatttcttgggggttgatggccacagcgaggccgatgcagttaagtggagcccagcagatggcaaagatcacaaacaccacaaacatggttagaaagctccgcaagtcgctgggcttcaggcacagcctgctctctggcttggctttcctgcgggcctgaagcaccagcacccagatgcgcaggtagcagaaggacacgacagcg

SEQ ID NO: 120105 - DNA, 1000 bp, Homo Sapiens
cagaaatgttgctttcttgtctatgaacattttctcagagccctcttttccagctgacttgccctctcattggccagaatagcattatatgcccatttccactcaaattactaggaagggactggaatgactaggactggcttagaccaaaagagattcacccccaggcctagggagggcccacttcctctacagccctaagctacctgagggttgaacaaacttggggtttccttagcaagaaagaagcgggaggagaatggccgtagataaggagtcaacagcatcctccctgggaactggcacttcctacccacctctctgccctaagcagacatttatgcacataatttcataatttccttttttttttttgagatgaaatctcagtctgtcacccaggctggagcgcagtggtgcgatcttggctcactgcaaactccgcctcccgggttcaagcaattctgcctctgcctcccgagtagctgggactataggcgccccaagtcatgcacagctagtttttgtatttttagtagagatggagtttcaccatattggccaggctggtcttgaactcctgaccttatgatctgcctgcctcagcctcccgaagtgctgagattacaggcatgagccaccgtgcccggccttttttttttttttttttgagacggagtctcgcttttgtcagccaggctggagcacagtggcgcgatctcggctcaccacaacccctgcttcccaggttcaaacaattctcctgcctcagcctcccgagtagctgggattacaggtgcccaccaccacgcctggctaatttttgtatttttagtagagacggggtttcaccatgttggccaggctggtcttgaactcctgacctcatgctggcaccgagtaggcactcactgtatgatggtcaaatgactaaacaatgctggactctaaaaggtcatctcacttgttcacatacatatatagttaggatatgatttgt

SEQ ID NO: 120106 - DNA, 1000 bp, Homo Sapiens
ggactcaggactgaatggcaaaactgaaaaattagtaacacaaacaggactgaaactcacaacccccaggttgccacattgttgcttaccacaaaaataagggacagcagagctttggccctaaaggaactcagacctaaacctttcccaagacagtgttgtgacaccctctttggggctgtgcaatttctgacatttctaagcttctggattccactgcatttccccgtccctggagaggaaacagcttttggtatgccaaattcagccaaagaactttagggagctggcccctgtgccagcacctggaactgctcatccatcatagccaatatggctagctgtgtgcagtggctgtgctcaaccatcactcactcattcacctaactctgtccctgtgataaaggtgacgttgatcaccatcagccagtggattattcaatcatacctacataatggagtctccataaaaatccaagaggacaagatgccagagcttctcgatggctgaacatgtagagtgttctaagaaatagtgtgcacataaaagcaaacaccagtaatttaaatgtcagatatagtgtaggtatcttttcttctctttgaaagaaatttctgcctttaataatgtgtccagaattttaacttattaaatagaacatactcaaagttaacccaaaagtatatattctaaacattaacacttggataattctacctaaatgatttcatgatgcactaatattgtacaagttttgttttagagagataaagatttcttcaagttaactgggtaaacactagacatttataaagaaaaagaaattcaattgaaatctcagcataaattgcatcctatttcagtttgggagagaaatcatcagtgaattttgtgttggaaatgtttatcctaaaatattaggcttttaatttggaattttgtgtctctgtggtatttgttccactataaagtcaaaagcaccatctcagatgtttctgt

SEQ ID NO: 120107 - DNA, 1000 bp, Homo Sapiens
atgaacaaacaaagaaacgagcactccaagagcaactttataattaaaacaaaagaagacacaagttgaaaaattacaaggatagaaaactatgaactaagagggttatcatcacagttatagcagggaagctaggagtggagagggatcctggccattgaatgcttagacctggaaattccatacatcgcttctcaaatatcattggccagaacgaatgacaaggccaaggggtgagggaggagtaactctgtgctcctggaagtagagaaccactggctattggtgaatatgaacaatgtttactgctaccacatacagattcttaatataagataaaaaggaaacaccacaaatcaatgagacaagatcgtttataaatggtgttggcaaaatcgactcactatacagggaataatagaaactgggcctccaccacttatcccatatgtgcgtggacttgagccagattatagatctgtgaattgcaaaactataaagttaatgctaaaaaaaggaggatcacttattgatgttggagcagggaaaaagttataaaataaaaattcggaagcacaaatcataaggcagatgattgaaaagacagcttacatgaaaattcagaaaatacttcctgactgttctgtgcttggcttccttcacctgtaaaatggggagttaatttaactaaggggttgagagcagcccccaggccattgtaagtgcttcgtgtgctacatgttattacaataatcagtatttcatgccctttaaaacatctctagtaatgctttttcccaaaacatcaattttgcctgacagtaaaatgccacaaacttgtgagttttgtgagctactgtgtgcctggtttatcttttcccatgattttccctcctaactcttctgtgtcattttgttttgtgtgtgtctcttgaaaaaccacatagctggattaagagcatccatcttttaactggagaatgtagtccatgtcttttta

SEQ ID NO: 120108 - DNA, 1000 bp, Homo Sapiens
gagatgaaacagcttgtccaaagcatattcttacaaaaaggcagggctccactgcctccctattcatggagtcgcagagctgaaaggaactttaaaaattacctggactacaggcactcagctgccatgccttgtaattaagaccttctttgcaagaaatgttttgctaacaaattaaaatactgaggtttgtgaaacatttgcttttggttataaatcacagtggattcaaagttattcttatgataattatcattttcttatgactctcatttgttttgcacttcgaaatgttttcttgatgggagagagcagggtatacttaatgggctggacttgatgaatgggggttgccctgtctaaatacattccattgtcttgttgacctggtagaaacagggttatggccattgacttcctagaataggccaatacctgctaaaagctgcagaaaggaaatgaggaagttgaaacaggtaagccctgacaggattgatccctgaagggttaatcccttgactttgttctttgagctaagagcaactgaaagcatcatacgctccatttgacttactactttgacaaggtttaattagtatgtctttctgcaagaataggtgagagattcagtcccagagcccagctgatatagattgaaaagggtccctctatccttcagtgggccaatggcacatgcttttgtggaacattagcatcatgaacagtgaaaggtgctgcttaggaataaaaagtggcaatttccaaatggtatttctcaataatgagagagcttgctggatgtgattattttccacttgagagggggaaaatgggatctcaatgaaggcatgggggtgtctagcatgcccaaagatatagaagggtacaattgtccttacaatttgataatgatagagcccttatatgcatgcatttcactgataatttacacattgcagttctttcagaactgatgaaaatggaatccacagcacattgc

SEQ ID NO: 120109 - DNA, 1000 bp, Homo Sapiens
tagagttcaccagagcaccctcaaccacagtctctactaatgaactccatctgcctcccatcaacatccaccccctcttacctatggctactcctgctactgcagccaaagacactgctgttgtgtatttctccacctttctctgcttggctcattcctagtcacttttcacattccagttcatttcctcccctaaacttccaacactccaaagtggaaaagatgtcccccttcagtgtgcttctgcagttaccttcctgggctataacttatcctcctgtctgaggcctccatggggcttgaactacacgaagggaaactgtcatgtttcaggctccaccaaatccctagttccttccccagtgagagagcaggggatcactgagtggttgtatatgaaagcaagcacccatttaagtacctaccctgtgccaggccctatcttagacaacaaatcaccacatttaattctaataggctttggaagttggcatcatccccacttacagatgggaaagccagctcagagaacgcctacaagatcccaaagcaaatgagagaaaagctggattcaaagcctggggcagcacttttcaggacatggctgagcctcccacactaacaccacagccaagtctgaatccagaaagggttgacagggactgggaaagctttaggactttactattctgaggaaaagatgaagagaattttcctgatgatgcaatcctgttgctgatcactaacagacctgcatactaagaactcgaaacttctgttcttaaaatacagggtgggcatgtgttaaggagagtagtagtcccaaaaccaaaaaaaaatgccttgtgatcccctcattaagcaccagaccactactagacctcctgacaaccaccctgagggccaatgactacgcagaaaattaatatcccgctaagagaccaaatggtccttgtgtgaggtaatttttgcactgagaacccgtcaatggggtcagacc

SEQ ID NO: 120110 - DNA, 1000 bp, Homo Sapiens
  misc_feature (402)..(403): n is a, c, g, or t
aatacgactcactatagggcgtcgactcgatcaacataaataaaataaaactttatttttaataataaaattaatgttctagtaaggaaaagacagtatgtcattcctttagcagtacaaacaatcttttatccaaaagaatacattgggttttatttgtgtcatttgtctgaatacagacacagtggaatatctaaatgataccctgcctctgaactccaagttgaaagtaagtttttattatactgtagggaaacaatgggttcagccgtcttattgcaaggagcaattgccaagggagagttaaactcaattactgaaccatactgaataaaaaatactgccaagaacaaaaatacgcctgggtaaagacagccactgaataaaaaaatccgacataanngtatcaaatatttatttatctgggcaacaaggactatgatacattgacaggcatggaaactactgccagcacaactcaatacaatgcaactagaactgcttccaatatggccagtgaaaatacagaataccaggtggttccaaatgtttgaagttctttgaacagaaagagagaggaggagagagagagaggaaaattcctaacccttggtttaagacaatattcatttattgctcaaatgatgctttagggaggaccaagtggaattaaaattaccttttttttttctcccctacaatacatagaagggttatcaaaccactcaagtttcaaaatctttccagggtccaatatcactttttttctttcggttcaatgaaaagctaaatgtaataatactaattatagataaaattttattttactttttaaaaatttgcccagctgtttgtcacctttaacatgctacaacagggctaaattcatgaacccagagaaaaaaatccccaaaacactggatttctaaatcagtaccatgaaccacatgaagaactaatagggaagattcaaaacccactaaacaagaggtaaacaaga

SEQ ID NO: 120111 - DNA, 1000 bp, Homo Sapiens
attaagaaagcagtttatttcttaataactgaatgtatattattttacatataattaatgatcagagagaaataacagttgctgagaacgtaaatttatgttgtactttagaattgaacagatacaaccacagattcataccaaatgcattacttttagattattaacatattcttttacataatttcatttcacatatatggagtccaaccaagatacatctggcatagtaagttttcatcagtagcttcctgtataaggtaatgcacatgtccttcaatagataacggcagtcctgtcactctatttcgagtcttgattacaccttgtagtcgctgctcaatgtcaagaacatgggtcttggcctaaaaagaagaaacataaaaccaaaaacagatgttaataatttggaattactacctttctttatattttgacatttaataaatgttaataccattttactgaccaataccccttttgtaagagcaaatacaggaaaagaagaaattaaacaaatacagttagcttgtgatactgatttggaggctcgcaagattgattcaacatcaactgcttggacatgtttctggactacgtgaaataccagggaattatttacacattacaattctagaaaaataattttttaaatctgctttggaagtgtttaggacttaaacatttcaatgaatattcaaataacaatgctgtactgcctaatatttacattatgttagtacatgcaaatgggtgttctaagtgagctacttggaactgtacaatttcttaagcatatctgaatgcaaaaggaagaataacgttattagaagaataattctcagaggtggtgctgggtgggctggtgggctgcgctgcagcccacgagcacaaagaggagggccacggggtggagactgttgctgtgccatctgccatcgacttttccgccaagagcctggactccaaatatgacttatgttccagcagaactccaggt

SEQ ID NO: 120112 - DNA, 1000 bp, Homo Sapiens
acatcaaaatgtttattttttggatatagacatttaaaacattcatctccaagaacagcttcaatcaggtatacaataagaaatagactttaaatcctaatacagaaaaggtaacagaatttttttgaatgctgctgtagacactagtgttagaaaaaaaagtttataaatggttttgcaccaaaaaaatatgcaaagaaacttgaaaatagaaattgtttgccatttgttgctctggttgctgtttaatatagacccagtgactgattgtcttcagcacacatctaatttggccatttactgcatttggctaatgtgatccaaaatgtgatctagatagtgcttttcactggaggattgacaaacacgctacatacattagtgaatcttcataccacctcagtgaggtagcttagaaatattatacagaaattgaggcacaaagaggtaagtgacttgcccaaagttcccaacagcacagtccctggaagaggaggtaactctccacacaggactcatgtgccagaaagctggacagggacaccctcatgtagcatttagtaaatacttagataaagctgtagctgatcctttgagttttcagtaccctaaagtagtaggggaagtcttttgggcaactctcctacccttggctctcaactttcctactgttgttctcttatgaactccttcacctctttgaagactgtagcagccttcaatggggaccagacctctcacctttattctgatctgtcatctatttggtagttttgtttgtttgaggtgtgtccgttggacagacaatggtcaaaagcaacaggattgggaaggtgcctatcagggtagtaactgcttattttctctgatcagtttgttgaggtgtcacctctctcatgcttttccagataatacagaagcaaaaaggaattgcctttaagacaaattcatatttaaatcctaatgctccatacagtgttggtaaatgatttcaaggaat

SEQ ID NO: 120113 - DNA, 1000 bp, Homo Sapiens
attctaaaataaagaacatttattatcacaagttggataaaaacacacagcttttacaaaaatgatttttgatagaaaaatatgtttgaatacactgtgatatttgtaggaacaccacactattgctgtatctccagctaaagcttcaaggaaactctatttcttataatcaaaatatccactatttaccacaacccgtctttggaaagaagttcatagtgtattctgaacaaaccaaagcatttactcggaagttacattcccatgcctggcagtcacttgtgtatgtttaatacagttacacatgatgtaattacagaatggcggcgctggaagggaccttgtagatcatttagttggcaccctaattttacagagggggaactaaggccagagttgagagatgtcctcaggatacctgagtcccattccagtgttcgttcagtaattcataaggaagtcatcataaaggtttaaaaagaaaacgttaatgactcgctccctttattcttctgtgctgagagtatcattctggtttattcagattaagaaagaaatacactactgaaatggtatgaaactcactgtcaaagggcacttaggtccgttggctccgtttcccacagttccccaaatgaacaggtggtacaagactcaggctttcccctaattacttacttgggtaaagtgacttgggtaaaatgaaagatacagccaggcgctgggctcatgcttgtaatcccagcactttggggggccagggcgggcggatcacgaggtcaggagttcaagaccagcctggccaacatggtgaaaccccgtctctactaaaaatacaaaagttagctgggtgtggtgatgggcaccagctactcaggaggctgaggcaggagaattgtttgaacccgggaagcggaggttgcagtgagccgagattacaccattgcactccagcctgggcgacagagcaagacttacttaagtaagtaagtaagtcagt

SEQ ID NO: 120114 - DNA, 1000 bp, Homo Sapiens
gtgaataaataaaagtttatcattccgtacaaacgcactcattttccacaacagtttttacacgagccgcggtggcccggtggtggcacgtggggggcggccccgcggcggcgttctcgcgggtggcgtcacagcggctccaggtcctcgtccccgcacgcgtactcgtacaggtccacggcgcccagcggtgagggcgcctcgaagaagggcctctgggccagcggggagcgcagcgcactcagcttctgctccacggggctgagctcggcctcgaacctgcaacgaggggatggcgaagacgtggccagcagcgcggagcaggccctgggccgttttccgggaaacacaggctgctcggccgccaacctccagcacgagacagtcccctgagccgaccttgagctccagccgctgagccagcaacgcgctcctggctgaggacgccggctccacgaatgctcccgggggaggggcctgcggtgcaggtgaaaacccacccaggacgggacggagccccgggcgtgagctacacacagaggacctgggcgggcgcgccttttccccaaagcgagctgcacgggacctgtgtttacaactgggtcgtggtgtccacacaggactggagaacaaacaggaccacagtttagacacattctcccaaagcacagaagctcccagtggaggctaccacttccgttctgaccagaacacgcagcagtgcgaggactggacgcgcgccttcccttaaggtctcggcagtgacgtcgggcgctgctccggggaacccagcgcggccacggaccacacagactctcagagatcctgtggggacacctctgctttccaagacgcccccgacagcctggcactgagctccccgcggtcacccccacggacctgagctcccactgccggagcaggcgtggacacggtgaaggcagtcgaccccagcgtgctgctggctgtgccgcagacacaaagccgggcagccgtgggg

SEQ ID NO: 120115 - DNA, 1000 bp, Homo Sapiens
ctttgaaaaaagatgtttattaaacaactttaattgtcataaaatgactaaaatgggttttaaaaattaaggctcttctctttctgtggattgccagaacaatgtaaaaataatatcaatcaaccctgctaaacgttttgttcctaaagttaaatttcatagattcctaaacattttatgattaagataaaaaattggactataaatgacaattcatggccatctgtgctgaacacacattgatcaggtgtacaatattctaattgagtagttaagcaaaaaatattccagttaaagcataaattttaatttcagcattttaaagtcattgtttccccacatggtcatgattttcctaaaattgaaatagtctaatacaggagcgctaaccttgggactctatatactcccaggaggatgactgacttggctggcaattagtttgattatatttttttaaatgctctaaggtaaattatcaaatgattcagaattacatggcatgcagtatccaaaattatggctctgatgcattgagatttacattaagaataagaagtgtcattcacattcattgtacaccccacccctcccacgaaaaagaaaaaagtcactacctattcaagttctagatctggtgcagcattaaggattaaaacttaccactttaccaggccttccccatgtgcaaataaatccctcctgacaagcagtgactatacagtcttcaagaaatattagtacagtcagtctctcatgtgctatctttttacatatcagcggctctaacaagggaacatcttccattcgaggacacaggggcgttcccagagttttagcagggtccgttttggttttggtaactagattcagtttgtcactgctcttgctagaaatgtgtcccatgctatgatttcgcttgtgatctttctcgtggtgcctctccttccggtcatgtagtgaaagtgttgcaaatttgctgaccccagaagcaatggcc

SEQ ID NO: 120116 - DNA, 1000 bp, Homo Sapiens
ggatgttaaaaaggaaatgtttattttcatgttataaggtgattacaaactcctctaaaaaaagcaaagatgaatttaaaatattgatatacatatttatctaaaaagcaaaagagaaaaaaacccctgcaaaatacagggaatcatatcataaaacatttatacacaaaagcttgtatactgcaagactgaactacacaccaaggatcttgttcaaatacaaatgttcctcctcagaaaagtctcttgttggttgattttttttttataaaagtttaaaatatcttaaaaatattttgaagttttaaaaaaatgtcctgatgagccagacatatttctggaaggaggcaagacccacattctcagctttctcttgtgctaaatacagagtcacagttgctagggattgggagattaattgggtaaaaaaaaaaaatgaagccaacatctcaatttgaagtcaaatatataacaggatgctccatccctcggagaacacgccagaacatgtctgtagtgacacccacaagagaacaatgcaaaaatgcttcctattacaacaatatatattctgaggatcagggagagaaggaaagggggagggctgccccctgctttctggactgcccacctctacaagtttggctctctgggtttgttttgtttagtcttgtggttttgtacttcgatttttgcacacagtggtatttaccgtgtcccaggcagcctggcctgggaccacatgggtctgagggagggatgggacctcaggccaccttgaaggattttctcttgggtcctttcctggcttgtgtctgaatcttgggtggggtgggctgcggggagcagttaggtgcctctgcctttagactggctacccagagcatttccccagggagaggggctgtgctgggagatgctggctgggtgggggaccagtgtggcggtacccgggtgatacaagagtgccctgaagtgggctggaggggccatgctgtgc

SEQ ID NO: 120117 - DNA, 1000 bp, Homo Sapiens
aatggtgaaaaacacttttttaaatgggcgaatatcatggatgctcgtagcaacattttcgtaatagccaaaaagtgaaaacagcacaaatgctcatcagctgatgaagggataagcaaacatggcatctccaaacagtggaacgaagtggtgtgatcctgagtggggtctgtgaagcacagcaggcttggccagccacggtaaccacgatgggtccatcgctggatgggaccagaaagtgaatacgccgaggcatagggttgtagcagagaaagaggtttcatcgtagggccaccgaaggaggaaatgggaggaaacgtcaaatccatctccctgaggagtttggggctggggtttttaagggtttgggagtggagactggagtgtggagatggttgattggtcgaagtgtgcagggtggagtcatgggagagggagacgaagctgtattttcatgctgatcacattcctctgtgggggtcttcaaactggttggtgtcggctgttttgctggaattcaggatctgaaaaacatcttaagcaagtcttaaacaaaaatcttatgattctaatgtcagagatcccatctattttaaacaaaagccttgtgattctaaggtcagaaattgtatctataggaacaacggggatgcaaatgttacctagtgctacgtcactgttggttacaaggaagtgggtcaaagtgcaggctgactgatgcttacttacaactatatttctgtccagaattcttcttaatcctgtgaggatggctcaccatatcgtgctcaatcatggtgccaaaatgcctgtcctggggctggacacctagaattcccctccaggccaagtgacggagtctgtgaagcttgagaacgttgccactgtcagcaagctgcggtgctcataccatgagaagagcctgataaaggagcctgtcagaagaccctcaggggaccacctggattcctaccttattcactggccaacaggctatttt

SEQ ID NO: 120118 - DNA, 1000 bp, Homo Sapiens
aaatgtcctacaccaggtcacaagattctttaatttaaaaacaaactacgtacacaggaaattttctaacaatttcttcccttttatgaatacatattctgtaatttttagaatagagaaatatgttttaaccaaaatccccaaaatgtccacttatctcaaaaaaaaaaaaattcaggtgacacgatttaactccttttttagaaacaaagtatctccttgtagacctgtacccaacaggctttgttacacagacatacatatcagttttcatataaactaagaatttaagttctttcagagaacttatgcagaggtattaaaggtttctttttttaagttgtgattaaagagaaaaccctctatcaagtatttttaatacatattttctcatttttatattttaagaacccaacatctgttcaccatgaattaagaattcaaagaaaaaataaaaatgctttaaacaactgtggcaaattctaccgttttaagagtattaccatatttaaaacattttattaatgtgtaaaagggggaaaaaagcactaaggccaaagatttactgacatactgttttcaattagtaaaacaaatcttaaaatattgagagataattattgtccatctttaatttcctttcatgtgaaattcagaagtaacatgtgtccactttaggtaacatttatatataaaaagtttattagaaatataaaaaattttaaattttacactatttccaccttaagattcttttagataaagcagatgtgccttacggttcaaacacaatctgatgtacaaaatcttatttagttcttagcaaaataaatacagaaacacaaatgatgaaatgatggactattaataactttaaaaacccaccgtaaaagtttccaaaaaccaccatttgttgtaggtacctaatatggcagtatttactgtaaaatacatgaaacagctttcactaaaatttaatgtactggcttattagcaagat

SEQ ID NO: 120119 - DNA, 1000 bp, Homo Sapiens
aacggtttaacattttactaaatcaactcacacaaattccaaattgcaaatataattaaggacaacagattctgctttgccttattaaatctttcattttcaaatccatcaataagacaaaaagtaaccaaaaattaggtctgttgcaaattcatgattcttctgaggggggaaaccaaaagaacattagagtaaaaagaacgccactggaggatgtacaataaagcaccacaacacacgcttacaaacggggcttcctggcttcggtgacaggtaaaagacgctgttctccccactgctgtgcgtcaatcagggtttcattaaaataaaactataaaatctcctaggttacactaagtcagacacggtctggaacacagtgcttaacaacagtaatgccaactatcagtgctaacataaaaacattttagaaggtcaaaaacaattaaactggaaaccaaagccttattttccctagatgagcaaaactgaaaatgaaaggggtcccacctcccagtaggagtgaaggggattttttttttcttttaaactgaaggtggggtacatggtgcagctggttctgtcattgctcagcctagttggcgtccagcttggccatttcctgcacatagatgcctatactctcgctgtcaaaaagcacgaagtacaccgttttgatggaagaggacattgtagacacgaagtaactggagatggccttcagaatcagctgagctgctgtctgctttggaaaaccgttcctgccgctgccgatggatggaaatgcaatggatttcagcttcttatcatcagccagggccaagcagtttttcactgtcttttccagaagttcttcacacttgtctgcaccccaaactggactattacagtggatcacaaacttggcaggcaggccatggcctgcgctgacagcagctccagctacttccaagggcccgttctttttccggagttccaggacagcttccacaaactcctt

SEQ ID NO: 120120 - DNA, 1000 bp, Homo Sapiens
ctggtctaaacagctttattgaccagatgagaaatcagcttgggtacagcccatgcctgcagccctttcagtgggtggctccagatagtgttgtcctttcagttgctgggagcggtgaggcccagccctttccccttcctcccaccactattcctaacctggggcctggcaggggtggagtgatgtgatctaagggtccctggagaagggtggagtggaagaggcagggtcttgggttaaagggaagattctgaggtctcagggcaaagggaaaggtgtttggatgaagactgaggcagtgcctacctccctccacatctgaggatcaagcaggtgtggcaagaacagagccctggcctgggctctgctggccgcagcctcaggagccagggttaaggccagagataaatgaagatttgagccattgataaatgccaatatatgtttcaggtatttcattaggatcctcccatcaagcagggaactagatgtttgagaagatcaaacaacatcctgactttggggtccttaagacctgggttattctcctcccagtcctagtgggaggctatccattccacaaagactcaaaggcaagaggcctggagaagcaggggctcctaggaccccgcctgcatgcctctctgcctccaatagtgactccctaagctgggactcctcaggcttactctgagggacaccaggaagctcaacctctttcccacagaggagaatctctgagatccaaaaaacccagccttcccccctcctcatcttggtcttgcttccctctccctccagcctgttgctgctgctcctctgggtgccaagatgtgtcctcaggtgtcttggtcagctgatgatggacacgcagcacaggaggctaagaacagagctctgtggggcgaggtgtggggagaggggcctgctctcacctagacccaaaacactgaggtctcctactggtgatggtgtcagatcccaggcctggggagccctt

SEQ ID NO: 120121 - DNA, 1000 bp, Homo Sapiens
aagtccaggtgtttgtattcgggctagaaaaggcaatgtcccaagtctctgctgcctgtcacagtccttcagccagggctggacctcaaccctgaggagtcacactgagttccagtgaccaccgtggtggtggccatgccactcatggttgctatggccggaaggcctggggcagcctcctccaagccgctcgcaccccgtaggtgcccatccgctgctggcgcaagtgctggccgaagatgaagcagagcaggacagatgtcacgaacagggacagcaacaccgacaccaccgtgactatgatgaccatctggctgtccgacacaggctcatagatctccaacatcttcggggctgagtgtttgtgaaagatgttgccaccgcgagacatcaagtccagcacagccaggcaggagaagttgcggtggccatcctctctgtcagccgtgctgttgaatgtggctgtggcctcctgcggagcaggggctgccttcccgaaggtctcatagtgcagagtctcattgccacggaacaggaagagggtgaggctgtccaggggctccacggtgggcaccctgcactcaatggtgaaggacttgcccacagccaccaaagtgggttgcagtgtcaggatgacctgccttggaggctggtacacgctgacgttggaattcattgactcctgcttcccggagcaggtgaagtggcattggaggaccgtgtcatgggagatgtttgagaccaagtaatgtttccactgagcctgttcgtccagcagaatcttatctagagaggtctccagaccacccacttcaggctggttacaggtggtgctgcagttgacctcgagggaccctttgggctcaaccgccagcttctttggcctcacgtgtacctcgaataccttctcatccgatcctggacagcagatcagggtgaagagggccacagtcagggtcctgtaaccgaaagaggacatctctggcagtctccacgggct

SEQ ID NO: 120122 - DNA, 1000 bp, Homo Sapiens
gagacaggggtcttgctctgttgccaggctggaatgcagtggcaccatcatagctcaccaggagccttgaactcctgggctcaagcaatcctcctgcttcagccttccgagtagttgggacttcaggcaaacaccaccatgcctagccagttttttttatttttaatttttttgtagagacagagtcttgctgtgttgctcaggctggtcttgaactcttgtgctcacatcttcctctcaactcagcctcccaaactgctggggctacaggtgtgagccactgtgcccagcctatatgtgcttcttatgtatatcatagattgtggccttactctatattagttcttgcattgctatttagctttccctacacaggcctcatctctacaactagaccataaactgcttgagggaaagatgtggtcttctatgtctttggatcccttacagtgcttacatagtgcttggtcccaagggagtgctcatagtattcttttttattggcagattctacataacacattgcaaatggtcacaacaatcaagactatatccatagatgtcccagaaataatatctgactatacagagcagcattaccaagccaccaagaagtctgcctagtaatgacaatgataacaacagctaacacttagtaagtgcttgtgatgcatctggcattcttccaggtactttccttaaatgcatgtgacaaccctatgaagttattacaattacagtcctcattttacagatgggggaactgaggcacagagcagtggtataggtgctcaagctggtaaatagcagagctgggatttcaactcgggcagtctggttccagagtcagagcagaagcatggcacctgctgtctctctacagacagcaaaggggttggggagaggatgaactaggaacagccagaaatgacagaaagagctactaaagcttctaccatttttgctgttcatgtgcaatgcttagcaactatgtgccaaa

SEQ ID NO: 120123 - DNA, 1000 bp, Homo Sapiens
aacagagacttgacatttattgtgcaattttatccccaacagaacacgtggcattctagaggtatatgaggtaataaaatcaacactccaattagaacacctgaaataattggctctagtaacaaatgtctcttataattaaaaatattgaatgtttaaaaaacttttataacattttaagtttctaaaagaaatgagcctaacacttaaaaaacaacttactcttctatataaattgttcacaaaaaaatcttgctattctatattacactatgcatttgtagctttattaacatatccctagtgggtattaactctacacagtacaatcaaatagaaattattcatagagaatcaacaagactccaacaataaaaatatcaggatcaatggatttgtcacagtttctccacaagtattcatcatagaaaatagagtaaaggcaactcggccccggtgttaggctgctacatgaagttccagagaggagagacataaaggcaatgcctaaattgcgcagggtcgggctggaacagtgaccttgaaagcttcatgacccacctctagcatgccctgttcccaagaagtgcaagccaggaccctcatggccttggcatgctcttgaacttaaacacagccaaagggatgtgaaagccaaaactacaggaaaaaatcaacagattactgtattttcttacaaaattttcacaacagttctcacagtgacatcataaattaaaactctctcttccaaaccaatcagactcatcagctctaaagctacaaagacacaaacgtgaaaagtgaattgaacgttggctacctgatgccccggtgctatttctaacatctaggagttcccaaagactctcacttcactgagttcaaatgtttgcttttatctccctgcatttttgcactaggaacctatgggacaaatgtgaacaaactcgtgattttaattttaatttacctacttttaaaaaaagttttctggtct

SEQ ID NO: 120124 - DNA, 1000 bp, Homo Sapiens
gattccatctcaaaaaaaaaaaaaaaaagccgggtgcagtggctcatgcctgtaatcccagcactttgggaggccaaagcgggtggatcacgaggtcaggtttttgagactagcctggccaacatagtgaaaccccgtctctattgaaaatagccaggtgtggtggcaggagcctgtaatcccagctactcaggaggctgaggcaggagaatcacttgaacctgggaggcagaggttgcagtgggccgagatcgtgccattgcactccagcccaggcgacagtgcaagactctgtctcaaaaaaaaaaaaaaaaaaaaaaagcacgattatgtgttagctcatttaatcctcataacagcctttgacataggtactactattatcccctgcttgggaaaatcacacacctaatcagtggcagattatagacacgtgccaccacgcccggctcgcgttatgtatttttagtagagtcagggtttcaccatgttgtgcaggctggtctcaaatgcctgacctcaggtgatctacctgccttggcctcccaaagtgctgggattacaggtgagagttactgcacccggcctggagaggtacctttaaaccatataaatatcacattcctcattatgcttgtaatttgtttatgtttgtattcatatattcacatgagctcatggtttatttcttctgatgggttataattaattactactattacttattttgatgctcaaatttgtccagtgggaacccttttaatctgtgtgtcatttcaatgattcatcctcatcaatctttgggcactttttctctctggcacaagaagttccacactcatgtattttctctgccccagccctgaatttagccattttatcaaagagtcttggttcctttagttgatgttatggactgaatattcgtgtccctcaaattcatatgttgaagccttcaccagcaatgtgatggtctttggtgattcagcctttgggaagt

SEQ ID NO: 120125 - DNA, 1000 bp, Homo Sapiens
ataataataggccaggtgcagtggctcacacctgtaatcccagcactttgggaggccgaggctggtgaatcacctgaggtcaggagttcaagaccacgctggccaacatggtggaaaccctgtctccactaaaaatacaaaaattagccgggtgtggtggcaggagcctgtaatcccagctactcgggaggctgaggcaggagaatcgcttgaacccagaaggcagaggttgcaatgagccaagatgatgccactgcactccagcctgggcagcagaatgaaactctgtctcaataataataataataataataataataataataataataagcaactctaatgatatttcaaacaatggtccccttttaggtcacactatcaaatcagagaaagatatacttgactagctgtaaaatgcaatttgaggtctaggtgaatgaacaagtaacctctaaatcataaggctattgttacaaactgaatgtttgtattccccccagaattcaaaggggagacagtatccccaaagtgacagtatcagaaggtggggcctttgggaggtaattaggtgatgagggtagagccctcatgaatggaatttgtgcccttaaagatatacttgagagtttgcatcctctttttctgccatgtgagaacatcaaaagactgacatctggtaagatctggaagcatgccttaccagacaccagatatgctaccacttagatgttggatttcccagcctccggaactgtgagaaataactgctgtttaagtcacctggtctatggtaatttggtatagttgcccaaatggactgtgatggttaatactgagtatcaacttgattgaatagaaggatgcaaagtgttcccgggtacatctgtgagggtgctgccaaaggagatttaacatttgagtcagtggactgggaaaggcagaccatcctcaatctgggtgggcaccatctaatcagctgccagcactgccagaataa

SEQ ID NO: 120126 - DNA, 1000 bp, Homo Sapiens
tcctgtttctcacatcatactctcataaagtccacgactaacttcattttgccacctgcttttttttgtttttcctctatgtaccttgcccatcttgataaataatacaactaaactcttaaatcaaaatcctgggagctatctttaactttttctgacatccaatcaataatcaactcctgttcatcctaactcataaatcctttccaaatccatgcttccttattaccattaccactgttcttattcgggcctaatcattttttttctggactttataaaaggcttgttttccccttgtctctagttgttccttctactcatctatttttcacagatattttcctaaagtatacacctgatcatgtcattcctcctctcaaatgttaactgaacctacgggatacaaaatatcaaaatttcttggcattgcacacacataactgtttatgataaggggcttagcttgttatgcattctccacccaaaatgaaaacaatgtactttaaaaatatcaaataacttacactttcccatgtgtcaagtgccttctcccatctccattttaaaaaatgtaatgctccctctaattgaatgcattctcctatcactattactcctaacaccatgaccaccaccaccacaatgtaagctattagaagcattaaaaaaaaaaagatagtagtaggcttaatcaaagacttgttaagaaaatgagtattcaataaatccaaactcatttgtatttctgtatttgattttatttggtatatgccactatgaccttattttagtagaaatccattacaggatttttaaattatcattagtcaactccacaaagacaataatactgctgtggaagaccgaaggggaaaaaaactgatatatttatttacaattccctatattgtaaacatttaatctatatattgttactaacttataatgagacaaggaaatgatgccctgtatttctattcatattcagcaatagcat

SEQ ID NO: 120127 - DNA, 1000 bp, Homo Sapiens
attttcaaaaagatgatattttgtttattaaaattaaaccacaatctgtttcctgacatacaaataactgagaagttaaaagatgttgcaaccccaacctaatttcacaagtgttgttttcatctccaatcttgaaaggtttgtcacataaacagtttagtgaggtcacagtcatgataatatgcgaatcttaaactgattttgaaaaggatgcatcacaggttcacacttccacatctatacaactttattaacaagtaaaatacatgccagcatgttttatatatgggcaaggacattcctatgataatgaatggcacattatcatctaacaattgacctttatcaaatatatgttttcatatgactatttgaagaattaaataataaacaactaataaatgctaaaataacatttaacagcagttaaaaatataaaagccattcagtttagtatttacgataagctggaatcattcaaatacaactattaaaaaaaatactattcctcttctacaggccaaatggttcattagaaaacactgtggcaataataactggctcctgcccttaccccagttccatccctcaaagggcagtggagctaaggtagttgcttcttggtacagtctacaattatacacaggatgatcatataacttatcctccaaattagaacacttttgagagtacgatgaggcactattaagctgagaaaacaggaataaccaggactcttttgagcaaactaaggatatatattaccttagttaagtatggtatcacattcactatcattactttttgcacttcttgaaatagtacatactagatgaaaaaaattatatttaatgaaggaactctgaatttttctccaattggatattttgaactccacttttcctgttaggagaggttttactggaaataatattgttttagcaggtaaaaatctgtgaacaacttagaaggcatgtctaaaatgaaatatatcttatag

SEQ ID NO: 120128 - DNA, 1000 bp, Homo Sapiens
gatcttttctaattagggagtaattatgactgtgtgatttaaaaaggtaattttgaacctgtaactttactgaattatctctggtatccttttttataatgtatattagagtgactagtaacaaaaactttagcagaatattctttccttactacttttcaagtatatgcattcatttgaagatgttgaagtgagaaattaaatatctgagaactgcaaaggaaaaataatccagaacatggaaattttgttaggataataaacaacatctgcagaggtagataacaggatgaactccttattttttaacaaaatgaattttaagataaatgtctttatctgcagatgcaccttaaaacaagaaaatgaagaaaaaacaaatgttaatatgctgtacaaaaaaaatagagaagaattagaaaggaaagagaaacaatataagaaagaagttgaagcaaaacaacttgaaccaactcttcagtcactagagatgaaatcaaagactgcaagaaatactccaaatcgggtaaatcaatctttggtaaaaattctatattttaaactttatcttatcactgttacttataatatccacttgatttaatatatattgtttaggtctaaaaccataaatgttatctcatttttaaaaatgaatgatgacacttacaggtacaattattaatatttattataaatcttggcatccacataggatattattttattacaaagagcttttgaaaacaataatatgccataatttatacttagtgataacctattgataaaaattttgttccaggtaaaatttttccttgtactttcccctatttcatattgattactgcacctaatattataaagaggaaacagaaattattgcaatcgcaaataatctcatgatattctaagaagagctctataaattttatcttatttactattggcgttttgaaataaaagttttctttcgtattgatgtatttacaccacagaa

SEQ ID NO: 120129 - DNA, 1000 bp, Homo Sapiens
tttttttttttttttttttaatttttatgatttattttacaatgtttcccctcccctcagccgcactagaatgtcagctccatggggtcagggatttaaggcagaagagtgaaaatgcccaacctaaaacacaagatctacaaaagcacctggctacatggggccaggctgagcaactgtatgttgtctacaaagggcctcaacctggcctcacatggccacgtccagcaccaaagacaaatgtacagggaaggggagggtgtgaggtccaacactcacctatagaaacatgtttttagctgctttacttccaaaaagaaaaaaaggcatagctctctttttcaattaaacagaaaactacataattacgttcaaacactcactgaagagcctgcctcatgggaagggcagggctgtcgtgggaagagtcagctgcactttggcaccatctcaggtgcctgtccaagccggatctgaatgggactggtcaagtgaggggtcagtcctgcagtctgcgctcacacctcttctccagatctgccatctcctttaggaccagggccacgctgtaccgcagctcctggaacttggctgtggggacctcaaagcggtatgctgacccatctgaaagcttcagctgcatcaggacgctcggctgcagggagcgagccagggcactggtggagattgctacatccacccgccaccgaaagtcagcaacatgcggcagccaggccccctgctgctgggccacagaatcaaggagggccgctggctcccaaataccacgctggccaagtccccgaccaggtcttgggggatgcagagctcctggagctgggtccctgaaggtgtcaggcttcaggctggtggggggcagacggagggcctgctggagcagtgtgtgcatgcctgccagcaggcacccagctgctctccggcaggttggcgctgaccccaagacgctgcaacagtctcggcagtcctccccctgcaggct

SEQ ID NO: 120130 - DNA, 1000 bp, Homo Sapiens
ctgagaaaaaaacaaagtatctgaaaatactcttcacasttcatcccctgtccctcaatagttcagcctgaatcataaaastatgacattcctggrtgacctctgcataatggccacactgaactgtagttaatagagtaagtgagccaaaaaacccaaagggtagcagtgtgtacacctgctaccataccaatcaatgaatgtaggaaatcccccattccattttttgttggttcactttcaccaacatgtttttcctttactgagcatctaatttagtaaagcctttttccagattatggagacacagatttggataagactcaataagactctctaagagcttagtctgaaaacattgggaaccgtgagaccatcaaggagttcacagttgagacagacacaaacattaaatacaagtgtgaaacagcatcaaaataggaagatacagagaatgaaagtacctacaagtcaaagtgttgaagcaaataggagcctaccagaaagtaagatggggacagaatcgctttttgagacctgaaacgataaaacagtgtgatatgtttagggaatggcaagaagttccatgggattggagagctgcagagtagacacggaaagattggtagggattagatcctgaagagatatgttaagggactgggactttatcttggggatcattatttcccagttatgatcatggaactctttaaaattacaatgtaaagaaataccaataataacacaatatgtttaaaacgtttgattctttagccttcttaaaatctaaatagtataaaaaaatggaatcattttatttaaatcccccaaataccagagatgaagtaaatcatcttttattttcatcttacatttggttatcatgagacatgcaaactcctccaattttaatgagaacagtgtttttgtgtctttttatcacatatccgcttaatattaggtgtaatattgctaagtcggattcgcatatgaggtg

SEQ ID NO: 120131 - DNA, 1000 bp, Homo Sapiens
tcgaaggacatctgcataacgcaagtcacggagatgcctacaaactctatgtaggcagcaatttatatcctggctaacacaatcagccggaacttgtggcacatccctgtggtcccagttactcaggagttgcttgagcccaggaggttgaggatacgagccccaagattgtgccattgcactccagccggggcaacagagcaagattttgtctcaaaagaaataaataaataaagaaaagaaacacaaaatagtttgcccaaaatatttttggggcgttcattttatttttattttattttattttattttattttattttattttattttattttattttattttatttattttattttttgagacggagtctcgctgtgtcaccaggctggagtgcagtggcgcaatcttggctcactgcaatcttggcctcctgggttcaagccattctcctgcctcagcttccccagtagctgggattaaacacgcgctaccacacccagctaatttttgtatttttcatagagatggggtttcaccgtttggccaggatgatcttgctctcctaacctcatgatccaccaatcttgagctcccaaagtgctgggattacaggagtgagtcactgcgcccagcctttttggggcatttattaactgcttttagacaaacaattttgctccctacatataagctcaaatctcgtggactactgaggaagataaacctatgggcctaatattttccgtcccttcttcctccttggtgtccagtgggactagaacgctttccagttgaaagagatcatgaaagcattaggccattatgctgaaaccacacctgatctgattacttcatgcatgccttttcctgactgctaaagaaaaagaattttgtgtcggtctttactttagaatcaccacattcaagttttagagaagacagttacaaaagttgcaaatatttgttttctaatcttggcacaatcctcttgcact

SEQ ID NO: 120132 - DNA, 1000 bp, Homo Sapiens
gatctatgttcactcatttaggtgacataactgggggaaaaatgttggctttgatgacaacagtggagacttcatattggtgctcaattctttatttttgcctcattggtataaatgttatgtctgcatgggttttttctacaatttctttctaagattatttctccccaaagctcagcacttttggaatttttcattctcatccaaaaatggaagcaattttatgtaaatgtctcttggaagcagtgttggaattcatattttgggtagcagaagcagtagttacaagggtagtggtgtcttttgtggtggtggtggcacctgctgcagttgttcatatttggggtgcaggagtagggagggtaggatcagttggagaatttacagggaaaaatggaggtccaggtggatagggtcttggtcgggaaggaggctgtggataacttggggcatcaggatggagtggtggaccttagggttgaggagggggtggtggaaatatccctggaccatagggtgcgggaggaggaggtgggattctccctggaccatagggtggaggaggaggtggtggaacaaatcctgggccaaaaggttgaggaggagccagcggtccaggtggatatggtcccctggggcctctttgactctcaccaggctgtggaaaaaagaagtaaataatttcaaatcagatatttcacagttaaatataagggtgaatgctttctgtggtaagcagaactctgagatggccccaagatttctactccctgctggcacatgctggcctgaccttatcaggtgagcccttttaaaaaaggttctacaatgtcagagacagaagaaatcagagagatttgaagctgcagtaaatgtttttctctgggctttgaatcaagatgccatgttgtggggagggtcatgtggaggtacatggtagactggctatagcagccgagagtggcccctggctcgtaagcagcaggaaagtaggggcttc

SEQ ID NO: 120133 - DNA, 1000 bp, Homo Sapiens
ccggtaaactccacttaagtttataacctgtgccacagcaaagaatggtgatgctatttattcaactacccttttaaaagtatggcaaacatgttcaagaggagctacaaaggacttgggatggtacagggcccaactgtaagctttcttaaaagtgatgccttcaagtaacttcagacatgtaagctgctgcacatccaaaaagtctaagaaaatattccagaaactcagagattacctacagaatgcatttcaggctaattatgaatactgccataaataaagttttaattaggactcgaaaacctttcagtcatagcaattcttgtcaaattctatggggatggtaactgaaataaagtaaggagagtatgtataatatatatttatatatataatatatataatgccatttttccatttccaatgactacaccataaaatgtaagcaaggcttctcaaaaacattgaaacattcaaaatcaaaaccctcattcagaccttcacattccaaaggaaaaataataacagtgcaaaagcccattataatgtcattatttatgacctggccctccatgttacatattggaacaataaagttacgttttaatatgcggtgcccgaaattgtaacaaagaacaatatttataactatcttcaaaacatgaagttgattttcattttaggtaacaattttcagcttttatgaaagacaaggtggcatataaatttcaatggtgaggtgttagaatagttgtctctaactttaccaatttaacttatgagcaatcaatcaatactctatatatcaatgtttaaatataaatgtgtaaatcctaagagctttgttaaaaatttaaaaattgttgaatgaaactgacaaggtatggaaaacgtgtcaacattatttactaagaatattttagatgaagttctgcctaatctatttgccatcaaactctataaatgctgctctagtaggtcctattcaatctgtatt

SEQ ID NO: 120134 - DNA, 1000 bp, Homo Sapiens
gatcaattctccttgaaatacacaatctaccaaaactcatgcaaggagaaacagatcatgtgaaaagacatgtatctattaaataaactaaactactaataaataaacttccaagacagaaagccctagacccagatggattcactagtgtattctaccaaacatttaaagacaaaattgtaccagttttctataatctctttcagaagatagaagcaaagggaacccttcttaattcattaccctaataccaaaactgaatggagagattacaagaaagctaaactacagaccaatatctcccatgaacatagatgcaaaaatcctgaacatattagcaaattgagcacgagaatatataaaaagaattatatgtacatcatgaccaagtgggatttatcccagttatggaaggctagttcaacattcaaaaataaattagcgtaatctagcatattaacaggcttaagaagaaaaatcacatgatcatataaatcaacatagaaaatacatttgacaatacgcaacacccattcacgataaaaactctaattaaactaggaatagaggggaacttcttcaacttgataaagaacatctacaaaaacctacagctaacatttaattgtacaagactcaagacttttccagcaacattagcaaaaagcaaggatatcccttctcaccaacccatttcaacatcatactgaaagacctagctaatgcaaaaaagacaaggaagggaagtaaaagatacacagattgggagaaagaaataaaaacttttttttcactgatgacatgattgtcgatgtagaaaatccaaagagtcaacaactcctgaaacaaatgagtaactatagcaaggttgcagaatataaggttaatatacaaaaatcaactgctttctcatacactagcaatgacaaactggaatttgaaaaatcagaacacaatgctatttacattagttctaaaaatcaaataattaagtataaaa

SEQ ID NO: 120135 - DNA, 1000 bp, Homo Sapiens
tgctcacatgttctttcctgcgttatcccctgattctgtggataaccgtattaccgcctttgagtgagctgataccgctcgccgcagccgaacgaccgagcgcagcgagtcagtgagcgaggaagcggaagagcgcccaatacgcaaaccgcctctccccgcgcgttggccgattcattaatgcagctggcacgacaggtttcccgactggaaagcgggcagtgagcgcaacgcaattaatgtgagttagctcactcattaggcaccccaggctttacactttatgcttccggctcgtatgttgtgtggaattgtgagcggataacaatttcacacaggaaacagctatgaccatgattacgccaagctatttaggtgacactatagaatactcaagctatgcatccaacgcgttgggagctctcccatatggtcgacctgcaggcggccgcgaattcactagtgattgaagcttcaatcctgctgcttggttcgggaggcctctgcattggcccggagcacagcccctggggatggatacggccgctgctggaagaggggcccagctgctgtggtgtcagcgccagtcttggcctcattccgcttggggagtcctgttgaccacgtgccccggggggcgtctgagtatgagctagggtccatggggtctaactcttcatcctttcggcttactgcttgtcatagccacgctctcgatccctgtcagacttgtcgtggccccggtctgacttgtcgtggcccctgtctagtttctcatggctgcggtccgacttgtcatggctccggtccaacttttcttcagcatctgcattactgcttctgagcttcttggccgatttggtaaccacggagttggggtcatgtggggagagccaggatacaaggtctgtgtctgcattccagtagtaagggagcccgcaggaagggtcgaacaccttgtaccagcttggtggtaggccctccaacctggtggcctcgt

SEQ ID NO: 120136 - DNA, 1000 bp, Homo Sapiens
agcttcagggcttccttgccatgtgtttgccatgcctagcctatgcactagcctacttttacagcgggggaaacagcccacagcagagaagtgacttgctgtggtcccaggatgaatttgcgcccagctcagcctgtgcctggggcctccctctgccccatctgggtctcatcactgcctccctcctcacctcttctgggctcctgccagggctcaccttgcaaaggaaccgctggtcttgccaagtctgagggccggtcgtgcaggtgcaggaacagctggtggggggtggattcaggctgtgagagcagctcacgttcatgtgtgtctgggctcctctcggcctctcagcaggccatgagcctctccggggactgcagtgactaatgtgtattttatgagctcttgggacaggacggggtttgtttgcttgtggcattaagaatagatgtgcctggtgggtggggattccgtccttgtttgcctagttctgaaaactgtcttcgtctcctcggtcagaagctgtggaagggctgtcactgggccttggctccggtaccatcgctgggttagccccaagtggtgactgtttttctccttccgtgtcattgacttagaggcgtgttaattatgcactcccaaactgcaggcttcacaacaaggcctccacccagcaggaagcacgcagctcagtggaatctgacaggccctgcctgcctggtgcacgctggcatgtgcgatggggcccttcctggaagggccaagctggcggtgagcccttcagaaaaggtgtctgggctgggtatggcggctcatgcctgcagccccagcgcttggaggggccaaagtgggagggaccattgagcccaggagttcgagaccagcctgggcaacagagtgagacttcatctctacacagaaaaaagtaaaaattagccaggtgtggtttctcacgcctatagcctatagtcccaggtactcaggagactgaggctggagg

SEQ ID NO: 120137 - DNA, 1000 bp, Homo Sapiens
tttttttttttttttttttttttttttttttttttggggtttgatgattttatttctcccttcccataaccagtaaaaaaaaaaaaaaaaattacaatcaggcctggtggtggctcacgcctgtgatctcagcactttgggaggctgaggtgggcggattgcttgatctcaggagtttgagaccagcctgagcaacacagcgagacctggtctcaaaattattatacaatcaatgcaagtacaaagattcaatttttaaaaatcaccagagtacaaagacggccacagcccctgcccgggtttaacttacatatatacagagtgggcggggcaggcatggccacagaggtggtattacaaaatatacaaagtggtttctttctttacatttcatagaagaagcctgcctcatttccaaatgagagcactagaagcacaaatcatgcagaccatttactatataacttatgaaaaatgctgtacagggctgtgactatagatatagagtatttggctctgtttgggaattgatatctacaagggggagggtcaggggaggactgtctgatatcctgacttgctgggatggtggagaagctgggatgggggaggccccaatcttgctgcacggctacacccactcctcctttcctagataaggctggagcgcactggccaggaagaattgggatggctgagggtggggcgggggcagtggtgtaatcaggcaggaggctgtggaaggcacagagaaggcatctaggatgagaaggaacacacccctttgacccatgcacacacgtgtgctcgactgtactcaatgatcccagttcactgggcagtccagttgggtacagctttccccaaaaatctggagctttgcaggcatggagagaggacagctaatcaaagcccatctgtgggaaaatggaaaaatgtttggaaagagattccagtgggtgggtggatggaaagaaggaagttaacccaggaaatcatc

SEQ ID NO: 120138 - DNA, 1000 bp, Homo Sapiens
cttctgtgtcctttgtacaagtttatatgtttcccttaaatcttccaaggcagatggttcttaaccctggctttacatctgagccacttttggggctctctaaacaattagatccccgggccccagcccagatgttatgagttacaagattatggtttagacatcttttactttttccaagctttgtgtgtgaccaagatacatactttactataaggctctaccaaattcatcttaaaattgacagctaaatactgtaattatatagtaggaagaaaattcttttctgaacataggagttcctaggatcacctaaagtagggctcctacctggaattctccagtgactgaaaactataactgggcaggatttgaatttacctacaaaaggagataaatggtttagttggacaaaagatcactcttcagtcttatcctttctgttcctcattgttacaaaagaaagtggatgcttcactcataactaggaatggtactgcctttcccagttctactgaaggggaagttaaagggccacaccctaggctttaggggatagaactgcacccagcagtgtcagcaattcctgaaacaacttggatgaaactgcgtgatgccacacccttgacagggcatttctgagcagagaacagtccttgggagatataaacatgcagtaagctcagctgcgtggcaaggataaacaggaacccatccttagggcatggacagcctaacaagaaaggcccttcagctgttctaatcaccagggtaggcctgggaaataaacatgtaaggagagaaagagataataaattttgaaagaattttgaggtgatgaactatggacccagtcagtctacagctgccgtgaccagtatggtagcaactgtatggctatttaaattaatcaaaacaaaaatgtagtttctagccatatttcagatgctccgtagctacctgtactgaacagtgtagattacagagcatttccatcact

SEQ ID NO: 120139 - DNA, 1000 bp, Homo Sapiens
gaaaaatgtttcaattgaatgggaaaacttcctgtgataaagcctccaatcatcgagtaagtcaatatattttacatataaattttccaacatgttaagcactaagcttttaactaaatagctaaggggaaattgttaccaccaaatgcaacacatatcctgcctttttgaataacacatactacttatcttgattccaattcatcactaaacatcacttgtataatttgatcacagtgatgtcctcagagacagttgtatgcagaatcctataaattgtctcaagctgctatgcctttaatgttcaccttaaatttatttttgttcccctgacttgctgtcagctgtcacattctgtagttcaccccttctgcaagacccttttgatacttgtgatttgttaagaagcagaaatcagataaccaaacttgttagaattcaatgtgaagtaagaataagtagactctgggtagctgctgcctctaccattaaaaattttttaaaaagaagactttttcaattaccacttaatttgaacttgacttacctagactactattagtcgatattagtttaacagagggaaaattgttaataaagtagatgtaatatgtaaacacatacatcatttccttgttctggatctatcaatgatttcatactttgactatatctaaattatctgcttttcccagccttcaaagtggtctttaattcacccctgctttccatgggttaaatttcctacaatgctgagatatttatattggtttcctcctgtcctacgaacttcgtactgatttctgccacaataaatttgattagatgaaaaaaaaaaaagactttttttttttttttttttttttttaagatagggtttcacttctgttgcccaggctggagtgcagtggcacaatcttggctcactgcaaccttggcctcctcaactcaagagattcttgtgcctcagcctcccgagtaactgggactactggtgcgc

SEQ ID NO: 120140 - DNA, 1000 bp, Homo Sapiens
tttttccattgtggatgtcttttattgtgcttagggacccacacgatgctgaatagagattggtcaacagacacggacaacacctgggttgctacacggagcccctccccagaaggcgatggggaagccgctctctgtgctgtcttcaacaaccagaaggcgatggggaaactgtcctctgtgtccctccccagaaggcaatggggaagccgctctctgtgctgactgcagcggccagaaggcgatggggaagccgtcctctgtgtccctccccagaaggcaatggggaagccatcctctgtgctaactgcagctgcctggcagttcacaggctgacggctcccaccgagcattacactccagtccctggagcccacgtccacttgcaggggacagccatgactggccctgcacggcccctgccctcgggcagcacgtaggcaggcccaccgacttgaggcatgaattcaaactatggcatccactttcctgtcagtggcagagggcagtgtgccatggaaagcagcttttggccaacatccttcactcagtattgctaattattcttgtaaacaaaaactgcaatatcagcaagcaggctcgcggatactgcattcttgaatttgttttgattcacaggtaaatatgattttaaaaagccattcgcaaacataaaaactgttgttattgatgtggcacgcacctgagagaaataaaattccagtggggtcccttcctggaggtcacggctcaaggccaggcagagtgttggtctgcaggctgcctgcatgggggccctgcatgcgtcctggggtagtacacgctcctgtgggggccctgcatgcatcctggggtagtacacgctcctgtgggggccctgcatgcgtcctggggtagtacacgctcctgtgggggccctgcatgcgtccggtccggggataggacacgctcctgtgggggccctgcatgcgtcctggggtagtacacgctccagtggggg

SEQ ID NO: 120141 - DNA, 1000 bp, Homo Sapiens
tttttttttttttgcaagctttgtctgctttatttcactacattaagttaagcaataaggcaaaacagtaacctgtcattcataaagatcaaggagtacctctctgtcccaaaagggaccaaaaagggtgtttcttcacaaatatgcatgacacttagctcattatgctgataagcacttcaaacaaaaggaaaggtcagtaggtgaatcaagtaacaaatccaaattaacttagcctaagtttccaaagctgtagtttcaagtgctaatgggatctaactttcctgtggtggtgcatactgactagcattaaaatttttgcacctcatctaatataaaaaaggcaacaaatacaattcctaattcaccagctgcaggtattgaatcatttctacgaacacacagaatactagcttacactaaaacctatcttgaggaaacattaaaccagtggctctattattctgcaagttagtttggcttctgaagaaaaaagtttatgatcaaagtgttttgtgtttctgtgtatgggaatgatgagacccatacttcaacattattactttggggaataaataccagctacctgccataaacgcatgacatgtgtgtagtctatgcaaacgtgtaaacatatgaagctattctctactctatgcccatttcctccactggcaaatatggagcagtgatttcacagtaggctctagcaggtagtgaaataaaaatttgagactctgtggggtcacaaaaaaatgaaactctttctatagtctgcaaatctgtaattacccatccccctgctccaactcctaagaggctaaatgttattaccataatgttagagatgagtattttccttcttacactgcatcacatatattactctgtaggactgtttcataaaattggcttgacctttgtacaattagtacaatttagtgtcttttagagtacaatttagtgtcttttaaaagcttcctaaatatttaaaacattt

SEQ ID NO: 120142 - DNA, 1000 bp, Homo Sapiens
agtgtgattgcatttattcttataaatgtacagagctgtagaagtgcaagccaagagttctatagagtagtacataaacaccatatggtaccactcctgctgggaggtaagcctggatacacccctctcctcaggaaactgtcacctgcagaacacacagcactcagaattaaggcagtttggccctgggcacattggtggtattttggtatgtggccactggccctaaacaactgaccatttctaccctgcctcactgcactgtcccaccaggtccctccagctttttctacaaggtaacaccctcctacatggggtcagccagctcagaaacctcttcttcagggacagttgcagctgaatatgccagagctgattattacaacaacgatgcagagggccttggttttggggtcctgccaccctcacccctagaagctgctaaacacccaggccattctgccctgaccacctccccaacagagatgtaggtctatacttaccttccacagccacctcccagcacacactgggtccctctacctgtgttgctgtctttctttacactgtgctacatttgatccctttccacatgtgcacttcacctctgcagacacaagaaaggcctggacatggtctctgcagatggggaaggggttctggatggagacgttcttgagctctacaagcatttgcacaaagtgctcagaatgttggccactgcatagagctgcagagtcccattccagaacagagtaaccatctgcctctcttcccaagaccccaagctggcatgactctggtctctgtcctatctctctgctgtgatgctcctagctagtagagtaagtcagcccccagatactgtatattcctctcaaccttccatggtttgagaaaaacacaaagatagatgtccatcaggcactcacaggattaccatcgtaaggatggttgtcagacaaataacaaataaggccgtatctttttattagacttg

SEQ ID NO: 120143 - DNA, 1000 bp, Homo Sapiens
agctgaggtatttggatttatatttagaggatgacaaaatgatatttgacaaagtatatatctttacctcaaaaaggaagacatgttaatataatttattataaacttcaacccaatcagtcttaaatgtttttgactctatgactaagcgttaattatggacactgttaccctagaacaccacttgatagccctgcatgaattctgccaaaccaaagacatacctttttaaaataaaaataaagcaaccatttacacttactaagaaaaacaaaaatttacttcaaattgtagtataggcttttcaatcacaaaaagaaagaaaagaacagtgatctgacagtggtcacatcctgtgcaaaaaacttgatacaaaaatgatagcacatggtatctgagctgcttacattacaagaaaaaggaaatacagtagctgaaatatggcactcctgggaatcaacttctaaaccaaatagaatgcctttgaaatgattaaatttatttgtgtattagtaagaaagccccaccaccataaatagtacaatatttaaaaataaaaaaaaatatatctatctaagatagatagtgtatttgtactgttagacttctttaagtgcagaaggtggttcaggttttgcctttttaattaaataactgaccatatgctttataaagtttcactcaatcacaaaagccaatttaaatcaaggaatatgatatcaaagttgcataatttcatttgggactgccagcaggttaaagtcttaagtctttaacattaatgttcatttttagtcaatgaatagttaaaaagttctcaaatcttcatatcctcttgaacttgcccttctaaatgatcctcagactgcaattcctagtttgcaaataaaataatgcaatatgcatcatacttcaagaaaagatgatgatgtcgaactaacatgcttctggatcttttccctgctcctttcaaccttctttataatttctgccactatgc

SEQ ID NO: 120144 - DNA, 1000 bp, Homo Sapiens
ccatgatttcatttctgaatcggttactatttggagaccccaattcctttacacctactctttttatctggtagacaatactttattcggaaatgttccctcctgtaattacaaatcttgttagtcatcctcctcctctccccaggaggattgtgggctttaattaattaatgtggttaaaccgctttgaggtgcctggttgaaaggtgctatataagtgcaaattattattatggctgttgacatcccatggcggcaaagccctcagccctacacatctagagacctgaacaaaggcttcttcatcttcaccttccctgctaggtctgaaatcgctagctcaatggtttaggagcaaatctgttaccatctcaacagcaatcaactaattaatccccattatgtcagcttccgtttccttcttccaagcagtacggtcctgttttatttcacaaatcacacccccatcaactctagacaaaggtcacagtatccctatggcttctcttggcctaaaggaaaaaaaaaaaaaagagaaagtttgaaaaaaaaaaattgttatgaaatgcactaacttcccaccagcaacctaaatggaactttcctccaacagcagtcctctttcatacgtattgcccacagagccactggccttgcaaaccagagatccagaaacacagcggaagtgtgggttagggtcccgcagccctggcttgactaaggatagctatagacaaaaggggagtgtcgctgcactgggtgggaagaggtcatccacagaagcaagcacccctcttcagctttctctatgacccccaagtttcccctgagaaagccagctgccatctgtagccaggaagccctcacaaaggcaggggaccatgatttagatgttttgtgctatatctagcacaccacagtccttaacaaatgcccaatacttccactatgatggtagccattgaaagcagccctgtgggggagacttggcctcgcatag

SEQ ID NO: 120145 - DNA, 1000 bp, Homo Sapiens
tttttttttttttttttttttactggctatttttaatagaaaaacatgtatatatacatatctatatatatttaaggagcaccccttcccccatttgagtatgattactcaatgggaagcagtaatacaaatggaaaaatcttccctcctatattgaggaaagaagataaaataagattaagccatgtttagcactgagtattttaacacatgggttttttgtttgtttgtttgttttgtaataacatactttagattacaatacccaaaattctaaggtcctaatgttaatgatagtatctcaatgtccattttcggtttgtttcaacatgattttctccttttgcctctgtgtcacacgtagtctttcccgctggaaggtgcaggttttggatagggccttggtgttgggtaagaggttgtttttcggggacaggaacagcaaagtagggcacctcccagaaggcagagagaagcagcagcccagccagtgaagagagcctgaccaaattcgtacctggcattgactggggtcatagggtcatagaattcttgaacgattctattgccataccatgctgtggcaactaaaatagccagacctgcaagaagaaatatcgcgcccccaatgacagccatcctcatcttctgcacctcatcgtcttccaagcacttcatacacttcatgccaacggtggccacaaagattgctatcactcccaggaggatgccaaccaccatcaaggcacgggttgcttgcaatgtgctgctcagattcagcaaggagtcaaagactttgcactggatctgcccggtgctctgcgacacgcaggacatccacagcccctcgtacatggcctgggcggtcacgatgttgtcgccggcataggagtaaatcctccactggggcagggcagtgctgacgatggcgccgatccatcccaggaaggcgagaatgaagcccaacagctgcagccccgcgttggccatgactcgctcg

SEQ ID NO: 120146 - DNA, 1000 bp, Homo Sapiens
gatccctaatcccatcaccatggcgatagggtataaacattccacggtgaaggcacaatccacattgtgaggtccaactgctgccatgcagacagttgtgcttttacatgtacaggaaggtcattgaaggctcattgttctgtttcaaaaactgaatcccaagcccacatattattatgctgtgcttcttaaaataagttattagattcgaaataggacacccccaaatatttatatatatatatttaattatagataatataatataaaatatatataatatatatattatagatatttccttttacatcctgcatcctgatattatatatattatatataatataatataaaatatataattatatatattgtataattatatataattatatttatataattatatataattatatttatacaattatatataattatataataatatataatatatactatatacattatatattatataatatataatacatatagtttatattatatataatatataatatatataatatatagtatataatatatactatatattatatataacatatagtttatattatatataatatatagtatataatatatatgatatataatatatcataatataagtacattatattattatatattatattaaacatataatatatatattatatagaatataatattatataatatataataatattaaattaaataataattataatatatattatgatatataatacaatataatatattacatatcttataatatatatgtaatatatatattttatatatgtcatatatattacatatcatatatcatacacaatatataatatatatcatatatgtaatttatatcatatataatatatatcatatataatatattacatatgaaatatattatatatattatatatcacatattatatatcatatatataatgacatatatgtaatatatattatatat

SEQ ID NO: 120147 - DNA, 1000 bp, Homo Sapiens
tttattaatgctgaattcaatcaagataaaaattagatgtaaacatcctaagtgttatggattatgaaaatttgctgtaataaatgttcagtggatgaacatctagtatcttttacccaagtatgattatattttggcctcagaataaataatacagtcttttctagcctctcaacagttgccaaagtataggaaaggataagattatggcatgaaataattcacatgaagcagttcattaggaaatacatactgagcttctataatatatgtacttccaataattgagaacaatacttagagcatgatagcattgtgtgggcttttagccttcatttaacttttctacttcatttaactggtattgctagaaaataattttacaatctttggctaattaatagtctcaaaaatataatgatggattccactggatattctaaataattttctgcttgttctctgcctatatcaagtctacagcaacaaaaacagccatgcaactccccctgcatattaaattcacgttaattttaggaattgaatagatctagtaaatgattaatatgtgctaaccaacttaccattttagggcaatatttgaacatggctaaacaaatagatctttgcagaagataatgagatacctgtctgttctttgctttcttcattgatttggatcactgtacaatcattaatctgaagtctatcttaaagaggagagagggctgctggcaggaagccactttggcaggctcttctatgttgtggtctgtttgattcatccacagagacatggattaagatagaattataggaaatcctattgagtaaaggcttactggattagaaaagggaaaattaatttaagcctctctactccttcaacataaccttttaaaatactaggttacagcatgttcatttcacttgtgattctgatgtaagatactaatggaaatgacatttgaaaagggactgatgtgtgtataaactgtca

SEQ ID NO: 120148 - DNA, 1000 bp, Homo Sapiens
gatagtgtcatttaaagcacaaaagttttaaacttattatagtcaaatttatgcactgtttgttattattacttatgcttttagtggccatatctaagaaactattctctagtccaagactttgcagatttacacctatgttttcttctgatagtgttatggaacactatatatttagctctttgatccattttgagttaattcttttgtatggtaggaagcaggggtccaatttcttttttctgcaggtggctattcatttgttccagcactatttgttgaaaatattatttgtttttccattgcatggccttggtactctgtgggaatcagttgactatggacatacggatttagttttggactctcagttctatcccatgggtctgtgagtgtgtcattatgccactacctcactgtcttaatgaatgtagccttgtagtaagatttgaaagtgagatgtgggattctcccaactttcttttttgttttcaaaattgttttgactattcagggtccctcgaatttccatataaattttagaataatctcgtccatttttgaaaagagaaaagaagcagttgaaatattgatgagattatgttgaatcttcagaaaaaatttggaattgtgattgccttaacaatattaggtcttcaagcccatgacccaggatgtctttttatttatgtagacatttaatttatttcaacaatgttttataattttcagtgtacaaatctttcacttctttggttaaatttatccttatggtggataaagaaaatatgcatacaccatagaatactatgtagccataaaaactaatgaaattatgtctttcccagtaacatgaatgggatgggaagacattatcctaagtgaaataactctgaaacataaaatcaaatacctcatcttccctcttataagtgagagctaaataatgactacacatgttcataaagacggagactccaaaagatgggaaagtaggaat

SEQ ID NO: 120149 - DNA, 1000 bp, Homo Sapiens
acccacctgtgagtcaagagtcagaggaaagatttcagaaaataaggacttctgtgcacagaattcagttattgcttgggaaaataaatgtaatttatattcatgtgttgtacaatctaattacctataaggtaataatgtctggaaaatattcagagaaaggcataaaataaaaagttcagggaagcctcaaggaataacttgatggagaagaaaaagaggcctgaactaaaactttataatgtggatgaatatctagatactctttaatattactctgatccattctattctattctattctattctattctattctattctattctattctattctattctattctattctattctattctattcgtaaatgctggccaaaattagtgtcatgattcgccaataattatttctgcacagtatgaacacactgttctaagactaaagtctctacagggaaatcatgggacataacattagaggcttaggaaagagatgagaataggccttaaaagacatttttaaaaagcagtttaagtaattattaggcaatcattagaaaataatgtaatagtcactgaaggtctttgagtttatatagaattatcactgcaaacttttagacagatctattggcaaagtgtaaggcagtattggagagtttgttaacatgctgtaggaattagtccaaataagaaatctccattagagtagaaatggagagtacaaaaaggtgacatagtagaatctgtacaaaacctatttgaatggaaagaggtaaagagaggaaggagtcaaacggcatcagcccttcttgagtgattagaatatttggatgttattatgggctggattgtgtttcctagaattcctatgtcgaggttctgacccccagtatcctatgaatgtgagagacaggacctttaaagaggtaattaggttaaataggctttcagagagggtcctaattcaatctaactgttatttttataagaaga

SEQ ID NO: 120150 - DNA, 1000 bp, Homo Sapiens
cttcttccaagtccctcatcatccagtcaaacgattggccgcagctcatatatcagtatgcagtcgcacatctggtcatttctccttccatgcaaagcgcacagccaggtgcactggttgaagttctgcccactgggaagatttcccttcaccactgtccttcagggatgtcctagagaggggctacattgccacagctgtccactttcgggtggtgcctacatgttgttcagaaccatctgtgaaccaggccctagtcttcccttcctctgtcaactgatcatagggaactccccatgaggccatcagtgcaggatcggggagagaaggcagagtgtcaggagtggagaccatgggcatttgaacaacttcctcgtgtaacttacttgtgccttcaggacctgctcaagcccaatcatgtatataccatttctattttatgatggaatgctgctgtggatgacacattttagggctggataggtcagaaaacacccagttcatgataggcagttcaggtggtatggtgacttgatgacccatagtcaaacgttcagtttccaccaaagtccagtagcaggccaagagctgtctctcaaaaggagagtagttatcagcagaagatggcagggccttgctccaaaatcctggaggcctccactgtgattcacttatgggggcctgccaaaggatccaaacagcatccctgtctgccactgacatctcaagcaacactggatctgctgggtcatatggcccaagtggcagagcagcttgcacaacagcctggacctgttgcagagccttttcctgttctggactccactcaaaactggcagccttttgagtcactcaataaatgggctggagtaacacactcaaatgaggaatgtattgcctccaaaatccaaattggcgcactaggtattgtgcctctttcttggttgtaggaggggtcaaatgcagcaacttatccttcaccttagaaagaatatcttga

SEQ ID NO: 120151 - DNA, 1000 bp, Homo Sapiens
ttagccaatttattatgaaatagttattagaatgagaaattgatttacctaaatattttcaggatttaaatttcacaaaaagaattaagactctatgagttgtttaggccattggaaagtagtcagaatttaatactttgttttgttatttcctcagttattagctcatttgatccagcagagtgaagaaacataagcagggagaaagagctatgatgttctgtggctggaacttgagatgagctgattgtttaccagactaatttccactaatttctaggcacacattttccatatttctttgcagtggccaataggtggtggtggtgggatggtgggtgatatggttttgctgtgtccccacccaaaatcttacctggaattgtgatccccataatccccatatgtcaagggagagaccaggtagaggtgaccgaattatggggcggtctccccatgttgctcttgtgatagtgggtgaattctcatgagatctgatggttttatgtttggcaagtttctccattggttattcttcttcctgccaccttgtgacgaaggtgccttgcttccccttcgccttccaccatgattgtaagtttcctgaggcctccccagccatgtggaactgtgggtcaattaagcctctttcctttataaattacccagtcttgggtatttccttatagtaatgtgagaacagatcagtacagtggggtttgatgtgcctgaattcatgtcaatggaattgggaggtaagtgttgcacacaacttcgagtcttggcccatggaaccttctcacatgcagttcttcatgctcctatcactggcttaatgtagaggaagatgaagccttagaacatgctgctatcacaagatggcaggacactgcatccctgaatgactacatggagcagagcttcctgctgacttcatttgattattacatgagctagtgtcttagtctattcaggctgctagaacaaattatcatagact

SEQ ID NO: 120152 - DNA, 1000 bp, Homo Sapiens
gtgattctcctgcctcagtctcccgagtagctgggattacaggtgcccgccaccacgcctggctaatttttgtatttttagtagagatgtggtttcaccatgttggccaggctggtctcgaactcctgacctcaggtgatctgcctgcctcgccctcccaaagtgctgggattacaggcatgagccactgggcccggctgttatcttaactatggtggtggatacacaaaccttcgcaggggataaaattatatagaacttaacccgcacacacacatgctagtacaagcaaaattgtggcaatctgaacgctatgggagattgtatcaatatcctggttgtaatactatactacaattttgcaaaatgttatcaatggcggacactggacaaagtgaaaaggaactctgcattgtttcttacatctgtacatgaaaacatcagtgtgacagttaatattaaatgtcaacttgattggattgaaggctgtaaagtcttgtttctgggtgtgtcagtgagggcgttgctagagaagactaacatttgagtcagtggactgggagaggaagacccaccctcaatatgggtgggcatcatccactcagctgccagcgaggctggaacaaaacaggaggaaaaaggtgggataggtgacttgctgagtcttccagctttcatctttctcccctgctggatgcctcctgcccttgacatcagacgccaggttctttggcctttggactctcagacttacaccagcggtttgccgagggctcttgggcctttggccacagactgaaggctctacagtgttggcttccctacttttgaggcctttggactcggactgggccactactagcttccttcctcctcagcttgcaggtggcctataatgggccttcaccttgtgaacatgtgagccaattctccttaacaaacgccccttcatacatacatatatcctattagttctgtccctctggagaaccctaataca

SEQ ID NO: 120153 - DNA, 1000 bp, Homo Sapiens
tcagtagctaagactttaacaatgttagaaaggactccctatgactcgcccagtggagtgtgttgggtaacagaccacgtgctcacagagaggagcactgcattgcacgaactcagagcctctgatgccactcaagcagctgatgaccaggtgcagggtccttcctctgagggacatgtgtcagggagaagcaccctgacagactgcagggcaatgaacaagttcaaagctccactccatctcttcacttgtggatgcttaaacccaatctatactatgtccttcctgcgctctttttatccaactataatatctatcacagtttataattttctctttatgtgtccaagatatgtcttctccacttcaccaaagttccttgcaggaggggctcatgctcttgcctgcccctagggacccagcacctacagcctaccttagagtacatgcaagttcagcatttgttaatgaatgaatgaatggctcccaagtaggaatcatatctgagagttttctcccttgcctaggtattggtcacttgatagttggagctgcagtctacctggatttttatttaaccaagtgagtagatccaagactgtcctatagcttcaatcattcatccagctcatgttctctgagcccttactatgtcctaaagactattacaggaactgaggatgtgaagatgaataggacatgtacacatgagttaacatatcagtcaaatcaaagcctgctcccaacaactctttcttttcagggtcaaccaagcacattgaatcttttacttaacatgcaatatgaaaaaagagagaaattataaatttaagaagatagacaaaagagatggtgaccttgactcaccagtatccaggcccaaagaggagcatgttctctgatttcactccctggagccccaaactttcttcttcttctcaaagcagcagacattaagagagactgctgaatttcttatacatagagacccttgacagcc

SEQ ID NO: 120154 - DNA, 1000 bp, Homo Sapiens
atacatttatcccacatttactagtataagagcgaaaataaggaatgaaagcaaattgttctgcagggtccatttgtgcatgctattatgccccataaagaaaaaaaatctttcataaaggatcgttagttttttcatcttatttacaccattagatgttgctgcagaacattagaatatgcactggtgcaacgtgaatagtctgtctgctatttattgcataatccattttatgcaatgtcaaaaaggaaaacaaccaaaaatacagggtttattttaaattaggagttaagctctgactttctgatgtgctaagttgaagcctggagcattttctcgctaatccagtgtgagtttctaacagtgagccctgttttaagaggaaaaagggtgatgtagtccaattaataagatggccttgttcattttccctgggatgatgaagcattggatggctccctggctcagtgaaaacagggtggaaaaacgttgatccaggaattgtaaattgagcatgcagggctctgcaacagctttcctatacttctttgggaataaggagtagggttcaccatacctgtccagttttctttgcacttgccactgtttctcttaaattgttttgggaggttgctttcattttggcacatttttgacgaaaaatgtgtgccttcaagttcatgcccaggttgtctgtcctgatcacacaaatggccttggaggttccttatgaattctgtatgcaatctgtcactgcattgcttatgtagcagttttgagtgcaaagccttgaaaattaatgaagtgcctttctgttttctgtcccaatctgtgatctggtgcctggagggtattttgactatttttgacttcacttgtttttgttgttgttgttgttgttacatacagtttttttatttttaaattctctctctaatatgttattttgcttttattctgtccattcattcaacaccatgttgacatagtttggatattt

SEQ ID NO: 120155 - DNA, 1000 bp, Homo Sapiens
gaaggctctgcaacaggtccaggctgctgtgcaagctgcttggccacttgggccatacgacccagcagatccaatggtgcttgaggtgtcagtggcagatagggatgctgattggagctgttggcaggcctccataggtgaatcacagtggaggcctctagaatattggagcaaggccctgccatcttcttcagataactactctccttctgagagagagctcttggcctgttactgggctttggtggaaactgaatgtttcaagtcaccatgcgacctgaactatcatgaactgggtactttctgacccatctagccataaagtgggtcatgcacagcagcattccatcatcaaatggaagtggtatatacgtgattgggctcgagcagatcctgaaggcacaagtaagttacatgaggaagtggttcaaatgccctggtctccactcctgccaccctgccttctctcccttagcctgcactgatggcttcgtggggagttccctatgatcagctgacagaggaagagaagactaggacttggttcacagatggttctgcatgatatgcaggcaccacccgaaagtggacagctgcagcactacagcccctttctagggcatccatgaaggacagcagtgaagggaaatcttcccagtgggcagaacttcgagcagtgcacctggttgtgcactttgcatggaaggagaaatggccagctgtgtgattatacactgattcatgggccgtagccaatggtttggctggatcatcagggaattggaagaagcatgattggaaaattggtgacaaagaaatttggggaagagggatgtggatggacctctctgagtggtcaaaaattgtgaagatatttgtatcccatgtgagtgctcaccaacgggggacctcaccagaggagaattttaataatcaagtgaataggatgaccctttctgtggacaccactcagcctctttccccagccacccccgtcatc

SEQ ID NO: 120156 - DNA, 1000 bp, Homo Sapiens
cgccccgccccgccgccctccagccgccgcggccgctccggggtgttccccagatctcttctcaatcaagagatgaaatttgtgccgttttgaaactgaagcctcaagtagtccagacgttttctgacccacatccgagacgttctcggcttcccgccgcaacttccgaatttggggagggggcggaggcgggcgggccaggcctggcgaccgcaccttgagggagcgcgagtcccctcgctgccccgggccgccgcaggcgccggcggcggtcggggacggcgcgacccagcccgggacccccgcccgccccggctcgggcgaagtttgccgcggcccggggtcgccccgtcactcggcctccgtcggggactgggtccccgtaacccgcaagggcgcccgaccccgaccccgcccgccaccgctcactcacctgccctgcgccggacggcgagcccgcgggccggcggggagaggccgggaggcccgggcggggtcggggcgaggcgggtgaggaggcggcggcggagcctaagtcagccgaagcggcggcgaccgcggctgaggcggctgaggcggcggtcgcggcttcaggcgctccagcccgagcgctgcgcgcggcgcgggcccgcccctctgcgccgctaaccaatctagcgccgcgcgccgccgccggccccgcccccgcccaagggcaggctcgcgaaagcgggcgccgcgggccaatgaaagggcggaacatcaaccggcgcggccaatccgagcccggaaagttctctggaaaaagccaactccagtcaaaggggcgggggtggggctgggggcggggcggggacctggcccaatgacgcgcggggcggggccgagcattgggcggggaggaggcggggcctcgaacgggcgggccggtcactagtagtgggcggggtcgtaggcgggacattgagcgggcggggcaagaatcggggcgggggcctaatgaagtgaagcggggagggga

SEQ ID NO: 120157 - DNA, 1000 bp, Homo Sapiens
ggccctggggctgcagagcgacacccctcctggctcccgagtcggggaccttcagaacgtgggatccaggacccaggtagaggctctcactgcccacggaacaaaccagggtccaggtggttagtgaggggctcccgcgcaccaggcaggactgcgtgtctgggccagtgcgctgagccctctcggtcagcctgcgggagcctctcttccctacatctcagcctcactgtcacctcggccctgctgaacaggtgccacccccgcgagcagggtctcaaaccagctcactctggaaggcgctgggagaggctcagaccagctcactctggagggcgccggaaagggccccggcctcactctggagggcgccgggaggggccccggtcagggcaacgctcgcccaaccttaggaggttgaggccgtcgcacccgtgttcccctgggcccccacccctccctccaagaggcccagaagcacaggaggaaggtcacggggcgtccctcctacctgtccctcaggttgtcgatgaagcgcttggtgaaggacttgactttgtccacgagggccccgtagggcttcagcctcagggccacgctctcagaggtgtccagcacaaagaacaggtccacggggcagtctggccgaagatggaggagaggggccttcaagctctcgccccattccccgagtctctgctgggcctgccctcccggccagcccagcgcctgcagcacagagccccgggcccggagaggctctcccgggaaaaggcagcaggacgtccctcggtggggacggtggggagggggtggagtgagagaccccaaaccgctcctgtgcctcgaggggagtcagaaaccttcacaacctcccccgaagggcagggcgtccccggcacgggaccggacaagtgagacctcacgggaaggtttctcgctggattcagaaccagcagcgcacgacttcttctagaacgggggtcgggggggccgtgcgtct

SEQ ID NO: 120158 - DNA, 1000 bp, Homo Sapiens
gaattcatcgtgaagcctggagttttctttgtgggaatgatcttaattacaacttcaatttccttaatacataaataaccacgttaactacttgttcttgcatgagcttttgtaagtgtgtctttcaaggaatctgtccttttcatatgtcattgaatttactgacatatttttttcacaacattttcttctcattattttaatacttgtaatactatcacctctctcattccaaacattggtagtgagaaatctggttagaggtttattaatagtattgatcttaaagaaccgcatttggttgcagtgattatatctattgatttcttctgttttctattttattgattctcctttgatctttattatcttctttctcatgactagttttttaatttgctctttcatctctagattattaaggaagaagctgatgtcattgatttgagatcttccttcttttctataacacataggcctttagcgttataaatttcctttaatttaaatgtcactgttttagtgacattctataaattctgacacatttttcattttcattcaggcaaaaatattttttaaatatgcttctgatttcttttttgattcatgaatgtttacaagcatgttacttagttaatggatgtttggggactttctagagatcttactgttattgattattaatttaattccatgctatggagcaattctctggacccttccttaactctttgaaagcagcatcattggaggagacaaattccttatacggtaatccacaagtcctgggaaagtaggcatgaaagagattgcaatgatggtttccaacttcatccatgtacctacaaaggacatgaactcatccttttttatggctgcctagtattccatggtgtatatgtgccacattttcttaatccagtctatcattgttggacatttgggttggttccaagtctttgctattgtgaatagtgccgcaataaacatacatgtg

SEQ ID NO: 120159 - DNA, 1000 bp, Homo Sapiens
accataagtcacaattttggctaatatcctacttcagtaacgcattcacagcagcttccctcattcaactggtaatagaattactcaaatgtatcaccatcagccattattgaagctgaagcttaaacactgtgtctgtttatattgaatacactgtacaagaacaatgtaggagataaaaataatttcccaaacagaaaatactaattttgtattgttttgtaattgtgttcatctcaatttacaaatttaaaatgattaatcaatactaaagtgttctttagtgtcatctgaaaatcattgtaaaccaaaattctattttttttaaaaaaatgtgaagttctgaacattaaaacaaatctataaccaataatattcgataggtctaaagtggctggagagtaggttgcatttctgccccccagaaggatggatgtcagacagaggcttgcatatggttttgttgtactaacaactgtaaatgcaaaatagatccaaaaaaaattttcagcatatagtattatcaatatgtttgggcagttccagtgcttataattattcctcaattgaaagcattattcagttacctcgcatgccattcattttgaagttcaaagatcataaacaaattttcaaaatcttgccaagtttttttgctgatagggtttaatgggtttcagaatttttctttctttctttcttttgctgctacatattttcagctttattatttcccagtattaaatgcaatgattttctaaattcatggatgtaaaaactatgcaccgaacaagatgcaaatataaaaagtcttatatacccacacctagttcctccaaccatgtctcattgttttttaattccacccaaattgcttagtcaggaattatctcatttcacaaagaaataaatattttaaaacttctgggactccatattattttcacaaaagtctcagagttgaagagacaccaagaaacattgaaattccttcataact

SEQ ID NO: 120160 - DNA, 1000 bp, Homo Sapiens
gccttgtgccattggtgtgggtagcctgtgccccagtgaattaactaactgcagaggaagactttgatggacatgtgtgctgcgcacatcaacatagaaagtggccacaataacaagtcaggattcattctgaggacttaaaaagtcttgggcagaaacacatggcaaaaaaacaaatctgtttatagaattgtgaataaattttaacttcacagagctggacaaccattttgaatttacagacatcctgaagaagtagaaactagaaaactgacactttttttcttaatcgatgtaacaagcattgtcctgatatacagaaaatattcttttggtcttacaggtcagaagtgaagctgagagaggagagcttatttttctaagtttgcacagctaaaatgtttagtatcaattttgatggcaaagcctgatgtattttcttctatttactgctttcttacagaagcacagatttgttcacaaaacctatgcttcttctcttgtttacttttcatattttatattttaaaggtaacacctactcttttgatatgattcttatgtactaatcatggagctatctaaaggtgtcattcctaagtgttaatcatttgttgtttaatgtggtttagaaactgttctgtgtgctttgcccatattacttaaattctgacaacaactctacaaggttggttctattttcccttataagggatgaagaaaccaatggaagggacgagctcaaagttactcagatagtaagtgggaaaactataacaaaatccaggcaatctaattccagaaatgaagcttttgtttactattctgcttctatcacacacaatacgaaatcattggaaataacagagctgaaaagaatcaagagaccaaaaaaaattatgtatttataaaacccaggaaactttgtatgtcaaaaatcatgaaatatttttaaataaattgtcttatgcaaaatcattaagaaaacaagaagtaagga

SEQ ID NO: 120161 - DNA, 1000 bp, Homo Sapiens
cacttgtccacactgactaaattagtgctgactcccctatcacctcagacaaatgcatctgtaagtgtggtgtacagccatccctcccactccaagtcataaacttatttttaaaaataggctgcagaagtgctaaaatgacagtatttggtgaacaactttcaaaataataaaattcattttctcttcctagaaatagcctagggttttcaatgctgattcatttcattagaggttcactgagaacaaggaacaatttctttcaatattaatactctaggtatttactagaagggaaaattggcaagaaactgggatgtgacatagagacactgttatttgaatattaactctttccaataaataaccatcctgattttaatttgctatagaggtctggattagttattattaacaatggttgtgcactggaatcacctggagagcttaacaatatgtattcatgcccaggtctgcatcctgtaccaattaaatcctaatctataaggggagcccaggcatcagattttaaaggatccccaaggtgactgtaagaagctgcccattctgagaaccattgtatgatgctaccagcctttaaagtaccaaaatgtactccacagttaaaacagagaatgttcaacactctttgaagatatcataaaaagattacttttttcttttctttttttttttattttataaatcccaactttaaagcactcccttggcaggtgaagtcactagcatttcccatgtccttatagaaactaattccctggttgtattccttcctccacaaattccctaacctaaattttatcagaatagctaaattacctcttttcaaaccatcgtatataattcaaacaaaaattgtacaataatagtaaaattcctccaaagcccaaacacattccccaagtaatacttgtattactatataagtattagaaaacgaatgtttttctcctttgccattttaatacctaagataata

SEQ ID NO: 120162 - DNA, 1000 bp, Homo Sapiens
tgcatctattttacatcattgtttatgggcacctaatgacctttatacctaatcatcactaacattacaatatttgtcaaagatccaaattattgctggaagtttacataagcaaatctaagtcaaaatattttcttcttagatatgattatatggtttacgtatccctgactgacactatacagagtacatactatgaacaatgggagttaatttgctaaggatttaagaaacaaaatatttctcactgattaggttttagtctctgtagtcatttgaccttacaaactacctttctaaatttactctttttacttattattcatgtacttcactaagcttgaaagacttattattaatcatagaaaatgacccaggcaactctcaatcatttcaaggggttagtctgccaaggttaaggatgtacgcagaaaaagaacacagaaccacaggagaaatctgtgttctgtgcttttttggaagaagggctgaggacctcaatatttaaagggaaaacagtttgtactgggggaaaaaggaagaaagaaaaaaaaatgtgggtagataagaagcaagcggttgcattcttttgagtctttgatcagcattcactgaatacacattttacatgtgaggggagatagaggaatagtcacttacgcatttgtcttgcactcagtgaatctgcatttttacataagataaacataaggcagatacttcaatataatatgcgtttggttgaggtgagcagagggatgactttttgttctgacctttgtcccacacctgtgaagatgagctatcaatttacactatcagaataaaattcaacagaactgttttagggtaaagaacttggggcccacaaggaatttcctggtgggcaaattgtgatggaggtgtatagctttcttatctttgtagctatcttatataggagcaaaacagaaggcaggttttcatgatgcaattcccagcttgacttttccttttggct

SEQ ID NO: 120163 - DNA, 1000 bp, Homo Sapiens
ctgtggacatgtgagtaaatgctgggatgagttaagacttttgaggattgtttggaaggcatgattgtattttgaaatgtgagaaggataggagattttggaggggccatggtggaattatatggtttggatttgtgtccctgcccaaatctcatgttgaattgtaatccctggtgttggagaaggggcctgataggaggtgactggatcatgggggtagatttcctcccttgctgttcttgtgagcgtgagttctcaggagatctggctgtttaaaaatgtatagcccctcctcttcctcactcttcctcctgctctggcaatgtaacatgtgacttcttcctctttgccttctgctatgattgtaagttttctgaggcctcctcaccatgcttcctatacagcctgcagaactgtgagccaattaagcttattttctttataaatgatccagtctcgggtagttctttatagcaatgcgagaatggacgaatacataactattcccttacagctcaagagcctgatatgagtaaccttttatatatcaccttaatccatttctgttataattcagagaacaaggccctgaatactaggtagttttgtagataaaagggacccactatgctctgaacctcatgctcattagtactcagtataggaaaggggacatggtagtattttgtatctcttgatgtgaatgtcagtttgtccccaaatcctctaaagatctgggtgttttcctttcccaatttatgtttgagcaagtaatggttcatggatacccctgagaaattaggggaattgctatagaacattctagccttgtggattgcaagttccttcctcatagagacccagctttgcctttagcccctgtgttctgcattgaaaagtgggataagtctacaaactgggcaaaaacctgtgactttattttctgactcccttgagctttctgagtattagtactagattgctacggctgcctgaacca

SEQ ID NO: 120164 - DNA, 1000 bp, Homo Sapiens
gtttagaagggtttctctaatattgtcttctataatttttatgctattatatcttagagttaagtctttgatccatcttgatctgtccaattatccattggcataattcattattagacgttatgttccttcaggaaatattttatactgtttctttttaattccctagtttaaaaaacaatgttctaagcctattataagacatgagagttgtagtggaaaacaaagtggttatagaagagaaagtcaatgaactgagagtctcagagaatagaataaatttctaagtggcattcatagcaaaaaaagatatatatatatatatatataaagatatatatatctttttttgctatgaatgccacttagaaagatatatatgcctacatatatatctttatcaaagacatatatgcctacatatatatctttatcaaagacgtatatgcctacatatatatctttatctaagacgtatatgcctacatatatatctttaagacgtatatgcctacatatatatctttatctaagacgtatatgcctacatatatatctttaagacgtatatgcctacatatatatctttatctaagacgtatatgcctacatatatatctttatctaagacgtatatgcctacatatatatctttaagacgtatatgcctacatatatatctttaagacgtatatgcctacatatatatctttaagacgtatatgcctacatatatatctttaagacgtatatgcctacatatatatctttaagacgtatatgcctacatatatgtctttatctaagacgtatatgcctacatatatgtctttatctaagacgtatatgcctacatatatgtctttatctaagacgtatatgcctacatatgtctttatcaaagatgtatatgcgtatatatatctttatcaaatatatatgcgtatatatatctttatcaaagatttacgtgtgtatatatctctttatcaaagatata

SEQ ID NO: 120165 - DNA, 1000 bp, Homo Sapiens
agctcatgcctgagtgataaattaagtgacctcagctatttctcttcagtgttgtgaaagttatttttaacagtaggtttcctggtagattctctaaccactcggtatttcacatggcccaacttggttaactcgactggttacggcaaatgctgataaaggcaagatcacaggtttgctccccatgaaaaccaataacttctcggagattaaaaaaaaaatctcccttctgtgaccacaagcagcatcactcatgcaaatgtcggaagagaggaattgggagtgagtgagagtctagcccagtgcaaatatttctactgttgaaaaaagaagtccaggcgcagtgactcacgcctgtcatcccaacattttgggaggccaaggtgggtggatcgcttgagcgagaccaacctagccaacatggtgaaaccttgtctctacaaaaaacagaaaaattagtggggcatggtggccttcgcctgcggtcccagctacttgggaggtggaggtaggaggattacctgagcctggggaggtcaaggttgcagtgagccatgagcgcaccagtgcaatccagcctgggcgacagagtgagactctgtctcaaaaaaaaaaaaaaaaaaaaaaaggaaagaaagaaaagaaaaaagaatctctcaagcatcaagttgtgttcctataggacacatgggtttctgcatgaaagcaactatgtccagtcccctaaacctggtgattttattggaaatacctccagttaatttttacgctaataacctcagcccactcacaccaaggccaaaagttaccagagttatgaacagagccattgcccaccttttccccctaaacgttgttgttggtgcacatctgcagaaagaggccgtttacgtggaatttcaaatctggttgtttagtctacaaggaggggggaaggattctgtctctttaatgtttataacggttggacagagcttgtcgggtgaaggttaattgctct

SEQ ID NO: 120166 - DNA, 1000 bp, Homo Sapiens
cataatgaaacgaaatataatttatttgattttgaagatgctgagaatattaaacataaatctaaaatgaagacgctggagacataaaatggtgtacaatatgaaagaatcaaaatagaacgtaaaaaagaaaaaagactggaaaaaatcagtagcaaacgttttataaattcacttatttgcataataaaataattagttattcactcacacccccagcactcactgaaggtttttgataagccaggctctggtctgagtgtttcgtggtcactgattatcgaatgtaaggagcaattcatctttttctcacctctagatcagaaatttgcacggttctcatgtccaactgcaatatagtgcacggttcagagagacagtcttctggtttcaaaatgtggttatacttgggctttgaaaaaaactccttaactgctaaagatctaggggaaaaggtcaaagcgactgttgagagtcattgcaaacatcttaggcttcaaaacacacacgtgggaccgcggtgagtgctctcccttctgtgtcaccaggatgctaagccactatctggggccctggaaccccagagcagccctcaggcctccacaggccctgggtgcctcccgctctgagaagacccagactctacccaggcatccagagacttcctgagcctgacctggaggcattaaggagcctgccagtcactgggcgcttccctgtgaggtctcattcatgggatctgagcacacggaaaccaacgctcacccctcataacccagaggacaaggggagttgcagcgtgtcttgcctagttttagaatgtatttgatttcaaaatcttttgtggatcttctattaacagtaaatgaacgcggtattcctgctgtaggttactctataataaacgaaaggaactagaagggctgaggtggcctgagtgagtctgagtttcaggagaaatacttgctctgttgctacacaaattcaacacagaaacaga

SEQ ID NO: 120167 - DNA, 1000 bp, Homo Sapiens
tgtcatttcaacttgaattcaataatttttgatcaagtaacttttaaaagttttcaaattttattctgatatttaataattcataaacatgtgctaaaagtgtttatatgcaagcaaacttcgatattccttggctatagtttgtgaatatttgaaacaaatattttcaaggtttatatgactaaagaaaataaaggtaaagaaaaagaaaacagaggtaaggccaatattttagttatatgtacttataagaacacactactttgcttaaaaggaaggattacatcttgttgtctaaatctaaaaaagaggaataatttcttgttgttgaataattttactttcattactctctattgtggtattggcaaattttactttatgacataaaatacatgtttctcttaaagttcttgcaaaaacttgagtgtttcagttttaatatgctataatagatatatatttgttaatatgtcatgctgtcctatagtccttacatttgcagaaactattccctttgaaacttcatcacagtaggaatgagcacacagacataggtgttgatcccttctccaacaaaaaatacaatatataaattgtaatctcagagtaactcctatgattcttcaagatttctctcaagagcctctttatacatgtaggtggatgtggagtcccttttgcagatgacatcattcaacttgttatatattttctatatgtcatgacaattttaatcttggtttttccaaaatgtttatcttcccacaaaccatttctgttattttgagaattgttctacatggatatggttgagaatcagagaacactccatcgatactttatggtaatttgttccaaaattctttggatacagccttgtttcactgttaacatctgtccaaaaacaaatccttatggatctttctaaaaagtttattttgaacccagtatgtgtatcagtgacttatttgtatcagtgatcatttgtatacttgga

SEQ ID NO: 120168 - DNA, 1000 bp, Homo Sapiens
gaaagcttttattatgaatgggtatcaaattttgtgaaataatttatgtatatattaatatgattttatgattatttttctttattatcttgaagtgttggatttacattgattttttaacgttgaaccagacttgcatacctgggataaatcccacttgggtgtgatatatagtttatttataaattgttggatttgacttgctaatattttgtaaatggtgtttgcatctatgtttagaaagatattggcctgtggttttcttgtcatatctttgtctggttttggcatttcagtaatgctggcttcatagaatgagaaagtattctctctatttctatcttttgaaataacatgtagataattgatataatttaatgtttaaatgtttggtagaattcaccagtgaacttgtctgggcttggtgctttctgtctggggagactataaattattaattcaatttgtttgatggatataaaggtctgttcagattgcttcttcctttgtgacatttagctgattgcgccttttgaggaatttctctatttcactttggttatcaaattattggcataaaggtgctcatggtattactttattatcctttgaatgacaatgctgtctatagtagttattccttctttatttctgatattcttgtgtattttctttctctatctctgtcttcttttatttttctgagttagcttaggtatagacttagcaatttcgttaatcttttaaaagaaccagctttcagttttaattttctctattgattttgttttgaaatgcatttacttcttctacaatgtttattatttgttttcttctgcttactttgaacttaatctgctcttcttttctcagtttcctgaggtagaggtctagataattcactttaaatctttcttatattctaatatatgtattcaaggaaatttccctctaaacattggtttcacttcatcccccaaattttgatttgttgtgtttt

SEQ ID NO: 120169 - DNA, 1000 bp, Homo Sapiens
gaactcttaacaataaaaccagttagggttctatcatacagaatgtaacccccaaatatatcaaaaatcttattttaatataaagaatattgtattgacaattgacaatattacagtgagtctagacagtacattaaagtgtgagataaatacatatatatttaacttataaacatgtatgcatacataaattctagctgtgcttaaattaaattaagttaaaattactataaaaatattatttaagattcaagaccaaaagaaagattatcatatagaatcctcatgaactttctgtttaaaaataatgactttttgttgtgccatttacctttttcaatgtaatctcttcactaatataaaataccaaaatcttaatgtctcatatatcctgggaaaggtgctttactactttaaccttttcaatattttgtaatatgattgtcatacctttctacttcacttatagtttacagccttggcgaactgtggggaagaaattagattgtcaagggaaaaaaaatacaaaatgctaaagattaaaggcatcagctctaaatattaaactgtctgattttattcatcttataaaagacttaataattttggtagtcatattttggaagagactttttgctaaagaaagataactctaatatgatataatttggtggaatacatgcatgtttaagggtttgtgggtgtttgtgtttggacatgtgtaagaaaatagcactttatagaagaaggactatgttttatttgattgtcaggcttgtgcaataatctcaaagccaggagtcaaatttaaatttacagaagagcaggcaaagttgctaggttgaagaaattgaatccaagcctattcattcatggtcagggggatggatgtataggtctataaagaccaaaagacagctatatttggctaaaaaaaaagagaaagtgaatatgggtggtaaatattacacttcagaaaataatgtaacatttatattca

SEQ ID NO: 120170 - DNA, 1000 bp, Homo Sapiens
ggatttcattgtcattggagcaattgaaaatggcattgtagtttttaatttttgttcttcacatattcattgttagtatagtcgacccttaaatgaggcaggagttaagagaactgtcccctgcacggtccaaaatctatatgcaacaacttttgactcccctaaaacttaactattaataacctactgttgaccagcagccttaccaataacatagtccgttcttacatattttgtatatgtattatataatgtattcttacaataaaatgactagcaaaaataaaatgttattaaggaagccataaggaaaataaaatatatttactattcatttagtggaagtggatcttcacagatattcatctacacattgagtcttcacattgaataaactgagaagacggtggaagaggtggggttaaacttgccagctcagggatgacagaggttgaagaaaatctgcatataagtggacccacacagtttaaacctgtgctgtttaagggtaaactatttatattaaaatgtgaatgacatatttgttgatcatatgtcttgcaacattgctgaatgtccctattagttctaggagattatttgtaaattctccctacacagagaattatgtcattttcaaagaaagttttatttttatttttatttcccatctgtttgccttttacttctttttgcgtgtgcgttttctcattaaacaagaatcagaaaaggagagaacctttctttcttcttggtcttagtggaaaggcatttagtctttcaccataaagtacttacttctttcttttcattttcctgatgtcagaacttaggttaacgactttacacctttcttctttgttagtgtgtgcaatgatctcagcaatgctttaattatatccaacttattttgagatgttgtattatcatttccactaaattttacatatttatgttttttgtttgtttgaatttcctttgatacttttcttttgatgcg

SEQ ID NO: 120171 - DNA, 1000 bp, Homo Sapiens
cattatttttacccttcgggcacctggcaaccaccattctactctctgtttctctgaatttgatgactcaaggaacattgtatgagtaattgtcttttttgtgactggcttacctcactgagcacactatccttaaggttcatccattttgtatatgtcagatttccttccttttaatatcccattgtaagtgttataccatattttgtgcatgcattcatctgtcaattaacaattggtgggttgcttctacattttggctattattaataatgctacattaatgtggatgtacaaatacccatttgagtccctgctttcaattctttgggttttatttcagaagtggaattggtgaaccataagataattctacatttaggtttttgaggagccaccatattgtttttcatagtggctgccctattttttatatctaccaacaatgagcaagggttctaaattttccacatccttaccaatacttatttcggggttttggttagaggttttttgtttgtttgtttgtttgtttgtttgtttttaatagtagcattctagtggatatgaggtaaatctcatggtgtttttgatttgcatttcccagatgattagggaggttaaacatctttttatgtgttcagagaaaactttacatacattcagagtgaaagcatatgaaattattaagtactaaatgcgatctatgcttccattactgtgaactgaatatatacaatatggttgatgcacattatggcataatcccagaattgctactaacagtgtagtagcagtgcacatccagcaacgtggattgatttttgcaaggatactgagtaaaagctgtgaaatataaaattaaaactattgcatactatcattcatagaaataaaagagctgtatatttgattcaaaaataaatatatgaattaaatattctatcaaacacattaaaattctgcctattgaatgagaagagaatgagactcatgaatt

SEQ ID NO: 120172 - DNA, 1000 bp, Homo Sapiens
ataatccaggaatcaaggtcagcttttagctgtttatttgtaatatgatatcaatcttttagataattcgctagttatattttccccttggactcagcaaatctgttaagtaggcagcacaatctctatctaatagatgagagaatggagtctccaataaataaagtgaagtgatttgccagtagtgatttacgggcacctgtagtctcacctactcgggaggctgaggcaggagaatggcatgaacccaggaggcggagcttgcagtgagctgagatcacaccactgcactccagcccgggagacacagcgagactccgtctcaaaaaaaaaaaaaaaaaggactcaagatcaatattaggaatcttcactgaaaggcaatttaacttcagttttcttttttaacatataaacactgcacagatctaataaaatattctgattcaacacaatgcttttaaacaataaggaattcactcttcttatggcaaatcaaagatacattaaagtcttcatgagaagcttaacatggcagattattcaattcgtcttttaaatattgtcagtcaaggcctaaataccaccaaaatatattcccttcacagtaaatcaccatgattattgccattattgatctgtagaatcagttactaaatgtatcaataggattcaacaccacctatcaggtgtcatacagcttcattctcctgcctataaaccatcaaattttcttctatgggtttacataatttcttcttgaaggaggtactgaaatgttgcatttaattattttaaaaattacatctaaaagtaagcttttataccagggagatcaattgctttattttataactgttcatgttgtaaaactataaatattgtttcctaccacacttattacacaatatgcagcatttagcaaattttaaatcatcttcattaggcatatgatggtatgtgtaatacacacacacatatatatttacatgcataaataaaa

SEQ ID NO: 120173 - DNA, 1000 bp, Homo Sapiens
tcccaagattgaaatcaaacctgggttcaaatactataactatgctttatctctaaaatctataaattaggaataacacttcctctccaattaaatgtcaataacctattactgtagtgaacatcgtgttgtggcactcagcaagcagtcgctgtgaatattattgttgtagcttaaaaatatgagcttggttaatataaatcagtggttctcagcactggctgtacataagtatcacctggggagtttttagtaactatcaatgcctgaaacatatcccagacaaaataaatcagaatatttaggaatgaggctcaggcattggtattttggagaagtttcttggtggttctaataatatactaagaaacactgatataaattattttttaagcctgatagttttcagataaattaacaaagtcaagtcacccaaaaagctgaagatcaggccccagactcatgaagactttactgggcaatagagatctcgtgagaccagcaagatcaccatttaatggctgcacccctgtctctccttcaaaaggtgactttcaagcaaatttgaggtatagttttcattaacatcattatcaaagaagcttgttgcaaaaagattacactgaatcatctggggtagataataattcaaaatattctgttaccttccagcttctagattttgttcaataatttgctgttaaaatttgtttcctccgtattctctcttacatatcatctttccaccaattttccctagatgttgcagagaggttattttttagtttcatgtaattgccccaaaagttccattctctcctgtttaccagattgcctatttcattctgccatgggaaaacttcttttcctgctctgttctcaacagtctgcactccttaaatagcataatctcatctgttgtgcacctgggtgatgcaatctggctcttctagtaggatcatcttccaagctaaactaaaccccaatgatttgcactcct

SEQ ID NO: 120174 - DNA, 1000 bp, Homo Sapiens
aagatatataatttttatatgtgatatataaatatatataaattatatatatttagatttcacacataagtgagatcatgtaatatttttctttttgaatctgagtttttttgcttagcataatgtccagactcatccatgttgtcataaatggcaggattgccatctgttataaggctgaataatacttactatatttcattatatatgatttaattttatatatgtatctatgtacacatctacatgtatatatctatatatctcccagtttctttatccattcattcaccaatcgacactaaggttgtttccatattttggctgctgtgaataatgctgcaatgagcatgggagtgcagatatctctatgaggtgctaatttcatttcttttgcatatatatgcagaacagggattgctgggtcatatagtagatctatttttacttttgtgaggaatctccacactgcattccataatggctgagccaatttacattgttaccaatagtgtacaagttttcccttttctttacgtctaccctttctaacacttatctctggtctttttgataatagccagtctaacaagtgtggggtgatattttctggttttggtttgcatttcccaaataactagtgatgttgagtgctttttcatatatctatcggcaacttttctgtcttatttgaagaaatgtctattcaagttctttgccattttaaaaactggttgtatttttggctattgggttatgtgaatttcttatcttttgaatattaacccctaatcagatatattgtgtgcaaatattttctcccaatcagtaggctgccttttctttctcttttttgctacacagaaaccttttagttagatgtattaccgtttgttaattttagcttttgtcatctgagcttttgttgtgatatccaaaaaaaaattattgctaaggccaatatcaaggagcttttcccatatgattctttgggtcagaa

SEQ ID NO: 120175 - DNA, 1000 bp, Homo Sapiens
taatcacctttaccttcttcttttatgttgctgtataatgagacttgaccttgagctttcaatcgttaatcctcaaagatggccattatttttattactgagtctaacattttgagcattaactatgaaccagaacctattttaaattatttgcatgtattaactctcagttcttaccacaaagatatgtattataactgcccccattttacatatagggaaaaggagacttcataaacatctcagcaacttgccccaaattatgcagaactcagagcctgcacgcttaaccccaataccatacagcattatgtttaccagccagcgcaaactgagcaactatctgtcgatcaaccaacttttattgtagtcctactctgtcctcttccctgggtgatggcagtctcccactccttgcacccatataatgccctcccttaagtggccaaattctccccttgcacagacttcttcctgctgccatgaagcatatataggtctcttctagctagggggaagaaaaacctcgtcataaccctgttaccctctcaagttgtcattcttttcttcttctcacagccacatatccccagacccactgcatcttccagcctttgcactctgtgttccctcacactgtcaccactggccttccatttgtccaccaagtagtttccctggcatcatcgtcagggacctctctgcagtcctgagggtctcttcttggccatccatgatcctgtactcttggggttttcctttgtctccttggtccctgtgtctggctcctttttccccttctgtccctgaatgcgctgttctgcaaagcaaggaggtgtctcagcagcaaggatttaaggcaagacttgcccataacatgagttcccatgatccaagtgcattggagtttggctctaaacagccttaaactgatctttcctgccagaatcccggtttaccctaacagtacaggtgggcagtggaaagtgaataaatgagt

SEQ ID NO: 120176 - DNA, 1000 bp, Homo Sapiens
gacaaatgtatgataagctttggagaacaatttctctctccagtcctcatttttggtaaaaacaaattatgataggactgtgtgggttgttcgtagaataaactttagtcttatacttggcctgattatttgcataaagtgcagcaagaatggttgtttctatgtaggcctttggattggctttgatgaaactctgttccacaaggaatttcagataagatctttaaagctgagcccagccatgggtttgtatcctcaaatacctgtgagttgggtaatcctctcctcttgagggtctaagataaacttggagctgctggacctgttagaaaatgacattctttactgaccacaatttaggaaccttgtgcaggaactgtgtagacaaggtatgaggccagttctccttaaggggcttttattgggtctgcatgtcaagcttcattccttaaagggaaacacaccctttcagtcaaagccttggtaaaataaccagttttttcaattgtgtcctgttgacaaagaaaaatggattcttattgcactgatgcaaatattgccataagttaagagtactcacagatagtttccaaattctagaggaaccaggcagagaaaaacaaacacactccaaattttgtttacagtagtataccttactcaattattaaaggccataaatagttcaaagtaagtttccttcactctgaaaaataaaacaaggatcagcaatattccaagcaagagtcaaaaagttgctttaaccttctgagtgctgtccgtctagttaaatcttgttttgcttgatatttgtgaacatgtaagctcattatgagtcccatacattctctattccaatgttacaatcttcaaagctactaaaaacctgtatttgagaatgcctgttaaattctttaatatagcttgattataaaccatcttttgagaaggaacaaagcaagataacaattgtctgtgaatgacaagatttccaggatat

SEQ ID NO: 120177 - DNA, 1000 bp, Homo Sapiens
agatctgtgctcagtgtcaatgagagttacactggagtcttcaaagccattgcaggatttatgttaacttaaaacacttacagaccagcctttgtttgccatcttttccaggaaggggcccagacctagtcatggaatgtaaatttaatgatgcacttctctccttttttaaatgagttacatccacaaagcatagtctgctttttcattttaacttcctttagttgatcagaaatttaaagatgtttgcaaagctgtttgggtgaagcacccttacaggcagactcttgctaattttgttttgcagcccctcccctttatcacgttcggctgtctctgtactcgttgtccgttgtctttcttatgatctaattaggtcatcacaggaacaaacgcaactgctgtaagcagggtgtgggcggtgaaggtcactcacttttgggcaggacgcactgagctggtgggagggcccctgtggacacatggggcgtgctgaggaccccgttcagtggggccattggagggaaggtaggggcagggcgtcacttcatcacaaaaccaacaaatgaaagcacttgtgtatggattcaactgaaaagtacgatgtgtaaggcacaaatgtctcatttttggtgattgctcatagaacaagtttactctactgtatctttaccttgctgtggtctcccttggaaataacagaagcgccactgaaacctcacccctttggtggggggccaaaaagggaggacatagtctccccactgggggagtggacgtgagatgatacaggggcaagaccattgtgggagcatgaaataaggggtgaggataagccctgggcttctggacacagagtttcaaagtcagagctgaacagaggagactgggaagtgcgggggatgcctgggagggaagggcaggagtggtggaggtggtcccaaggcgtgtgtggcttctgggttcccacctgcatcagcagcaccctgacccccagctc

SEQ ID NO: 120178 - DNA, 1000 bp, Homo Sapiens
tcaagttggtttaacctgaaatggtagcacatagggggttataaattcatcagaggggagacggtacccgccatggcacagcttcgagaccaacggcagcttccctccatgtgttctctcccagccttttgttgcttccttctcattaacccatgcttggaaagaacgggtacctcttccaggtagtgaggaaagaaatatctgatgtaaagaaaacataacccacggagacacggagaaaacataacccacggagacacggatctgctaaaacccacccacagtttacaccactaaaggcttccagccaggggcagtggctcacacctgtaatcccagcaatttgggaggccgaggcaggtggatcacctgaggtcaagagttcgaaaccggcctgaccaatatggtgaatccctgtctctaataaaaacacaaaacatcagccaggcatggtggcgtgcacctgtagtcccagctactcaagagtctgagacaagagaatcgcttgaacctgggaggtgaaggttgcagtgagctgagattgcaccactgtactccagcctgggcgacagagtgagactctgcctcaaaaagaattaaaaaaaaataaaacaatataaatcttccaggtcttccaagaacagaaacatgtcccccggctacacatgtgcagaaccatggacgtcccagagtgagcagacagtcatccccaaatgcaaacatgaatctgttctgtgcagaagctgcctccagctttgaagtagtggtttcttgtgtctcctcatcaaggatttgcagcgacttgggctccagtctcccccaggttcccatatttcccgagttgtctgttttagctgtgctgatgacacgtcggcctctccaaccacggcagtggccttggaggacaattcaaaaccatcaggcccttaaggacaggatgcagatctcagcaggccccgtatcctttctcaccgctgttgccattgttgtttcaacctct

SEQ ID NO: 120179 - DNA, 1000 bp, Homo Sapiens
cacctcttacatcctactctctgccaggtaatttctttcccctaaatctcagcaaaagtgtgctcaaacagaatctaatttcccttgatatttatgcaaataacagaaagaaattccccacagggacagacttgcacctaaaatctgtggaaccagagcaagaatgcaaataaaggctcacatgttgcatttccaattatttaaaagtcattgatggaactaaaagactcaaattatattgctttctctgaccaatacaccttccaagccacctggaaggcaaggatctgatgagaatgtctggattcctgagacttcctctgggggacatggcagtccttgatgagtcagtctcagccaaggcttttgctgctcttctccccctcccaagctccactttgcactctcagaagctctgtacatctgcagatacctcagctgccacgtccagactcttcccactctcccacctgcaagagaaacatcctcaggccaaagaatgatgcatgccacagggcagtctgtccatgagagaacaaacctgaggaatgagaacccaggtcccaggaacaagcttccatcatttgagcagagaattctgggacctgagtacctagatggtcaagaagcaggaaatggggaggacactcctaggcagagagccatgcagggaaggctagagtgggaactgactaaagcatgaagtacagggccaggttcatttggcccaggtttagggggcagcattgcaggacatcatgctgaatgtaagctattatttaatgtagtgtttgatatcaaaatccatttttgtcttgctccctacagtggctaaggaaatcatactctatagagctaatcttttacagattatctcttgatctagttatctagtttttattgtgagtataagtctttatgtattttttatccagcattcaaaaaatcaaaattccagaatattcacttttaataacacattctatttctggcataaaaa

SEQ ID NO: 120180 - DNA, 1000 bp, Homo Sapiens
gtggatcacaagttcaggagatcgagaacttcctggctaacatggtgaaaccctgtctctactaaaaatacaaaaattagccgggcgtggttgtgggcgcctgtagtcccagctactcgggaggccgaggcaggagaatggcatgagcccgggaggtggagcttgcagtgagccgggatcgcgccactgcactctagcctgggcgacagagcaagactccgtctcaaaaataaataaataaaataaaaaataagatgcagagggtctgaataagatggacaaggctgatcttacactgtacatgtatgtctaattctgtgtcctgaaaggaaagagaaaatagaatacactgtcttttcaaaaacaataggagacttacacaattttacaatatattagatcacaaagaaaacctcaataaattctaagaagtgaaatagaaaccacgttctcaagctacaataaaactaaaaataataaggttgaagcaaaaagaaaattaatactcaacctatcggaaatgtaaaaaaaatctcgtttttcctcattttaaagaggaaataaaactacaactgcagcctatctaggaaattacaataatgaggatattatatatcaaaacctcatgggacaaggtcaaagctgaaggcaaaatgatatttatattcttaaatacttcacggaaagcaaaagtgaatccagtattctgcagggaggagggacttagaaaaattaatacaaaacttaaaggaaacagaagggaaaacagaagaattgttagcaaattcatgatttatcactggacacggtggctcactcctgaaatctcagcactttgggaggccaaggcgggtggatcacctgaggtcaggagttcaagacgagcctggccaacctggggaaaccccgtctctactaaaaatacaaaacttagctgggtatagtggtagatgcctgtagtcccaactcctcgggaggctgaggcaggagaatcatttga

SEQ ID NO: 120181 - DNA, 1000 bp, Homo Sapiens
accaaggactaagccctgtggttctccaacattaagaggtcagggagaagaggaggaaccagcaaaggcagccagcaaggcagaagaatttatggtgtcttggaagcaattgaagaaagtacaccagagcagaatgagtaatcagtggtgtcaaatgctgctgatagaataggtcaagtacaatgaagacaagagagaaacattggctttataaaccgggagatcattagtgcccttgagaacagcacgtggttggatggaagatgcactggagtgggtttaagagagaatggggaaaataagggaacatggcaaatacagatgcctcttttaatatttctgcaaaggagagggagaaagcagcaaattttcatagttataatttgatgatgtggaggagagagaggaaaattgctaaaacattgcccttgagtgagcaaggggtggagattggacctcatcacaagtggaggggttggctttagagaggagtatggatagttgtctacatcaacaggcagaaaggtagagtgtatatacctgcatgcagatagatcaccagagaatatatatagtcttagaagtttgtggtagtcctctctgattgcttcatttttctcagagaagtagaacaaaaggtcatcagatgggaagaaattgttgggaatctggaaggaaagcagaagacataaacttcgtgagtgtgggtgagggaatagacagagaattttggtgtgattgccagtggcatttaaggggacacttgacattaggggtcaggaatttaaagtgagaccagccaacatgtttgcatgctttcttctgttttctctagccacagtcagctgtctgggtacaggtgtgaactgggcagtctgatggatttaaccagatgtttttgccaaaaggatatgaccaagtaaaagatgggccagggagttgagggagggaaattaatgacagatgatggaatctacacttctcttttaaaaattttaaa

SEQ ID NO: 120182 - DNA, 1000 bp, Homo Sapiens
aagctaatacttagtttttagtaggctgcatgtaaacaattccaaggtgaccagttgtcctagcctacgtcattccatagtaataaaccaggtaacttcctctataaatccagcaacaaccaaaatctgtgtttactcactgaatcaaaattatatactgaaacacttattaatttggctctcacttaaataaaatgtgcaaatgcctcattccaaagagaaaataactcatggagtgaccttattcacaaatgacagacttaacatcaccatatgaaatttgaagggactgcccaagtactcagtaattggctgcacattgtgaaattaataagaaggctgctggctggagacagttctgtaaattccagcctatatgatgtcctgcctatacctatacaatttggcaagaggactctgtgttggtattgagaactggctcccattttcatggtaaaaacatacctacatggccaggcacagtggctcacgcctgtaatcccagcacttttggagtccatggcgggggggatcacctgaggtcaggagttcgagatgagcctggccaacatggtgaaatcccgtctctactaaaaatacaaaaattagccaggtgtggtggtacacacctgtaatcctagctacttgggaggctgaggcaggagaatggcttgaacctaggagacagaggttgcagtgagccaagatcacaccactgtactccagcctgagtgacaaagcaagactccgtctaaaaaaaaaaagaaaaaaaaaacctacaaataaacatgattttgaaataattgaataagtttgtgccatggtaataagtagctttcttaatgattttgttcttattaaacaaaggggtagctgaaagataggcatagtttttaaatttgtttttctttgagctcaatactcttgccaattcttagaaatcttggaaatgtcaaaatttcaaaactatatttcttcagatgtttagttataattaaat

SEQ ID NO: 120183 - DNA, 1000 bp, Homo Sapiens
ttttttttttttttttttttccacccactgctttcataaataaagttttatttgaacattgccacattcattcatttacatattatgtgggtgcttttgctccaccagagcagagttgagtagttgggacagagaccatatggcctgcaaagtcaaaaatatttgctatctggtcccttacagataaagtttgctgatccctggagtaaatgaatgtattattataaaaatgaaactattttcttattcttttaatgtggaaataaaactttgtaagagatagaagaaatcacaaaggtaaaaactgtcagatttttttggcacaaaaatggaaacaaatatataaaattttaacttaacgtacatattgaggaaatgttgataacaaatgctactgagagttaatagtgttccattataatgtactttttgtaaatgaacattaaaaatagctgcaaattgaaacaaagtgggaaaatacttttaaatggtgtttttttcataaattactggagtaaatataattaagaacattttttggggaggaaaacaacctgtcattatgtatcaagaacctttactatgtacctttttacctagtagttccacttcaggaattcttttcttaggagataatcctaaatatgggagtatgaatattcacagagatattcatcgtggcattactgattgtactgaatatgcggaaacattaaatggaccaacattgtgttgtggttataaaatcttggtgccattggagccggaggcagaaggaaaaaatcagtaatactgatttggtatttatttaaaaatttgatattttgctcttcatggaccttgcataaatttgatttttaaaaatactgtgttaaaatattatcttcattactgaggtttttggtgcccccttaattttgtacctgaggcatgtgcctcactcacctcatcccagtcacatctctgtgtaatgtgttatgtttcttaaataatacatatt

SEQ ID NO: 120184 - DNA, 1000 bp, Homo Sapiens
gatctcactttgttgcctaggctggtattgaagtcctggcctcaagcaatcctcctgccttggcctcccaaagtgctgggattacaggtgtgaaccaccatgtctggccatatattacatttttaaaagaacctatttatttatgtatgtatttatttatttgagacagggtcttgctctgttacccaggctagagtgcaacagcacaatctcagctcactgcaacctccacctcctgggttcaagcaattctcctgcctcagcctcccaagtagctgagattacaggcgtgcaccaccacgaccagctaatttttgtattttcactagagacagggtttcaccatgttggccaggctgatctcaaactcctgacctcaagtgatccacctgcgtcggcctcccaaagtgttgagattacagacgtgagccacagtgcctggcctaaaagaaccaatttaaagttgaaagttggaaataatttctattctgtagttttctattaaaggagctcacagacacaaaaaaagcagcagccactgggtatgatggctcatgcctgtaattccaacactttgagagggcaaggtgggaggatcacttgagcccaggagttcaagaccagcctgggtaacatgacaagactctatctctataaattatttttctttttccagacagagtctcactctgccacccaggctggagtgcaaaggcatgatctcgactcactgcaacctcttccacccaggttcaaccgattctcatgccttagcctcctgggtagctgggattacaggcctgtgccaccacgcccagctaatttttgtatttttagtagagatgggttttgccatgttggtcagactagtctcaaactcctggcctcaagtgatccgcctgcctcggcttctctacaaaaaaatttttttgaaaaaattagccaggcatagtggcccacatagtggtcctagctattcaagaggctgaggtggaaagat

SEQ ID NO: 120185 - DNA, 1000 bp, Homo Sapiens
cactgtaaactggagagaccagagcctcctatcctctaggattgctgtatgtatcagatgaattagttcacgtacacagtaaagcctcagtaacttttagctatgataattattctcactactgctagctgggggatgaattactagaaggcaatatatgactgtatattcaaaactttgaacatattcataattcattttgttataagctgtgataaattcaattcttcagatttttgaagtagaaatgtatatgaaatgtacatataagaagttttatcaatgttatttatatttccaaaagaattaatacaatacaatatcaactgagtgtggactggttaaataattattgtgtgtccaaataacatgatagtacacagttaatgaaagtcaacttcatgtaaaatatttaaggatacatgataaatggaaaaaaaacaagtcttatgaaataaattataccaacttagtttcaatatatgattatactggaaaaatacaagtgacatacaaagagggaggcttgtacacataatattatattaagaaaaaatgccctgtttaatcaatatagagggagaattctgtcacagaattctgcaaactcaaaaaatgtccaaatgaagccctaagccaattctgaaaggacattagttaaaaataacaatacctgtgaaaacgccatgggaatagactgttgaggtgattgttcagaaagcatattgatgtcataccccacaacttttcctcttgtaacattatctgctggcttctcccaggagatattgagagagtacgaagagaggggaaagactgaaggagggatcatgaatacaggtgctatcaatgagaacaataacaataacatcaaaacaatgaatgttgtccctatatatttttaaattgaattcacacattcatttagtttctgaaatacctttaccttttaaaatattctgctttgaaaaagtccaagaatatgctggtatatgtaaaa

SEQ ID NO: 120186 - DNA, 1000 bp, Homo Sapiens
cctaggcactcctactttttgttaatgagaaagaaattcagcttaatactccatctggaccacttatcagacagagtgaaaggcatggattttgcctttaagagaagatatatattcataggctaagccataagatcactcaacctcatattttagcaagttgtcttttctcattgccagttgcattgtacagaaaatcccttcctcatcttaaatttcttaaccaaaagaatgctatgagtctgtagtatcatcatgtactgcatatagggaatggaggaaaaggacaaaatgagttatggtttctggacatatcataattaggaagcagatttggtattttcttctttagaatttcaagtcaaccatttaactaaaccttattgttttatgtgtgatctctgttcagttctaattgaacactaggaccctgatataagccggcttgcccgaaagtgagcctgagccagtaacactttgaaaactgcagaggtgtgtttgttcccatccttatggatgcttgtcattctatggtagagtcaggtttggctcaggaacatcagaaaatataatagagtttcacagttccttacctgaaatttgaaaacctaaaaagtctgaacaaaaaaaaattgctagctcatttcatagcaaaacctaaccttaattgacctgagctacttatagtttttattcttcccacataatgtaactattttacagacttggctgtggaaatattaaagtgtttaagagtttctaccccaaatcctatagtgggtgttatataatatagagtatacataacttctaaaatctaaaatattcttaactccaaaactcatctggccccacatgttttacatgagtgactgtggacctgtaatgataatagctaatatttactagatgcttgcttagtgccagcaccagtctaagcactctgtattaattagctaactcaagatttaattcttctttgcaagaactctatgattat

SEQ ID NO: 120187 - DNA, 1000 bp, Homo Sapiens
aatcaaattaggtttcaaccccagcagtttttaaatttaaatggagagcagataaaagaagagaagattaaaataaagcatacccagtctgaatagctcttatttaaagcaaatattttatttcaatttgtgtatgtgtgcatgcatactaggtgtcaattaaaatatatttgtactttttcttgcagatagaactacaaaaatagaatacacactcaatgggctgaccaactgattcataacatctttattggagaatgaactttctttttctctccaggccccctgtaacccctgtctggtattttctacatgactgattcctctctagagccagaactatggaatcttaagagaatctgtatttctttaaaaagaataaatatcttatgacactctttatttttgtttgcctttcctctcttgtatccagcctgaagggagaaattagaagaaacaaatttattcaaagtaggaagctatagggttttgtttgtttcattctgtttttcatttttacctccactcctgttgacttgggaagggcaattggaggagattattttccagagtgatttgggcagcagagatacaggggcctgagaataggaggcatggcattgcgaacacagagaacagctaggagaagatgggagaggataggagaataaatggtaaggtgggtgttgaaacagttcaactcagaagtggcagtcacagagacatttaaatttacattttaccaagtaccttcttactcagaaccctataataatccctgcaaacgttgtaaaattccaattttcttagaaagaaagaaagaaagaagaaagagaggaagaaagggagaaatgaagaaagagaagaaaagaaaaaagaaagaaaagaaaaagaaagaaagaaagagagagggggagggagggagagggagggagggaaggaaggaagcagagagggaaagagggaaggagggaggaaggaagcagagagggaaagaggg

SEQ ID NO: 120188 - DNA, 1000 bp, Homo Sapiens
  misc_feature (701)..(701): n is a, c, g, or t
gggggggaaatgacttgctcaggatcactcagctcatatgtggcagsgcaggttctgaaacctgggtcttgtttgactgcacagcttgaggtcacccctcatgccacctctscsaccaggcctggcaccccaggcaatcaggatactcactgctatcatggatgggctgggaggtgactggcttcaggggcagggagaaggagccatcactggctctaaggaaggcagagaagcgcagccgcactatactcagatccatcaccttcttcagttctttggcctcttgctccagctcccgctgctcggcctctgggcagtaggtacatgtgtgacccctggcttctccctccctgctccttccatgagcacctcccatgacccacccaccccctgcacccatacccgacccaccccctgcacccatacccgtaaggccctggggcctagagcggagccgctgcctctgaagtttttgtatcatagtccccatcatgttcttcttagtcacatgcaggacacccaggttgttaaatctgagaagagagaatcgggagcctttggccatgcagttctttcttcctgaggcacctttcccattgccaggcacctttcccattgccaggctcagctcagccttacttcctcaaggaagccattggagtttctacttaggcccttgggtttggggccaacctacatcntttccccttggtcagatgctaacatcatatggaggtggctggggcctgggactggcawgamsggcataccagtgggggccaaggcgtaagaagggcacctactgggcagtcatgtccttgggccccacagaaacggcgcagatccccagctccgagcattgcttgcccaccagactgtgggcatgagcacgaggtgggtcactgtgtgttaccaggtccacctcgatcttggctggtccctcgtagttacagatctaggagaggcaagggactgtcacgtcagggccttgggcatgctg

SEQ ID NO: 120189 - DNA, 1000 bp, Homo Sapiens
  misc_feature (352)..(352): n is a, c, g, or t
ttgagcattttttcacgtatggtggtcatttgtgtatcttcttttgagaactgtctattcatgtccttagcccactttttgatgggattgttagcttttttctttctaatttgagttccatgtagatcctggatattagtccttgtatagacgtatagatttgtatagattttctcccactctgcgggttgtctgtttactctgctgactgttccttttgctgggcaaaagctgattagtttaattaagtcccacctatttgtttttgttgcatttgcgataccatcttactcctgcaagaatggccattaccaaaaatgcaaaaaataatagatattggcgtgaatgcggntgaacagggaacacttctacactgctggtgggaatgtaaactagtacaaccactatggaaaacagtgtggagagttcttgaagaactaaaagtagaactaccatttgatccagcaatcccactaatgggtatcttcccagaggaaaagaagtccttatatgaaagacatacttgcacacgcatgtttacagcacaacaattcacaattgcaaaaatgtgaaattagcccaaatggccatctaccaacaagtggataaagaaactacggtataaatatacaatggaatactactcagccatgaaaaggaatgaactgatggcattttcagcaacctggatgggactggagaccattattctaagtgaagtaactcaggaatggaaaaccaagcactgtgtgttttcacttataagtgggagctaagctatgaggatgtaaaggcataagaatgatacaatggactttggggactgagagggaaagagtggtaaaagggtgaggcataaaggagtacaaactggatgcagtgtatactgctcgagtgatgggtgcaccaaagtctcgccaatcaccagtaaagaacttactcatgtaaccaaataccacctgtaccccccccaaaacaggtggaaatttaaaaaaattaa

SEQ ID NO: 120190 - DNA, 1000 bp, Homo Sapiens
aaatatctgaatgggacctgcccagtacatctaattcaaatcaaagaaattttgacaggactttaccaaaaccaagcatgcctgctcaaagaaagctcatgaaaagggttatgaaacaattaatcgaccacaggtaaagcccttccatctgttccacctaccccaccttcagtgtgaaaggcctcggtctcttcagccatctggagaaaaaaagaagaaaaagctaaaaatagtgggctgcaaccaaaatgaaagtatctaaatgttggtaacagtgtttgaagaggaaagggcatgttcctttgagtggtttccaatctaggtctcatggcctgaaatgtctgcctaacttctgatttaaagagaacagaaataaatactggctcttagaaagaaggtgccttgattggggtgagcacataaaacaatggaaaaagtgacaaaagctgcttttgtcttaccttttgttttctcttttcattattaaactgtaaaagtaatgcctgtctgcttaagaaataaattcaagttacagacatatataaagtagggatcaaccacctcccatccctactgccactctagcacctcttcccacattttgatgtgaggaatttattgctttacctttccaaatttgcatgtatgtgtgtttataaaaatgggatcttactattctccaacttgactttttttcttttcactatatactatggaaatttttccatgtccgtgcacatggattcttccttgttcttttgacggctacagaaaactactcttttattgctccataattcatttagtcagtcccccataagaggatcatttaaactatctcaagactttttaccacagaaaaagctgctgtaaacatctctgtacatacatctttgtggtcttgttgtttcttaaataaattcttagaagtgaaggcaaattgctggcttaaagggtgtgtaccttttcagttttgatgacaatttccagactgtcctcc

SEQ ID NO: 120191 - DNA, 1000 bp, Homo Sapiens
acataaacttacaatagtgttgtctgttttcaaaatgagttgtctgaaatggcaggcaaccacagctgcagacagccatctatgatatatatcactcaattcaactttttcttgtaatgtcataacttttatctgcttcttggaatcacttccagtatcactaggggcacttcatatgggtgtcatggtgttattcaggtttatggttttgcactaaacatgatgaaaggtatgcgagaaccaaaacagatcaccttttactacaatacgcaacttactagaaagaaaacctctcatggggagatgactatcatcacatggcgttttaagctcacaacacttgttctcaccacaatagctacaggaggtggctatgaaattattgcagtagtacagtatatattacagtaaattttatgaagttatgaattaatattgcattatgtttgttcacatttctcttgcataacttcataaaatttaatcaagtcattattaacaaaacagtaatcaaaaagttttttactcatgccaatagatcttatggaaatgtttattttatgataaaaaatgttagaaaagaaacttaaatatcttcaagtaagaacttaaatgaatatgtgaaattctaagatggtttccaaaagttcaaagcagcagtcttagaaagtcgttttgcattttattggcaaaattaatggttctgtaaagcagaatgaatatcatcatttacttttttagttttttagtgtgttttttattgtttttgtgggtacgtagtaggtgtatatatttctgagatattttgatacaggcatacaatgcttaagtggaaagtttaatgattgtatatattaaacccaagcaacaaacaagcacttacacatctgtgatagatagaattctaagaggacccaatgtttcctactccctggtattctcaccttgtgtaatccctattctcaacattgagcgtcatcaaaacctgtgaatatcgtgg

SEQ ID NO: 120192 - DNA, 1000 bp, Homo Sapiens
tatcttaccaaaggctgcttttgagtgcatgtgtaaaacatgccagtcactggatatgccaaagaccccagtcctggaacaggccagctgggctctgtctgaagctctgttatggagtgctcaggttccctgaccacatctgctgtcattctctgctgctcttggaatccgctccatacactgcttctcctccccttggacgagatgatcaactctttctaaaagccttaaacttctctagagactgaggaggcaggaactaaagaatttaagatctttttatccagttcaggggcactgtcatcaatgtttctacttagatcgttgagctgtgtttatttttcttacaagatgttctgccttcacagtgctgatcccttggactggaaattgcctgcacttcctctcttcctatgttctcatctggaaaactcctacccattatttttcaaagcctaattcaaaatcactttcatcagtgaaggctcccttaactccaggcaagctagtttctgcctctcagggctattttagcagctattttaaacttcaactccaaacacaatgattataattctgtttgcatgcatttccttcactcatagctaagcttctgaggcatttttgttttcatagcaacccacagtaacagacacatagtaggtattcagtaaaagttgaatgaatgaaaggagataaaagccaaagaaaaaacccttaaaaatcttacatatgtataaagcttccaactatcaatttgcagaaaatagagtgcagagaaagatgtaaaacatcaccccaaaatgcaatcagcaaaacccgaagaggggaaactctttaggacaaacaacccagttttctgaaaaataaattacaaagagggaaaaaaagagagagatggaagatggcctataattaaaaagagacttagaagacataacaatcagttgcaaagcatgtactatatttggatctggtttttaagaaagtaaattatgac

SEQ ID NO: 120193 - DNA, 1000 bp, Homo Sapiens
gatcccatttgtttggatcatttgtaaaggtaacttttcccatttgtaactaaaaagttatctgtggagggatcctttgcagtcactcacaaagtgtgaataaaatatcctgttcccaataatctttataaaaaatttaaaaaattattttatttcattttgtcatgtccttgagtcatagatatatacacacatatgtatatatatacacacatatgtatatatatacacacacatatatatatacacacacacatatatatacacacacacacatatatatatatatatagagagagagagaatctcgctttgtcacccaggctggagtgcagtggtgccatcaggacttgctgttgtctagaattcctgggctcaagcgatcctcccacctcagcctcccgagtgggtgggattacaggagggtgccaccatgcctggctaattttttaatttttaattttgtagaaacagggtttcactatgttgcccagggtggcctttaatttctaatgtaaacatttttaattgtggtaaatacacttataatttaccatcttcaacatttttaagtatacagctcagtggtgttaaatatattcagtgttgtacaaccatcaccaccaaccatctctagaactttttcatcctgcaagactgaaactctgcacccattaaacaataactctcattcttcacaatccccagctcctggcagccaccattctttctgtctctgaatctgactattctagggaactcatgtgagtggaatcttacatttgtctgtttgtgcctggcctatttcacttagcatcaagtgctcacggctcatccacgttgtagcatgggtcagaatttccatctttttggaggcggagtaatgttctgtgtgtttagtcacattttgtgtatccattcatctgttgatggacacatggattactctaccttctggctgttgtcaataatgctgctgcgaacatgggtctacaaacat

SEQ ID NO: 120194 - DNA, 836 bp, Homo Sapiens
ggcaccaccacagctggcccacttctggaagggttcccatctcctgctggccctggtctccacaagctcagtgtcatggagtttggtcctccccatcccactgccaggtcagtgtgatctccgcagggtagaagcccagggcccagcacctcagggtggcctcatggtcagagacgggatggtgggtcacgtgtgtctttgggtgttccgcgcgctgcagcgtctccttcccattcttcaggtatctgcggagccactccacgcacaggccctccaggtaggctctcagctgctccgcctcacgggccgcctcccacttgcgctgggtgatctgagccgccgtgtccgcggcggtccaggagcgcagatcctcgttcagggcgatgtaatccttgccgtcgtaggcgtactggtcatacccgcggaggaggcgcccgtcgggccccacgtcgcagccatacatcctctggatgatgtgagacccggcctcgctctggttgtagtagccgcgcaggttccgcaggctcactcggtcagtctgtgcctggcgcttgtacttctgtgtctcccggtcccaatactccggcccctcctgctccacccacggcgcccgcggctcccctctcggactcgcggcgtcgctgtcgaaccgcacgaactgcgtgtcgtccacgtagcccactgcgatgaagtggggctccccgcggccgggccgggacacagcggtgtagaaatacctcatggagtgggagccggcccaggtctcggtcagggccagggctcccgagagcagcaggatgagggttcggggcgccatgacccgcatctcggcccaa

SEQ ID NO: 120195 - DNA, 942 bp, Homo Sapiens
cggtggattgggaagatggctcccatctcagggtgagggggtttggcagcccctcatgctgtacatggcatgtgtatctctgctctttctccagaaggcaccaccacagctgcccacttctggaaggttctatctcttgctggtctggtctccacaagctcggtgtcctgagtttggtcctcgccatcccgctgccaggtcagtgtgatctccgcagggtagaagcccagggcccagcacctcagggtggcctcatggtcagagatggggtggtgggtcacatgtgtctttggggggtccgcgcgctgcagcgtctccttcccgttctccaggtatctgcggagccactccacgcacaggccctccaggtaggctctcagctgctccgccacacgggccgcctcccacttgcgctgggtgatctgagccgccgtgtccgccgcggtccaggagctcaggtcctcgttcagggcgatgtaatccttgccgtcgtaggcggactggtcatgcccgcggaggaggcgcccgtccggccccacgtcgcagccatacatcacctggatgatgtgagacccggcctcgctctggttgtagtagcggagcgcgatccgcaggttctctcggtaagtctgcgcggaggccttcatgttccgtgtctccccgtcccaatactccggcccctcctgctctatccatggcgcccggggcgccatcctcggactcgcggcgtcgctgtcgaacctcacgaactgggtgtcgtccacgtagcccactgcgatgaagcggggctccccgcggccgggccgggacatggcggtgtagaaatacctcatggagtgggagccggcccaggtctcggtcagggccactgccccccagagcagcaggaggacggttcggggtgccgtgacccgcatctcggccaacttttttgtacaaagt

SEQ ID NO: 120196 - DNA, 512 bp, Homo Sapiens
tcccccagcgggagctggtccttcaggggcttcccctagaaggtgaggcgggacaggtagtcctgcacaccctccagcccgttcacataaagattcaggtgggccacggtctgcgtcagccgcacctcgtaggtgctgctgcggcccttgttattcctcaccaggatgttcagaggttcgtcgcatttgtccaccaccagcaggaccgtgctgccggggcccaggccctggctggcaagggggaccctgtcctgcagcgccacaccgctcgggtggacagccagacgctgctggaaggcgtgcacgccgatcttctgggtgatctgcgccttcagctctgacaccgacatggagctgctcagggacacctggaattcgttgcccgccagcatcttcaccgtcaggtcccagcccatggctgtgggctgtgggctgtgggccacggcacgagctcctgtatttaaggggcaaagatgagccaacttttttgtacaaagttggctttttaaagg

SEQ ID NO: 120197 - DNA, 1187 bp, Homo Sapiens
tggttcagggttctgcacaggacatggtcaaaggaaccaagtcacaccccccatgttagaggatccccctgtagctccgggaagggcttcgaagctggagctgtgtgaggttcccgttgaggcccagtaccttgagttccatgaatccttgggggacagagcacaggagggaaaaggggaatggacttttacaggatggggtgggggacggcctgtcccggggacaccctggttctttctacgcgatggccgctctggcctggggagaagctggcaaggagagggcaccgggtaaggatggggtgctgcatgacccagctctgcccaaggtggccagggagaccactatgaaggctgcctggtgtgagcgggaccctggtggggtgcagagtgaggccctgtgtggggactcagggaggatgctgggcgggagagaggcccagggtgtcccctcacccatgcaggtccctgggtgtgatcatggaggactggtaaggctgctgctgcccagtggcgaccatcaccagggtcaggagtgggggagtcagtgcagagacccagggaagggcccacttcccaggacgtttagtgtcagcaggcggagtctctccacaggctctggctggcgtgcctctacgcctcactctggtaccgcagccgggagaaccggtccctgatggcttggtcactgtctggcccaccctcacccaggcggaccaccctgctgcttgggacaaggtcccgcaccttgtgcttgatcacagagaccaggccgggtgcctctgagtctgccgggcctgtcagaaggatgtaggcggcgtggcggcttggctcaaacaggacggcgtcaaaggcgacaatgtgggtagagacattggccagctccagcagcacgcgcggcagggtggggtggaacatgtacaggctgtgccgggcctccccggtctcctgtctgtcggtgccagttccgttttcaacggctacagccaaggtgtctggtttgtagcggccgaagatgggttttctcaggacatgggctgccttgggtgtccagcgaggcgtcagctcctgcccgtccagcagcacgaaggcctctgagcccacaagaagcacatctgcaccggcgttccctgggacatgcatcaggtagcgcactggctccagagctgccaacttttttgtacaaa

SEQ ID NO: 120198 - DNA, 746 bp, Homo Sapiens
tcacatacacagcacagaggcacgggcacctgggagagggcagcactcatgccttctgaggggatcttggcctcacggtgtaagaagggagaggatggtttctcttctgccctcactagggcctagggaacccaggagcaaatcccaccacgccttccatctctcagccaaggagaagccaccttggtgacgtttagttccaaccattatagtaagtggagaagggattggcctggtcccaaccattacagggtgaagatataaacagtaaaggaagatacagtttggatgaggccacaggaaggagcagatgacaccatcagaagcatatgcagggaaagggcagttactgggcttctgggctgcttagtccctggcttggcaggaagggtagggaagatggatggggctcattgtttggcattgatgatgtccacgaattcgggcttgagggaagcaccacccacaaggaagccatccacatcaggctggctggccagctccttgcaggttgccccagtcacagagcctccataaatgatacgggtgctctgagccaccgcatcagagacgttggacttcagccatcctcggagcttctcgtgtacttcctgggcctgttggggtgttgcagtcttgccagtaccaatggcccacacaggctcataggccaggacgaccttgctccagtccttcacgttatctgcgatgagggtttgtctgctcgccaacttttttgtacaaag

SEQ ID NO: 120199 - DNA, 947 bp, Homo Sapiens
cagggtgaagatataaacagtaaaggaagatacagtttgggatgaggcccacaggaaggagcagatgacaccatcagaagcatatgcagggaaagggcagttactgggcttctgggctgcttagtccctggcttggcaggaagggtagggaagatggatggggctcattgtttggcattgatgatgtccacgaattcgggcttgagggaagcaccacccacaaggaagccatccacatcaggctggctggccagctccttgcaggttgccccagtcacagagcctccataaatgatacgggtgctctgagccaccgcatcagagacgttggacttcagccatcctcggagcttctcgtgtacttcctgggcctgttggggtgttgcagtcttgccagtaccaatggcccacacaggctcataggccaggacgaccttgctccagtccttcacgttatctgcgatgacctttgtctgctcgaaaacaaccttctcagtgatgccagcttccctttcatctagcttctccccaatgcaggcgattactccgagtccctctgccagagcatgggccactttctgcccaatcagctcatctgactccccaaagacatgccttctctctgagtgccccaggaccacccacgtggctccgcagtctttgatcatgccagggctgatctccccagtaaaagccccattagtcactttgtagcagttctgcgcagccacagcaatcttgggatctagcttctgccgggcgaagtcgatataggcagtagggggagcacaaaccacctcggtgtcggccggcaccttggccgcgttcagagtgccgatgagctcccccagactctgcttccgcccgttcatcttccagtttcccccaacgaagaacttcctggagggcgccatggcgctggagccgaggcgctgccaaggtcccaa

SEQ ID NO: 120200 - DNA, 967 bp, Homo Sapiens
acaggtctttgcggatgtccacgtcacacttcatgatggagttgaaggtagtttcgtggatgccacaggactccatgcccaggaaggaaggctggaagagtgcctcagggcagcggaaccgctcattgccaatggtgatgacctggccgtcaggcagctcgtagctcttctccagggaggagctggaagcagccgtggccatctcttgctcgaagtccagggcgacgtagcacagcttctccttaatgtcacgcacgatttcccgctcggccgtggtggtgaagctgtagccgcgctcggtgaggatcttcatgaggtagtcagtcaggtcccggccagccaggtccagacgcaggatggcatgggggagggcatacccctcgtagatgggcacagtgtgggtgaccccgtcaccggagtccatcacgatgccagtggtacggccagaggcgtacagggatagcacagcctggatagcaacgtacatggctggggtgttgaaggtctcaaacatgatctgggtcatcttctcgcggttggccttggggttcaggggggcctcggtcagcagcacggggtgctcctcgggagccacacgcagctcattgtagaaggtgtggtgccagattttctccatgtcgtcccagttggtgacgatgccgtgctcgatggggtacttcagggtgaggatgcctctcttgctctgggcctcgtcgcccacataggaatccttctgacccatgcccaccatcacgccctggtgcctggggcgccccacgatggaggggaagacggcccggggggcatcgtcgcccgcgaagccggccttgcacatgccggagccgttgtcgacgacgagcgcggcgatatcatcatccatggtgagctggcggcgggtgtggacgggcggcggatcggcaaaggcgaggctctgtgctcgcggggcggacgcgccaacttttttgta

SEQ ID NO: 120201 - DNA, 1138 bp, Homo Sapiens
tttagaagcatttgcggtggacgatggaggggcccgactcgtcgtactctgcttgctattccacatctgctggaaggtggacagtgaggtcaggatggagccaccgatccacaccgagtacttgcgctctgggggtgcgatgatcttgatcttcatggtgctgggcgccagggcggtgatctctttctgcatcctgtcggcaatgcccggatacatggtggtgccgcccgacagcaccgtgttggcgtacaggtctttgcggatgtccacgtcacacttcatgatggagttgaaggtggtctcgtggatgccgcaagattccatacccaggaaggaaggctggaacagcgcctccggacaccggaaccgctcattgccaatggtgatgacctggccatcgggcagctcgtagctcttctccagagaagaggaggatgcggcggtggccatctcctgctcgaagtccagggcgacgtagcacagcttctccttgatgtcgcgcacgatttcccgctcggccgtggtggtgaagctgtagcctcgctcagtgaggatcttcatgaggtagtcggtcaggtcccggccagccaggtccagacgcaggatggcgtgggggagggcgtagccctcgtagatgggcaccgtgtgggtgaccccgtctccagagtccatgacaatgccagtggtgcgcccagaggcgtagagggacagcacggcctggatggccacgtacatggccggggtgttgaaggtctcaaacataatctgagtcatcttctctctgttggccttggggttcaggggggcctcggtcagcagcactgggtgctcctccggggccacgcgcagctcgttgtagaaggtgtggtgccagatcttctccatgtcgtcccagttggtgacgatgccatgctcaatggggtacttcagggtcaggatgccacgcttgctctgggcctcgtcgcccacgtaggagtccttctggcccatgcccaccatgacgccctggtgtctggggcgcccgacgatggaaggaaacacggctcggggagcgtcgtccccagcaaaaccagctttgcacatgccggagccattgtcaatgacgcagcgcggcgccaacttttttgtacaaagttgg

SEQ ID NO: 120202 - DNA, 1037 bp, Homo Sapiens
gccatgccaatctcatcttgttttctgcgcaagttaggttttgtcaagaaagggtgtaacgcaactaagtcatagtccgcctagaagcatttgcggtggacgatggaggggccggactcgtcatactcctgcttgctgatccacatctgctggaaggtggacagcgaggccaggatggagccgccgatccacacggagtacttgcgctcaggaggagcaatgatcttgatcttcattgtgctgggtgccagggcagtgatctccttctgcatcctgtcggcaatgccagggtacatggtggtgccgccagacagcactgtgttggcgtacaggtctttgcggatgtccacgtcacacttcatgatggagttgaaggtagtttcgtggatgccacaggactccatgcccaggaaggaaggctggaagagtgcctcagggcagcggaaccgctcattgccaatggtgatgacctggccgtcaggcagctcgtagctcttctccagggaggagctggaagcagccgtggccatctcttgctcgaagtccagggcgacgtagcacagcttctccttaatgtcacgcacgatttcccgctcggccgtggtggtgaagctgtagccgcgctcggtgaggatcttcatgaggtagtcagtcaggtcccggccagccaggtccagacgcaggatggcatgggggagggcatacccctcgtagatgggcacagtgtgggtgaccccgtcaccggagtccatcacgatgccagtggtacggccagaggcgtacagggatagcacagcctggatagcaacgtacatggctggggtgttgaaggtctcaaacatgatctgggtcatcttctcgcggttggccttggggttcaggggggcctcggtcagcagcacggggtgctcctcgggagccacacgcagctcattgtagaaggtgtggtgccagattttctccatgtcgtcccagttggtgacgatgccgtgctcgatggggtacttcagggtgaggccaacttttttgtacaaagt

SEQ ID NO: 120203 - DNA, 681 bp, Homo Sapiens
  misc_feature (241)..(280): n is a, c, g, or t
tatcacttctcctgtggggactggggagatgactgggccattctctttagagtgaagtggggtggcttttaggatggcaagggacttcctgtatcaacgcatttcatatttggaaagatttttaaaaaaacaacaatgtgcaatcaaagtcctcggccacattgtgaactttgggggatgctcgctccaaccgactgctgtcaccttcaccgttccagtttttaaatcctgagtcaagccnnnnnnnnnnnnnnnnnnnnnnnnnnnnnnnnnnnnnnnntaaagccatgccaatctcatcttgttttttgcgcaagttaggttttgtcaagaaagggtgtaacgcaactaagtcatagtccgcctagaagcatttgcggtggacgatggaggggccggactcgtcatactcctgcttgttgatccacatctgctggaaggtggacagcgaggccaggatggagccgccgatccacacggagtacttgcgctcaggaggagcaatgatcttgatcttcattgtgctgggtgccagggcagtgatctccttctgcatcctgtcggcaatgccagggtacatggtggtgccgccagacagcactgtgttggcgtacaggtctttgcggatgtccacgtcacacttcacggtgatggagttgaagccaacttttttgtacaaag

SEQ ID NO: 120204 - DNA, 937 bp, Homo Sapiens
gccaactttgtacaaaaaagttgggccaactctcgcactctgttcttccgccgctccgccgtcgcgtttctctgccggtcgcaatggaagaagagatcgccgcgctggtcattgacaatggctccggcatgtgcaaagctggttttgctggggacgacgctccccgagccgtgtttccttccatcgtcgggcgccccagacaccagggcgtcatggtgggcatgggccagaaggactcctacgtgggcgacgaggcccagagcaagcgtggcatcctgaccctgaagtaccccattgagcatggcatcgtcaccaactgggacgacatggagaagatctggcaccacaccttctacaacgagctgcgcgtggccccggaggagcacccagtgctgctgaccgaggcccccctgaaccccaaggccaacagagagaagatgactcagattatgtttgagaccttcaacaccccggccatgtacgtggccatccaggccgtgctgtccctctacgcctctgggcgcaccactggcattgtcatggactctggagacggggtcacccacacggtgcccatctacgagggctacgccctcccccacgccatcctgcgtctggacctggctggccgggacctgaccgactacctcatgaagatcctcactgagcgaggctacagcttcaccaccacggccgagcgggaaatcgtgcgcgacatcaaggagaagctgtgctacgtcgccctggacttcgagcaggagatggccaccgccgcatcctcctcttctctggagaagagctacgagctgcccgatggccaggtcatcaccattggcaatgagcggttccggtgtccggaggcgctgttccagccttccttcctgggtatggaatcttgcggcatccacgagaccaccttcaactccatcatgaagtg

SEQ ID NO: 120205 - DNA, 903 bp, Homo Sapiens
tcagacagggtgcgcccatcttccagttgctttccggcaaagatcaactctgctggtcaggaggaatgccttccttgtcttggatctttgctttgacgttctcgatagtgtcactgggctcgacctcaagggtgatggtcttgccagtgagtgtcttcacgaagatttgcatcccacctctgagacggagtaccaggtgcaaggtggactctttctggatgttgtagtcagacagggtacgaccatcttccagctgttttccggcaaagatcaacctctgctgatcaggaggaatgccttccttatcttggatctttgccttgacattctcgatggtgtcactgggctccacctcgagggtgatggtcttaccagtcagggtcttcacgaagatctgcatcccacctctgagacggagcaccaggtgcagggtagactctttctggatgttgtagtcagacagggtgcgcccatcttccagctgctttccggcaaagatcaacctctgctggtcaggaggaatgccttccttgtcctggatctttgctttgacgttctcgatggtgtcactgggctccacctcaagggtgatggtcttgccagtgagtgtcttcacgaagatttgcatcccacctctgagacggagcaccaggtgcagggtggactctttctggatgttgtagtcagacagggtgcgcccatcttccagctgttttccagcaaagatcagcctctgctggtcaggagggatgccttccttatcttggatctttgccttgacattctcgatggtgtcactgggctcaacctcgagggtgatggtcttaccagtcagagtcttcacgaagatctgcattgtcaagtgacgatcacagcgatccacaaacaagaaccgcgacccaa

SEQ ID NO: 120206 - DNA, 875 bp, Homo Sapiens
aaacttgtaatttctaaacttaagttggggcaatggctattgtgcagagtaatgccatcattgggcactgcgaatgccatgactgaagaattaacagccacccctcaggcgcaggaccagggtgcaggggtcgactctttctggatgttgtagtcagaaagagtgcggccatcttccagctgcttgcctgcaaagatgagcctctgctggtcgggggggatgccttctttatcttggatcttggccttcacatttttcgatggtgtcactgggctccacctccagagtgatggtcttgccggtcagggtcttcacgaagatctgcataccacctctcagacgcaggaccaggtgcagggtcgactccttctggatgttgtagtcagaaagagtgcggccatcttccagctgcttgcctgcaaagatgagcctctgctggtcgggagggatgccttctttatcctggatcttggccttcacattttcgatggtgtcactgggctccacttccagggtgatggtcttgccggtcagggtcttcacgaagatctgcataccacctctcagacgcaggaccaggtgcagggtcgactccttctggatgttgtagtcagaaagagtacggccatcttccagctgcttgcctgcaaagatgagcctctgctggtcggggggaatgccttccttatcctggatcttggccttcacattttcgatggtgtcactgggctccacctcaagggtgatggtcttgccggtaagggttttcacgaagatctgcattttgacctgttagcggataccaggatcctgccaatcaccaaccacgtccacccacagggacacaaacaagctcccaacccaacttttttgta

SEQ ID NO: 120207 - DNA, 752 bp, Homo Sapiens
taaaaacttgccacatgcaataaaagaaaaccaaagtggtctcacaaaacattctccttatccttctgaaggttttacgatgcattgttatcattaaccagtcttttactattaaacttaaatggccaattgaaacaaacagttctgagaccgttcttccaccactgattaagagtggggtggcaggtattagggataatattcatttagccttctgagctttctgggcagacttggtgaccttgccagctccagcagccttcttgtccactgctttgatgacacccaccgcaactgtctgtctcatatcacgaacagcaaagcgacccaaaggtggatagtttgagaagctctcaacacacatgggcttgccaggaaccatatcaacaatggcagcatcaccagacttcaagaatttagggccatcttccagctttttaccagaacggcgatcaatcttttccttcagctcagcaaacttgcatgcaatgtgagccgtgtggcaatccaatacaggggcatagccggcgcttatttggcctggatggttcaggataatcacctgagcagtgaagccagctgcttccattggtgggtcatttttgctgtcaccagcaacgttgccacgacgaacatccttgacagacacattcttgacattgaagcccacattgtccccaggaagagcttcactcaaagcttcatggggcatttcgacccaacttttttgtacaaagttggcttttttaaag

SEQ ID NO: 120208 - DNA, 1278 bp, Homo Sapiens
tcaacaatggcagcatcaccagacttcaagaatttagggccatctcccagctttttaccagaacggcgatcaatcttttcttcagctcagcaaacttgcatgcaatgtgagccgtgtggcaatccaatacaggggcatagccggcgcttatttggcctggatggttcaggataatcactgagcagtgaagccagctgcttccattggtgggtcatttttgctgtcaccagcaacgttgccacgacgaacatccttgacagacacattcttgacattgaagcccacattgtccccaggaagagcttcactcaaagcttcatggtgcatttcgacagattttacttccgttgtaacgttgactggagcaaaggtgaccaccataccgggtttgagaacaccagtctccactcggccaacaggaacagtaccaataccaccaattttgtagacatcctggagaggcaggcgcaagggcttgtcagttggacgagttggtggtaggatgcagtccagagcctcaagcagcgtggttccactggcattgccatccttacgggtgactttccatcccttgaaccaaggcatgttagcacttggctccagcatgttgtcaccattccaaccagaaattggcacaaatgctactgtgtcggggttgtagccaattttcttaatgtaagtgctgacttccttaacaatttcctcatatctcttctggctgtagggtggctcagtggaatccattttgttaacaccgacaattagttgtttcacacccagtgtgtaagccagaagggcatgctctcgggtctgcccattcttggagataccagcttcaaattcaccaacaccagcagcaacaatcaggacagcacagtcagcctgagatgtccctgtaatcatgtttttgataaagtctctgtgtcctggggcatcaatgatagtcacatagtacttgctggtctcaaatttccacaaggagatatcaatggtgataccacgttcacgctcagctttcagtttatccaagacccaggcatacttgaaggagccctttcccatctcagcagcctccttctcaaatttttcaatggttcttttgtcgatgccaccgcatttatagatcagatggccagtagtggtggacttgcccgaatctacgtgtccaatgacgacaatgttgatatgagtcttttcctttcccattttggcttttaggggtagttttcacgacacctgtgttctggcggcaaacccgccaacttttttgtacaaagt

SEQ ID NO: 120209 - DNA, 580 bp, Homo Sapiens
tgacaaatttttggtcaagtgtttccattaaaaagtactgattctaaaaactaataacttaaaactgccacacgcaaaaaagaaaaccaaagtggtccacaaaacattctcctttccttctgaaggttttacgatgcattgttatcattaaccagtcttttactattaaacttaaatggccaattgaaacaaacagttctgagaccgttcttccaccactgattaagagtggggtggcaggtattagggataatattcatttagccttctgagctttctgggcagacttggtgaccttgccagctccagcagccttcttgtccactgctttgatgacacccaccgcaactgtctgtctcatatcacgaacagcaaagcgacccaaaggtggatagtctgagaagctctcaacacacatgggcttgccaggaaccatatcaacaatggcagcatcaccagacttcaagaatttagggccatcttccagctttttaccagaacggcgatcaatcttttccttcagctcagcaaacttgcatgcatttttgaaggctgtggcaatcccaacttttttgtacaa

SEQ ID NO: 120210 - DNA, 1112 bp, Homo Sapiens
caagtacttcccacacacctggcagggcacttgtcttcatgacaggccaggtgggagcgcagacggtctcgggtggcaaagaagcattgcaggtctgacacttgtgaggccgctcagaagtgtgcactgcttgatatgtccgttcaagtgatcaggcctggagaagcctttcccacagctctggcagatgtaaggcttgcccacggacccatcatgggaccgcacatggtaggacatgcggtcttttctcttgaaccgcaacccacacacagggcaggagtagggcttctccccagagtgggacagcttgtgccggttaagatgatacacatcacggaagatcttgccgcagatctcacaagccacctgcttcctggtccggctcctctttcgggggccgtcggggtcttcagagatgggtagcccattctcacccagcctcggaggaggaaggtcgatgtagcccagctggaggctggtgacaccgtgctgggcctcgtgctgccggagccggttggcatcagtgaacaccttaccacatagaccgcatggaaggatgcctgcctccctcaggccccctggggacccaaacattgagtccagcaggttggccttccttgggcggccccggcctcgcttgccagtcaggggaggggcactggatgccacactggggaatggggaagtcagcagttggggggataggggtccagccaccatgggcaagcggtccaccccaggtaacacaggcaaagaggcttggcctgcaatggctgcaccagccgcccgagctgcctcctcctctggctgcatgctgccggcgatgccattgctgttggctgccaaggctgccccgttggtcatgtccaaagggaagcccaagtccgaggtcccaggggggggaaagagcattatatcggcgcgggcagggggtaccaggatctgtacgttggactgtttgatgacttcctggcagatctcgataaccgacctcatcagcaggaacttggcggccgtcatgagttcgggaaagctctccaagcgcaccacgatgcgggaagtgtaggcgaagtccagaatgtctccaaggtatttggagctgatagtgccaa

SEQ ID NO: 120211 - DNA, 616 bp, Homo Sapiens
tttcactgaaaactttttattgctctttggatagaaacgggaatttatttgccaggaaggatgatcccatcatacttctgctggaaccagcgcatggcctcctctttgctgattctgtgtttggccccaatgcagcctgtcctgcgcttcttgtctgcgatgctgaaacctggcctacccagcaccacatagaagtccaggccgtagataccaatgcttgggtcatatttgatacccagatcgatgtgttcctggatcccaaaaccaaagtttccagtatctgagaagttgtttttttcttaactcatactcccgcacctttagacccttctccaagatttcttctgccttggcccctcgaactgtgcagtggacagcaatcttttcatttctccggatgccaaaggatctgacagtgtatctagctttggaaaacacaggggtctgccctgtgagctgctccaacaccttggctgctcgcgtcagtctgtctccactctccccaacacagatgttgagacagagtttgcggatgcgaagttcccgcatggggttctccttttcaccttgatccagggccatgatgccaacttttttgtacaaagttggcctttta

SEQ ID NO: 120212 - DNA, 1260 bp, Homo Sapiens
  misc_feature (473)..(507): n is a, c, g, or t
tttgacatctttactgttgattatctccacaatgcccaccacgtcatcgaataccaggccaagtttcttacagttatctactgtaatggagttaattttgcccttgatttgcaatgtcgtgttgacacacttgtatatgtaagccacctgtttcagctctgtgtcctcaatcaccaggttggaaacattttcctgattttccactctccacttcttgccctccagttcaagtacagctggctccttctttgtggctcgtttgggggatgggctggtttggggtttaggtgcagagaatggtttggggccactgcgtactggaccactctgagccttcagggcagggttcttgtgagtcttcatgtcatcagatacatgtttcagggcatgtgtaatgctctccccctgattaatctgcgcgaacagtgctgagcgggaagcagactcatctgagcctgaactggtagagactnnnnnnnnnnnnnnnnnnnnnnnnnnnnnnnnnnnacctgatccggcagagggtccagatggcagtccgctcagttcttttgccacaggccccgttttgctccaggccagtccggtggtatggaactccttaatgtaagcctgcagctctgtccatatacttaaataagctttgacccagtctacatgcttcttatccacatctttgtactctttgaggactcggtttgtataaaacatggcggcatcattcatttctttcacataagggccaggcttgggagccatagccacccagcccagggcctggatactttcgctgacagctgacaggtgattaaacaacttgctgcctcggttcttctcccgaaaggttatcacttctttgatctgctctgagatgggtgccaacaaatcggaaagcttattttctgctggctgttgacactgagaagctgtaaccaacagagctcgctccaacttcaaacctgtgtggaccatctccgcatgtttctgcacgtctcccccaatctctttactgatcttcaagtactctgccacaggaccagcaagcagcgagtcaaatgcctgcacatatggagctgctcctgcttttgaaggactgtctgcatacccacggtgcatgtcagaggtatgagatactgcctccaggcggcccactgccctctccaatctttctaccagattttgcatgtcagccataatggaccacctccggactgcgatcagcccaacttttttgtacaaagttggcattataaaaaagca

SEQ ID NO: 120213 - DNA, 952 bp, Homo Sapiens
gagatgtacttgctggggtcatcgggagacttgaagtccaggtcatacttcccagactgaagaactcggaggccgctacgtccatgccgatgaccaccttatcagtgtagccagctttcccaatagcagtcttcagcagctccaggcttctttattctccaggatgttgggagcaaacccgcttcatcccccacattggtggcatctttcccatatttctccttgatgacattcttcaggttgtggtaaacctctgctccaatgcgcatggcttccctgaagtttgctgcaccgactgggaggatcatgaactcctgcatggccagcttgttgccagcatgagaaccgccattgatgacattgaacgccgggactggcaggatgacttcagagttgccagccaagtcagcgatgtggcggtacagggggacccccttctcaacggcaccagctttgcagacggcaagggacacccccagaatggcgttcgcaccaaacttagatttattttctgttccatccatctcgatcatcagtttgtcaatcttctcttgttctgtgacgttcagtttcttgctaaccagggcaggcgcaatagttttattgatgtgctcaacagcctttgagacacccttccccatatagcgagtcttatcattgtcccggagctctagggcctcatagataccagttgaagcaccactgggcacagcagctctgaagagaccttttgaggtgaagagatcaacctcaacagtgggattcccgcgagagtcaaagatctccctggcatggatcttgagaatagacatggtgaacttctagccactgggtctcgtcgcctaggagaggaagcggagggtgctgcagacaccgaggtgaacgtaaagccggcgagatctccgtgctccgggtacccacagatactgccaacttttttgtacaaagttgg

SEQ ID NO: 120214 - DNA, 903 bp, Homo Sapiens
cagcccaatcatcctggtcaaatgggtcctcaatggagaccacaggatagtcctgacaaagtcctggtagagtgcccccagctgtccccagtgatgtatcgggaaaggatcagtgggagacttgaagttccaagtcatatttgccatcacgataaaactctgaggcagcaacatccatgccaataacgatctttttccgtgtagccagcttgtcgatggcttccttcaccagctccaaggcttcactgttctccaggatattgggggcaaagccaccttcatcccccacattggtggcatccttgccgtatttgtccttgatgactcccttgagtgtatggtagacctctgcacctagtcgcatggcatcccgaaagctctcagctcccactgggaggatcatgaactcctgcatggccagcttgttgccagcatgagagccaccattgatcacgttgaaggccggcacaggcaggatgaggtctgagttcccggccagctgagcaatgtggcgatacaggggcagttcccgctcagctgcccctgccttacacacggccagagacacacccaggatggcattggccccaaacttggatttgttctcagtcccatccaactccagcatcaggttgtccagtttctcttgctccaccacagagagacctgagctgatgagggctggcgcgatggtggagttgatgtggtccactgccttcaggacacctttgcctaagtaacgctgtttgtctccatccctcagctccagggcctcatagatgcccgtagaggctccactgggcactgcagcccggaaaagacctttggcagtatagagatccacctccactgtggggttcccgcgggagtccaggatctcccgggcccagatcttctctccaa

SEQ ID NO: 120215 - DNA, 1102 bp, Homo Sapiens
tttctcaccctttacttttgctgctaccatcttctctccaggaggatcgtaaggtttgggacgggcagacccacagagaacacctggagatgggaggctcctatttggagagcccctggtagaggggctgtgctgaggagaccccagataggactctgggctcatacagatgccactatcattatctgaaggggtgtcttcctcctttatgcactgagggatcatggcaacgtaagcagtgtagtctggcttcctatctccttcagtgatatccacttcactgcccagctctaaactaaaggaatgatctggagtggaggacaggacccctggggaaaggggaagaggttgtaagaaggtgaagggggcaacctggtcgggttttgttaaactttctgggagatggccaattgggttcaccgtctgggggggctgcttattagtctcctggactaggggggcaaagagatcacaagtgtcatccaacgtggtcagaaggtcatctggcatggtttccaggtcatctatacccaacagggcatccaagtcgaactccttcaaatccattttctccaacatccaatctgtcccggagaaggcatcctccttgctgttgttggagggactgaccaacccatccacagccagccattcggaggagcccgccttagccttgtcgctggagaacccatgaggtttgaagtgcttggccacctccaggtaatcatctaagagacctaggctttcttcagcccccaaacccgactggtcgaagggggacatcaagtcccccaccaacacctcgctgctcaggaagctcatttcggtcatgttgcggtgctttgctggaatcgaggaatgtgcttaattcgaaggtgtctttgtcggttacagcaacgctgctgctgaatgccgtgagaagcgccatggcttaagccgctgggggttgccgctgcagagcctggtgctgctgccgccgctgcaaaggccaatgctgccgcaggcactgctgcccctaatacgccatggtggccgtggaccctgagggcggggaggagggaaaacgcacacgcgcagagccaacttttttgtacaaagttgg

SEQ ID NO: 120216 - DNA, 954 bp, Homo Sapiens
gggatttcttagcatcctccccgtagaactctttcagtgacttcttgagcttctccacaatttggttctggatcgaggggtcacagaggatgtagtcaggggccacgcaggtctggccactgttcatgaatttcccccaggcgatgcgtcggcaggccacgtccaggtcacagttcttgtccacgtagcagggactcttccctcccagctccagcgtgacaggggtcaggtgcttggcagcagccgtcatgatgatcttccccacccccgtgctgcccgtgtacaggatatggtcgaacctctccttgagcagctccgtggtctcagggacacccccattgattactgggtacagatccttgtccaggtactgggggatgatggtagccagcaggctcgccatgttctcactcagctccgagggcttgaggaccactgagttccctgcagcgatggcgcccaccatgggctggatggtgaggttgaaggggtagttccaggtgccaatgacgaggaccacgcccagtggctccgagtggatgtagagctcgtcctgctgagtctggggcgtcttctccacgggctcatccgcggcccactcagggagcttctggatcatgtactcgatctcctctaggacgtacaccacctcctcatagtaggcgttccattcattcttgtgcaggtctgcggccagcgcgcccaccagctcctgctcctgctcctggatcaggcgctgcagcgcctccagctgctggatccggaactgcagcggacgggtcctgcccgagctgaaggcggcgcgggcgcgcttcacggcctcgctgatcttgctcatggcgcctttgacacagcctctcccggtaactggggctcctggaacggcaagagccaagaggggacgtatttaaggccaacttttttgtacaaagttggcattataaaaaagcattg

SEQ ID NO: 120217 - DNA, 514 bp, Homo Sapiens
gacaaggcttacagacttatttcttcttggacacacccacggtgcggccacggcggccagtggtcttggtgtgctggcctcggacacgaaggccccagaagtgacgcagccctctatgggcccgaatcttcttcagtcgctccaggtcttcacggagcttgttgtccagaccattggctaggacctggctgtattttccatcctttacatccttctgtctgttcaagaaccagtctgggatcttgtactggcgtggattctgcataatggtgatcacacgttccacctcatcctcagtgagttctcccgccctcttggtgaggtcaatgtctgctttcctcaacaccacatgagcatatcttcggcccacacccttaatggcagtgatggcaaaggctattttccgccgcccatcgatgttggtgttgagtactcgcaaaatatgctggaacttttcagggatcactagagacatggctgcagcacaagcggcgccaacttttttgtacaaagt

SEQ ID NO: 120218 - DNA, 1497 bp, Homo Sapiens
aaaaatgctgacaagaattagtctttcctttgtgctgaagtcttccacccatggatggaagcaggctgactccttgagggtcaggcaaggggtgggaaagggaacacattactttgtgaaggcaaagcagaaaggtgtgtttgccagaccagcatgggcagctcagagggagcaaagcatccaccagaagaggctctccattttctttgtagggttgacagttgagatttgaggctgagttaacaatgggaccactgaacttctttccaatggaaaactcacggcccagtcccacaggaactgtgcgcataccaaacaacaatgaggaaggaagggccgggtggctctaccaaacagttcaggtccactgggtgaatgaagcctggtgggaaagcggactcctgaagttggcgccctctgctggtcccacttctcatcgtggcgggtcgactgcctgagtagaggaagaggctacagatggggttgacaaaaaagggagtgaggggaaccccaggaagatgaagccaaactccaaactatattctgctaatcagttttttgatcaaaaaattcaaaatagaggaaaccacaaagtacaaaagcttttctgatgcttttcattatcacagaacacaccacctgtaatgtgtgcaaaaaggaaatgaggggtggaaggagaggaagtctaattgggaaaggctggatggtcacttcatttcttctctttcttcttatccttttcattcatggccaggatcatcatgagttttctgaagacagtaatgaaatctaagaagagatcaatgcagtgccagatataatcttgatctccatgttcggccttttcaataatgagttgagtatcaaaaaggacgaagccacacatgaccaccagtcccacatacaggtttgcctggaaaagccaaatggatccaaagaaaacattccccagggaagacaaaagcaacaagctcagggctgacatcaagatacctcccagaaagaggtagctacggcgcctggcatagagtgcactgagggtgaagcaggtaaagatcattgccgtgcccatgaaagcagtgggaaggatgctggggttgacagcaatacaaaactccagggcagggcccaggccaactcctgtaaggaatgcaaatccagcaagaagtcccagtcttttctgttcagtttcatggctatgaggtgttgccatcagccaaatcatcaatatcagggagcccaaggcagacagcaggccagcctgaatgaaatgagtgaccatatggacataggcccctgcagccgccacaaacatacaaagggcaaaacttgcatagaccttcttcaggtgctgctgcgttgacggggttatatgagaaaattttaaaagcgcatcaaagttgatctttcgatcaaatatgttcatggttccagagtccgtgcagcagtctccactcttcctaacccgcctctccaaggcctaccagcgcttcccaa

SEQ ID NO: 120219 - DNA, 1454 bp, Homo Sapiens
ccagggccagcttggtgttcatgagctcctggtactcacgcagcagccgggccatgtcttgcttggctttctgcagggctctccagctcggccagcttgttcctggcatccttgagggccagctccccacgctgctcggcatccgcaatggcgttctgcagattggcgcactgtttcttgacattgtcaatctcggctctcagcctctggatcatccggttcatctcagagatctcatgcttggtgttgcggaggtcatcgccatgccggccagctgtctgctgcagctcctcatacttggtctgataccaggactcggcttctgtccggctgcggttggcaatctcctcatactgggccttgacctcagcgatgatgctatccaggtccaggttgcggttgttgtccatggagaggaccactgaggtgtcagagacatgcgtctgcatctgggacagctccgcatcaaagaacatcttcatgaagttaatctcatccatcagtgcatcaaccttggcctccagctccaccttgttcatgtaggcagcatctacatccttcttcagcatcacaaactcattctcagcagtggtacgcttgttgatttcatcctcatacttgttcttgaagtcttccaccaggtcctgcatgtttctcagctctgagtccaggcggccccgttcccccacgatgctgtccagctgcctcctgaggttgttgatgtactgctcgaacaacggctccaggttctgcctcacagtcttggtgccctgctcctgcagcagggtccactttgtttccagaaccttgttctgctgctccaggaaccgcaccttgtcgatgaaggaggcaaacttattgttgagggtcttgatctgctcgcgctcctcggtcctcaccctctggatgctggggtcgatttgcaggttgaggggagtcaggagactctggttgacagtgacctcttggatacctccaggagggcagacaggaaagccagggccaccgaagccacctccaaagccagctccgccaccaagcccaaagccaccaccagctccaccgccgaaaccaaatccactaccggcaccacctccaaagccatagccgcctccagcaccagcaccaaaccggttcctgaagctgccaccactagtgctgatggatatcctcttggagccccccaggttgtagaggctccggctgccatagccacccactccacaagcacccgcaaggctgaccctgccgaagccaccaccaccgccacccccggaccgggacacggaggtgaagctggtgcgggagacagacggggtgatggcagaggcggtgctgaagctacgactgcccccgctccggaaggacacacttgactggcgagacatggtggcttgttcctggtggagcaagagaaccaggcactagtgggttgggaggtgctggagagccaa

SEQ ID NO: 120220 - DNA, 950 bp, Homo Sapiens
ctttgtacaaaaaagttgggacctggatagcatcatcgctgaggtcaaggcccagtatgaggagattgccaaccgcagccggacagaagccgagtcctggtatcagaccaagtatgaggagctgcagcagacagctggccggcatggcgatgacctccgcaacaccaagcatgagatctctgagatgaaccggatgatccagaggctgagagccgagattgacaatgtcaagaaacagtgcgccaatctgcagaacgccattgcggatgccgagcagcgtggggagctggccctcaaggatgccaggaacaagctggccgagctggaggaggccctgcagaaggccaagcaggacatggcccggctgctgcgtgagtaccaggagctcatgaacaccaagctggccctggacgtggagatcgccacttaccgcaagctgctggagggcgaggaatgcagactcagtggagaaggagttggaccagtcaacatctctgttgtcacaagcagtgtttcctctggatatggcagtggcagtggctatggcggtggcctcggtggaggtcttggcggcggcctcggtggaggtcttgccggaggtagcagtggaagctactactccagcagcagtgggggtgtcggcctaggtggtgggctcagtgtggggggctctggcttcagtgcaagcagtggccgagggctgggggtgggctttggcagtggcgggggtagcagctccagcgtcaaatttgtctccaccacctcctcctcccggaagagcttcaagagctaagaacctgctgcaagtcactgccttccaagtgcagcaacccagcccatggagattgcctcttctaggcagttgctcaagccatgttttatccttttctggagagtagtctagaccaagcccattgcagaaccacattctttggttcccagggagcccc

SEQ ID NO: 120221 - DNA, 1214 bp, Homo Sapiens
ttggcggccgccctcctcaccaagaagcagcttctccgctccttctaggatctccgcctggttcggcccgcctgcctccactcctgcctctaccatgtccatcagggtgacccagaagtcctacaaggtgtccacctctggcccccgggccttcagcagccgctcctacacgagtgggcccggttcccgcatcagctcctcgagcttctcccgagtgggcagcagcaactttcgcggtggcctgggcggcggctatggtggggccagcggcatgggaggcatcaccgcagttacggtcaaccagagcctgctgagcccccttgtcctggaggtggaccccaacatccaggccgtgcgcacccaggagaaggagcagatcaagaccctcaacaacaagtttgcctccttcatagacaaggtacggttcctggagcagcagaacaagatgctggagaccaagtggagcctcctgcagcagcagaagacggctcgaagcaacatggacaacatgttcgagagctacatcaacaaccttaggcggcagctggagactctgggccaggagaagctgaagctggaggcggagcttggcaacatgcaggggctggtggaggacttcaagaacaagtatgaggatgagatcaataagcgtacagagatggagaacgaatttgtcctcatcaagaaggatgtggatgaagcttacatgaacaaggtagagctggagtctcgcctggaagggctgaccgacgagatcaacttcctcaggcagctatatgaagaggagatccgggagctgcagtcccagatctcggacacatctgtggtgctgtccatggacaacagccgctccctggacatggacagcatcattgctgaggtcaaggcacagtacgaggatattgccaaccgcagccgggctgaggctgagagcatgtaccagatcaagtatgaggagctgcagagcctggctgggaagcacggggatgacctgcggcgcacaaagactgagatctctgagatgaaccggaacatcagccggctccaggctgagattgagggcctcaaaggccagagggcttccctggagccgccattgcagatgccgagcagcgtggagagctggccattaagatgccaacgccaagttgtccgagctggagccgccctgcagcgggccaagcaggacatggcgcggcagctgcgtgagtacc

SEQ ID NO: 120222 - DNA, 824 bp, Homo Sapiens
tttgtacaaaaaagttggggtcaaggcacacccttaaaaggatattgccaaccgcagccgggctgaggctgagagcatgtaccagatcaagtatgaggagctgcagagcctggctgggaagcacggggatgacctgcggcgcacaaagactgagatctctgagatgaaccggaacatcagccggctccaggctgagattgagggcctcaaaggccagagggcttccctggaggccgccattgcagatgccgagcagcgtggagagctggccattaaggatgccaacgccaagttgtccgagctggaggccgccctgcagcgggccaagcaggacatggcgcggcagctgcgtgagtaccaggagctgatgaacgtcaagctggccctggacatcgagatcgccacctacaggaagctgctggagggcgaggagagccggctggagtctgggatgcagaacatgagtattcatacgaagaccaccagcggctatgcaggtggtctgagctcggcctatgggggcctcacaagccccggcctcagctacagcctgggctccagctttggctctggcgcgggctccagctccttcagccgcaccagctcctccagggccgtggttgtgaagaagatcgagacacgtgatgggaagctggtgtctgagtcctctgacgtcctgcccaagtgaacagctgcgggcagcccctcccagcctacccctcctgcgctgccccagagcctaggaagaaggccgctatgcacggtaaccattgggaaaaaggagacccaccctgaggctcagacctacccctcagcccacctgg

SEQ ID NO: 120223 - DNA, 952 bp, Homo Sapiens
caggctctcagaagttgatctcgtctgtgagagtgtctgccttggcttgcagttcaactgttcatgtaggcagcatccacatccttcttcagagtcacaaattcattttctgctgctgtgcgcttgttgatttcatcctcatatttgttcttgaagtcctccaccaggtcctgcatgcctctgagctctgagtccaggcggccccgttccccgacaatgctgtccagctgcctctgaggttgttgatgtactgctcgaacaacggctccaggttctgcctcacagtcttggtgccctgctcctgcagcagggtccactttgtttccagaaccttgttctgctgctccaggaaccgcaccttgtcgatgaaggaggcaaacttgttgttgagggtcttgatctgttcacgctcctcagcccgcacccgctggatggtgggatcgatttgcaggttgaggggagtcaggagactctggttgacggtgacctcttggatgcctccaggggggcacacagggaagccagggcccccaaagccaccagcaaggccggctccaccacccagaccaaagccaatgccggctccaccaccgaaaccaaatccactcccggcgccaccaaagccatagctgcctccggctctgctgccatagccgccactgatggcacagctgccccctccaatggagatcctcttggagccccccaggccatacagactgcggctgccaaagccagctcctccacatgcaccacccaggccaccactgcccctggagcgggacacggagacgctgctgaagccagagcggctgaccccagggagcctggctgagttggcactgaaaccccggcggctgctgctgtggctcctgatggtggtggatgtgctggccatggttccaggagatgagagagctgaggagagtgtgccaacttttttgtacaaagt

SEQ ID NO: 120224 - DNA, 1515 bp, Homo Sapiens
accgtccgccgcagggggtgccctgaaggaggagtcgccggtgccggggtgagtgctgcgggcgctgctgttcccgatggtgtcttgatgttgggctgatgaggtctggttcctctcgcttcaccttcgagagccgattcctgagtcaggtagtgcagtggttgtaaagtgcagcatattcatttccaagctagagggttttgtgtccggattcaaaggcccaggcttgagctgggtagcaccatttctttcatgttgtgggttctgggagcccagagggcagccatagtgtgccgactccgtggaggaagtaaagaaacagacccgcttcttgccgcagccccaccagcctaaggtgttcaggaaggccggacgcgcctcctctgtcctcgccgtcacaccggaccatcatgtcctgcttgtcacgtccaccggacctggcgtcttggccttcggcagctggtgggcacgtccaccccagctggagacctggcctcgtctccagcccgaacgctgaggcaccgatcccggctccgtcgccgcccgcgaggcccgccttggccacgggctctggaggccagtgcctcccgctcgccgcccgctgcgctcctcacccctgcctgcaccatcctccctcctgagagctcattcactccgccccgcccgcctcgcctagtctggtctcgccccatgcccttgactcccctggatgctgtactgtctgccaagccagccccaggggctgagcggtgagggcacacagcgtcaccaagtccactgtgggccctctccgcaccagaccctgggccgcagtgcctcgtgggaccggcgcccgcaggccgagcccctgcagcctccttgctgcgcaatgtcccggggcccccctcccgtggccgcttcgccctcctggtgatgtcctgctgcaactccccgagcactgcctgtcttcccgctctccagccctcgaggctccggcataggcctgagaaagccgtgccggagctgcccctgtgcctgctactaaatgaattgcggtgggtgaggtggcagctggggacccctctgtcctgtgtcccctgccttgtccctgtctgacccaggcctggggtaccaccccacgtgctggaccctacgctggccacccctgtgctccctccctgccctcttgctctttctgcctggaacgggcccatagccccccagccttgcgcagtctcggctccccccgagaagatgtcacctttgctaactctcctgcccccatcctgcccctctgctgggagggtgtctgcttctccccgccagccctcgatcccctaaacctccttctttcagaaggctggggaagcgaggcctggggagggaagggactcacctgcccggcagatggggtcctcacctgcccgctgctgccagctacacctccgttgcccaggccctgggatcaaaccctgcccaccagctcccctcgtccaaccagctgccacgtcctgtaaccaaaagtgaccgggccaa

SEQ ID NO: 120225 - DNA, 862 bp, Homo Sapiens
gaggatttgaatttctcagaaaaaaggaaagacaggaaaggttcagaaacaaagtgacagaaggatgaaaaagaagaagagggaggtggtggggacggcgtcatcccgctggaggagttcagctctgggatgatgtggtggctggtggtcaaccgtccgccgcagggggtggccgtgaagatggagtcgccggtgcggggtgggtgctgcgggcgctgctgttccgatggtgtctttgatgttgggctgatgaggtctggttcctctcgcttcaccttcgagagccgattcctgagtcaggtagtgcagtggttgtaaagtgcagcatattcatttccaagctagagggttttgtgtccggattcaaaggcccaggcttgagctgggtagcaccatttctttcatgttgtgggttctgggagcccagagggcagccatagtgtgccgactccgtggaggaagtaaagaaacagacccgcttcttgccgcagccccaccagcctaaggtgttcaggaaggccggacgcgcctcctctgtcctcgccgtcacaccggaccatgtcatgtcctgcttgtcacgtccaccggacctggcgtcttggccttcggcagctggtgggcacgtccaccccagctggagacctggcctcgtctccagcccgaacgctgaggcaccgatcccggctccgtcgccgcccgcgaggcccgccttggccacgggctctgcctcgagctagcccctccacccgtcatcactcctgccagactccagatgtccaaggtgctccttggctcccacaagctctcctccagcaccccatcttccccatggttgcccctcggccaacttttttgtacaaag

SEQ ID NO: 120226 - DNA, 879 bp, Homo Sapiens
tcccggggtggtggcagcaagtagacatcgggcctgtgcagggccacccccttgggccgggagatggtctgcttcagtggcgagggcaggtctgtggggtcacggtgcacgtgaacctctccccggaattcccagtcatcctcgcagatgctggcctcacccacggcgctgaaagtggcattggggtggctctcggagatgttggtgtgggttttcacagcttcgccattctggcgggtccaggagatggtcacgctgtcataggtggtcaggtctgtgaccaggcaggtcaacttggtggacttggtgaggaagatgctggcaaaggatggggggatggcgaagacccggatggctgtgtcttgatcggggacacacatggaggacgcattctgctggaaggtcaggcccctgtgatccacgcggcaggtgaacatgctctggctgagccagtcgctctctttgatggtcagtgtgctggtcaccttgtaggtcgtgggcccagactctttggcctcagcctgcacctggtccgtggtgacgccagaccccacctgcttcccctcgcgcagccaggacacctgaatctgccggggactgaaacccgtggcctggcagatgagcttggacttgcgggggttgccgaagaagccgtcgcggggtgggacgaagacgctcactttgggaggcagctcggcaatcactggaagaggcacgttcttttctttgttgccgttggggtgctggactttgcacaccacgtgttcgtctgtgccctgcatgacgtccttggaaggcagcagcacctgtgaggtggctgcgtacttgccccctctcaggactgatgggaagccccgggccaacttttttgtacaaagt

SEQ ID NO: 120227 - DNA, 959 bp, Homo Sapiens
gcaagagtagggtgcatggcttgaataagaggaaacagccgttcacccaacatttgcttttgctcttgaggaggggcagatgccaacatggaagcagtcaaaggttcctgaccttgtacatgaacagcaggctgttgcattgtaacttgtggctgtgcattaagatgttgctgaggattgcgaactcctgcagcatatttatactgtggaacggtgcggacagcaggagtagctgcagcggctgcagctgcaggacgtggacccattgtctgtgttgatgtgttagcaacacgctgtgttgacatgactcgtggaacctgtgaagaagctggtctcatagtactaaatggtggtctaggagcagctgggcggatagcaccgggcatattttggaatggatgaggtctggcaccctgagcagtccagcgaggacttggtcttagttgagcaatttggctaggaggatagtatgcagcacggttctgagtctgtgggatagctgccatgaagtaacctgaaggaggtgctggctggtaggggttgattacagggttgggaacagctcgtacacttgccattctctgcatatactggttagtgaggtgagcctggcgctcttctttgcgctgagctaaagctacatacaatggctttgtggccacaattctaccgttcatttctgtaactgctttagtggcttcttctggggaggagaaacatacaaaaccaaaccctttgctgcgaccaccctccatcataacctttgcactagtgattgtaccaaatggagaaaactctttccggagacgttcatcatcaataccatcatcaagatttttcacataaagattaacaccctggtatctggtgatcctatcttgtttcatctgttcaaatttgcgcttaagttccgtctgccgttccacctttttctgagctcgacgaacataaatttccaa

SEQ ID NO: 120228 - DNA, 780 bp, Homo Sapiens
ccataatatttaagtttttcgatgtttagatatttttcttcggtgaagcacaagtttcttttcatggtccctgatcaattttaaacagttggaacaccggtggcactgttaactgctttctgggcagcctctttagcttggtgggcttgtagtacagctacagcttcatcaaccttagaacggagtgactctggagactcgagcatatgaagaagttctgaattatcaatctccaacaacatgccagtgattttaccagcaagagtagggtgcatggcttgaataagaggaaacagccgttcacccaacatttgcttttgctcttgaggaggggcagatgccaacatggaagcagtcaaaggttcctgaccttgtacatgaacagcaggctgttgcattgtaacttgtggctgtgcattaagatgttgctgaggattgcgaactcctgcagcatatttatactgtggaacggtgcggacagcaggagtagctgcagcggctgcagctgcaggacgtggacccattgtctgtgttgatgtgttagcaacacgctgtgttgacatgactcgtggaacctgtgaagaagctggtctcatagtactaaatggtggtctaggagcagctgggcggatagcaccgggcatattttggaatggatgaggtctggcaccctgagcagtccagcgaggacttggtcttagttgagcaatttggctaggaggatagtatgcagcacggttctgagtctgtgggatagctgccaacttttttgtacaaagt

SEQ ID NO: 120229 - DNA, 1825 bp, Homo Sapiens
  misc_feature (643)..(651): n is a, c, g, or t
aactgggttaggtaggagacaactttatgaccaagaggacaccaagagcttcttggataaaggttaagtggaggtatcttgctttgcccaaacagaggcatattcaagtgaatatggagccaactgacttagaaggaaagggaacgacttggcaagtgtaatctgccagctggttgagtcagacgacacattgagaacgatcttttttggaatcatgtcctcccttcaacccttctcctacaatcatgcactgtctacctcgtcctatttacatggaccctctcctattgccacctctgggtaagaatgcatcactctaggctatgctgctgctccatcaacagtattgacagttttgtcagtgatggaactatggaaacaaaagccatcaaataacatacactactatttttaggagtcaaagtaatgctctaaggatctggcaaggacatttggccccctgagcttccaatccccacagccaagacttttctattttctctcatgttagcctgagagacaaaaggagaaggaatgtgctgacactttaacactctaaacccaccgatgcttagtttatagaacacacatatgacacacatcctaatacagactacggctctattaattctcttaaacatcnnnnnnnnncctaaatgtttcaatgccataaagcttacattcccttgaagcagagtacaggaaaccttagcaatatgctaccatccagtaggatataaatataaagaagctgtatcagcaagggatgctcagggaatgtgtttgcagcccgtttcacggtagccgcttgagaggggatattggaagtgagtgactttctttcatttggcaaagtttccttatctcagcacctactctttctgatggtatgtttttgaaggctgcacagtacgactctgggtaccgtgtgtacatacatatgtaaggaataacgtttatgttgctcagaataggcacttttgaaggcagtaaatctaaaagtaaagttaatagagcctatattagtgctcatcttctcactttgctgatgtgtatgctgaacagaagatcacagatttgagtcagtctcgcaaagaggccggagtcggcaaatggctatattcagagctggggaagtcttgccaacttaactgtagctgttaaaaaggcagacttggagaaggtgcaatcgtttttctcaaaggtgacggcacagaaagagaaaaggcatgaaataaaagcctgtgtgcgtggctcagggaaaattactatcctcaggctctgtatcttcacgccacatctacttcatggcacagatttgctacttagaaagtcctttccctttccttttttgtatgtctcataattgcacatattcccttacttagctgtagagaaagagaagccctaaatctgttagagtaatgataaaggtgtaggttaaaagacaaaacaaacaaaacaaaagtggtttattatacagaaaacatgcaaaagctcaacgctacatccaactgtaaaggtttcaggtctaagtttaaattttcacttaaggcacattaagccacatgataattttatacatgccaaataatcagacaatcaagtgtcatgtttaattctatttgctctttgagatatttcttgaaaaagaatgagggcataattcagattttcagaggggaaatattctgactttgcctaataaagaaatgagtcttggataatttgctcatcagctttcccaagagaggaaatgggtagtaaaaggaagaaagtcttttaaaaataattttgctactactttactataaagtcttgccaa

SEQ ID NO: 120230 - DNA, 487 bp, Homo Sapiens
ttcggcatgaggctctacgctcacgggtgcgggcccgagaggcagctccagggccgcggaggcggcagctcggggcgtagggatggcttcagggaccgcggcgttgggactggaaggctcaggggcaggcggtgaggcctctggcagcgaggagcccacacagttacgttcaggggctgagctcgaaccggctccttccagtttctccggtggcaccgccgcgggactcccagtggccgccaagatcggctccgtagccgccataactccagctccgggcgtcactctttgtccggtagctgtgtgctcagcactgcgtctgcgcgggggtggggtgagcagggagacgtttccggttaaagggcagagctcgcgtcacccttgagggagtcggactcgggaccggccgagagtgtgcggagcttacctgcaccagcgaagcgcctgcgaccaacttttttgtacaaagttggcattataaaaaagc

SEQ ID NO: 120231 - DNA, 966 bp, Homo Sapiens
cccctgttgacagatgggagatgggcagcaggcccttgctgccattgttattttgctgttcggactgggtttgttttgtcctcaagggtgacgaaagagccaggcaccagggtctcatgggatgaggtacagggtgggagatgggggaggggctgggggctgaagggagcaagaaagctgtagctgtgtggggctggcaggatgttgaagaccgcctctgctgctctcacatggggactgggcccagatcttgcttggtcacacccagcccagaagacgggtcctccagttccagtgactctttcggtggagcgtcagtgggcttttgctccaaggagtgcctgctcatttcaaacaggagccaatggtgcatccagctctcaaagaccttccagtctatggtctccatggtgttcttaaggtgtctcaggttctccgggaagctccccttcagtggcgggtacaccttcagggggtcagcattctggagcaggtgcatcacatggtcctctgtcatgttgccatacttggtggcattctgcatgggcccctggggcagggctcccatgggcagcgcctgcatcagcagcggggtggccatgcgcatcttgctcacaggcttgggaggcttgggaagcttcatgcgcaggttctccagctgcaggttctgggaggtgactgtcagtttgtccagccggccctgctgctggtacaggaagtaggcggtggtggcctggccagcgaggagcagagtcaccaggatggaaaagcctgtgtacagggctccgcggctgcacttgctctccggggccccagggcgccggcccagcatgggcagttgctcattgttggagataaggtcgcgctggtcatccatgactggcttctgatcttcccgacagctcctgcttctcctcctgtgcatctgggaccctgaccccccggctccaacttttttgtacaaag

SEQ ID NO: 120232 - DNA, 909 bp, Homo Sapiens
ttttcaagatttgctaagatctgtataatcatctgtgcatgggaagatgtagttactcttgagggaagcggctttacgccaagtgccgtacaattcatctaacttccggaaagcactttcagtccaaatgcagaaacgtcccacatgcccaccaggagcaagcttcaaaatgttcagcttgcttacattaagcagagtaattccagggatgtttctgaaggccttgatgataccattatcctcattatagatgatgcacgggcccctgcgctggatacggcgacggtttctcattttgcctttgccagctctcattcgctgagaggcatagacctttttgatatcattccaggctttaagtttcttaaggagcaaaacagcttccttggtcttcttgtagccttcaactttatcttcaactaccaaaggaagttcaggaacttcctcaatacgatgacctttagacatgaccagtgctggtagggctgaggcagccagggcagaacagatggcgtatcgtttttgggttgtgttcactctacgatgccaacggcgccaggttttggttggtgcaaacattcggcctccacgacacatgtttccaaaagcaccctggccagagcggtgagtcccaccacctcgaactctgggaattcgagccacagctctgccagtaccccaagactcagcactagtctgatgacctgctaattcactgacagcatagggctgtctgttgtttttgcgcaagttggtgtgaacaaagttcacaatatctggtcgaataggagccttgaatacagcaggcaaagtgacatttttgccagatgactcccccttttcggagtacaccgatatcagtgggcgagcacacgccatggcggagagaggagacagccacgctcccaa

SEQ ID NO: 120233 - DNA, 958 bp, Homo Sapiens
gatcaaatcccctctccctgcccggtatcagggccactcatgctccggtttctctggtccagaaaatcctccagactcctgcccataaacacccatgctactggggtggtcctgtcggaatgaactctgctgcccgtagctgctgctctgttggctatattgacttggagcttggctgtaggatccagtttggggtgggtaactagtgggaggctgctgcccatagctgctttgttgaccatagctactctgctgtccatagctgctcggttgcccataggtgttctgctgagagtaactgctctgatcataactagtcggctgtgtagaggaatagctggtaggagggtaggatggaggtgcagtgactggctgcatggggtagctcccaggtacctggggataactgtagttactctgtccatatcctaggctgggctggttgtaaccccctgtgctagattgaggttgactagtctcagtgggcttgtttccatcctgcggtcttgtaggtgcagtggctgctggctgctgcccataggctggataagcaggctgagtgccatatgcagactgagctgcataggaggcctgggtggtggtgactgtagcagtggtggtatcataagcaccagtgccatacccctggacaggctggctgtatgcctggggggcagttggagtagtataaccagtgggaggctgtccataagaagttgcataggcggtctgcccataggttgcagtggtctgagcctgggtatagctgacatcagtgggctgtccataggttccatagctttgttgcccatatgcctgggtggtctgtgcatatccttgagtgggctgggcggtgtaagcactgtagccctgctgcgctgcagcttggctataggtactgtaatccgtggacgccattttctctccttcctcctcgttctctcaacgtccgtcccaa

SEQ ID NO: 120234 - DNA, 892 bp, Homo Sapiens
gcatgtgatctcagggactcagacatacgtctaagttctattctgagtttggcaacagagcagtgacagatatttctgaatgaacaatttttaggtgttttcagccatttgaaaagtattgccaacacactatttggtgttagctcaacagtcacgttgtgccaagaattaaagaactctaaagtctacaaacatcttacttcaccaagactaactataattgaagggtttactatttgtttaataaaaaatcacacatcaacttttatccaaacagcaactactacaaaaggaatgacaagaaaaaaaatgacttcacagaaatacactaaaaaatctgacaatgttatgcaagaaccgccaaagttttagtgtttaataatgaatagcacaactgaccaaggtccaagatgtgaagataccatgttcaagaaactggggggaaatcactctacaaactaactatatactaggtgataagaatgcatactttataatataaaacctgtctacacatagtagttagctgcaaaaagccattcgatcttctcttggcttggaaaaatgccagattccagtataaattattagcaaccttcaactcttttgcgtggcaggtatcttgttttcactttccagttcttccaccccagcctgtgtcatgaggtccgcgatattcttttccagatcatcaatgcgactactcatatcatcaattctcccaatgatctggtcagacatggtctgaaatttatcttgcatctgctgcaggagtgtctgcaccaccgaggtgaggtcctgcacggtcttggggtcagtctcggccatctccccgatgcccagcttggcggtgatgtctcagaccgtaacctacacttccgtttgtccccaa

SEQ ID NO: 120235 - DNA, 365 bp, Homo Sapiens
ggcggggaggtggggggcaagggtcaccagcaggcagtggattaggagctagaagttgaccgggtccacccgaagcttgtgcgcgtgcaggtcgctcagggcggacagcgcgttgggcatgtcgtccacgtgcgccacggcgttggtcagcgcgtcggccaccttcttgccgtggcccttaacctgggcagagccgtggctcaggtcgaagtgcgggaagtaggtcttggtggtggggaaggacaggaacatcctctccagggcctccgcaccatactcgccagcgtgcgcgccgaccttaccccaggcggccttgacgttggtcttgtcggcaggagacagcaccatggtgggttctctcccaa

SEQ ID NO: 120236 - DNA, 1460 bp, Homo Sapiens
  misc_feature (821)..(859): n is a, c, g, or t
gagaaccagcacattacaaagcgaccatcccccacatccattccttaggacgggcctcagggcggtgggtgcatcgtgaggagggagcggcatgggatgttagcaccaggtatttacagaacagctcgagagcgcttcaggaacgcgggcaagtccaatctgcagagtggccaaatgagcagtccccacccagccaaacctcagaaagccaatcagatggtttcagaacagcagccagtgggatgtgagtgttgcccactgtcagtccccttctgtgagttggccccctcgaccccctcctgggccacatccagtcaacgccacaattcctcaacgccccctcagtccttctggaatgcctctcttggcacccctgccccaacaggctgctgggatctgcacgtggaatcacagggctggttgcatgcaacggcaaagggcatgctcttctgcctgggggagggcctcttgtccctcccagcaggtcccgggacagggctggcagccaccccagcacccaaaataagatgacaaacaagaggaaacaaaccaaaatgaaggagagccatccgggctggaggagggcagaggctccccaaggggatctggggagggcttcaacttatgaatgcatcaggccttggaagacgtggatggaagaggcgagggcaaaaggaagagatgaggggcatggagagagactcagggaagaaggagaaagagcaatcatgcagcttgggacaaatcttttgttgctttatcagattctcagtcaatcaattggtgtttgctagaaccggggtacgcaggggagtgttgannnnnnnnnnnnnnnnnnnnnnnnnnnnnnnnnnnnnnncgggcatcgccagctgcccggggggccttcactttgcagtcatcatctgtacaaactcttcataattgacctggccatctccatcgatgtcagcctccctgatcatctcatccacctcctcatcggtcagcttctcccccaggttcgtcattacgtgacgcagctctgcggcgctgatgtagccattcccatccttgtcaaagacacggaacgcctctcggatctcctcctcactgtctgtgtccttcatctttctggccatcatggtcaggaactccgggaagtcaatggtcccgttcccatctgcatccacctcattgatcatatcctgcagctctgcttcagtggggttctgtcccagggatctcatcactgtccccaactccttggtggtgatagtgccatctccatccttgtcaaagagggagaaggcctccttgaactctgcaatctgctcctcagtcagctggtcagccatggcgaggcccggggtgtccggagcacggggatcaaggttcctccggcggcggcagcagctgcagcagttccagctccgccgcgcgtccgcgcctccacactcactgcccgcagcgcgcgccaa

SEQ ID NO: 120237 - DNA, 891 bp, Homo Sapiens
ttccattcccctccctccaaactaggtattgtccaagttgtatcaaatgccacaaagtttaccatgcacccagaagcagagaagacaggaggtccagaggacaaggtatggtggggtcactactcgcattgcagagtccacacgagttaactcatgctgggggcaaagaatggaaagagtaatacacagacaaagcaaaagaacgaaatgcgcagcctgaccagagacgtttacaatttataccaacttacaaatatttagggtgcccaccaactccgagagaacagaccaaactaaccacatgaaggaagacctctgccggggcctcctctccctacaacctcctctcaagaatcattaggaagcccaaacagcttcacagttccggcttcccggctgctgtcatatttgccgtctttgtcatcacaggcaaatgccagcagaggccttttggggtgccacgccactgtgaaggtcggagactcacactgtacctcccatagtttgtcccctgtctccacttcagcaatgtcaataaaatgatcttccgatgctgacgccagcattttcccatcatggctgaaactgagggttcttacaggccaatccagcctggaaaagcaccgaacacacactaactcatccacatcccagaggctgaccaaagcatctgcacttcctgtggcaaagtacttccccatggggtcaaacttgatacagatgcagttggaaggatgggcgttgatggactgcacaggcttcagttctgggtagctgaggatgttgatacaaccattgccatttgtcaggaagaacatattattgtcattgttccaggagatttcgttgaccttgaacgtgaactgctccaacttttttgtacaaagttgg

SEQ ID NO: 120238 - DNA, 538 bp, Homo Sapiens
gaagtcgatgtgtttctgggaatccaggtggtcaatgaaggacgggatgttcaccacttgcttgcggaccctgatatggcgctggcggatcagcacgcgagcgtggtggatggacttggccaagcccagcttgaagacctgggtctgcaggcgtctctctaagaaatcctctatcttcaggcccaggatgtaatccagcttcatcttgccctcatccagcaccccaatgcggaccagccgccgcagcagggcgttgccttcgaacagacgccgtgggtccttctcatcaagcgtcagcagttcccgggcggccttgcggatcttggccagggtaaatttgaccctccagacctcacgtttgttccggagcccatactcgccgatcagcttcagctcttggtcgagacgagatttctcgaagggtctccgcggggtcacataagttttgcgacaaacccagctccgggccactggcatgttggctccgcttccccgtctgcgctttaagcaaaccacccgccaacttttttgtacaaag

SEQ ID NO: 120239 - DNA, 1369 bp, Homo Sapiens
  misc_feature (602)..(801): n is a, c, g, or t
ataaaaccatcttaatattgcttacatcgaatactattagttatattcggggcaagcagactagggatattggtgttacttctataaagttaccttctgtttctaaatgctgtaaactaaactaaaacaggttacccagaaaaaagtggcaaattccaaaatggcttaatacctgtgacaactattgactgagccaggtacaacatcgatgaaattcagacatacaatgtaaagttgaaataatcccaaattattttacattatttatgtatactttacaaataacacaaatatggaaatgttttcttggaaagctgttggaactgtaagcactgcaacgtatgaaagaaacatatttagcaataaaaaatttaataatatcctacaactgaattagttgcatatttataccattcaaaatcttgattttaacctcattcattcctttgaaaaatacattcctcttttgttcttttaaatgcaaaattagtggcagttgcagcaaaaacgccgaaattctataagaaaaaaactgatttaccccaaacatatcattcagcacaaactgcggtacctgaaatcccagtatcagctcatagtannnnnnnnnnnnnnnnnnnnnnnnnnnnnnnnnnnnnnnnnnnnnnnnnnnnnnnnnnnnnnnnnnnnnnnnnnnnnnnnnnnnnnnnnnnnnnnnnnnnnnnnnnnnnnnnnnnnnnnnnnnnnnnnnnnnnnnnnnnnnnnnnnnnnnnnnnnnnnnnnnnnnnnnnnnnnnnnnnnnnnnnnnnnnnnnnnnnnnnncttcccacatctatccccactcacaatgatcagaaataagaaacagctttttaaaaagggccactaaaaaatcccaaatatatgtaacacaaacagtccgacttaacaatggtttgacttatggtttttcaactttataatggggcaaaagcaatacacattcagttaaaaactgtacttcaaattttgtactctgatattatcctgggataacgatatgtggtacaatactcttatttgagatattaaacacttcattataaaataggttttgtattagatgattttgcccagctaaaggccaacgttaagtgttcagaacacatttaagataggctaggctaagctgggatgttcagtaggttaggcgtattaaatgtattttcaacttacggtattttcaatttacaatgggtctactggaacataaccctattgtaagtcaaggaacatctgtattctaacatttatgaataattttttgtacaatgaaaaagtcataatgcccatataattctgaagttaacacagtaaaaattccagataacctttacagatttaaaaccaa

SEQ ID NO: 120240 - DNA, 1075 bp, Homo Sapiens
gaattccaatcgacccagtacagaaaagtgcttgactgctcaagtggtattaccagtcattaggaaggctcttgtagaatgctccgtactaatgggaggagatgtcatcagggtttcatgtccaaataggcttggtcttggttagttattcgtgatcaatggagtcatcttcgatcttactagagagttcatcttatccttaccgctgtcatcctcctcatctgaacccacattatcgattctgggacattcgtcatcatctttatcttcctcttctttctcacatttctcttcttctgcctcatcatcactaatttccttctctcgttccttctccaaataaagggtgatgggatagcctatgaactgagaatgcttcttcactacttctttgacccgcctctcttctaggtactctgtctgatcttctttaagatggaggatcactttggtacccctgccaatgggctcaccatggtcagcacgcacagtgaaggaacctccagcagaagactcccaagcatactgttcatcatcgttgtgctttgtgatcacaaccactttctctgccaccaagtaggcagaataaaagccaacaccaaactgcccaatcatggagatgtctgcaccagcctgaagagcctccatgaatgctttagtaccagacttggcaatggttcccaaattatttatgagatcagctttggtcatgccaatgcctgtgtctaccaaagtcagggtacgttcctgagggttggggatgatgtcaattttcagctctttaccactgtccaacttcgaagggtctgtcaggctctcatagcgaatcttgtccaaggcatcagaagcattagagatcaactcccgaaggaaaatctccttgttggaatagaaggtattgatgatgagggacatgagttgggcaatttctgcctgaaaggcaaaagtctccacctcctcctctccatggtgcacttcctcaggcatcttgaaaagaaaaggattatacgtaatagtgagcaacgtaggcttgctttccgatacccagacagtcccaacactgcgccggagccaa

SEQ ID NO: 120241 - DNA, 1441 bp, Homo Sapiens
  misc_feature (275)..(294): n is a, c, g, or t
  misc_feature (472)..(484): n is a, c, g, or t
gaaaataaagaatggctgctaactataaaagctgtggaagaaagggccttaaaatctaagtctttgtatttacccaaatacttcatagtgcaaatatgataaattcacatgcattttacttttacatactcataacaagatagtaacacagactaaagctgcagtgttttcccaagtgaatcttcattttaaccaaactcacaaagcatttatggaaattaatacatctggcaaagcaccagacttgaatcaagcagtctcaatgctacagtgtnnnnnnnnnnnnnnnnnnnnctcaagatgtagaagcagtagccatatcagcaaccattcttctagggaagggacccacatatacgatccttccccaagaactttgatgctaccccgctgaagagtttaagcacaaaacacagtgcttgtatcatataagtaaggactttcatagaggaaaactgtaatataaatgcannnnnnnnnnnnngcttttaaaggatactgcaatataaatatattaagcatggcctcaaatatccaacattttcctatcttacattttaaaccaaagttaaaagaacctacaggctttataaagaactctcttcacagcacagctgtagttcactttaaacaaaaaatgttccctttgtgctatatccttagaagtaaacataatatacagataaatgagaagtttcgattctgcatcaagcattattcaatctcaccttctgatataaacctgcatacagtcaaacttgcaaagcattcacttaatattttagttgaaacaaacttaaaaggtatatgggttttcggtgaaggagacctttgtgagttccagtggtgtccttggcactcagaggttcagctgaagtcccgactggtgaggacaagtggagccacaagggtccagacgtaaagcaggaggcagacccagctggagctgatcttgacccacacagctggccacttgctggtcatgctctgaaactttgcatcagggctgtaccagctggtcagggtcatcatgatgtacaaggaagccaagcagagcatgaggtggaataaggagtagctatactgcactccctctttctcgttgtccacagcccgccgaggctgtccatcttcttcatcactggcaccactggtagttgtatcaccaaggatgacgctgtcactccctgacagggtcagcttgtctacttggctattagtggaagtgcggatgctggaaagtgatcccaaggaagacaaatcagaaaggggccatgacaatgaactgctgccactggcctgtatacaagacacttactgctgagctgttcctactttggagactgaaagctttctgaagatcctgcttaaagttctgaactgctgcctgtcatcataagactgacgtcactgtcatcagttactacttgatgtgatccaa

SEQ ID NO: 120242 - DNA, 934 bp, Homo Sapiens
ttgggacagcattcgggccgagatgtctcgctccgtggccttagctgtgctcgcgctactctctctttctggcctggaggctatccagcgtactccaaagattcaggtttactcacgtcatccagcagagaatggaaagtcaaatttcctgaattgctatgtgtctgggtttcatccatccgacattgaagttgacttactgaagaatggagagagaattgaaaaagtggagcattcagacttgtctttcagcaaggactggtctttctatctcttgtactacactgaattcacccccactgaaaaagatgagtatgcctgccgtgtgaaccatgtgactttgtcacagcccaagatagttaagtgggatcgagacatgtaagcagcatcatggaggtttgaagatgccgcatttggattggatgaattccaaattctgcttgcttgctttttaatattgatatgcttatacacttacactttatgcacaaaatgtagggttataataatgttaacatggacatgatcttctttataattctactttgagtgctgtctccatgtttgatgtatctgagcaggttgctccacaggtagctctaggagggctggcaacttagaggtggggagcagagaattctcttatccaacatcaacatcttggtcagatttgaactcttcaatctcttgcactcaaagcttgttaagatagttaagcgtgcataagttaacttccaatttacatactctgcttagaatttgggggaaaatttagaaatataattgacaggattattggaaatttgttataatgaatgaaacattttgtcatataagattcatatttacttcttatacatttgataaagtaaggcatggttgtggttaatctggtttatttttgttccacaagttaaataaatcataaaacttg

SEQ ID NO: 120243 - DNA, 1483 bp, Homo Sapiens
  misc_feature (366)..(374): n is a, c, g, or t
ccagatctatcagtcatgataaattagacccagtccatctttcaatccagtctactctggttctgaacatataaacacaaaacactacagatttattaatatagcattttcccacaccctaaccctataaagaactttaaaagagaaaatttcatctaaatatttcacacttaaaggaaagctttaccaactatggcaacaggtttggaccatgaaatagtactttcctagatgacatatcgagtcaacatgaagccttagctgaaatgaatgattcaggatattaatgagaaattctcacaaatgatatgcatttaggaaatgattttgctttccttaaatagttcgaaggcttgaaaataaacnnnnnnnnngcatttcttttagaatgtttggtcattaacaacttttaaccttatcttcctcttctccttagcccttaacagaccgagtccattctatttggaaataacaagaacttgatcagattattaaatcttggaaacctcatttttaccttataaagtgttaagtttcacgtgcatattctcttacaaatgtagtataaatgttatggatagatataaggaaatattggcatagtataggtaattagtgaaaagacacaacttcacaaaacataataaaagataaacatgaaactataacactacttaaaaaatattttctcccaaattattttagcatttttgactagtttaataatatgaacactgccaaaaaatgggttcaaagtcgcctggagaaacagtttcttcttctggagtccatctcagcagcagcgattttctcccacattcattcccaagttaggcagatgtgtagaagtacctgggcttggcattgcccagaaggtcatcttcgtagttggggaggcagcagaagaagaaggcacagccgatcaggataatcgtggctgcccacccaaagccgtaggcccagttatagatgtaagtgacagcagggttggcatgaagggtgaaggtctgggtgtacttcacggggtaaattaccagggagatgatctggaacacagcagccaaggcaaggagacctccaatcactctcaggaagacaagcatctggggtccacagagggcgaagaaggagaggatgaaacagatcaccaggatgatgaagccacagaagagcatggcagccgctgctctaccccacgcgtactccatgaggctctgacagccctcctcgtaggacccgctgccgccgccctcttgggagcatttccaccacagcgaggacgtctggccgtggtcgctagactgcaaccagccgcggccggccagcgcgatgatgtcgaaggcgatggcgctgagtaggagcaggggcaggatccagcggcagcgctcgcaggccaggccgcagcggatcatgttgacgggcggcgcggggccgagcggagcggagcggagcgggtcggaggagcgcgcgggacgggcgccaa

SEQ ID NO: 120244 - DNA, 1433 bp, Homo Sapiens
ttggcaggcagcggcggccgcggcggggcctggggcttggggcctggagcccgggcctggggcgctggcgggaggcccctcccaactcccggcgcgcctcgcccggctgcccgcctcactgaaggtcaaggcgctttgttctgcgccgcgggcggcctcctgggcggcggccccttggaggaggcgaagacggcgagaggcggcggccgctcaaatctcccgctagcccagcccgccccgcgtgcgggggctgtggcggttacacggccgggcgcgccggagcgttcaggcttcccgtttttaaggggataaaaacattcagatggcagatcacagtttttcagatggggttccttcagattccgtggaagctgctaaaaatgcaagtaacacagaaaagctcacagatcaggtgatgcagaatcctcgagttctggcagctttacaggagcgacttgacaatgtccctcacaccccttccagctacatcgaaactttacctaaagcagtaaaaagaagaattaatgcattgaaacaacttcaggtgagatgtgctcacatagaagccaagttctatgaagaggtacatgacttggaaagaaagtatgcagcgctataccagcctctctttgacaagagaagagaatttatcaccggcgatgttgaaccaacagatgcggaatcggaatggcacagtgaaaatgaagaggaagagaaattggctggagacatgaaaagtaaagtagtcgtcacagaaaaagcagcggcaacggctgaagagccagatcccaaaggaattccagagttctggtttaccatcttcagaaatgtggacatgctgagtgaattagtccaggaatatgatgaaccaatcttgaaacacctgcaggatattaaagtgaaattttctgaccctggacagcctatgtcttttgtgttagagttccactttgaacccaacgactactttaccaactcagtcctgacaaaaacctacaagatgaaatcagaaccagataaggctgatcccttttcctttgaaggtcctgagattgtggactgtgacgggtgtactattgactggaagaaaggaaagaatgttactgtcaaaaccatcaagaaaaagcagaagcataagggtcgaggcactgttagaacaattacgaaacaagtacccaatgagtcctttttcaacttcttcaatccattgaaagcatccggggatggagaatcactggatgaagattctgaattcacattagcctctgattttgaaattggacactttttccgtgagcggatagtcccgcgggctgtgctgtacttcactggggaggccatagaagatgatgacaattttgaagaagtgaagaagagaagagagattagatgtgacgaggaggagaagacgagatgatgccgaaattaacccc

SEQ ID NO: 120245 - DNA, 1458 bp, Homo Sapiens
ggaatttgagtgttcttttaataatttctataccaatttttgatcttcattagctggagtcaatgagtccaaggctggaatgcatcgaaggagggcacaaccccctcccaaaacaatgtttcttcaacagcagctcttgtagcattaagggcatctgtaactctgtctttcttttcattcacttcaacatcacttgtcccaccaaccttcagcacagccactccatctgaaagttttgcaagccgttcattcagtttttccttttcatattcactagttgtgacatctaactgctcaatgatttcttgaatacgtttttcaatttgagccttgtcaccttttccttttaagagcatggcatcgtctttggtcacaatgacctctccaacttttcctaagtcatgaggctgaacgtcttcaagattcagggtcaatccctcttctccaaacactgcaccaccagtagcaatagccatatctttaagctggttctttctattgtcaccaaaccctggagccttgactgccacaacctgaagaccaacctttagcctattcaagacgagtgtacttagagcttctccatcaacatcttcagcgattatgaccaaaggcttacggtgagcattggcaatttcaagagcaggtacaatggactggatactagaaattttcttttcactcaacagaacataggcatcctggaattcacatttctgaccttttgatgtattaataaagtatggagaaatatagcctcgatcaaacttcatgccttcaataatttctaattcatcattcagtgtttttccatcctttactgtgatgacaccctttcttccaacttttttcattgcatcagagatgatattgccaatttctttgtctccgtttgcagaaatcgtagcaacctgtgcaatttcttcaggggtggtcacaggtttagactgctttttaagttcagcaattacagcatcaacagctaacatcacacctctcctgatttccactggattagcacctttgctaatcttctcgaagccttccttggctatagagcgtgccagtacagtagcagtggtagtgccatccccagcttcttcatttgtgttattggcaacatcttgaacaagtttagctccaatgtttttgtatttatcttttaagtcaattgactttgcaacagtcacaccatcttttgttactttgggacttccccaactctgctcaataatcactgttcttccctttggccccattgtaacggccacagcatcggctaaaaggtctacaccttgaagcattaaggctcgggcatctgcaccaaattttacatctttggcataagcccgagtgagatgaggagccagtaccctggacaccggtctcatctggcgaaagactgtgggtaaccgaagcatttctgcggggcggcggcaaggcgtgcgctcggcccaa

SEQ ID NO: 120246 - DNA, 876 bp, Homo Sapiens
caccagcccagtgacacactgggagtgtacagctgagctcaggacacagcttgtactcttgtgtccacaagggagactgtcccattctcatcaccaaagacaaagacttcactttgctgaggatgccaagccagcgaggtaggaaggtagccaggcgcactgcagccaatctgtgatgctggcttgggacagcgggtatcccagagtaaaattctattgtcctcgctgcatgaaagaaacacagagtccttgtgaggagaggcagcaacacaagtgacctgagcagcatgagctcggtatgaactcagtaccacctgctgagcaaggtcccaaaccttgatgcagatgtctttgctaccactgacagcttgtgtgccagagctcaagacactgactgtagacacaatgtcatcatgctcatacttgcagaacttgctgacaataagtgtctcattctcatctagttcccacaattcaacagcacctgaatcggaggccactagaatacctctctccccaacccaagtgaggtcagccactccagcctccgtttggactccggcggagcagaagccttcgttgggggcggcacaggggtccttaaaaagccagagggagccggcccagcagcgcccactcaggctggaggccccgaggagaagcgccccatcggaccggtaccgcgcagcctccaactgccgttccatgcaggcgggcgcatttgggggaagattccactcccgggccgccgggggcactagggggggtggggtttccttccgcatctccacggttccaactccaacctagactcaaactggacgccggccggagactccgctccggcagcaaaccccacgtgccaacttttttgta

SEQ ID NO: 120247 - DNA, 920 bp, Homo Sapiens
ccaattagaaagggaaaaagtaaactgtgctagcgtccggcattcagcttcccatagcatgtctcacagttttcggccatttcagctaagagttttcttatgacaggcaaaaataatgattaaaataccattagctttgctgagaaatgtggaaaaaaaatcacaatgtcaaaaatatttgaaactaattttgtttttataaataaataaaatggtgtttatcttttcttaaaattcttgctgttaaaacattcaaagttatgtcaacctgtaaggataaaggggtatttaagataacatgtttggaaaactaaaccacatttttaattgccagcattatgctttgttcttggtagagtcatccttgtttcttctttttacatcccaattataaaccctggccatattgacttctgtggtagtaaattgatctcgaagaaagtcaaggtcttcctccagggaatcaagattctttgtggcagtcgataaattcttttccaacaatgcctgagcttcatcaatatcatattcaagcattacattagcccccaaccacagacacactttatcggtaggaggaactgaagctttgcaatacaggttatctgccagcaagaatctggtctccattgagttggtggactcttttttcttctgcatgtattttagaatttccaaagtctgtttaatttcaggaatctgaccttttagccttcttttcttttgagcaaggttgagttccataaacttatacttctggtactgttcatccagcttctttaatactgtatctgcagtctcattcccaggctgtttcatgaaggaatctacatcttccacaaacacggcctcaggaatccccaggtggagccgccgcccattccctgtggccatttctcctttgccacaactgtccccaa

SEQ ID NO: 120248 - DNA, 931 bp, Homo Sapiens
tcagcagagatgacaggggcatatgtggccagagggaagtggatgcggggatagggcaccaggttggtctggaattctgtcaggtcaacattcagggctccatcaaatctcagggaagcagtgatggaggacacaatttgactattaacctattcaggttagtataggttggacgctcaatatcgaggtttctacgacagatgtcatagatggcctcattgtctaccatgaaggcacaatcagagtgctccagggtggtgtgggtggtgaggatggagttgtagggctcaactacagctgtggaaacctggggcgccgggtaaatagagaactccagcttggacttcttgccataatcaactgagagacgttccatgagcagcgaggtgaacccagaaccagttcccccaccaaagctgtggaaaaccaagaagccctggagacccgtgcactggtcggccagcttgcgaattcggtccaacacgaggtcaatgatctccttgccaatggtgtagtgccctcgggcatagttattggcagcatcttctttgcctgtgataagttgctcagggtggaagagctggcggtaggtgccagtgcgaacttcatcaatgactgtgggttccaagtctacaaacactgcccggggcacatgcttgccagcccccgtctcactgaagaaggtgttgaaggaatcatctcctcccccaatggtcttgtcacttggcatctggccatcgggctggatgccgtgttccaggcagtagagctcccagcaggcattgccaatctggacaccagcctggccaacgtggatggagatgcactcacgcatggttgctgcttcgcgactgccgagctgatggcggagacgaagaggagaggttgttgcttcttacagcgcgactcttaggcggtcgatgtaagccaa

SEQ ID NO: 120249 - DNA, 1475 bp, Homo Sapiens
gggccaaaggaatggaatattagtattcctctccttcttcctcaccctctccttcaacagaatccacaccaacctcctcataatccttctcaagggcagccatgtcttcacgggcctctgaaaactcaccttcctccatcccctccccaacgtaccagtgaacaaaggcacgtttggcatacatcaggtcaaacttgtggtccaggcgagcccaggcctcagcaatggctgtggtgttgctcagcatgcacacagctctctgtaccttggccaggtctccaccaggcaccacagtgggaggctggtagttgatgccaaccttgaagccagtggggcaccaatccacaaactggatggtgcgcttggttttgatggtggcaatggcagcattgacatctttgggaaccacgtcaccacggtacaacaggcagcaagccatgtatttaccatggcgagggtcacatttcaccatctggttggctggctcaaagcaagcattggtgatctctgctacagaaagctgttcatggtaggctttctcagcagagatgacaggggcatatgtggccagagggaagtggatgcgggggtagggcaccaggttggtctggaattctgtcaggtcaacattcagggctccatcaaatctcagggaagcagtgatggaggacacaatctggctaataaggcggttaaggttagtgtaggttgggcgctcgatatcgaggtttctacgacagatgtcatagatggcctcattgtctaccatgaaggcacaatcagagtgctccagggtggtgtgggtggtgaggatggagttgtagggctcaactacagctgtggaaacctggggtgctgggtaaatggagaactccagcttggacttcttgccataatcaactgagagacgttccatgagcagggaggtgaacccagaaccagttcccccaccaaagctgtggaaaaccaagaagccctgaagaccggtgcactggtcagccagcttgcgaattcggtccaacacaaggtcaatgatctccttgccaatggtgtagtgccctcgggcatagttattggcagcatcttccttgcctgtgatgagctgctcagggtggaagagctggcggtaggtgccagtgcgaacttcatcaatgactgtgggttccaagtctacaaacacagcccggggcacgtgcttgccagcgcccgtctcactgaagaaggtgttgaaggagtcatctcctcccccaatggtcttgtcacttggcatctggccatcgggctggatgccgtgttccaggcagtagagctcccagcaggcattgccaatctggacaccagcctggccaacgtggatggagatgcactcacgcatagtggctagggattaggaggcgaaggcgacaggagcagacaccgggtcccggttaccgtccccgacaagctaagagtcgaggccaacttttttgtacaaa

SEQ ID NO: 120250 - DNA, 899 bp, Homo Sapiens
caggggcatatgtggccagagggaaagtggatgcggggatagggcaccaggttggtctgaattctgtcaggtcaacattcaggggtccatcaaatctcagggaagcagtgatggaggacacaatttgacctattaacctattcaggttagtataggttggacgctcaatatcgaggtttctacgacagatgtcatagatggcctcattgtctaccatgaaggcacaatcagagtgctccagggtggtgtgggtggtgaggatggagttgtagggctcaactacagctgtggaaacctggggcgccgggtaaatagagaactccagcttggacttcttgccataatcaactgagagacgttccatgagcagcgaggtgaacccagaaccagttcccccaccaaagctgtggaaaaccaagaagccctggagacccgtgcactggtcggccagcttgcgaattcggtccaacacgaggtcaatgatctccttgccaatggtgtagtgccctcgggcatagttattggcagcatcttctttgcctgtgataagttgctcagggtggaagagctggcggtaggtgccagtgcgaacttcatcaatgactgtgggttccaagtctacaaacactgcccggggcacatgcttgccagcccccgtctcactgaagaaggtgttgaaggaatcatctcctcccccaatggtcttgtcacttggcatctggccatcgggctggatgccgtgttccaggcagtagagctcccagcaggcattgccaatctggacaccagcctggccaacgtggatggagatgcactcacgcatggttgctgcttcgcgactgccgagctgatggcggagacgaagaggagaggttgttgccaacttttttgtacaaagt

SEQ ID NO: 120251 - DNA, 1096 bp, Homo Sapiens
ttttattttaaaaataagcctgtgttcaagctctgatcatatttctttattttgatttgggaagaaaatactgtttctgatagcatgaaatgcaaaatttttagatttttaatctcactaattttaagaactattgagaaattgattaatgacatgaagtgcacaacactaattactggccagctgttgggcattgtgtttcttacttagttctcccaaggaaaactcttaaactgaatcttcagcagaataatccttaaatatactttgtaagcaaaacaaaagcttttttgtttacatagttctttggattttactgttcctaattttattctgaaactcaattttaccccagaccataattaccatattaactttgtaatgcacagttgtatgcaattccgcaaagcagtagtataccatcaggctctattcacccagagcataggaaaaacaggattggtcacacccattaagaaacaaatctatcccacgctatttgccaatgtgtagtttcagtctaaattctgacaataaaatgtatggatatatatctatatatctcatcttgattttcaaaagtagccaaagggagttcttcagagcttagcgttgcctggctgaagctgaagattttgtaacttcatagcgagacccatgttgccagtgattttcaatttgccttgaaagaaggccgactgaggattcattttaccagtcattaaagccaggaagtctgagtcagccattgtgattgtgcagtcagccttcttatctgagttaggaagcactgatcctttgccattcttcacatccaccacccaggtggcctctttacccccagggccatctttcaccttgaaggcaaaaataccaccgattttcttcacaaactgttccccttcctcttcaagtttcttctcaatctccttaaaaacaagatttgccttaaatccatcacttgcagagctggttggaacagcttcaatttgatgagttctaaaagaactggcggcttccggaaaacccatcttgtagagtgttacaaccacagctcctccaatgcctaaattccaacttttttgtacaaagttgg

SEQ ID NO: 120252 - DNA, 867 bp, Homo Sapiens
  misc_feature (717)..(777): n is a, c, g, or t
cctgggtaccaaatttctttatttgaaggaatggtacaaatcaaagaacttaagtggatgttttggtacaacttatagaaaaggtaaaggaaaccccaacatgcatgcactgccttggtgaccagggaagtcaccccacggctatggggaaattagcccgaggcttagctttcattatcactgtctcccagggtgtgcttgtcaaagagatattccgccaagccagattcgggcgctcccatcttgcgcaagttggtcacgtggtcacccaattctttgatggctttcacctgctcattcaggtaatgtgtctcaatgaagtcacacaaatgggggtcatttttgtcagtggccagtttgtgcagttccagtagtgactgattcacatttttttccaaatgtaatgcacactccattgcattcagcccgctctcccagtcatcacagtctggtttcttgatatcctgaaggaagattcggccacctcgttggttctgcagcttcatcagtttctcagcatgttccctctcctcatgagattggtgaagaaagtatttggcaaagttcttcaaagccacatcatcgcggtcaaagtagtaagacatggacaggtaaacgtaggaggcgtagagctccaggttgatctggcggttgatggcggcctctgagtcctggtggtagttctggcgcacctgcgaggtggacgcggtcgtcatnnnnnnnnnnnnnnnnnnnnnnnnnnnnnnnnnnnnnnnnnnnnnnnnnnnnnnnnnnnnnggggccttggggcagtccgagggtgcggtgaagaggtgacggagggctggctatgggcggccggccggggtggggaacgagcgccgccaa

SEQ ID NO: 120253 - DNA, 803 bp, Homo Sapiens
ggagggagaggcttaggcagaagccttattacttgcaaggtgcctttcagaagtcgctgggctcagaggctcttagtcgtgcttgagagtgagcctttcgaagagatactcgcccagcccagcctccgggccacccagcttgtggaggttggtcaggtggtcacccatcttcttgataagcttcacttcctcatctaggaagtgagtctccaggaagtcacagagatgggggtccgtgcgggcagaacccagggcatgaagatccaaaagggcctggttcagctttttctccagggccatggcagctttcatggcgtctggggttttaccccactcatcttcagctggcttcttgatgtcctggaagagagcgcggccgccacgctggttttgcatcttcaggagacgctcgtagccctcgcgcttctcctcggccaattcgcggaagaagtggctcacgccttccagagccacatcatcgcggtcgaaatagaagcccagagagaggtaggtgtaggaggcctgcaggtacaaattgaccaggctgttgacggctgcctccacgtcggtggaataattctgacgaatctgggagctcatggttggttggcaagaaggagctaaccacaaaaacggtgctggcaggtcccagaagcaggagatggccgagaagatggtcccggaggttgcaagcggagaggaaatcggagggcggtcggaggctggaagagagtccccggatctgttccgtccaaacactgttgaagcaagagacagacccgcgccaacttttttgtacaaag

SEQ ID NO: 120254 - DNA, 877 bp, Homo Sapiens
ctttgtacaaaaaagttggggggtgctgctacagcagcgagaacgaggactcggaccaggaccgagaggagcggaagctgctgctggaccctagcagcccccctaccaaagctctcaatggagccgagcccaactaccacagcctgccttccgctcgcactgatgagcaggccctgctctcttccatccttgccaagacagccagcaacatcattgatgtgtctgctgcagactcacagggcatggagcagcatgagtacatggaccgtgccaggcagtacagcacccgcttggctgtgctgagcagcagcctgacccattggaagaagctgccaccgctgccgtctcttaccagccagccccaccaagtgctggccagtgagcccatcccgttctctgatttgcagcaggtctccaggatagctgcttatgcctacagtgcactttctcagatccgtgtggacgcaaaagaggagctggttgtacagtttgggatcccatgaagagaggggtccttggacagctcttctcctctcttcatcccatctctaccccacccccttggcccccagcctcactgcggcttatacagtaccctaacctgctactaatcacagagaaaaatgtgaagaaggaggagaagatgaaggctagaagcctgagcaagtgagggtagaaccttttgggactggcctttgaagctctggccagggatggggtgggggccaaaaggacagagcctggtatgtcttcatagtcattgagaatgtggagataccagtttgggtggggggtgatcaccaggggacctagggagatccccttcccaccctctctgttggcctcagagtcgctcctgccccctctccctgacttg

SEQ ID NO: 120255 - DNA, 950 bp, Homo Sapiens
actttgtacaaaaaagttggagtagcgccaatctaggcagcggctgtgaggaaaaaaggcatgaggggtcgtcttcggaatctgtgccacccggcactaccatttcgagggtgaagctcctcgacaccatggtggacacttttcttcagaagctggtcgccgccggcagctaccagagattcactgactgctataagtgcttctaccagttgcagcctgcgatgacacagcaaatctatgacaagtttatagctcagttgcagacatctatccgggaggaaatctctgacatcaaagaggaggggaacctagaagctgtcttgaatgccttggataaaattgtggaagaaggcaaagtccgcaaagagccagcctggcgccccagcgggatcccagagaaggatctgcacagtgttatggcaccctacttcctgcagcaacgggacaccctgcggcgccatgtgcagaaacaggaggccgagaaccagcagctggcagatgccgtcctggcagggcggaggcaggtggaggagctgcagctacaggtccaggcccagcagcaggcctggcaggctctacacagagaacagagggagctggttgctgtgctgagggagcctgagtgaggagaccgccagccccagaagcagagggcagtcaaggtcaagagcctgtggtccagcatgcctggcctgggcgggctacctctgagaacggctgaaatggtgcccagtccatcagcagtgatggaatttgctggaggactagggcagagcaagcctcactgccactgtgcctttggggcacccttggggttggacatacaccccctttagattcctctgtttcttctacctggataattcttggacatgttctctcttctctagttcagtcagctctgcccctccgccccctcctgctggttcccagccttttcctggccctgg

SEQ ID NO: 120256 - DNA, 910 bp, Homo Sapiens
tcacagaccaagtggatcctggggatggaaactgaaggccagacaggatcctccctgtcccatggcttaaatgccttctcagaactcacagatggtcagtcgggagtacaggcagttcctgtcattccactgcccatctgtgtacatctccacacactgctcttttccccgactgcaggctcccctcggtaccagttggtgtagtttacaggggtcccatctgagtagcggaagtctccagggctgggaccctcagtcaggcctacataggcatatgtgttgtacttcttcacgaagcttgcaatggcctcattttcctctggattccttgggacagcaatgcggccgcctgctctggcacatgcctcctgaatggcatcaaaagtgatggactgcccattgctggagaagaccttctctcctactgtcattatggagccctgcagactgagggctccccttgtctgcaggatttgatgtctgaagtcgtggagtgtggcttggagctcctcatctagatgagctggaagccctggagggcctctctcgccaggctcccccttctctccacgctctccagggacaccaggggctccaggcagcccattattcccaggaggacatggtgtttctccaggcggacccatggggcctggagggccagggtctcctttgacaccatctctcccgtccctgcctggcaggccgtgggatccaggagtgccggggataccagggcttccaacacaaacgtccttcacttcgcacgcagcaccagaggctgccatcaagatgaggttgagggccagagggcacagccacatggctctgggtccagtcgctgctcctgttcttttcaggctccaagaaatcagcgacccacacacagagcctccaggtgcttggccaa

SEQ ID NO: 120257 - DNA, 926 bp, Homo Sapiens
ctttgtacaaaaaagttgggacccaagcagctggaggctctgtgtgtgggagcagcgactggacccagagccatgtggctgtgccctctggccctcaacctcatcttgatggcagcctctggtgctgcgtgcgaagtgaaggacgtttgtgttggaagccctggtatccccggcactcctggatcccacggcctgccaggcagggacgggagagatggtctcaaaggagaccctggccctccaggccccatgggtccgcctggagaaatgccatgtcctcctggaaatgatgggctgcctggagcccctggtatccctggagagtgtggagagaagggggagcctggcgagaggggccctccagggcttccagctcatctagatgaggagctccaagccacactccacgactttagacatcaaatcctgcagacaaggggagccctcagtctgcagggctccataatgacggtaggagagaaggtcttctccagcaatgggcagtccatcacttttgatgccattcaggaggcatgtgccagagcaggcggccgcattgctgtcccaaggaatccagaggaaaatgaggccattgcaagcttcgtgaagaagtacaacacatatgcctatgtaggcctgactgagggtcccagccctggagacttccgctactcagacgggacccctgtaaactacaccaactggtaccgaggggagcccgcatgtcggggaaaagagcagtgtgtggagatgtacacagatgggcagtggaatgacaggaactgcctgtactcccgactgaccatctgtgagttctgagaggcatttaggccatgggacagggaggacgctctctggccttccggcctccatcctgaagctccacttggtctgtgagatgctagaactccctttcaacagaattc

SEQ ID NO: 120258 - DNA, 926 bp, Homo Sapiens
cagccacatggctctgggtccagtcgctgcttctgccggagggatggccgtgagcccatctgccacttctgccaacatctcccccactgtgctctgtcaggactcaggaagctgggcagagctgagaggcagggcgggcgagaccagagtgctgggaagacccgaagctcccgggaaaattccaagcatcatctggcacctggcatggcctcatgcttcaggcctccggctggaggttgtggggtctcaaggctgctgaggaggaggaagagtaaggagctgtggggagcccagggacctgggctccagtgcagtctcctttctttcagtgcctcactatgttaccctgggaaactggcttcacctctctgatttcagctgaatcttccatgctctgcagaaaacctgccctgtccctcccaggctgttaggaggaaggatgaggtcactcactcactgactcactccatctgtccctcatatgcccagttaccttcttttcaggctccaagaaatcagcgacctgagaatgaaaagagatgaatagggcccacagcctggacccttcaaggtgatcatcggggggtgatgaccctctcacagtcagtgatgaggtcttccttcctcttggggtctgttctcccactccccctgcttaggccctgctgagtccctggtagggatggatctggccaaggaagatatcaaagcatgagggtctttgtaggtcatccatgttgaccatgctgtgaaacacctcccagtggaaaatggggagttgccctccttcccaacctgggccttggtcaggcctgtggctgctgggctggtcctctctgcctgcgatcctcaagctggagaacacctaggggatgtggctaaactcacccacacacagagcctccaggtgcttgggtctctgccaa

SEQ ID NO: 120259 - DNA, 1214 bp, Homo Sapiens
  misc_feature (1002)..(1018): n is a, c, g, or t
ttggcagggctgacccagcgacgccctccattcactctccgcgcccgttctccggctgtcctcccgttccgctgcccgccctgccaccatgacggaacaggccatctccttcgccaaagacttcttggccggaggcatcgccgccgccatctccaagacggccgtggctccgatcgagcgggtcaagctgctgctgcaggtccagcacgccagcaagcagatcgccgccgacaagcagtacaagggcatcgtggactgcattgtccgcatccccaaggagcagggcgtgctgtccttctggaggggcaaccttgccaacgtcattcgctacttccccactcaagccctcaacttcgccttcaaggataagtacaagcagatcttcctggggggcgtggacaagcacacgcagttctggaggtactttgcgggcaacctggcctccggcggtgcggccggcgcgacctccctctgcttcgtgtacccgctggatttcgccagaacccgcctggcagcggacgtgggaaagtcaggcacagagcgcgagttccgaggcctgggagactgcctggtgaagatcaccaagtccgacggcatccggggcctgtaccagggcttcagtgtctccgtgcagggcatcatcatctaccgggcggcctacttcggcgtgtacgatacggccaagggcatgctccccgaccccaagaacacgcacatcgtggtgagctggatgatcgcgcagaccgtgacggccgtggccggcgtggtgtcctaccccttcgacacggtgcggcggcgcatgatgatgcagtccgggcgcaaaggagctgacatcatgtacacgggcaccgtcgactgttggaggaagatcttcagagatgaggggggcaaggccttcttcaagggtgcgtggtccaacgtcctgcggggcatggggggcgccttcgtgctggtcctgtacgacgagctcaagaaggtgatctaagggccgcggcctcctcnnnnnnnnnnnnnnnnncaggggaaccaagagaaccacgtagaatcctcaaccgtgcggaccatcaaccttcgagaaattccagttgtctttttcccagccgcatcctgcctgtagatggccggggaaggctctagaaaaggggcgcattgcgatccaaccatcggcagccgattccgtgtcttgatcacggggtggggagggaaccgtggcg

SEQ ID NO: 120260 - DNA, 1201 bp, Homo Sapiens
gatagtcccctttggctgtttctccagacagcatgatgcagtcggctccatccaggactgcattggccacatcactgcttcagcccgagtggggcggggcttcttgatcatgctctccagcatctgagtagcacagatgacaggcttcccagctcggttgcaccgtccaatcatcatcttctgagcaaggaagacttctctgcaggaatctcaatgcctagatcaccacgagccaccatgatcccatcactggcctccaggatttcatcaaacctccgaaccccctcatgattctcgattttgctgataatcttgatgttctttcccttctctcccaggaccttcctaacttcatggacatcagatgccttgcggatgaatgacgcaaacaccatatcaacatcctgctcgaccccaaacttcagatcctggatgtccttctccgacacagcaggcaagtccacagcagccccaggaaggttcacacccttcttgctgcccaaggagccaccattttccacctccgtcaccaggaagtcggcacctttctgcttcacctggagagaaataagcccatcatccacgtagatcttgctgcccacttccaccaccttgcagatgttcttgtagtccagccacaggatgttctcgtcacacttttccatgtaggcgttatccagcgtgattttgagagtggctcccttcttcagctccacctctgcagtgccgctgcccttgatgagcccagttcggatctcaggtcctttagtgtctagagccacagcaacgggccggtagaggatggggtcagaagcaaagctttccgtggctgtgcgcacattcttgatggtctccgcatggtactcatgagttccatgagagaagttcagacgagccacattcattccagacttaatcatctccttcaacgtctccactgatcgggaagctgggccaatggtacagatgatgccagtgttccgggctgtgatgggtggtgaatcaatgtccaggcggcacatgtgctccaggaatgtgtcagccatggctgcgtgcagctgctgggtctgaatgaaggcagtcccggcttcactatggggcttcgacatggctgctgaggtcctccggcgctgaccgactcgggctacgctgcaaagacgaagagatccggagccacggcatctagcccgggggctgccaa

SEQ ID NO: 120261 - DNA, 934 bp, Homo Sapiens
gtcataattaaaagcaatgttcacccgctcgatgtccatgctcggcccaaataggttggtagccacaagaattcgtcgttgaaaatctttaaactgctgatacccgagaaagcctctcctcctggggcatcccacggtggatggcaatggctgggaagttctgctccactagtagctgggccaaggcaatgcaccgctgcacagacttcacaaagatcaccacctggttgaactcaaggacatccagaaggtcaaagagcttccggttcttctcgttgtccttcagtttcacgtagtactgctgcaacccatgcagcgtcaacttcgtctcatcatccacgaagatctccattggatcttgcatgaacttgcggcagactggacggatctctttgctcaaggtagcactgaacatcatgacctgcttctcgtggggggtcatgcgaaaaatttcctggacatcccgacgcatgtcgagctgttcaagcatcttatcacattcatccaaaataaagtgtttaatgtgtttgaggttgaggctcttatttcgagccagggctaggatacggcctggagtccccacgacgatatgcgggcagttcttcttcagcacctcttcatccttcttgatagacagaccaccaaaaaaaacagcaaccttctgacggatgctcaaagccacagtcgacaatggcccggagcaactctggcttgagcaggaagtcacgaaagccagagctgtggatggagacataggagcccttgacatccttcttggcaggggcctcagccccatctcccccagctgctgtctccacctcatcatcttcatagtccaagagctcattgtccacatcgttctctgccataactaaacagggagagcgcgccaacttttttgtacaaagttggctactttataaagaaagcattg

SEQ ID NO: 120262 - DNA, 1003 bp, Homo Sapiens
tggaatgcagggtgacccaaggacaagcgagttgcggggatctctactgtgaccatgcagaattgatcgcagtctgctgcgccaccaccacctcatgttcccgaggggaacagctgggctggcgactggcatcaggctgtaactgcaaatctatgctaggcggggtctcccttctgtgtgttcaagtgttctcgacttggattcttaactattttaaaaaatgcactgagtttgggttaaaaaccaaccaccaaaatggatttcaacacagctctaaagccaagggcgtggccggctctcccaacacagcgactcctggaggccaggtgcccatgggcctacatcccctctcagcactgaacagtgagttgatttttctttttacaataaaaaaagctgagtaatattgcataggagtaccagaaactgcctcattggaaacaaaaactatttacattaaataaaaagcctggccgcaggctgcgtctgccacatttacagcacggtgcgatgcacacggtgaccaaaccacggaggcagcttctggcactcacaccacgagccgcacgtttgccacatgagagtaaagcagagggcaagaggagtgagagggaggggggtcgcgttcacttctggttccggagctgattggacagccagtccagtccttcatagagcccgtcgccgctggtggcgcaggtggcctgaatgtaccagttcctgtggcgtagtgagtgcagccccagcttgtctgtgatctcggccgcattcatggcgttggggaggtcctgcttgttggcgaacaccaggaggacagcatcccggagctcgtcctcggccagcatcctcatgagctcctcacgggcctcgttcacacgctctctgtcattgctgtccaccacgaagatcaggccttgtgtgttctggaagtagtggcgccacaggggccggatcttgtcctggccacccacgtcccacacagtgaagctgatgttcttgccaa

SEQ ID NO: 120263 - DNA, 859 bp, Homo Sapiens
ggaaaatttgtattatttcaattattttatgtccagaaaactcaacagtgtacatttaacccagtttagtggcaagttctttagctttgccttttcgagcttggcgatacgagccacagacttaggacccaggacattgccaccccagtgacggcggatctcatcgtatctgtcattgtaattgtcttgatagcttccaccagcttagccaaagcgcctttgtcttccgagttcacctgtgtgaaggcgacagtggtgcaggtcttcctgtggactagacgtcccagtcttgcctttcccttgataatgcagtaagggacccccattttacgacacagggcaggcaagaagacaaccagctcgatgggatccacgtcgtgtgcaatcaccaccagctgagctttcttgttctccaccaaggtggtgacggtgttaactcctgctcgaaggacaggtggtctcttcgttgggacgtcccctttgccagcagccttcttctcggcccgggccaacagtctctgcttcttctcttgctttgtctctggtctgtacttgtgggccagcttaagcagctgagtagctgtttggcggtccagggcctgggtgaactggttaatcgcaggaggcactttcagccgcttatagaggatggctctctgccgctgcaacctgatatagcggggccatttcacaaagcgggtgaggtctcttttgggctggatgtcctgtccaatgccaaaattcttaggccttttctcaaacaggggattcaccactttcttagcctcctgcttcttcacgacagctggggccggagccaccttctttcccttgcccttctttcctttcggcatcccaa

SEQ ID NO: 120264 - DNA, 828 bp, Homo Sapiens
tattcaatttgagagcaggtactgtttattaaccaaccagcttagaaaaaaaaacatggtagacaccttagttcattcttttaataagcctgttgatctggtcctccctgttgccagcatctccaccttctacaaaatgggtggtctttttcttcattccacctcgtggagaagacaatttgaagggccacaggaagttatttgcctctttgaagcgttttccaacagtatagatctcatgaatcaaatcctccatgcagatgatgccgtatttaccaagagatcgagcaatcaaagcgttatctgtcaaagcaattcgcttcttattgattttgccataaccacgcttgtagattagttcatttactgacttcagattggggtacccccatgcaatatatggctctacaatcctcagcatgttaatcgaagccttgttgagcttcacaaaggttccattgaagatttgacgaaggcgaagaagctgcaacacctttcgaacctttgggctcactccattgatacctctgattctgatgacaaacgccaatttgggttctgcaggtacatagaagttgccagcttttcttgccatcctcgccattcgaatttcagttctgtacatctgcctatattccttgtgatagtgctttgctttttcatagataagcttcctccttgcctttcgaagcatcttttgggcaaacttctttctcaggcgcttgatcttcagctctgcgaaattccttcgctttttcttaagggtttctggcacagcaggaacctccttcttcttctcttctacaccctccatggttccagccccaa

SEQ ID NO: 120265 - DNA, 955 bp, Homo Sapiens
gggctagtttcagttctctccttttaaagaatttattaagcctgttataccacacagtatgttttatacactgacatacaactcccctaataagataaagcaaagacaaaaaagtttatcttattagaaacaagatacaccaccacttattgtcttcaaacattattgcactttaactttcttaatttgacaaagcattcaagaaacatctgcagactagttttaacagacaaataacacctgtaagcagacatgactgtcctaaattgtttattaagtatgaattttacaaactttacttatattagcggtaacggtggagctggagagtattgcgccttctccaagctgcccggcgagagccaccaatagtgtggtggaacttgtggccctttccaaggccacggctctttcggcctgcagatgtcagcccacgcatctccctgtgcttgtggactggtttggtgatccactgggtgtcaggatttcttctgatagctttatggaatggatcaatgaggataacctcaaaaaatttgtatgtggaatcttcaccaacccagtaagaattcaggactctcagagccccacagtggcgtccagctcgctcctctgcaacggactgaaggcttcgagcaaactttagctggttaacaccatgatggacaggcttgccgtaagttgcacccttaggaactgggcgttttcggccaccacggcgaacacgaatcctatatataacgtaaccttgcttggccttgtagcccagtcggcgcgctttatcaggccgggtggggcggggagccctgtggagagcagagagctggcggtactgccagcagcggaccctcagaagaaagcgcatgacatcagactgcttctttctccatagctcctggatgtacttgtatgcacccatcttggcttacctgatggctgccccaacttttttgta

SEQ ID NO: 120266 - DNA, 477 bp, Homo Sapiens
gaataagcagggccccagtatgtgcagaagttgtcagggggtgcccaggggtatggtgaaggagaggtagtccccaagggcaccccagcggggccggtagatctggaagatggtgatccaggaggtgagcactatcacccagaagaggaagcccacagctgagcgccagacatagcctttgatttggctctgttctgtgtaggctgggacaaggaaggcctctcggaagaaccagaagatgttgaccaaccagagaaaaggcaggaaagcaaacccccccaggtagtacttccggcacaggttcaatttctcctcattggacactcgctccaggttcatagctgcgctggggccgggtcgtcccaagggtctgcggggcaagacccaagccttgaccctaagtaacagatgcaaggatcacgaacaaccacgccccaggagagctcacttcctccggctggggtgccttagctccaa

SEQ ID NO: 120267 - DNA, 1165 bp, Homo Sapiens
gcttccactgaatgagtctctttttattctcttggtaatctcttccagttaactacttccgttgtaggtgatgaaatgggtaaggctccacacttcagatgttggcactgctatgagcatggtctttccctttattgcaactcaaaatcagaacctttgattcttttttatattccagtcccagaagtagtctccactgtagaagttaattgatgagtagtagcctacaatcaggctctagcttctccaggaacactacaggatcaatttagtttaaatatgcattaaactaaaaggcattctctcaaatgagtttaaatgcattttatttttagacaacctacatgacatgtttttcttaaaaacaatgcctccactccaaataaatcacagtcaaaataaatgaagagctcaagatgacatcagtcccatttgtcttaagtcctggtgttgtgtggatgacaagcagaagccagttatgatgacaggtgatagatccaaaataattgccacatttgttaacatttttccatttctaaaccatccttaaagaaaatcatatatggggtcacaccatcctcacggtagtccaatagagcaaccatgccatctggattcatgttttcaccaataaagaactggtagtttttgaaattagcaaggatgtgcttgatttgttctgcagcccctgtcataaaaggttttactctttctggtctctgttcttcaagtttccctttgattgatttcatgtaatctttgatgtacttcttgtaggcttcttttgtgaaacttgtttcctgcaggtgatggttcatgacaatatcgacaccagtgattactgtgctttcggtaccttcgccctcggggccttcagcggaggcatttccaccaatgagcgagtcatcaatgttaccttctgtcctactgaccatcttcccctccacctccaggcacaacccgtccgcgatctcccggatcttgtagatgtcggagaacatctcatcgtggctgatgaggtcccggtagataatcatgatggcgactgaagggagacgacgacggcgctagcttagcacgagcctgaaactcggagcgagcgcggtgcagccggagcggcgctcggggggagggggccaacttttttgtacaaagttggccatta

SEQ ID NO: 120268 - DNA, 797 bp, Homo Sapiens
aaataaattcacagtcaaaataaatggaagagctcaagatgacatcagtcccctttgtgttaagtccttggtgttgtgtggatgacaagcagaagccagttatgatgacagttgaatagatccaaaaataattgccacatttgttaacatttttccatttctaaaccatccttaaagaaaatcatatatggggtcacaccatcctcacggtagtccaatagagcaaccatgccatctggattcatgttttcaccaataaagaactggtagtttttgaaattagcaaggatgtgcttgatttgttctgcagcccctgtcataaaaggttttactctttctggtctctgttcttcaagtttccctttgattgatttcatgtaatctttgatgtacttcttgtaggcttcttttgtgaaacttgtttcctgcaggtgatggttcatgacaatatcgacaccagtgattactgtgctttcggtaccttcgccctcggggccttcagcggaggcatttccaccaatgagcgagtcatcaatgttaccttctgtcctactgaccatcttcccctccacctccaggcacaacccgtccgcgatctcccggatcttgtagatgtcggagaacatctcatcgtggctgatgaggtcccggtagataatcatgatggcgactgaagggagacgacgacggcgctagcttagcacgagcctgaaactcggagcgagcgcggtgcagccgggagcggcgctcgccaacttttttgtacaaagttggcttttataaggaaagcattgctc

SEQ ID NO: 120269 - DNA, 398 bp, Homo Sapiens
gatttaattcttcagctaaaacagcggaagaggtgatttattatatggttgttacactcggccacaaataaacacagaaatagtccagaatgtcacaggtccagggcagaggaccaacatgggcattttgtttatgagcaaggtgggtctcagaggtgatcggcgatcagagggcgatgaagttctagatccattgagacaagctctagacagtagcatgcagtcccacaacttgtaccagcatccccagcgtctggcattccatgtttctgctcctgtggcctccacggtgcaacaagctagcggtttacttggacctctgcctcatctttcttcttttgcgcttcagcctgcgcattcgcttcttcctccacttggctctcatggcgcagagccaa

SEQ ID NO: 120270 - DNA, 879 bp, Homo Sapiens
ttggaatcaccatggcggctgggaccctgtacacgtatcctgaaaactggagggccttcaaggctctcatcgctgctcagtacagcggggctcaggtccgcgtgctctccgcaccaccccacttccattttggccaaaccaaccgcacccctgaatttctccgcaaatttcctgccggcaaggtcccagcatttgagggtgatgatggattctgtgtgtttgagagcaacgccattgcctactatgtgagcaatgaggagctgcggggaagtactccagaggcagcagcccaggtggtgcagtgggtgagctttgctgattccgatatagtgcccccagccagtacctgggtgttccccaccttgggcatcatgcaccacaacaaacaggccactgagaatgcaaaggaggaagtgaggcgaattctggggctgctggatgcttacttgaagacgaggacttttctggtgggcgaacgagtgacattggctgacatcacagttgtctgcaccctgttgtggctctataagcaggttctagagccttctttccgccaggcctttcccaataccaaccgctggttcctcacctgcattaaccagccccagttccgggctgtcttgggcgaagtgaaactgtgtgagaagatggcccagtttgatgctaaaaagtttgcagagacccaacctaaaaaggacacaccacggaaagagaagggttcacgggaagagaagcagaagccccaggctgagcggaaggaggagaaaaagcggctgcccctgctcctgaggaggagatggatgaatgtgagcaggcgctggctgctgagcccaagccaaggaccccttcgctcacctgcccaagagtacctttgtgttg

SEQ ID NO: 120271 - DNA, 1190 bp, Homo Sapiens
agtccacccgccaatttggactcagcagaaaaggcaagctcttggcctcggaagaccccagactccagaaatggagctgctattgttggttccaaaaaggatgacactggcgaaggcattcttcctcagcttgtccagtcgctggaacattccagtgatgagattgcagctcatgaaggtctgagtgagttcttcagggaagcgatactctgagtaccacagggaccagccgtccttatcaaagtgctcccagaaatatggcagtgccacagagagtgtgtcctcattggagtacttgcgcttaaattcatccaacacaaaggtactcttgggcaggtgagcgaaggggtccttggccttgggctcagcagccagcgcctgctcacattcatccatctcctcctcaggagcaggggcagccgcctttttctcctccttccgctcagcctggggcttctgcttctcttcccgtgaacccttctctttccgtggtgtgtcctttttaggttgggtctctgcaaactttttagcatcaaactgggccatcttctcacacagtttcacttcgcccaagacagcccggaactggggctggttaatgcaggtgaggaaccagcggttggtattgggaaaggcctggcggaaagaaggctctagaacctgcttatagagccacaacagggtgcagacaactgtgatgtcagccaatgtcactcgttcgcccaccagaaaagtcctcgtcttcaagtaagcatccagcagccccagaattcgcctcacttcctcctttgcattctcagtggcctgtttgttgtggtgcatgatgcccaaggtggggaacacccaggtactggctgggggcactatatcggaatcagcaaagctcacccactgcaccacctgggctgctgcctctggagtacttccccgcagctcctcattgctcacatagtaggcaatggcgttgctctcaaacacacagaatccatcatcaccctcaaatgctgggaccttgccggcaggaaatttgcggagaaattcaggggtgcggttggtttggccaaaatggaagtggggtggtgcggagagcacgcggacctgagccccgctgtactgagcagcgatgagagccttgaaggccctccagttttcaggatacgtgtacagggtcccagccccaattttttgta

SEQ ID NO: 120272 - DNA, 687 bp, Homo Sapiens
gttcaaggtcttggtgctcagcccaaggggctccatgtgctgggacaccaacaggaaagggcttctgcctctccagcccacacccgagccacctcctgacccctggctgcaaaagcaggaaggggcaggagccagcacaggacccgggtggggcagggaggggaagcgtctcaggatctggcagagccccgggcagcatcattcaacttggccacccgcaagcttgctggtgacgagcgaggactttctctggggcagatcctgtggggtggggatgtgatcaccagtcaccaggttcttgtctggtcctgcacttggcagctgcttattcttcatcttggctttggccatgttgtagtctcctgagtcaaagtacttttgccctttctggagtctcttcatgaggaagtcggagcctccaggcttttgtcctaggcttgggtatttggcctttagctttgcctcttcagctctctcaggcagaataccttctttctcctgcgtgtcctgcttctcctcgccggtctcctccgcagggttctcttcttcttgtttctgggacatggcgggaccgggactgtggagtgtaaggggcccgggaaggcaaccggagaagggaagggggaggggaaacggggacaacctgcgctgaatggttcggctcctgccaacttttttgtacaaagt

SEQ ID NO: 120273 - DNA, 859 bp, Homo Sapiens
ctctctctccatgcttctgcagtgactcttaagtagcatttttaaaaacttctatttattttaaaaggctcttgggtggcactcagagtcctctgcattcactttcggtttattccaaggtctgatgggtgtaaggaggtccagctgtctgcagctctccgcatcagcctaagctacacctcaatttccgagctacaaggatagggtatgaagtcttgatttacaaccctctccccacctcaaaagaaagaactcattagttataagtgtcctgttcaaatcacaatccagtgcaaacataatcacaaattgcatctctggcacatctggtgcttttagcttctgcacaaattcaacatggtaaccctcacagcattctagggcataaaagggtcaagtacaataaatatccactgtaagtggtcataaggaagaaaatcaccctgccacacagtcagaatgttttcccttcagctctccctaccgttgagaagcgctataaaaggaggctttagcgtcctctaaagtttaccattatattcactaaagccaccaccttgataaagttactaaagccaagatgggttacaaagttaggtaagttcattaaattcaactccccaaacaattacgtttatctatgatgcctaggcgagaaaggcctgtgaatctataaggtaggagaatggggaactaagattttaggccttaaaatatgttggaagaatttttcctagttcccacaagcagctactgtaatgaaataacaggagaaaatacagagctgatggttttgctattgtgcttaaaaaactaggcttcctcagtgaagcacctgataaacttaggtggttgccaa

SEQ ID NO: 120274 - DNA, 166 bp, Homo Sapiens
agatatgctgagtaaaagaaatagacgtaaatgagtatatatttctttgggtataaggctcctgatttctagctgattcctggctctcctctggaccatgttagtctgtgatacaagttacctaaagtagtcattaagagaaaaatctttggaggtcacctaccca

SEQ ID NO: 120275 - DNA, 607 bp, Homo Sapiens
agagtatattgtgataagaatgttttactaattcaatcttattttccctccatttgacaagttagtaagaaatttagcaagaaaatgtctttgagaaggagactggcaaaagagtaccagataaatacatcagggcaagaaaaccacgggtgaattataacacccacacctatctttccttccctcagtgcttccgagccataatctgtaatacaacagtgagtctttaagtccctgctagtccaaatgtcctgtgtgtatctcagaattatcttacagtctaaagctctctgggagcaggggagctgaactcaaacctgggtcctcttgttaaagatttcaattttatcttgggcaaaggtggatgattctgtaagggaaaaacatgaggcatgggatagtcatgaaaatctaaaaataagtaaatccaatgcctttacagaggagttccacaaataacaaatggctcttcaaccttctctaatgcacaaaatacaaattttttctcaaaaagaaatagacaccgttttattttttcttgaagttcaaaccaaaaatctcaaatgtcttatcttatgtatgtaatattagggggcacgttagccaa

SEQ ID NO: 120276 - DNA, 550 bp, Homo Sapiens
ggcacgggggcctccacggtcagtgtgccctcaggggacagggaggaggaaacttgggtggggtccacaccggggggcagcgtgtatttccgcgtgaagcaccgggagatgtagccatgctcgtcctgccgctcctcgtgcttgccggtgatctccaccacgccatccttggtcttgaccgtcagctcgtccggggcgaagtggttgacatccagggacacgcgccagcggtccgcagtgtgccggatctccgagaccccgctgctgagttgccggctgagcgcgcggctgtaggcgggcgcggccactgcggggctctcgatggcggcggggggcagggggcgcacgtagcctggccagctgctgccgcctaaccactgcgaccactcctccggcagccggggcagcccgaaggcctggtcgaagaggcggctatgcgggtaccagtcgcggaaggggtcccagctggggccccgcaggagcgagaaggggacgcggcgctcggtcatgctggctgacttgctctggccaacttttttgtacaaagttg

SEQ ID NO: 120277 - DNA, 857 bp, Homo Sapiens
agcaatttttatttggcactatttgaagtctgaactttaaccagaattcttggatgggtgttcatatccatcagctcgttcaactttagcactgtctagtccccagtggcttttccagaactactgcttcaccatgaagctccatgagctttcccaattcaaacttgggcttcttcagcatttttacttttctaacgaagacatcatggagaggataaatagattggcaagccttttctatgtcttttccaatgctgtctggaatcaatttattgaccacttctttcaagtcatttgtctgcacctctcgggtcatgatttccatcatcttcttccggatttggcggacctgttggtgctgagcataagaggtcttccgtatctgattgttgcgttttttagtaaaaccaacacagaacagacgaagcaagtaaccatcggtagtcttgacatcaacgtgagcttcaatcattgtctgccattttttgaccatggaacacattttgtcacgggtaagatccatgccatggaagttagtcaggcagtttttaccctgaacatcttcagtaatcagcttgaattttctaaatgcaacttcatcattctgcaaatcagcaagactcacttcaaacacacgacccttgagaccatcagatgcaattttggttccttgggtcctggtgacgagcgtctttccaatatttcttatattgaacatagcaggtgctttcacatcataccaatctttcttagaaaatggatcaaccactttcttcttggctccctttttgccgcctttcgtaaggcgcttgttcttgccaaccgccatggtgctggtcccaacttttttgtacaaa

SEQ ID NO: 120278 - DNA, 856 bp, Homo Sapiens
cacaaatagcactttttatttgccactatttgaagtctgaactttaaacagattcttggactggtggttcatatccatcagctcgttcaactttagcactgtctcgtccccagtggcttttccagaactactgcgttcaccatgaagctccatgagctttcccaattcaaacttgggcttcttcagcatttttacttttctaacgaagacatcatggagaggataaatagattggcaagccttttctatgtcttttccaatgctgtctggaatcaatttattgaccacttctttcaagtcatttgtctgcacctctcgggtcatgatttccatcatcttcttccggatttggcggacctgttggtgctgagcataagaggtcttccgtatctgattgttgcgttttttagtaaaaccaacacagaacagacgaagcaagtaaccatcggtagtcttgacatcaacgtgagcttcaatcattgtctgccattttttgaccatggaacacattttgtcacgggtaagatccatgccatggaagttagtcaggcagtttttaccctgaacatcttcagtaatcagcttgaattttctaaatgcaacttcatcattctgcaaatcagcaagactcacttcaaacacacgacccttgagaccatcagatgcaattttggttccttgggtcctggtgacgagcgtctttccaatatttcttatattgaacatagcaggtgctttcacatcataccaatctttcttagaaaatggatcaaccactttcttcttggctccctttttgccgcctttcgtaaggcgcttgttcttgccaaccgccatccaacttttttgtacaaag

SEQ ID NO: 120279 - DNA, 1158 bp, Homo Sapiens
gaaagtatgtagacggggtacgtgccaaagcatcctcgtgcgaccgcgagagcccggggagcgggggcttgccgggccgtcgcactcatttacccgagggacagggagaggctcttttgcgtgtagtggttgtgcagagcatcatgcatcacggagcatgagaagacgttcccatgctgccacctgctcttgtccacggtgagcttgctatagaggaagaaggagccgtcggagtccagcacgggaggcgtggtcttgtagttgttctccggctgcccattgctctcccactccacggcgatgtcgctgggatagaagcctttgaccaggcaggtcaggctgacctggttcttggtcatctcctcccgggatgggggcagggtgtacacctgtggttctcggggctgccctttggctttggagatggttttctcgatgggggctgggagggctttgttggagaccttgcacttgtactccttgccattcagccagtcctggtgcaggacggtgaggacgctgaccacacggtacgtgctgttgtactgctcctcccgcggctttgtcttggcattatgcacctccacgccgtccacgtaccagttgaacttgacctcagggtcttcgtggctcacgtccaccaccacgcatgtgacctcaggggtccgggagatcatgagggtgtccttgggttttggggggaagaggaagactgacggtccccccaggagttcaggtgctgggcacggtgggcatgtgtgagttttgtcacaagatttgggctcaactctcttgtccaccttggtgttgctgggcttgtgattcacgttgcagatgtaggtctgggtgcccaagctgctggagggcacggtcaccacgctgctgagggagtagagtcctgaggactgtaggacagccgggaaggtgtgcacgccgctggtcagggcgcctgagttccacgacaccgtcaccggttcggggaagtagtccttgaccaggcagcccagggccgctgtgcccccagaggtgctcttggaggagggtgccagggggaagaccgatgggcccttggtggaggctgaagacacggtgaccattgtcccttggccccagatatcaaaagcatcactgtgcctcccactataggtgttgctccaa

SEQ ID NO: 120280 - DNA, 897 bp, Homo Sapiens
tttggggggaagaggaagactgacggtccccccaggagttcaggtgctgggcacggtgggcatgtgtgagttttgtcacaagatttgggctcaactctcttgtccaccttggtgttgctgggcttgtgattcacgttgcagatgtaggtctgggtgcccaagctgctggagggcacggtcaccacgctgctgagggagtagagtcctgaggactgtaggacagccgggaaggtgtgcacgccgctggtcagggcgcctgagttccacgacaccgtcaccggttcggggaagtagtccttgaccaggcagcccagggccgctgtgcccccagaggtgctcttggaggagggtgccagggggaagaccgatgggcccttggtggagggtgaggagacggtgaccgtggtcccttggccccagacgtccataccgtagtagtagtagtaaaatggaccggacgagctgctatagacatctctcgcacagtaatatacagccgtgtccgcggctctcaggctgttcaattgcagatacagagtgttcttggaagtgtctctggagatggtgaatcggctcttcacggagtctgcataaaatttattcctcccatcatacaaaaatgccacccattccagccccttgccgggagcctggcggacccagtgcatgccatagctactgatggtgaatccagacgctgcacaggagagtctcagggacctgtcaggctggaccacgcctcccccagactccaccaggtgcacctgacactggacacctcttaaaagagcaacgaggaaaacccagctcagcccaaactccatggtgagtcctctgtgttcagtgctgatcaccgaatggaaacaccgccgacttctagtgctgggctcctcccaa

SEQ ID NO: 120281 - DNA, 961 bp, Homo Sapiens
gagcagagcctacggtgtcaggctggtgcactgaatgtgcatgtagccgctctccctcatcaggctgtagaatacttctccttgacggggtacagcagctccacatccctctcagtgaggccaagaaacctcccgaaacgctgtcccaggaggaggtcagggtagagaagttgcttaaaaccaaagccatgttcaagtgcaggcctttcacgtggctgggcaccagctgggccatattagtgcagatcagggacccccagtcccctccttgaatgtagaattcctggaagcccagccgcagcatcagcttgtaaaagatcctggcggtggccaccgagttgaaccccttcttggaggatgcctctgagaagccatagccagggatggaagggcagatgacttcaaaaacgtgctcatcgctcaggccatggttcttggggtcagtcaggagtgggatgatcttataaaactcgtagaaagagccgggccagccgtgcaccatcagcaagggcttcggggtatggcctgcgggcagctgggggggcttcacgtggatgaagtggatgtccagcccttcaatcttagtcttgaagtgagggtatctgttgagaatctccacctgcttcttccagtcaaattcattccgccagtaggagatgactttcttcaggtagttggagttgaagccatagtggaagcagctgtcctccaaaggtggggtgaaacggaacttatcgatcctctggtgtaagtcgtggatctcctcatctgacgtttccaccttgaaagggcggatgctgtcgtcctccctggctgcggacctcgtgcctggcccccaccacccatcttcaagtggcaaagtttcctctttgtcccgggagatgaaccagtagatggcaaagcccagcactgaagtgaggaggatttcccaacttttttgtacaaagttggccctttaaag

SEQ ID NO: 120282 - DNA, 1331 bp, Homo Sapiens
aaatgcacaatcaggctactgggcccaatcactacatgctgcactgcctggaccagctctggatttagagcactgaggtcaatgtggacagtattttgcagtaatggactggatatatcagagtccccactagttaggatgggggacatgtctgtcagaggatactgcacttgtcggcatgaaccgttctgagatgaattaggaaactgatcttctggaaaagtagctcggtagtctacagattcatttgaaaccatttctgtagttgggcttacacttcgggcacttacaagcctatccaaatgaggagtgtgtactcttgcatcgtagcgaactaattcactgcccagatctttaatttgctttctctttttcagccacaggaaaaacccaagtagtaataacagtgctgttgatattgagacaacaccagcaatcaatcctgtgaaattctgatctggttgaactattacttttccaaggacggttgaagaaattgcttgcttccactctatatttagctcgctgttcaatttcagcaggtcattggggaccgtgcataaaacggcttcagaatgtaagtgtatattctcacagctcttatttccaacttttaacacttcacctttaactgcttcagggtcaatatcatttcccttaatttccagtacattttcattgcccattgagatcatcactggcttttcaaaaggcttaaacacaggattatgtacataaatgagatcaaagtatttggaaaggatcccatctaacatgaaaaaggctttggttttcagggggagttgcagattcagctgttgcagggaaggagtggtacaacagattatctctgaattagagcgatgttgacatgccactgtaaagttccttcctgcttcatgcacatttatgaccattctcgggacactaactgaattcaggtttttcccaacacctgttattgtgctcccaccactaataaaagatttggttggatgaatttcatagacaatgggatcttcacggtaactgaagatgcttgtctctcggttggctaagtcaattttcaatttaacagcaaactcagttgaaatggtttgggctggggtataacattcaagaatactgtttgacacactttttaaagtacatgtttttccaccaattgaaatgtgtctagaattcccactgtttaggtaatttccagttaaagtaagtaaagtgccaccagccataggaccgtatttcggcgaaatacttgttattacaggatccacataggagaatgtactgtattgtgttgtcccgtggccatttgaaataattaccaa

SEQ ID NO: 120283 - DNA, 1734 bp, Homo Sapiens
tcatgccagagcgtgcagtgtccaccttgatacggtggggaattgctgattttttgaaaaagcttaatttaacaatttgtgatgtctatcttttagagttctgtatgttcccattttttatcttctgaatttgaattgcaagtagctgtaaaatccaatctttgagtgcatgggggtgggtgtgaggcggggctcagcttcaaccccctgtcctgtaaagcagtggctggtttttcctgagcccagccctgggaggtcgtggtaggtgtggaggctgcagagctcctccagatgctgccctcgctgtgcctcacaccagagaggatggaagtgggctctggtgtcagactgtggttgagctgagacagacaaggccgacacagggctgggggcccgtggtccaccagtggaagtgactgccgaggaagggcggtgaggagggcggtgtgggagctgaggcttcttttcagcctggcagctggcgagggccagggagcaggggaagagcctggtcaccatggtcccagagcccgtctcacttggcttttcctttgcagctggacagctgagttctcatcaaaggtcggggctgtggatacactggagagggctggacatggtcccacacaccccgagggcctggcaggtggtgtgggcatcccagcccctgggcaccagggtcagcagctggggcgtgtgctgctccacaaattgcttgcacttttccctgtccagccaggagccaacacaggcctggagcattgcctgtggtatggcctgctcgctgctgttcccggcctgggtggtcacggacatgcagaggtggcactcagagtctcgcggcagccattctcctgtcggcgaccttgggccagcgctgtcatccatggagcaccggaggacgaggcggcagaccagctggggcagcatgcggcccagcagcgtgtcgagcaggatgacggagtagcgctcagccaggcactggcagatgccgcccgccaccagaggtaccacgcggcacacctgggccactgccacagctagcgcacccttgggaatcatggcttggatccgcttgatcagagccctgcagagccagcaataggggagaggaatggggaattgctgctcggagagatcctgtgtgtgaggcccaggcctcgcctggagggccccgggcagcacagggaggacgagcttgtccagcagagggtctggcagagggtcccgcagaggtttgggcagggggtctgacatccctggctcctgctctggctctggctgccgggatttgcacaggcccaggtgcatacagatgccgtttgagtcagtctggttctggaagtagtcgatgaccagggggaagtagtcgtcaagcacttggttgcactggggcatgagcagcttcaaggggaggacgttgcactcctgctccaggaacttcctcatcgtgtcctggaaaatggcctccttggccatcttgttaaggatgtggacgatgtcctcacactcttggcataggtcatcggctcccacatgtccccagacttcctgtaggcaatgccctagggctctgcactgcaatgcttgctccaggctttggcaccagaactcagggccctgggcacaggccaaggatgaggtggtccaggcagcagtgcctgggccacagagcgtgggcagcagcagcagcagccactgcagcaggtgtgactcagccccaacttttttgta

SEQ ID NO: 120284 - DNA, 963 bp, Homo Sapiens
gggttgatgctctgtcagataggtcatagtcagtggaggcatggttctgatcagcttgccgtcttgataaggtagccctggccaatcttataaatcttcttgttgatctcagtgcggtgatggtagcctttctgcccagcgcgtgccacagagaaggctacacgagcaggatgccatgccccaatacaggccaccttgcgcaggcctcggtgggtcttgcggggcagcttcttggtgtgccaacgactggtgacccctttgtagcctttgcccttggtcaccccgatgacgtcgatcatctcatcctgcccaaacacttggttcacaggtacctgctgctcaagcctctcgcgggcccagtccagcttctcggccacagtgcctccgttcacctggatctccatcaggtgggccttcttctggcgcagaggaagcaggcgcatctgggtgtgggcaatgacacggatgacttggcagtacttcttcatgctgctgaagtccttctccagctgcttcttgccatcctcatcctgccatttcttgcagtacttggtaaaggccttcttcttagatttatgccaattcttatagaaacgcctcttgcattcatcactgatgtgctcagcaaagacagtcttgaaggtccggaggcctcgaggggtttccacgtagcccacaatgcccacaaccaccatgggtggtgtctctacaatggtcacagcctccaccacctccttcttgttcaccttggatcccggcctgtcgacttcccgcacgatgtgagtcatgccagccttgtatcccaggaaggctgtgaggtggaccggcttggacgggtcatccttagggaagctcttcaccttcccacgatgcctgctgctgcgcttccgaggcaggaagccgagggacccatgtctgggagcggagaactttctgtgagacatcacgcccaacttttttgta

SEQ ID NO: 120285 - DNA, 803 bp, Homo Sapiens
gtttgtaccccgttgatgatagaatggggtactgatgcaacagttgggtagccaatctgcagacagacactgggcaacattgcggacacctccaggaagcgagaatgcagagtttcctctgtgatatcaagcacttcagggttgtagatgctgccattgtcgaacacttgctggatgaccagcccaaaggagaagggggagatgttgagcatgttcagcagcgtggcttcgctggctcccactttgtctccagtcttgatcagctgcacatcactcaggatttcaatggtgcccctggagattttagtggtgatacctaaagcctggaaaaaggaggtcttctcgggcccgagaccagtgttctgggctggcacagtgacttcacatggggcaatggcaccagcacgggcagcagctggcaccttattggccagcaacatgtccctgatctcagtgaggtcctccttggtgaacacaaagcccacattcccccggatatgaggcagcagtttctccagagctgggttgttttccaggtgccctcggatggccttgcgcatcatggtgttcttgcccatcagcaccacagccttcccgcgaagggacatgcggatctgctgcatctgcttggagcccacattgtctgctcccacaatgaaacatttcggataatcatccaatagttggatgatcttaaggaagtagttggacttccaggtcgccctgtcttccctgggcatcacggcggtgcgtcagggattgccacgcagggtttaaagacgaccaacttttttgtacaaagt

SEQ ID NO: 120286 - DNA, 1400 bp, Homo Sapiens
  misc_feature (153)..(165): n is a, c, g, or t
ttttgtttttaatactgcccaaataaaccttagcctttaataaaccttaaggtcacaggcatcaatgtacattctgcatgcacaataaaaaattgaaccaaaagctaacaaaaacattactgagaaaatctgtaggtgtagataaagaaagtnnnnnnnnnnnnntgtgcaaaggttcacatgaatacaagttttaaccacttaaaagttcactggagattacatgtgaattctggaaagggtctatgtatacaatcaagtaaaatattttaaacaagtccattgtgccttagttaaattacaaaatccaatacacagttgttttaataaattagtgcaatatgaaagattttggaagattaacatgtatccatattaggatcaaattgaagatttcaaaatttcttccaagatccatgtttcacttcttcttaagctatttcttcctgagctgtttaaagatgcatgctcagatttaaacaaacttactccaaatatcaaactgcctggatgaggggtgaatacatttacctttacacctcagcaaacacatggaatttcacacactgctctgatgaacccagtgacgagcactcactttgtttcatttttaattatctttaagaataactgtaccgattatcctagttctaaggtacatttattcaccaagtccaaactgggagccaaacactcttgctcctgcttctacaaagaaaaagggaaagggtgattttctccaataaggcagatttcctacaaatatgtagtttttggattgtttttcctttttcaaatcactgcttgttctttggtagtcaccagttaagaagctacagtttcctggggatggggtgacagaactcaagctgtaatcccaaaggcatcacctcacgttcccaccaccggtccacgggatgagcctgctgctcacacggttgcggtgctatggcagagcgccgacagtcttctctcaatactacatttatatttatgcacattttcaatatctgcagggtcctgtagaatcctacttaggccttccaaaagaagggctgccttatgatagcgataaacaatatcttcggtctgctgaaacatctcatccagggctgcagactgaaccatttctacagcacaattatagatgagtttctctgcagtcacactgttgatttcatcaataaacctctgtttgtcagagaagaatcgattcagcttttctgtaagtttcttgcacatggtgatgcagaatttatatcgttcgttcagattcttgacaacttgtttcacagctgtggatgggctcagtttcccggacttgatctgggctttggcaagatgcagagaagccgcaagcagctgtgctgctttcatgtacaacaccagctgctccccaa

SEQ ID NO: 120287 - DNA, 915 bp, Homo Sapiens
agaaattactaagctctgttggtactacagctgatccttcttcagttccggaggcttcttctggtgtctgtagctcttgacagtggtacttcactttaagaggtttgccagggtaccagaccaagtgaatgcgacagggaattatttcctgtgttgataattcatgaagtagaacagtataatcaaaatcaattgtatcatcattagttttccactgcctcacactagtgagctgtgccaagtagtagtgtgacacctgtgttgtcatttcccacatcacgtaagagcttccaaggaaagccaaatcccagatgagtctcagagagggatcaatatgtccatgattatcaggtatgctgactatttccaaggggtttttcagttgcttcatttgcttgtaaagcaggtaatcctcttgttgtcttttctttttctcgatgagccgtgtacaagttacattgatggttggtctgggtttctgattcttgaaaaacactcgagcagaacatttccccaaacgtccctcaccttcctgaagtaaagactctgggttgtagcgctctgtgctgaagaccacgtgaactttacatccctcttttggattaatccacgcgcggccctcctgcacctcggccagcactcgtagcgcgctgggcgagccggaccggaagttgaagaagtgaagcgccgcgcgcgccgcctgctgcaggagcctgcgcgggaccccagcatcctgaggctgcccagggtcgtcggggtccccggaccccgcgggcgccgccaccggggcgagcaacagcagcagcgcgagcagcggggcggtggggcgcgggcccctgggcccggaccagggagcaggcagccgttgccggcggggctgcatggacgcaggaaagttggctcggcacccgccaa

SEQ ID NO: 120288 - DNA, 733 bp, Homo Sapiens
gttatttagtttttattccataaatcataaacttaactttgcaatccagctaggcatgggagggaacaaggaaaacatggaacccaaagggaactgcagcgagagcacaaagattctaggatactgcgagcaaatggggtggaggggtgctctcctgagctacagaaggaatgatctggtggttaagataaaacacaagtcaaacttattcgagttgtccacagtcagcaatggtgatcttcttgctggtcttgccattcctggacccaaagcgctccatggcctccacaatattcatgccttctttcactttgccaaacaccacatgcttgccatccaaccactcagtcttggcagtgcagatgaaaaactgggaaccatttgtgttgggtccagcatttgccatggacaagatgccaggacccgtatgctttaggatgaagttctcatcttcaaatttctccccatagatggacttgccaccagtgccattatggcgtgtgaagtcaccaccctgacacataaaccctggaataattctgtgaaagcaggaacccttataaccaaatcctttctctccagtgctcagagcacgaaaattttctgctgtctttgggaccttgtctgcaaacagctcaaaggagacgcggcccaagggctcgccgtcgacggcaatgtcgaagaacacggtggggttgaccatggctaatagtacagggttttcctcgcccaa

SEQ ID NO: 120289 - DNA, 972 bp, Homo Sapiens
tcccaatatctatttttatacttactttctttctacttaggttctttaataaaattaggaatcagaaagcaagtacaagacatgcttatttcacacagaatatcaatgaagacttaagaagataaatagcaagtacttctaaaaaatcacaaatttgacatttgggaacaatataattgccatactattatatcttttattaaaaaagaccttttccagcttgtttccagacttcttttactcctttaatgctttctttcttcacacacttccagtattcttgtatactctgatgttgtggtacccataaacctcgatgcattctgttttttaacaccccaagaaactcttcatgactaagacattcatcaccatccaaatcaaagatcttaaagacagtgtccaaaatattgtttgagagttcttgtcctgttgctactttcacagctctcttaaactccgctagtctgacaggacgatgagctaaactgaacatctgcatggcaatagcaaagtcttccaagtgggttgtaaaatggcaaaatgacttgaattcatccaaactaatgctctctcctgctgacaacttctctctcacatttttccaataaatatctttattttcagtgttagtgaaaaaaagtagccactctgcaaagtcttcttttctcatgaaactcaaacctttagaaaactgaaggaattccatttcttgaatctctgtttgtaaattttccataaatcttcgaaattctttataatgaagttttctttgtcctctttttccaaagaaacgcatctgaagagttgtgttaatttcaggttctttcactattgcttcctgatatccagtttcattagttttcactgtcatcaagtcatcttgtttacttatgatcttctgcagcgtaaaaaattcccaacttttttgtacaaagttggcccttttaaagaaagcattgctcatcaatt

SEQ ID NO: 120290 - DNA, 982 bp, Homo Sapiens
tagggtttaagcagaggagtgccttgatttaactgacgtttaataggatccctctgactgcagtatggaaaacagactgcaggggggctgggaggccagctgccagccattgcaacaatccaggtgagatgggatgagtggcttggaccatggtggtagtgatgcagacactagggtggggccaggttctgggtatatttagaagctggcaagatttcctaaaggatttcatgtcaagtgtgaaagagagaggagtcaaggatgactcaaggcttggtccaagcaacaggaaggatggagttactgctaaccaaaatgggaaagatataggagaagcagatttgggtgggggtggagggtggagaggaagccaggagtttggttcagaagcacattaagtttgacctgtcaaacatccaagtggagatgctgggtgagaaaggtggatgtttgtgttacgaccgccacagctcagggcagaacctgaactgaaatgacagacttgaaagttgtcagaatagggatgatgctcaaagccatgagcttgggggagatcctgtaagacattagttactgtgtgctctggtcccttacattgtccctattgtagcagaaacacgctgccctcaagaagtcagagtccatggggagaatgaacaagccagtcaatgaccagggtacacagggatgagcctaggggcagctcagccaggttcctccacaatgatccactcgaggtctctctctgagcttcagtttcctccctgggactgggaggggaccaggagaaaccctgcctgtgaagggctttgcaaactgttggacattattattgggagtgttgagctggaggacatttcatttattccctgctcattaagcagctgccttttccagggaaacagctgcttgtttaagttactttttctccaacttttttgtacaaagttggcccttttaaagaaagcattgctcatcaatt

SEQ ID NO: 120291 - DNA, 895 bp, Homo Sapiens
gggttttgccaccgcccccggaggacgactttgaaagagaaggctgtcccatggcaggttgttcaggcgccgggcaccccttgccacctgggccacccgtgttgggctctgctgcctgggctttcatcttcagcagtcgctctaccgccaccagaaagggtccatagactttggtccatctgctttgacctgggcattagatactgaataatcatccagcacagcctgcaagtttgtccagtaggtggacaggtgtgggtacaggactcgttctactgccttccagccaagagcatgcagccccaccacggctccatagtggcagcagagcggccgcacaggatctgccaggatcttctgcagggatagcaggatatgctgatagaggccacttacaaggtccccatgagtccagaagatgtggctgagcaggagggcagccccatcccgcagagtccagtggtcattcagggggttgatggaggcagccagtggctccaggacacagtagaggacactgcccaccagacagcggacatagggccccaagcacaggtgcggattacgaaataggctccgtgccacctgcagcagccggtgcagttgctccaggtcatggcttacagatttcaccccactgaccacataaacaaagtaaggcaggagtgccccaatcttggagttcgtctgcaagtcctggagtgcaaccttcatcagttgcggatcatcccctagcacagcacgagtcacctggtgatagtacttgagaaggtcatctgtcagtgaagacacagcactgggcactgccagaggacaggcaggaagcagggacaggtggagagctggccctctcctggcctctccagcctcctccccctcaaccaacttttttgta

SEQ ID NO: 120292 - DNA, 970 bp, Homo Sapiens
ttttcaacatgtccacttcatgcggagaccatgattttgatcaggaccttatctcgcgtccccttgcccttcatggagtcatacagccgatcagcaaaatacaggggcttgttctgaatgcactgaaccaggttcaggaaagcattttccaggtctcctttaacctctttctgatgctttccaacatgtcataagggctgtaactcttgtacctatcaaatactttctggaggtggggcacgctccgctcggtcatgatgctgatccacttgggaacatcagttcctttcctcttcactccagcgtcatagagatcccgagcatcttggtcaatcagttcataatcaatgacagagccatcctctgctcttctaccctttgccagggcaaccatcagcttgcggaagtcaccagatgtgtccgaaataatgtccttctccagatcagtcttgtacatttccttgtagactctgttaatttcctgcagctcctggttggttctggagcagatgatctcaatgagagagtcctcgtcggttcccagccccttcatggaagcttttagctcagaagcgtcatactgagcaggtgtcttcaataggcccaaaatcaccgtctccaggtggccagataaggctgacttcagtgctgatgcaagttcctttttggtccttctctggtaggcgaaggcaatatcctgtctctgtgcattgctgcggttggtcaaaatgttgacaatggtgacctcatccacacctttggtcttgatggctgtttcaatgttcaaagcatcccgctcagcatcaaagttagtataggctttgacagacccatatgcacttgggggtgtagagtgatcaccctccaagctgagcttgcacaggatttcgtgaacagtagacattttgaaggaagctgggccgtgcgccgagagctgagagccaacttttttgtacaaagttggccttta

SEQ ID NO: 120293 - DNA, 940 bp, Homo Sapiens
agcaatgcttttcctatatatagccaactttgtacaaaaaagttgggtagcatagcaacttcggatttcactctacccggagagtttcccgcttggttgaacacattggcctcaggaagcttccttcaaaatgtctactgttcacgaaatcctgtgcaagctcagcttggagggtgatcactctacacccccaagtgcatatgggtctgtcaaagcctatactaactttgatgctgagcgggatgctttgaacattgaaacagccatcaagaccaaaggtgtggatgaggtcaccattgtcaacattttgaccaaccgcagcaatgcacagagacaggatattgccttcgcctaccagagaaggaccaaaaaggaacttgcatcagcactgaagtcagccttatctggccacctggagacggtgattttgggcctattgaagacacctgctcagtatgacgcttctgagctaaaagcttccatgaaggggctgggaaccgacgaggactctctcattgagatcatctgctccagaaccaaccaggagctgcaggaaattaacagagtctacaaggaaatgtacaagactgatctggagaaggacattatttcggacacatctggtgacttccgcaagctgatggttgccctggcaaagggtagaagagcagaggatggctctgtcattgattatgaactgattgaccaagatgctcgggatctctatgacgctggagtgaagaggaaaggaactgatgttcccaagtggatcagcatcatgaccgagcggagcgtgccccacctccagaaagtatttgataggtacaagagttacagcccttatgacatgttggaaagcatcagaaagaggtaaaggagacctggaaaatgctttcctgaacctggttcagtgcattcagaacaagcccctgtattttgc

SEQ ID NO: 120294 - DNA, 1128 bp, Homo Sapiens
  misc_feature (219)..(269): n is a, c, g, or t
ttggctacagcataaaatgtgaaatgctttcatcctcattgcccatttccaactaccattctgtttctcctctattgttcatggtttttcaaacatatctttgatttttcaacccccctttttcattaatctgttcttaaaacttctttttactggctttcatacttagcattccagtgaaatgttcttagactcaccagtggacaaataataaggccnnnnnnnnnnnnnnnnnnnnnnnnnnnnnnnnnnnnnnnnnnnnnnnnnnngttgaattctccctcctttggcttgtgggatcctttttctctaatatctgtctttctttttttagttgatctttccacccactcccctttctcctcttctccactgagaataatctccctgtcttttattcacttcattttctatactcctatttatccattttgattgtttatacctactatttgtattcgaatgacttcatttttcccaccctgtgggtcagtttgtgacttttggaattttccacaggtacctgtacaacttgatatttgaaaacaggattcatcaccatatatccccagcccccgttttctttttaaacaggcctcattgcgtaattcctttgccctgaaaagtgtcaccacctttatatttttaccccagccttggagttatctttttctgctctccattctccatgtccaaaaacttgctgtcagtccagtttttaatcagttttctccttgaggcttgatctcccatttctctcatcccattatagcttttcatgtagatctgaggcccaggttactgtaattcttttttttccaatttccttgctcccaggatccccatcttgtataaagtttctaaggtgctcctcctcaaactccatttttacaatatccgtattgtaaaattttcattttcagtaacacccagtagataatttttcaaagacgatcctcctcaaacacccatttttacaatatctctattgtaaaatttcattttcactaagtaacacccagtagataattcctatggagcagtggtgttccaaattctccattacctctatgcctaatattcatcagccttcattactctctagcatattcaccttgattcaacaga

SEQ ID NO: 120295 - DNA, 443 bp, Homo Sapiens
acaaatatactggagaatcatgcaatgctgccagcattggatgcaatccggggccacaagtctgcacactcctttgctactggtcctgtaatggcagaacctttcatctcgcctttattgttcactatgactcctgcattatcttcaaaataaagaaacacgccatcttttctacggtatgactttcgttgtcgaatgaccactgctggatgtaccttttttctgagctctggtttgcctttcttgactgtggccatcaccatgtcacccacaccagcagcgggaagtctgttcagccgtcccttgatccccttcacggagatgatatacaggtttttggctcctgtgttgtcagcacaattgattacagctcctaccggaagacccaaggaaatccggaatttcgcaccagaggacccaccatgtcggtcgcttcgacccaa

SEQ ID NO: 120296 - DNA, 904 bp, Homo Sapiens
ttggcttctccgcacgactgttacagaggtctccagagccttctctctcctgtgcaaaatggcaactcttaaggaaaaactcattgcaccagttgcggaagaagaggcaacagttccaaacaataagatcactgtagtgggtgttggacaagttggtatggcgtgtgctatcagcattctgggaaagtctctggctgatgaacttgctcttgtggatgttttggaagataagcttaaaggagaaatgatggatctgcagcatgggagcttattttttcagacacctaaaattgtggcagataaagattattctgtgaccgccaattctaagattgtagtggtaactgcaggagtccgtcagcaagaaggggagagtcggctcaatctggtgcagagaaatgttaatgtcttcaaattcattattcctcagatcgtcaagtacagtcctgattgcatcataattgtggtttccaacccagtggacattcttacgtatgttacctggaaactaagtggattacccaaacaccgcgtgattggaagtggatgtaatctggattctgctagatttcgctaccttatggctgaaaaacttggcattcatcccagcagctgccatggatggattttgggggaacatggcgactcaagtgtggctgtgtggagtggtgtgaatgtggcaggtgtttctctccaggaattgaatccagaaatgggaactgacaatgatagtgaaaattggaaggaagtgcataagatggtggttgaaagtgcctatgaagtcatcaagctaaaaggatataccaactgggctattggattagtgtggctgatcttattgaatccatgttgaaaaatctatccaggattcatcccgtgtcacaatggtaaaggggatgtatgg

SEQ ID NO: 120297 - DNA, 873 bp, Homo Sapiens
ctttgtacaaaaaagttggggcggccgcagccctgaaggagccggtgccatctgtgggggctttgggccaggggtctccggacagcatgagcgtgggcttcatcggcgctggccagctggcttttgccctggccaagggcttcacagcagcaggcgtcttggctgcccacaagataatggctagctccccagacatggacctggccacagtttctgctctcaggaagatgggggtgaagttgacaccccacaacaaggagacggtgcagcacagtgatgtgctcttcctggctgtgaagccacacatcatccccttcatcctggatgaaataggcgccgacattgaggacagacacattgtggtgtcctgcgcggccggcgtcaccatcagctccattgagaagaagctgtcagcgtttcggccagcccccagggtcatccgctgcatgaccaacactccagtcgtggtgcgggagggggccaccgtgtatgccacaggcacgcacgcccaggtggaggacgggaggctcatggagcagctgctgagcagcgtgggcttctgcacggaggtggaagaggacctgattgatgccgtcacggggctcagtggcagcggccccgcctacgcattcacagccctggatgccctggctgatgggggtgtgaagatgggacttccaaggcgcctggcagtccgcctcggggcccaggccctcctgggggctgccaagatgctgctgcactcagaacagcacccaggccagctcaaggacaacgtcagctctcctggtggggccaccatccatgcctttgcatgtgctggagagtggggggcttccgctcctgctcatcaacgctgtggaggcctcctgc

SEQ ID NO: 120298 - DNA, 1363 bp, Homo Sapiens
  misc_feature (700)..(794): n is a, c, g, or t
taaaacaagccaacactgaagacacaaagaatgaggttaggttcattgaaaccagggtaacactttggatgagctaaacacaaagatgacaatgacttgagcaggtatagaagctcagagacatgcctgcaaaatgaaatccgtgaggaattttgtagctacccagagatacgtggttcaaattaaaatgtccgactgatcactcccggcatgtgctgcacagttatgtgaacgtgtcacacctaacgtgggtccattgtcttcagactgagcacaggttgccactggcatgctctgagaataggaatagagccatgcccactgacccatcctatgtctgggcttccaaatggaactatagtttcattcaaatcttcaggcgcctataggtcctgcctgcaggaatgacacctctcggcttagtaagggctgcttattgtgggaatatgactcccatctggaagaccagatagagacttgtcaccgtcaaagtaaagaacctattgtccatgtcaagggcaaagctgatgtgctgttcctcaaatgagtaaaacacacttctgtagtgctggaatgagtcacgtagttcacagtacattgatggagtcgaataacatctatccagtgagtcctgtaagacttcaggctcttccacttccatcagcacgctgttgagcctggggcatggtgggttttgatnnnnnnnnnnnnnnnnnnnnnnnnnnnnnnnnnnnnnnnnnnnnnnnnnnnnnnnnnnnnnnnnnnnnnnnnnnnnnnnnnnnnnnnnnnnnnnncgtcaagagaaaagccaacatgtttttcctccaatgcataaaaggaacttccatagggcaggcaggagtcaggctgttcaagacaactggaaggagttgaataacatctatccagtgagtccagcaagacttcaggctctactgcctccagcagctccctgctgagcctggagcatggtgggccttggtcttcttcctcttcctggtcctttttaattctgtccacgtcaagagccaagccaaggtactgttcctccaatgagtgaacagcacttctgtagggctggcctaagtcaggcagttcaagataacctgaaggagtcgaataacatctatccagtgagtcctgcaagacttcaggctctttctcatccagcagctccctgctgagcctggggcatgatgggtcttggtcttcttccacttcttggtacttttcaatttcatccatgtcaagagcccagccaacacgctgttgctccaatatgtaaaaggcacttctgtagggctggcatgagtcagtcagttcaagataacctgaaggagttgaataacatctatccagccaa

SEQ ID NO: 120299 - DNA, 452 bp, Homo Sapiens
  misc_feature (89)..(97): n is a, c, g, or t
tgccacgaggtgtgttttattttcattattcatacaaataattttctataatatcccggggcaaaccggagaatttggcggtccgattnnnnnnnnntcccttcagagacccacaggccggtggcatcggcgcggagtgcccaggttcacagtgcagcttgtggctcgtgtccatcttgcaggtggctcttcctccacatcacgactggggtctcgaagaggacgggggtaggaaatcctccaggatcttaggaaatttcactccgcttctcctgctcaatggtctctttggtcggcagggtgttcttctcctgcgtctccgttttcttcagcttggccttatcgaagctggcgatttcccccatgtctggtttgtctgccattttcttaaaacaatccgtgcagtctcgttccgagcccgagatcctggccaacttttttgtacaaagttg

SEQ ID NO: 120300 - DNA, 1161 bp, Homo Sapiens
ttccttgacaggcaagagggagtggggcagagctcgcttgacttactcatcctgcgcaaaaaaacaaaataatccttcttcccgccccaggccttcagggcagaggcctgcagggctaggccgtaggagaaggtcagggcccagggcttcagcagggggcacttgttaatggcattgaggttgatggacgcctcctcctcactctggcctccagacaggaaggtgatcccagtgacagcggggggcactgtgcggcgcagcgctgtgacggtcgccatggcaatctcctcatgagaaaacttctgagtgcaagcatggcctggggtgaccatgttgggcttcagcaaggtgcttccaggtagatgtggtggtcactcagagcttgtagacagcagccagcactttctcggtcacatactggcagcgcttcaagtcatggtccccatcagggaggatctcaggctccacgatgggcacaatgccattctgctggcagatactggcataacgggccagaacattggcattttccatgatggcgagggctgagggggtgtgttccccaatcttcagcacacaacgccacttggcgaagtcagctccgtccttcttgtactgggcacagcgctcagacagcccatccaacccttgggtggtagtctcgccatttgtccctgccagggggaccacgcccttgtctaccttgatgcccacaacaccgcccttggatttgataacttgggggaagggacgcccatcatccgccttctggtagagtgtctcatggaagaggatgacacccccaatgcaggggttcacgcggtcgtcagctgtcagcagcagctggcggtagaagcgccggttctcctcggtgttctcggtgccaatggactgcagccgcttggcaatgctcccagtggactcatctgcagccaggatgcccttgccaggtgccacgatgcggtgagcgatgtcagacagctccttcttctgctccggggtcagtgctggatattggtagggcatggtgctggtagtagcaagttcctggcacaggagaggggcgggtgtgcagggtgcggcggcagagggcggcgggctggcgagtggattcaaggagagaactgagggactcgtcaccagccaacttttttgtacaaa

SEQ ID NO: 120301 - DNA, 696 bp, Homo Sapiens
tttctccggcttccaaaagctttattggcaaatatgctctataaaagaatgatcaatcctgttgcctataagtcaatggaatgaagagctgtgtccagggacacaccacgccgtgctgaaggagactgctgttgtgtccacctcttattcatagacccagtcatgagcacaagacttgtagtcaaccagttcttcaggcttaaaccataggctgatttctttttcagcactttttactgaatcactgccatgaatgatgttcctgccaacctgaatgcagaagtccccacgaatggtgcctggctttgaatctgctggattggtctccccaagcatcactcggcctgtcttcaccacgttcagcccctcccagaccatggccacaaccggccctgagttcatgtacttcaccagcccagggaagaatggtcggtctttcaggtcaatgtagtgctgcttcaggtgttcttcagaggcccggaggaacttcatggccacgaggcggaatcccttctgctcgaagcgcttgatgatctcgcccaccaggccgcgctgcacgccgtccggcttgatggcgatgaaggtgcgctccaggttggccatggtccgggaagctggaggggccgggcggcggcgctgcgctgggagagcagagagctggtgtgaccgccacacccgggagccaactttttgtac

SEQ ID NO: 120302 - DNA, 946 bp, Homo Sapiens
ccaggcactgcataaaaaaagatggaagcaaacccaaatgcctatgtgcgaagggaggggggggcgggaaaaagagaagagtgaaggaatgatgcatgcactttttcctcccaaccatgcgctacaaaaggaagactaaatgagccaagtaaatgctcaaagtgctgaaaagacactgatcagagattgtacaaccggcaccttgcttaatattaacttattttagtaatcaatatcccattaattgctaagacaaagtgatgcccaacttggcatgccccctccccccaatttcaaggtatcatgcaaatcattattgtgctgcaattatgttgccagataagggttggttacatacagtggttaacatacaaatgatccattgggcaaacaggaatcatgacattagaaaataggtaaagaaaaattagctaccatctacagtttggtagcattgtgaccataattagggttgttgatgaagacagttgctaggtagatggggagaggctgcttacacatcagacctcctcaggtataaagcgagttcatatgctttcttgttaagtgtgcctccgtggacaccttcctttcccatgactataaccaatgctctaccagctctgccgacagccacattgtatgttggctccccaccttgactctttgtccggatgtccattgtgcagtcaccatcgacgtatagactatctctgatcactgagcatttcttcgcgccaagagtcaaaccgttggtaaagaaaccttcccggtcttttcctacaatcatatctatttctattggcgtaatgctctgaaagacgcccccggccgtggctgcccagacgtatttggcgtcgcagtagccgacaatggcggcctcctggcagcagccatcgcacatcaggttatccacgtagctctgccaaccggccatcttcgccaa

SEQ ID NO: 120303 - DNA, 864 bp, Homo Sapiens
gcgggaatacagcaggttgaccttggtgctctgcaccgccacggggctcttgctggaaatctcggccgccagcgctaaggcagcatccagcatgacctctttgtctgggaacacccgggctgaccagcccactgcccagggcctcgtcagccatcatcttgcgggcggtgaaggccagctcgttgaccaggctctggttcccgatgaccttgggcaggcgctgcagtgttcctacatcggcagccaaacccacgtccacctccttcacctggaagaaagcatcctgggcacagtaccggatgtcacaggcggtgacaaggtccacacctccgccaatgcagcccccatggacggcagcaatcacgggcttggggcacctctcgatgacgttgaaggtctcctggtatcgagtgatgatgtcacggaggtaccagctgatccgggccacatcatctcctttgggctgcaggatgtccgaagccatgtccatcaggtcaatacctgcagtgaacatttttcctgcaccagagatcaccaccgcccgacagtcagcgtctctcgaaatcttgttgaagcactctaccatctctctccagaagaccttgttcatggcattcctcttgttgggccggttgagctggacatgcagaacatgtttctgcgcagacgtcacacgaagggactcatagctgtggtctggggcttcaccgagggctactccggaagcctcctcttgtgcagaggagccagtgaggcgaaggctaatactgagtcccgggtagttggagcctgtcagtcgccgggtcagtaggtcgcggagtctgcgagaagccactatccccgccgccatcgccgccgccccaa

SEQ ID NO: 120304 - DNA, 971 bp, Homo Sapiens
ttggctcgtctgtagtgcacgccgcgggcccagctgcgaccccggccccgcccccgggaccccggccatggacgaactgttccccctcatcttcccggcagagccagcccaggcctctggcccctatgtggagatcattgagcagcccaagcagcggggcatgcgcttccgctacaagtgcgaggggcgctccgcgggcagcatcccaggcgagaggagcacagataccaccaagacccaccccaccatcaagatcaatggctacacaggaccagggacagtgcgcatctccctggtcaccaaggaccctcctcaccggcctcacccccacgagcttgtaggaaaggactgccgggatggcttctatgaggctgagctctgcccggaccgctgcatccacagtttccagaacctgggaatccagtgtgtgaagaagcgggacctggagcaggctatcagtcagcgcatccagaccaacaacaaccccttccaagttcctatagaagagcagcgtggggactacgacctgaatgctgtgcggctctgcttccaggtgacagtgcgggacccatcaggcaggcccctccgcctgccgcctgtcctttctcatcccatctttgacaatcgtgcccccaacactgccgagctcaagatctgccgagtgaaccgaaactctggcagctgcctcggtggggatgagatcttcctactgtgtgacaaggtgcagaaagaggacattgaggtgtatttcacgggaccaggctgggaggcccgaggctccttttcgcaagctgatgtgcaccgacaagtggccattgtgttccggacccctccctacgcagaccccagcctgcaggctcctgtgcgtgtctccatgcagctgcggcggccttccgaccgggagctcagtgagcccatggaattccagtacctgccagatacagacgatcgtcaccggattgaggagaaac

SEQ ID NO: 120305 - DNA, 1018 bp, Homo Sapiens
gttaaaccagacccccccaagaaggaaggagactgcggggagctttgggatttccgagcacagggatgatgtactccccagccagcaaggggattcccccaatggctgcatgcagggcccggatctcctcagtgggtcctgtgatgagggacgtgcccgtatccaggatggcagcacagcccttggcacagagagtcagccctgggcccaccttcacacgctccatgtggatctgccagtaggcagggaccgtgactggcacgaaggtgaggggtgggatgtagtgtgccgggtccgagccccccaggaccagctctcctccatcaggctcttcagggtccctgttgaggtaaaaggagaagacaggcttatccaatagcccctgctccaccagtacatccatcgggggccgaactccttccacagacagaatgggaaaaccgaggcccaatatcccatcaaaatgggcaaaagcgaagaccaggctgggctcccagagagcctccccgaaaatcactgatgcacccttgattccaccaatagtcagcttgtcctcgctcaggattccatctacccgcccagttccatattgaatggcaaacttggtcccattggcctggaaggagctagaggctttgggatcaaatcggtggtgtaaccagcagggcacactgaagaagtggcatctcctggacgggacccagagattggaggagccagtgtcaaaggcaacagtgaagttttgtggaggcgttcccagcccaatttccccaaaatactgcacatccctgtagttcgagagaggtacgaagatgggcttgtccccaggggatggggcccccaacttggggagctctgctggttctctccatcccctcagtaggttcaggatcctgcgtccaggttggactcgatgaagagggatgcggatcagtgtggccccggaaggctccacattcagcagaggcagcagcagcagcaggggttgcagcagcggtggtggagacatcgctgccaa

SEQ ID NO: 120306 - DNA, 741 bp, Homo Sapiens
  misc_feature (342)..(384): n is a, c, g, or t
taaatcatatttattcagctcaggggtggggtggctgggagcatgaacttcaggtccaggaagatgggtttgggatccagtctttgccatttgctctctgaaataacactcaaaacatttcactcctctaagcttcagtgtccttataaaaaattgggtaaacaatactggtcccgtgacattgtgtaaagattgaatagtacataataaactgtattaaaagattttgtcaaggtgtgtggcacatggtatgtgctcggtcaatagcctttgtgtgtagtaacggctctggtagtaattttgctagctggagagatggtaataattgtgacagcaacaagnnnnnnnnnnnnnnnnnnnnnnnnnnnnnnnnnnnnnnnnnnnaaataaataaatatccccaagagtcaccgggtactgtgcccaccccaagacacatcctaagacctggcacatgttaattttaatgattatctgggtgaatgtattaataaaaggggaaagtggagccggtggcatggggggtggtgtgaatgcccaccgaggtctgaagtggggtgcagatttgttcatcagcagaaagttactcgggtcatgtctgcagtggggggctcttccctagaggccttggccggctgcctccaggtcagggggctgagttggcatccaaagactcaaaggagtgaatcgtacatgtcagtcacagggttggcttgggcaccaccgtgctggggcacccaa

SEQ ID NO: 120307 - DNA, 905 bp, Homo Sapiens
  misc_feature (254)..(296): n is a, c, g, or t
ccatttgctttctgaaataacactcaaaacatttcactctctaagcttcagtgtcttataaaaaattgggtaaacaatactggtcccgtgacattgtgtaaagattgaatagtacataataaactgtattaaaagattttgtcaaggtgtgtggcacatggtatgtgctcggtcaatagcttttgtgtgtagtaacggctctggtagtaattttgctagctggagagatggtaataattgtgacagcaacaagnnnnnnnnnnnnnnnnnnnnnnnnnnnnnnnnnnnnnnnnnnnaaataaataaatatccccaagagtcaccgggtactgtgcccaccccaagacacatcctaagacctggcacatgttaattttaatgattatctgggtgaatgtattaataaaaggggaaagtggagccggtggcatggggggtggtgtgaatgcccaccgaggtctgaagtggggtgcagatttgttcatcagcagaaagttactcgggtcatgtctgcagtggggggctcttccctagaggccttggccggctgcctccaggtcagggggctgagttggcatccaaagactcaaaggagtgaatcgtacatgtcagtcacagggttggcttgggcaccaccgtgctggggcaccactgggccctctgaccacctggagagcctgaccaggcctgccacagagacctcagagtgccagagaatctatactgtgtccttagctccacacagtcagggcttccctgaaatctgcctctctctgtcattatgcttggccgggactgctcatcctgatggcactgggcaggcagtgggctgcagaggcagagctgaggggaccaggaggcaggcactctgtgtgactttggaggatccttctaccccaagccaa

SEQ ID NO: 120308 - DNA, 873 bp, Homo Sapiens
  misc_feature (161)..(169): n is a, c, g, or t
agtgctgtcagggttcttggcaaatgataggtgctcagtcaatagcctctgtgtatagtaacagttctgttagtaattttggtagctggggggatggtaataactgtgacagcaacaagtatcttattcccatttcacagatgaagacataagctctgggnnnnnnnnntcttcaactgtcactgattaccttgcccaccccacgacatatcctaagacctggcacgtgataattttaatgaaatatctgggtgaatggattaatgaaaggagaaagcagagccagtggtgtggggggtgatgtgaatgcccactgaaatctgaagtagggtgcagatttgttcatcagttgaaagttactcgggtcacatctgaaggcggctctaggtcaccctagaggcctaggctggctgtcttcaggtcagggggctgagttgccattcaaagactcaaaggagtgaatcgtacacatcaatcatggggttggcttggccaccaccctgctggaacactacctggccttctaacctcatggagagcctgaccaggcctgccgcagagacctcagagtgccagagaatctccactgtgtccttagctctgcacagtcagggcttccccgaagtctgcctctctctgtcattatgcttggccaggattgctcatcctgatggcactgggttgcagagagagagctgaggggaccaggaggcaggcactttgtgtgactttggagggtccttctaccccaagacctcactgctgccatctgtaagtgaaggaactggaccagatggggaataaggagggctccatctcatgtcgaaggccaaggctaagagtggctgcctggggtgcagccaacttttttgt

SEQ ID NO: 120309 - DNA, 908 bp, Homo Sapiens
caacattagcataaataaagctcagggagaagaggggggtgaggtgaaagatgagctggaggaccgcaataggggtaggtcccctgtggaaaaagggtcagaggccaaaggatgggagggggtcaggctggaactgaggagcaggtgggggcacttctccctctaacactctcccctgttgaagctctttgtgacgggcgagctcaggccctgatgggtgacttcgcaggcgtagactttgtgtttctcgtagtctgctttgctcagcgtcagggtgctgctgaggctgtaggtgctgtccttgctgtcctgctctgtgacactctcctgggagttacccgattggagggcgttatccaccttccactgtactttggcctctctgggatagaagttattcagcaggcacacaacagaggcagttccagatttcaactgctcatcagatggcgggaagatgaagacagatggtgcagccacagttcgtttgatctccaccttggtccctccgccgaaagtgagtcccggaaatgggctaccatactgttgacaataatatattgcaaaatcttcaggctccagtctgttgatggtgagagtgaagtctgtcccagacccactgccactgaacctgtctgggacgccagtggccctgttagacgcatcatagatgaggagcctgggagcctggccaggcttctgctggtaccaggctaagtaggtgctggtaacactctgactggccctgcaagagagggtggctctttcccctggagacaaagacagggtgcctggagactgcgtcaacacaatgtccccggtagtttctgggagccagagtagcaggaggaagagaagctgcgctggggtttccatggttccctctgggccaacttttttgtacaaag

SEQ ID NO: 120310 - DNA, 826 bp, Homo Sapiens
ctttgtacaaaaaagttgggtcaggacacagcctggacatgagggtccccgctcagctcctggggctcctgctactctggctccgaggtgccagatgtgacatccagatgacccagtctccatcctccctgtctgcatctgtaggagacagagtcaccctcacttgccgggcaagtcagagcattagcaactctttaaattggtatcagcagagaccagggaaagcccctaagctcctgatctatgctacatccactttgcaaagtggggtcccatcaaggttcagtggcagtggatctgggacagatttcactctcaccatcagcagtctgcaacctgaagattttgcaaattactactgtcaacagagttacaatatcccgctcactttcggcggagggaccaaggtggagatcaaacgaactgtggctgcaccatctgtcttcatcttcccgccatctgatgagcagttgaaatctggaactgcctctgttgtgtgcctgctgaataacttctatcccagagaggccaaagtacagtggaaggtggataacgccctccaatcgggtaactcccaggagagtgtcacagagcaggacagcaaggacagcacctacagcctcagcagcaccctgacgctgagcaaagcagactacgagaaacacaaagtctacgcctgcgaaagtcacccatcagggcctgagctcgcccgtcacaaagagcttcaacaggggagagtgttagagggagaagtgcccccacctgctcctcatttccagcctgaccccctcccatcccttggcctctgacccttttttcacagggg

SEQ ID NO: 120311 - DNA, 804 bp, Homo Sapiens
ctttgtacaaaaaagttggcccagacggaaccatggaagccccagcgcagcttctcttcctcctgctactctggctcccagattccactggagaaatagtgatgacgcagtctccagccaccctgtctgtgtctccaggggaaagagccaccctctcctgcagggccagtcagggagttaccagcaacttagcctggtaccagcagaaacctggccaggctcccaggctcctcatctatggtgcatccaccagggccactggtattccagccaggttcagtggcagtgggtctgggacagacttcactctcaccatcagcagcctgcagtctgaagattttgcagtttattactgtcagcagtatagtaagtggcctcctccgatcaccttcggccaagggacccgactggagattaaacgaactgtggctgcaccatctgtcttcatcttcccgccatctgatgagcagttgaaatctggaactgcctctgttgtgtgcctgctgaataacttctatcccagagaggccaaagtacagtggaaggtggataacgccctccaatcgggtaactcccaggagagtgtcacagagcaggacagcaaggacagcacctacagcctcagcagcaccctgacgctgagcaaagcagactacgagaaacacaaagtctacgcctgcgaagtcaccccatcagggcctgagctcgcccgtcacaaagagcttcaacaaggggagagtgttagaggggagaaatgcccccacatgctactcaattccagcctggaccccctcccatactttg

SEQ ID NO: 120312 - DNA, 973 bp, Homo Sapiens
ttgcacggatcacttattttatcattctcttctaacattgccttatatacagccaaggaggaggaggggtgtgagtgaaagttgagctgtaggacccgcaatatgggtaagtcccctgtgaaaaaagggtcagaggccaaagggatgggagggggtcaggctggaactgaggagcaggtgggggcacttctccctctaacactctccccctgtgaagctctttgtgacgggcgagctcaggcctgatgggtgacttcgcaggcgtagactttgtgtttctcgtagtctgctttgctcagcgtcagggtgctgctgaggctgtaggtgctgtccttgctgtcctgctctgtgacactctcctgggagttacccgattggagggcgttatccaccttccactgtactttggcctctctgggatagaagttattcagcaggcacacaacagaggcagttccagatttcaactgctcatcagatggcgggaagatgaagacagatggtgcagccacagttcgtttgatctccaccttggtccctccgccgaaagtgagaggtgacccaccatactgctgacaggaatacactgcaaaatcttcaggctccagtctgctgatggtgagagtgaagtctgtcccagacccactgccactgaacctgtctgggatgccagtggccctgttagatgcaccatagatgaggagcctgggagcctggccaggtttctgctggtaccaggctaagtacctgccgctaacactctgactggccctgcaggagagggtgactctttcccctggagacaaagacaggatgcctggagactgcgtcaacacaatttctccggtggtatctgggagccagagtagcaggaggaagagaagctgcgctggggtttccatggttccctctgggccaacttttttgtacaaagttggctacttataagaaaagcattgctcatcaatttgtt

SEQ ID NO: 120313 - DNA, 790 bp, Homo Sapiens
gggagggggtcaggctggaactgaggagcaggtgggggcacttctccctctaacactctcccctttgaagctctttgtgacgggcgagctcaggccttgatgggtgacttcgcaggcgtagactttgtgtttctcgtagtctgctttgctcagcgtcagggtgctgctgaggctgtaggtgctgtccttgctgtcctgctctgtgacactctcctgggagttacccgattggagggcgttatccaccttccactgtactttggcctctctgggatagaagttattcagcaggcacacaacagaggcagttccagatttcaactgctcatcagatggcgggaagatgaagacagatggtgcagccacagttcgtttgatctccactttggtccctccgccgaaagtgagggccggaggccagttattatactgctgacagtaataaactgcaaaatcttcagactgcaggctgctgatggtgagagtgaactctgtcccagacccactgccactgaacctggctgggataccagtggccctggtggatgcaccatagatgaggagcctgggagcctggccaggtttctgctggtaccaggctaagttgctgctaacactctgactggccctgcaggagagggtggctctttcccctggagacacagacagggtggctggagactgcgtcatcactatttctccagtggtatctgggagccagagtagcaggaggaagagaagctgcgctggggcttccagggttccgtctgccaacttttttgtacaaagt

SEQ ID NO: 120314 - DNA, 1006 bp, Homo Sapiens
ggccagtgtgttcattcgatgtgaaatagatatgcctgaagaactgtcagcgttgattcagctccagcatccctggccacctccccaccccgggagtcaagggtcgtggttctgccttgaacaggccacaggccgtgctgtagagaggccagtggtcacaatgagcccacgacaggaggaggagccctggcttgagggaaggggaaggcccaggcctgtgccgggccccaggggctggcagccaccagctcctcttccaggcatgggggacaccctgacaggatccggaagtctccatttacccaaaaatgcaagagccatgatcagtcatggcgacactgcaggcggtactgagtgaccatgtccagtccggctccgtccctcccacacgggggacaagcttctccgaggaggcctggccaaggtggaacaaataccctgatgtcgaaaaatgtctaaaaatcccacagacggaattttcaaaaagaggagaaacctcccgcgggagggaggcagcgagactccgaacacggtagcaagcactctggacagactcatgtatgaaaaagtacatcatggtttcaggaaacaagccccaccagggtgggctgcctggagatggatccctttccaaaaaccgaaaagcagaaggaagagacgggggtgaacggacggtgtgtaggggtgaggtgtcacttcagagaggttccctgggtttccggcgacgccctccttcaagcgaggccgcaggcttcggaggcgtgcgctgctgctgggtgtgcagcccccgaggggtctcggcagcgcccgggtctggctttgcgtattacagttcatctttcacagctttctgatcatcgtcttcctccatgtctggctcctctgcttcttccaggtcctcgagatcgtcatcatcccctgccccatcctggccaccgctctccaggaatttcttaaaaccatccagcgtgcgttccccgttccaacttttttgtacaaagttggc

SEQ ID NO: 120315 - DNA, 928 bp, Homo Sapiens
ctttgtacaaaaaagttggcgcaaagcctgagtcctgtcctttctctctccccggacagcatgagcttcaccactcgctccaccttctccaccaactaccggtccctgggctctgtccaggcgcccagctacggcgcccggccggtcagcagcgcggccagcgtctatgcaggcgctgggggctctggttcccggatctccgtgtcccgctccaccagcttcaggggcggcatggggtccgggggcctggccaccgggatagccgggggtctggcaggaatgggaggcatccagaacgagaaggagaccatgcaaagcctgaacgaccgcctggcctcttacctggacagagtgaggagcctggagaccgagaaccggaggctggagagcaaaatccgggagcacttggagaagaagggaccccaggtcagagactggagccattacttcaagatcatcgaggacctgagggctcagatcttcgcaaatactgtggacaatgcccgcatcgttctgcagattgacaatgcccgtcttgctgctgatgactttagagtcaagtatgagacagagctggccatgcgccagtctgtggagaacgacatccatgggctccgcaaggtcattgatgacaccaatatcacacgactgcagctggagacagagatcgaggctctcaaggaggagctgctcttcatgaagaagaaccacgaagaggaagtaaaaggcctacaagcccagattgccagctctgggttgaccgtggaggtagatgcccccaaatctcagacctcgccaagatcatggcagacatccgggcccaatatgacgagctggctcggaagaaccgagaggagctagacaagtactggtctcagcagattgaggagagcaccacagtggtcaccacacagtctgctgaaggttg

SEQ ID NO: 120316 - DNA, 1582 bp, Homo Sapiens
cccactttttcctgtgacccataatcccacattttacagtgcaggggagaaggggattagggggcatccaaaacaagtctctcccaaaaagaaatgatgtaaatttcacattccctctccacacaggatccaaatggtgagagtataatttacaattcatcttttcagctgtagattcctttgctgtttcttcttcttcatctgttcccacatccatttcttcatcttcgtcttgctctgtgtcttctgttgtgtgttctgctgtctcttcaggttcttcttcgggctcttcttccacctttgcatcagggtcaatgttcaaactgaggcgaagcattctttctattctatctccatatgctttagtgtctggtaaaagataccctgaccgaagcgttgctgtttcaaacaaaaccacagcaagatccaaaactgttttatcatcttcatcttccttaattcgtcgaagcatgtctctgatcagcgggtgtctgggattaatttcaaatgttttcttctgactcgcatagtaatttgtagagatgtccttgcccgtttggtacgcttgtgctttcatgattctctccatgttgccagaccatccgtactggctggccaccaaagcacacggagattctgtcaggcgctgagacaccacagccttttcaatcttgtccttaagggctttatctttcatccaattcagcagaggctcaaattctttctcaactgcttcacgactctccttagttttctcactttcatcgaacttcactccttccttggcaacattctggaacctcttcccatcaaattcgggaagggcctgaatacagtattcatccacaggttctgtgaggtaaataacttcatagccctttttcagaagtcgctcaacaaatggagaagattcagcctcttttctgctggacccagccatgaagtagattttgtcttgtttttccttcattctttccacatactggtctaggctagtaatgtcagttggatgatgagaagactggaacctaagaagtttagcaagacgtgttcgattcgagtggtcttcaatcacaccaagcttgatgttggtaccaaattctttccaaaaagtatcattgtatttatcatcagcaatcttcttgatcatgtccagcgttttacgaacaagcttcttcctaatcaccttaagcagtttatgttgctgaagagtctcgcgggaaacattcaaggggagatcatctgagtccaccacacccttgacaaaattgaggtatttaggcatcatatcatggaagtcgtctgtgatgaatacacggcgcacatagagcttaatgtaatcgctctttttagatccatattcgtcaaacagaccacgtggagcagatgtgggtacaaataaaattgatttgaaggtaacttccccttcagcagtaaagtgaatataagccatggggtcatcactttcctttgaaaatgatttgtagaaagctttgtattcatcttcttctacttcttttgatggtctctgccatattggtttgatatcattcataagttcccagtcccagacagtttccaa

SEQ ID NO: 120317 - DNA, 961 bp, Homo Sapiens
cctgtccatgcggtgagggtcattcacccatttgtcaagaacggcttcctgtactttcttgatgaggcgctgcttaatgttgttattggtgaggggatgtgttgtcatgtcaaaaagtaggaagttctgtttctctgttgtcaatacacccttttccaccaggtttttagctaatcgttcccgtacatttcttaactgataatgcaattttaatggattccatgtctcaccactaagtaattcaatccagttctggaccgtttctggaggctgagtttccttaacatgcttcagagcttcatcaagaagaacatcccctgttggagcatctgacttacagattacctttcttgttaatagacttttacgtctcattccacaagcctctagttgtaaccttcctctcaatgctaattcaattaacatacagccacgtaatccagatgatatacagtcattccaaaatgatgtgtaaccctcgcggtccttgaggcccagcaggagcacttcctccatcagggtcagccgcgtttccttggagtcgcccttgtcgtcgtcgtcctgctcgtcgcggcggctctgcgcgtcgtcctcgctgctgccggcgccgccgcccgccgcccgctccttgtcggcggcgttgcgggaggcctcggtgcgccgctgcaccaggccggagctgcgctgggtcagcgaggtcatggctcccgccgaggcgccgagccgggccgagagggtcgcaggaccgaccgggtcgccctcctcctccccgcgcggcctccgatccgggtttccgtgttaaatccggacgccggggcgacgtccgtcggcagcagggccgggggcagtcatgaggaaacaggtcagggcgaagcgggctggccgggcgtcggcggggcaggagaggagcgccttcctgcctgtggccgcagtccccgaaccaacttttttgtacaaaagt

SEQ ID NO: 120318 - DNA, 680 bp, Homo Sapiens
  misc_feature (176)..(237): n is a, c, g, or t
gaagacaaaaacaaggatttattggccctttgtcgggccttgattttcttaagatagaactctaactctttgccctctagcacatagccatctgctcggccacactgtcccggccttgaagcgatgcacgcaagaagcttgccctgctggaactgctcctccaggagactgctgannnnnnnnnnnnnnnnnnnnnnnnnnnnnnnnnnnnnnnnnnnnnnnnnnnnnnnnnnnnnnaaaatctcttcttcctcaggagtcagcttggctcccttcttgcggcccaggggcagcgcatagtgggactcgtaccactgtcggtacggtgtgctgtcgatgagcacgatgcaattcttcaccagggtcttggtacgaaccagctcgttattagatgcattgtagacaacatcgatgatccttgttttacgagtacaacactctgagccccaggagaaattccccacgtccaacctcagggcacggtatttcttgttacctccccgcacacggactgtgtggatgcggcgggggccaatcttggtgttggcagctgggcgccccaactcatacttccgcttcttgtggtagggctttctcttgcccccggttttgcggcgcttgtgccagttgtcccgagagatgcccgatcatcgctcggcgctccaacttttttgtacaaa

SEQ ID NO: 120319 - DNA, 530 bp, Homo Sapiens
gcacagcagccagatggcctggttcacacggcgcaggggggacacatccacagcctgtcgtctcacagtcccggcgcgcccaatgcgtgtggagtcctcccggggaccactgttgatgatggcgttcaccaggtcctgcagagggttctcgcctgtgagcaggtgtatgatctcgaaggcatgcttgacgatgcgcacagtcatgagattcttgccgttgttgcggccgtgcatcatcatggagttagtgaggcgctccacaatgggacactgagctttgcggaagcgtttggcggcataccgtcctgcactgtgaggcaggtacttggcatacttctccttcactgcaatgtaatcctgcagggaaatgtcattgatctgcacatcatcggtgctccacttcccaaagagcttgatgtctggggtctctgccaccgctggtgctgctgtctcccactcggtcatcctgagaacacagcctgagcgtctctgtcactcggcgtagggccacgcgccccaacttttttgta

SEQ ID NO: 120320 - DNA, 1378 bp, Homo Sapiens
actttgtacaaaaaagttggcgtttctaaggaactcctagatctggcaatgcagaatgcctggtttcggaaatctcgattcaaaggagggaaaggaaaaaagctgaacattggtggaggaggcctaggctacagggagcggcctggcctgggctctgagaacatggatcgaggaaataacaatgtaatgagcaattatgaggcctacaagccttccacaggagctatgggagatcgactaacggcaatgaaagcagctttccagtcacagtacaagagtcactttgttgcagccagtttaagtaatcagaaggctggaagttctgctgctggggcaagtgggtggactagtgcagggagcttgaattctgttccaactaactcagcacaacagggccataacagtcctgacagccccgtcaccagtgccgccaagggcatcccaggctttggcaatactggcaacatcagtggtgcccctgtgacctacccgtctgccggagcccaaggagtcaacaacacagcttcagggaataacagccgagaagggactgggggcagcaacgggaaaagagagagatatactgagaaccggggcagcagccgtcacagtcacggagagactggcaatcggcatagcgatagtccacgtcacggagatggtggtcgccatggagatggataccgccatccagaaagcagcagccgtcatactgatggccatcggcacggggagaacagacatggaggaagcgcaggccggcatggggagaaccggggtgcaaatgatggtcggaatggggaaagcaggaaagaagcttttaatcgtgagagcaagatggagcccaagatggaacccaaagtggacagcagcaagatggacaaggtggacagcaagacagataagacagctgacggctttgctgtcccagagccgcctaaacgcaagaaaagtcgatgggacagttagaggggatgtgctaaagcgtgaaatcagttgtccttaatttttagaaagattttggtaactaggtgtctcagggctgggttggggtccaaagtgtaaggaccccctgcccttagtggagagctggagcttggagacattaccccttcatcagaaggaattttcggatgttttcttgggaagctgttttggtccttggaagcagtgagagctgggaagcttcttttggctctaggtgagttgtcatgcgggtaagttgaggttatcttgggataaagggtcttctagggcacaaaactcactctaggtttatattgtatgtagcttatattttttactaagtgtcaccttataagcatctataaaattgagttctttttcttaattgtatgggccaggcagtccccatttt

SEQ ID NO: 120321 - DNA, 1684 bp, Homo Sapiens
  misc_feature (144)..(159): n is a, c, g, or t
gatttttggaaccttattaatgaaaatattgcttgctgataaaacttgctcaaatgctatgctgaatgtacaagtcactgattatgccaatacaacaaagataaccacatgtttgaggattgcaatgtgccagacattcactgnnnnnnnnnnnnnnnncacacaactaaacaaaatccacacaacaaacatctgagaatctggacacttcacatcagtgttttgaagtgtttcattaatatcttaagacaagtgtatcaaaaccttggcatgatttaatttcaagtcgccaattttgtttttactaacatcagaaagttatggctacactgccaacgccgggtctgcttaatttgacttaagagtttaatatgacttaaacattaaaagctcacactaccccgaaatatataatttcacgcatacggtgacattcaacattcaagtgccagtgtttttgtactgtcttttggtcaagtttctttaaactttcaaagaatcacttttaggcttacaaaaataaatatttgtcaaaatgttcaataaatattacataaaactagcagcaaaaagtatctagaaatctgtcgtgtgcaaatagttttcttcccaactatcattcccatggtcccaaataaattttagaatctagtcccatccccttcctagacaagctgcgttcaacaatctccaagagacaaagtaagattggaagtttaaggacacgcacacaagacatatatataaaattctctgaatgtgcaataaaagaagtactttgtaaaaagttatgggcaaaatgtccaagggctaaacctagactaatgaaatagcaccataacaaatgacctcaatactgtcaagtgcattacttaataaaagttttagaacaaggcacaatacacttgaaaatctattgcactttaggaaatttttgccgtcttcctatgccactgtaaaaagatggagcgttttgatcaccgcattctggccacaaaattagcacagaattcaaagtggcagaggcattttagtggtggacaatgctcatctttggccagatttagcataaacagactataaatacaatggaaacctatgcaactaaaactgactaaaactgcactgtagagcagaattgacaccttgtgcagttatgtacatatttccaacctgtgtgatctcaaagatttcagtttgttactcttctggagccatttttacgaagtctatagtaagccagtttaacatctcaacgcagcttgaacagagtaatgtgaatcggcatttaaaataaagcctgctgcatttaattcttcctgttcataccctcttgaccaaaaaacatcaacactagcatgcgttattagaccaaaaatcatccagggccctaatgagggctggtcattgctgtggtcagccattctaccatttcaatttcatttatggcaggcatttaaaaagtctaagtagatgaattctcctaaaaacctatttcaagttatcagacctttaaactttccctgtaatagtatgcccacatttggctagctcataattaatgatctgcctaaacgttgaaagaggaattgctgtatttacttgcattaactttgaaaacagtgctttgaatgtatgcatgttttttaaagcatcacctcccaacttttttgtacaaagttgg

SEQ ID NO: 120322 - DNA, 1674 bp, Homo Sapiens
ccagcagaccctttggcatgccgcccttaccaggaagccagagggtttaggagctcgccatccatatttatttgaaaaggtcaaaaggagcatctatgagacaagggaggggtgcaggctgaagcagcgcctcaacagccagggacatgtaggcaacacgagcaggcacagcgcggccaccactgtccacacgctcacacaagccaggcccgcagggccttcggagagctagcaggttacattcaggcagatggccctcttcccacccaaacccacagaaccccaaacaaggcatcaccaggaaagacacgggaaagccaaatcacagttgaaccagggacagagaacccttggccccactgatgtcccaagccaccagcagctgcttccaaaatccctatgctattacagtgggaattacatcatttaaaaagcctgattattccaggcttctaatctttcatataaaactgcctttgttttgctgctttgttcaactgagaggcccaggaaagcggggagggtccctgatcagggcaggaggccacctcagaagcccaggcccaccagtgcccaagcacatgtcagggctcagaacaaggcctcaaccaagagggttgatggcctccagtcaagaaactgtggctcatgccagcagagctctctcctcctccagcaggcgccatgcaagggcaggctaaaagacctccagtgcatcaacatccatctagcagagagaaaaggggcactgaagcagctatgtctgccaggggctaggggctcccttgcagacagcaatgctacaataaaggacacagaaatgggggaggtgggggagccctatttttataacaaagtcaaacagatctgtgcgttcattcccccagacacacaagtagaaaaaaaccaatgctgtggtttctgccaagatggaatattcctcctcctagttccacacatggcgtttgcaatgctcgacagcattgcactgggctgctgtctctgtgttctggcaccagtagcttgggccccatatacacttctcagttcccaacaagggcttatgggccgaggggcaggctccaattttcaagcacacgaaggaaggatccatcacctccaccaggatctcgatcagcacgggctcgtactctgccacaaactgatcacactgcttctggtaagggtctggcaggaagctgcagcctttctcaagagcagccaggatctcctgcttggtgctgtttttctccaggttgcgatccaaataacccaccagcttcttgcacacttcgcagaagccaccgtcctttggctgagtcacgtgaacggtcagtgcaggcagccgcgtgccagagcagaggtgcagcatgctgcacaccagctcagggctgacctcctccagcaggatggacaggatggagctgccgtacgtgtccaccacctcctggcactcttccgacagggacttcggcagcttcgagcacattttgtcaaaagcgtcgagtatttctttctcagtcttgttgttgtcaatcagcttggtcacctccttcaccaggaattcacacacctcacagtaaacatcagactttgctgggacctcgtgcttcttaatgggctccaccagttccagggcagggatgacattcttggaggccactttggcgccaa

SEQ ID NO: 120323 - DNA, 415 bp, Homo Sapiens
gtgatgcctcgtgatctatccataggcctggaagatcagcactgggatgacgatgagcagaatggtcatgaggatgcccagaatcagggcccagataataaggcacttggcggtggaggcataggcctgggccccggtcacgtcgccaaccatcttcctgtccctagacttcacggagtaggcgaatgctatgaagcccaggcagcaggggttcatgaagagggtgttgaacagggaccagacgacatggtcgggcacggaggtctcgctgcggatgtggatcacggtggacgtcgggggagcagggttgtggggcgcccccagcacagccacctcgtgctcctccttgagcatctcatagttggggggctggccactgttgacaggagagaagtaagaaggtggacagtgtcca

SEQ ID NO: 120324 - DNA, 1099 bp, Homo Sapiens
tacaacttggaatggatttgaggcaaattgtgccataagcagattttaagtggctaaacaaagtttaaaaagcaagtaacaataaaagaaaatgtttctggtacaggaccagcagtacaaaaaaatagtgtacgagtacctggataatacacccgttttgcaatagtgcaactttttaagtacatattgttgactgtccatagtccacgcagagttacaactccacacttcaacaacaacatgctgacagttctaaagaaaactactttaaaaaaggcataacccagatgttccctcatttgaccaactccatttaagtttagatgtgcagaagggcttagatatatccagagtaagccacatgcaacatgttacttgatcaattttctaaaataaggttttaggacaatgacagtaagataagggaagaaaacatggaggaatgaagtcctaattactatacatgcatatttttttgacagtagggagaaaccttttacagataagttacaaacaaagaaaaggcaaataaacaattttgtacaagaaatttaacacattctgtacaaggtcttcactttgctgtcatcatttgtacaaactcttcatagtttacttgaccatcaccatcaatatctgcttccctgatcatttcatcaacttcttcatctgttaacttctctccaaggtttgtcatcacatggcgaagttctgcagcactaatatagccattgccatccttatcaaacacacggaatgcttctctaatttcttcttcactgtctgtgtctttcatttttcttgccatcattgtcagaaattcagggaagtcaattgtgccattaccatcagcatctacttcattaatcatgtcctgtaactctgcttctgtgggattctgcccaagagatctcattacagttcccaattcctttgttgttatagttccatcaccatctttgtcaaatagtgaaaaagcttctttgaattctgcaatctgctcttcagtcagttggtcagccatgctgcaagcgctaccggtttccgagacgcgaccactactttagccactcagctcgcccaacttttttgtacaaag

SEQ ID NO: 120325 - DNA, 1208 bp, Homo Sapiens
  misc_feature (527)..(834): n is a, c, g, or t
ggggccccatagtgtgcatcatgtcccaacctgttactctctccccctcttcttccatgaggtcttgagaccaggattcctaaaacaaacaggacgagggacctttagacacgcaaggagacatgcctctagcaggatcagggggactggggtcgggagggtggggcaggaaggaagccagaatcagaagtatcccagccctgataaggcacccacagaaacaacctagcctctgaaacagcagatcaagtccagggagaaagggagtcaaggttgtaagcaccctctgcccagccttactcactaaaaggccaatacattacaaaggaaaataagtctatttataaaaaaaagtctaaaatgcttagattctccttaaaccttcctatttcaacaccaaaggccaggttgcagcttcagatgtcttaagggtttgacctgaagcccgtttcagggattatataaattaccagcctgaaggaagctgaatgcttaaagcaccaaggaggctgttaactgaagtttcnnnnnnnnnnnnnnnnnnnnnnnnnnnnnnnnnnnnnnnnnnnnnnnnnnnnnnnnnnnnnnnnnnnnnnnnnnnnnnnnnnnnnnnnnnnnnnnnnnnnnnnnnnnnnnnnnnnnnnnnnnnnnnnnnnnnnnnnnnnnnnnnnnnnnnnnnnnnnnnnnnnnnnnnnnnnnnnnnnnnnnnnnnnnnnnnnnnnnnnnnnnnnnnnnnnnnnnnnnnnnnnnnnnnnnnnnnnnnnnnnnnnnnnnnnnnnnnnnnnnnnnnnnnnnnnnnnnnnnnnnnnnnnnnnnnnnnnnnnnnnnnnnnnnaagtttcttaaatacagaaaggctatgctgatacagtgttttttgccctttaattgttattatttcttaatttaaaaagaaacctagggcttagatagtcctatcttctatttggatgtcagcaaggttaaaaagtgcaatgccaggagtatgtagctataggtggcctgtggcatttgcttacagaaacaggcagaaggatgccgcaggcaccaggaggcacttgtctaagaacaacaacaacaataacaaaaagctgctgagaaaggagggcaggggaacaaaacaacacaagacatttcctttttctccctctagccaccccccgccacatcccctgatcatgggtctcagccaacttttttgtacaaagt

SEQ ID NO: 120326 - DNA, 1001 bp, Homo Sapiens
ccaggaaatgagcttgacaaagtggtaggtgagggcaatgccagccccagcgtcgaaggtggaggagtggtgtcgctgtgaagtcagaggagaccacctggtgttcagtgtagcccaggatgcccttgagggggcctccgacgcctgctttcaccaccttcttgatgtcatcatattgggcaggtttttctagacggcaggtcaggtccaccactgacacgttggcagtggggacacggaaggccatgccagtgagcttcccgttcagctcagggatgaccttgcccacagccttggcagcgccagtagaggcagggatgatgttctggagagccccgcggccatcacgccacagtttcccggaggggccatccacagtcttctgggtggcagtgatggcatggactgtggtcatgagtccttccacgataccaaagttgtcatggatgaccttggccaggggtgctaagcagttggtggtgcaggaggcattgctgatgatcttgaggctgttgtcatacttctcatggttcacacccatgacgaacatgggggcgtcagcagagggggcagagatgatgacccttttggctcccccctgcaaatgagccccagccttctccatggtggtgaagacgccagtggactccacgacgtactcagcgccagcatcgccccacttgattttggagggatctcgctcctggaagatggtgatgggatttccattgatgacaagcttcccgttctcagccttgacggtgccatggaatttgccatgggtggaatcatattggaacatgtaaaccatgtagttgaggtcaatgaaggggtcattgatggcaacaatatccactttaccagagttaaaagcagccctggtgaccaggcgcccaatacgaccaaatccgttgactccgaccttcaccttccccatggtgtctgagcgatgtggctcggctggcgacgcaaaagaagatgcggctgactgtcgaacccaa

SEQ ID NO: 120327 - DNA, 937 bp, Homo Sapiens
aaagtcaggtgcttcttgtcgatgggtttaatgacaaactttttgtcattgaaagagatgttctgatttcactccaaggaaagccaatctttggggttaacttatcatctttctcataaatattcagtccaagggcatcaactccaagccaaaggtctgttcctttcttgttttttatctcgaaatagttgattccatacatttccaggtcgtgagcaatcttcaggtattccaacatagcattatctttgagcatcccacggtgttccgcatgccacacctggatccggtcctcccactggtccctggtaagtttgtgctggtccatcactctttgagggatcagccgctcagagctgaggtacccagacttgtgcacttctttgttgtagtccccaaacttggcctgcacagcgtaggaccccaagagcacggcagtctcaggggggcagtagatctcatcgctaaggattccttccttcacttggaggaagaaaagtttctgggtgatgtcctggatgagctcctcagccacatcttcagggtagaacttggcccggaacttgaactggaggggattctccttcctgacctcctgggcagacaccttcttatccagcttcagccaggtaggaaatcctttattatccacatagtggaggccaaagtaccacacttcccggaggccgatagtctttaccacctgatcaaaaagctgttttccagttgtatttggctggattgcaaactccagctctgcatccatggtggtaactcggacattgattggtttcggcattttcggtttctggtgagtatcctcgatccccgaaaacacgactatccagcagcagcgaagacgctgtcccaacctggagtcagagcagaacccttagagcgcccgcccgccctgcctcgtcctcctgccgcgccccaa

SEQ ID NO: 120328 - DNA, 667 bp, Homo Sapiens
gcatcattttaaatatcacaagtaggtcttaagtgtcatctggcatcttcttttctgaagccaggtaactcttagattttattcatcagcctgctgaacagttcctttttcagagacatagataccatccaaaaatttcctgatatccttgtttttaactgttgtggcttggtgaatcaaagccgctgaatttgaaacaagctcaatgtcatttccttcaaggattaattcatctttctgggcttgagatactgaacaagcaacacctggtctcatccgaaccctgcggatgtatttttcacccaagaaatttcggatttcaacaagagacccattctcctggataacaacgttgatggggaagtgagcatacacagacctcatcttgtaacggaagcccagtgtaacacccttgatcatgttctgtacatgactacaaatagtccgaacggtagccagttcctttctgttaccccaccatttgtcaacccggagcctcttttttttctttccaagaaggctgagttctacattgatgtgattgaagtccctccgcagggttcctctggggcccttcacgataactgtgcgtcccttcagagtaatgtcgacattttctggaatgtcgacagtctgattgctgagaatagtcttcattctcgcccaa

SEQ ID NO: 120329 - DNA, 870 bp, Homo Sapiens
ccttcttccctgccctagcccagggacagagtctaggaggagcctggggcagagctggaggcaggaagagagcactggacagacagctatggtttggattggggaagagattaggaagtaggttcttaaagacccttttttagtaccagatatccagccatattcccagctccattattcaaatcatttcccatagcccagctcctctctgttctccccctactaccaattctttggctcttacacaatttttatccctcaaatattcatccctggcccaaccagtcccctgagcctccctctggtggagactcctccacccatgagctccccagagcatccaagacagagtgcacagagacctggggaaggaagctgaactttgcagagatgaggacaggtgcaggctagggtacagggtggtggtagaggagacaagttttatctccaggcccacagtctctccccaacaccccccaagaattccagagggagttctcagtgcccccggacaggcctctccagcttcacactcttggccgcttctccaatcagctcccagaaactcctgaactccagtttagagtcattgcagctgcccaggttggcaattttctcttccaggccacagttgctcggcatgagatggggcagctgctgggtgaccaggtcccgtagctcagaaggggtcagcgtctccttcccaccctccacggagtactggtgaaagttcttgatgagggtctcaatggccctctccacatcactgaattcctgagcatcctctgcgttggctgaccgacactgtcccatggtgctcactgtgtctggtcctttgagggagagttctccaacttttttgtacaaagt

SEQ ID NO: 120330 - DNA, 617 bp, Homo Sapiens
  misc_feature (68)..(78): n is a, c, g, or t
aagtttttaaactttttatttgcatattaaaaaaattgtgcattccaataattaaaatcatttgaacnnnnnnnnnnntggcactctgattaaactgcattacagcctgcaggacaccttgggccagcttggttttactctagatttcactgtcgtcccaccccacttcttccaccccacttcttccttcaccaacatgcaagttctttccttccctgccagccagatagatagacagatgggaaaggcaggcgcggccttcgttgtcagtagttctttgatgtgaaaggggcagcacagtcatttaaacttgatccaacctctttgcatcttacaaagttaaacagctaaaagaagtaaaataagaaggcaatgcttgtggaatgtacagtgcatattggcggcgcacgcctcattacgattcgcctgcttgcttctcctgttcaatcgtttctttggaaggcagtggatttttctcttgcgtctctgtcttcttcagtttcgacttatcgaatttctcgatctcagccatatcgggtttgtcagacatggttgcggaggaaaagcgaagcgaggcgcacgagtacgagcgaagttatggtctgcgcagtggccaa

SEQ ID NO: 120331 - DNA, 963 bp, Homo Sapiens
ggggtccaggatcagctggcagaaggtgcgtggcagcttcttcccttcggggctggtggctgacttgctgaacttgccgttggctgggtcaaagtacctgtcaccccacagctttttcatcatgtcctctactttcttggcccgctcggcaggccccaactggccctcccccttggcggcgaacttggccacatacatctcggcaaactgcttcagggtgaaggcccacccgtggaggccagacccaaagcccacggtaccgaggacaggatcgatcatgatgttgcccatggggccgctctcgccctcgccgtaggtggagatgatgacgttcacgttctccacgatgcgctggaaagtctggtagagctcctcgggctccagctgcagctccagcagggcgcggtccatcttgttcatcatcagcacaggcttgatgcgctcggcaatggcctgccgcagcactgtctccgtctgcacgcacacgcctgacacgcagtccaccaccaccaatgcgccatcggtgactcggagggcagcagtcacctccgaggagaagtcgacatgcccgggggagtcaatgaggttgatgaggaagccggcaccgtccttgctctgcttgatgaagttcaagtcattctccgagagctcgtagaagagggagatggcagttgacttgatggtgatgcaacgctcctgctcgtccttccgggtatcagtgaagcgtgtctccccggcccgggccgaggcgatgatgcccgccttgcacaccagggagtctgtcagcgtggacttgccatggtccacgtgggcgatgacagacatgttgcggatgttggccttcttgtccatgatggcgcggatctggtctaccgtgaagttcaccatggtggcggatggcggtggattctcccaggtagaaccgaaagaagcgagtcgcgccgaggatggcggcgacgccaa

SEQ ID NO: 120332 - DNA, 1002 bp, Homo Sapiens
aaataagctttggattaataccgagttaggcgcagtatggcaggcaggggcgaaaaggggccggggaggaggggccactacagagatcagagtccgggggcggcagctgggcaggccgctagcaggagacctccatggacttgggcccggcgctgttcccagcagcacccgagttgggggtgatgtccaggtgggccccctcgctggtgtgcgagcggctgcgggtgccctcgctggtgtgggagcggcttcgggtgccctcgctggtgtgggagcggctgcgggtgccatccagagaagtgacgctggaaccagaggctgtgcgggaccgcatcaggcgggtcatgctagccgagggcatgtatcccatgccctgcacgaagtacttgaaggcctcagcgagcttggccggctgggagatctgcgggaggccgccacagtccgccatcttgaggagagtggtctttgttgggtccaattttgagttgcactccaccacggcatccactgcaggcgagctgtccccaaccaccaacagagcagggcactgcagggtgactgtgtgggttcccggcattggtcgctcaatctccaggtcgcgccggctgttgtaggcattgatgaacaggtgcaggttgccggggttcatgtcattcacaatgtgctggcggtaggtgtggaccacttccacgttactctgcatttcttccttcccaaaaaggtgggacaccaccatgtccggcagagcttgggtccatcctgagatcttggaggcggcccagtccatccagccttccgcacaagggttcacgttgataaggacaaggccctccaccatctcagggttgtttagagcaaatcgagttaggatgtaggcgcctgctcctgttcccatgccaataatgcttttcagcccaaactgttgaaggactccaggaagcatttcagccagctgatccatggaggggtacatgtaccctgcggggaaggaggctgcgccaa

SEQ ID NO: 120333 - DNA, 898 bp, Homo Sapiens
tttatggcattgttgagcagtgacccagagctcttgaaacagccattgtctttctgctctgggagagccatatgagggcttgggtaatgtgtgcttcatcgatgaagatgtaggctcgagcttgggcaaaagtcttcagaacaaaggctgtgagccaggtgttgccctggttctgccatatcgctccccaaaggtgctgtaggagccatcatagtgtttgtagttcaactgtctctggtaaccagtgttgagatagccaatggccttggacttgatctctggagtaagctgctgtgtttcatttagataatccagtacatagatgttaggagcaaagaggaccatattctgctctccacagccatagggcatctggagaagattttgtgtgttttgcatggcagagcctaatatgtctcccaaaactgagacagaagctcgggcagattcttctaccacatttggtggcagtttcagggataattcttcagaaacctcaccacctgatggacaaagtagggagttgaatgttgtttccttctctagtccttcaggttcaaccaacagaggcttgatgactgtgtctttccttccgtgttcaggaactgaaggcacctcagtcccacacagctcttgagactctagtgcctctgcgctcacagtgaaattcacatttcctaatgactttggggttactgcccaggacacagtttgccgcccgtttgcacagatgcagtgaggcgcttgttccttctccactgggacagctaggaaggcgggagaggcttccagctgcacactgacccggatgcatttgggaaggtagtttaggaccgtggccttgagtgtgaaggcctctccacgaatcacagagtaaggcattgtgagctccacccaa

SEQ ID NO: 120334 - DNA, 1524 bp, Homo Sapiens
ttgggggtgaattcggggacttgcacagactgcaggaatgtggccacagcagctcggtcctgagagccgtcagcccgtaggtctgggcaaacaggttggcagcagccatcacatagtccagatgcaggggattgttgacatcaaaggtgagcgggtgtggacagcgtttgggcccagaccagaacggcgctcctgagcttgtgagctggtcaggagggaagttgtgcagcagctgccggatgttgttcgagtactgggtgtgccagtggtggcaggcccaggtcacgcagtcagcccaggtctgtggtcgctgcagcaccaggctgcgctgcacagcctccagcacctccaagggctgagtgcctgccagccgcagtgttcgctccacaaacttggggtctgtgaggtactggttgacattttctgctggctgcttgaagaggccttcaaactcatcccgagcccactgcagggtgtgctcgatggcattagggaagttcttcagggtacagatggggatggacttctcaggtgggtcctggctggaactgtacgactctgtcaggaaggggatcaccacctgcacattgcctttggtgcccagtgtgcctgactccagcagtggcttccggtagtagacacagcggcggtccatgtacatgcgggcatccacgttgtccagggcattggccacgccatctaggttttggaaaaaatcgtcatcatagatgcgctccgtgtcaggacccacacggttctggtggcttgtcacccggatatgtggattcatttggcgcacagctgcagcagccgtgtcagactttaacttcgtgacatcccagggccggaaaagaaactgtcgattcagatttgacttctcaatggtgtccatgtctgtaacgatgatttctccaccctccccgcagcccagcccaatcatggcaaagttcttgagcagctcacagccaatggcccccgcacccaccaggaaatacttctgcttgcccagcttctcttgcaggtctgagccaaacacagccacttgcccgtcataacggttctggcgctggaggcacttgtcctctgtgaggacctctttgtcctcagggagacactcaagggcatcaaagtatagccactgcatgatgggcatgaacttcccggagcaggccttcatgacttcctgggcagccaggcccccaatgaaggcgtttatgggtgccagatccccagcagccacatatgccagcttccggatgaggtcctcgtccaggttattttgctgcactgctggcagggctcgagcattcacagcctgtgctaaggctaccagttctgctgcatcctcctcattgcggggccgaggtggccggccatgctgagcacagaactggtgcagggcctggaagccaatgtgcagctgggcagggcgagaaaacttggcgaagtccgtcaccacaaagtcaggttctgccagtgaggccaccaaggatttaaagctaatcttcttaggtactttgccaa

SEQ ID NO: 120335 - DNA, 648 bp, Homo Sapiens
tccccttttcccctcagtcgcctcgcgcctgcagtttttggctttcacccccaaccagtgaccaaagacttgaccactcaaagtccagctccccagaacactgctcgacatggacaccggtgtgattgaaggtggattaaatgtcactctcaccatccggctacttatgcatggaaaggaagttggcagtatcatcggaaagaaaggagaatcagttaagaagatgcgcgaggagagtggtgcacgtatcaacatctcagaagggaattgtcctgagagaattatcactttggctggacccactaatgccatcttcaaagcctttgctatgatcattgacaaactggaagaggacataagcagctctatgaccaatagcacagctgccagtagacccccggtcaccctgaggctggtggtccctgctagtcagtgtggctctctcattggaaaaggtggatgcaagatcaaggaaatacgagagagtacaggggctcaggtccaggtggcaggggatatgctacccaactcaactgagcgggccatcactattgctggcattccacaatccatcattgagtgtgtcaaacagatctgcgtggtcatgttggagtcccccccaaaggcgtgaccatcccgtaccggccc

SEQ ID NO: 120336 - DNA, 423 bp, Homo Sapiens
tagtttgcatcagtaagaaagtttattgaaattcattagtaaatgagaacagaaagttgtttttctttccattaaagaacactttctggtaaagtgaaaagaagaaatacagaaaccacaaaacaccttgtagacaccttattttcaaggtctatttccatagaccatcaagacagaagtgttttcttggagactttgttttccatgcatctgtaaataatggtctgtgtgaagggagactctttcctcttgatgcagtttaatagtagtgtttcttggtttctgattcaaccatagatgaaagaactctaccgtcgggcgccacctcttcaataattgtcttgattactctggttttgttagtatcttggtcccttagatgaagactcgcccacggacccggaagaggaggacttgtggcct

SEQ ID NO: 120337 - DNA, 539 bp, Homo Sapiens
gacctcatgcaatgccctccatgttaatattcatcagaaaatggataattaggggggccagcaaaaatatcaagggtcaaatatcgcacatttctgtttaggccatctatggctttcatctcctctgaagtcaactggaattcaaacacctgcacgttctgtctgatgcgctgctcattgtagctcttggccaggaccacaaccccacgctgcagctggtagcgcagggcaatcagggctggggttcgcttgtgcttttttgccaaggcacaaaggactgggtcctccaagagcaccggggagttcgggtccacccatggttcttctcgatgggatcccagttttatgccctgatagtttgtagcagactccctctgaacacctgtggaacatgctgacctcccagtgtctttcgaggggaggcctgcagcacagcccctcgagttctcttccagctgcttctgtggagaggaaggtgcttgttgactgctgataatactggttgtttacattcgtctgagccaacttttttgtacaaa

SEQ ID NO: 120338 - DNA, 854 bp, Homo Sapiens
  misc_feature (637)..(659): n is a, c, g, or t
ggctttctctaatgctacaacgctattgtgacatgaaagagtgataagacactacagtaaatcgtacttgtggaattcaggcctggaaggggctttggcaaataattaagccagccctctctttgtaaaaaggaggaaaagtatctgaagtgacttaccaaaggcttgttagcagagatgtttggattaaaatccagatattgacaaattcacccccaaatcccatctctagtttcatggcccacccactaaatcatgtgctccttttaaatctcctttatgcgctgaggttttagttatacaaaaaccccttccagtcaaacagaaaaaattaattcaaatatggaaagaaaaatcaaactttcagtattttcgtgactatcttgagtagttcattttccaacctcttagacagctgacagacaccactaacctgatcacctatttcagagcttcaaagatccttaatttccccaaagacttcctgagcaaaaggactacatgtgggaaatcaatgaaaacaggaatgagaagagaaagttaaaaattggttgcttttgttcctgtcattggggacttttggtcttctaaacattccttgagttcctccacatgagtttttaatatcaatctagcnnnnnnnnnnnnnnnnnnnnnnnggcctctgaaagtcaggatactgaccacctcggcatctctccccttccccactgcttgcgaatgccagtgctggcctgttccttaaacgcaccagctcatcccccagagcagcctgtgtgctctgccagcgactgctacttctcctccggcctcagctcaacatcccaccgcggaaaggccccaacttttttgta

SEQ ID NO: 120339 - DNA, 852 bp, Homo Sapiens
ttggggcggcgtaccgggcggaggtcgcgcctgagtgcgtccgcacgagagggcggaaccgtctccatggcaacccgcgcgcagccggggccactcagccaggcgggaagcgctggtgttgcggcgctggcgacagtcggggttgcgagcggcccggggccggggcggccagggccgctgcaggacgagaccctgggtgtggcgtccgtgccctcgcagtggagggccgtccagggcatccgcggggagacgaaaagttgccagacggccagcattgccactgccagtgcatccgcccaggccaggaatcatgtggacgcccaggtgcagacggaggcccccgtgcctgtcagcgtgcagcccccgtcccagtacgacatacccaggctcgcagcctttcttcggagagtggaggccatggtcatccgagagctgaacaagaattggcagagccacgcgtttgatggcttcgaggtgaactggaccgagcagcagcagatggtgtcttgtctgtataccctgggctacccgccagcccaagcgcagggtctgcatgtgaccagcatctcctggaactccactggctctgtggtggcctgtgcctacggccggctggaccatggggactggagcacgcttaagtccttcgtgtgtgcctggaacctggaccggcgagacctgcgtccccagcaaccgtcggccgtggtggaggtccccagcgctgtcctgtgtctgggccttccaccccacgcagccctcccacgtcgcaagagggctgtacagtggtgaggtgttggtgtgggacctgagccgtcttgaggacccgctgctgtggcgcacatgcctgacgga

SEQ ID NO: 120340 - DNA, 1439 bp, Homo Sapiens
ctaaatgcaatctttggaagtctgctattaaaaagcccttaaggatttactaacttcgagtctaagtgcaagggacgaaagcctaaagcctgtcagacattccttttcttggacaaaaagatcaaagtttctacaaattgctaagctttgcacaagggagaagcctacatgtactagtgcatggaatcagtttcatcttatttcatggggactcttctcccactggaaagaaacagaatgaggaatgaatcttaattggtctcttcatcagaagtggtaaacttggtctctatattcacgaagtcagacagttttttaagcagactgtggaagcagacagaaccagcttcctgtagccacagaccactacatggtatctaagctaaagcaaagatgaacaattatccagattcacttgaactgtactaaagggcaaggttcaccactacaaaaaggaagttgtctaaaagcaagaattcaattaacgctgggtaagaaaagtcaaaacactaatgagttgtccatgaagccaactgctaagaacgcgctcaactatacgcgacatgaagacactatgcacgaagccttacttggcgagtctgaatttctattaactaagggcagagtgagggagaacaaagagctacttccgtaacattttagtatccagatagtacagcagaaacggttcccggggcaatgggtgctgcattaatcacactgattaaagcagatgaatcattcgtttttcttttctttttgtttgagaagtttgtttatctccctcttggccattccaatgtacttcaaaatgattccatgttggtttagtccaggaagcaatagtaaggaagtcactatcaggtaggtgagaagcaggttgtggacttgttgtcccacccaagcaaccgcagcaagggaaacgatcatggtcatgaagtacatcttaggtttttcttcctttagtgtgaagaggcgtttccaccaacccacagctctgcgtcgagtttttactagattgctgcaaatttcatggaatctttgctgttgttcagtggtccatttattggagccaaaaattctaggcgctagaatgggaacaaggtagtcagccaagcacaaaaacataacaaaacaggaaacgccggacagaacagatggatctagatagtagataatcagaaacaccaaagaaaccacacccatgatggcaggtggaaaccaggctctttcccatcggaggactttatcagccatcagcatcacttctccccatccttgcagctgttcttccagacttgcagtctctgcagccagcaggttggtgctgcgattatctccctccgccatcgtctcggggatgcagtctctacaagcgcaggccacctccccaacgagtcctccaaccgaaacccgcacccaacttttttgtacaaagt

SEQ ID NO: 120341 - DNA, 1196 bp, Homo Sapiens
  misc_feature (124)..(132): n is a, c, g, or t
  misc_feature (506)..(556): n is a, c, g, or t
tctacattaaaaccgttggttggaatgctttgcactttgcagagaacagaaactgaaataacctgttatacaattagtcacaaattcagtcctggagtttgttgcccatacacaggagtatttnnnnnnnnncgggtcttctttgtagcagctaggccctgccaccaatgggcttggcggagttcacaaatctgttgtaacctgtagattccgtgtcacttctcgggctctcgtctcctgataagctttgtttcctaattaaaatcttgtgccactgccatagctactgctgctgctggaaccgccatagccaccttggtttcgtggttttgcaaagtattggcctccaccgccataggggccagagcttctgcctccaaaatttcctcccttcatgggtccaaaatttgaagactgattgttgtaattcccaaaatcattgtagcttccaccacctccaaaattgcttccatcattaccaaatccattatagccatccccactgnnnnnnnnnnnnnnnnnnnnnnnnnnnnnnnnnnnnnnnnnnnnnnnnnnnaagtttcctccacgaccgaagttgtcattcccaccgaaaccacctccacgaccaccaccaaagtttccagaaccacttcgacctctttggctggatgaagcactagccatctcttgctttgacagggcttttctaacttcacagttgtggccattcacagtatggtatttctgaatgacaatcttatccacggagtcatggtcgtcaaaggttacaaaggcaaagccccttttcttgccactgcctcggtcagtcatgatttcaatcacttcaatttttccatactgttcaaaataatctcttaggtgatgttcttcagtgtcttctttaatgccaccaacaaatatctttttcacagttaagtgggcacctggtctttgagaatcttctctggagacagctctctttggttccacaactcttccatccaccttgtgtggccttgcattcatagctgcatccacctcctccacagtggcatatgtgacaaacccaaagcccctggagcgcttggtgtttggatctctcattaccacacagtccgtgagcgttccccattgctcaaaatggctcctcaggctctcatcagttgtttcaaagctcaaccctccaatgaagagcttcctcagctgttcgccaa

SEQ ID NO: 120342 - DNA, 366 bp, Homo Sapiens
aactgcatggcagagataacgaagtacagtggctaaaataaaggtcttctcaaggacgttcctttctgccacgaacttggacagatgagtttctgtttttaagagctgataagactagtagcagactcctccttaattaaaatcttctgccactgccatagctactgctgctgctggaaccgccatagccaccttggtttcgtggttttgcaaagtattggcctccaccgccataggggccagagcttctgcctccaaaatttcctcccttcatgggtccaaaatttgaagactgattgttgtaattcccaaaatcattgtagcttccaccacgttccaaaattgctccaacttttttgtacaaag

SEQ ID NO: 120343 - DNA, 1118 bp, Homo Sapiens
ttaaaagcacaaacattcaaataaaaatacaataaatattcattctaacttagcaaaggtacatggattctgtctaccaaatattattttacagtgaccacaaaaggttatttggttgttacaaagactacaatttgaagatactagataggcaaaaattttgccattattaatatcgaccaaacacagaaaagacaacagatgtgtttttaaggcacgatttacatactaaattcccttgaaattcaatgcaatttcacttcgctcatgattttcaatcacaagacacctgtgacaaatgaggaacaaatccagaagagcccatctaatctcgtcttaagtggtcccttaaatacgttaaaagcccacaatataggcatttacaaggcttttctaagacttccagctcctgaaaaaatcacaccttcacagtttcaaatcaaccacctaagttgctaaggggcagcgaaggatgctgatctgctgcgtatgcaagtctgacgcccatctttcaagtgactaattcacttgataacacccacaccccaaacaaaacaaccctctgaaacaggctgtcttggccaccaggaggaagctggtaaagacatttcccctgcctgtgagatggcatcacacacccctccctttggttctcggaaaactggtgactctgtgtcacctgttttcagttaacacttcttcagtcttccccaccttgtagcaaagcaaaacaatttttgtttgttagtttgtctgtttgcacttaaagttctaagcactttggaaagtttctaagcaacttctcacttccaagcaacaacttaaccaacactaacaacttactattattaattagtattttcttggctcacccacgcactaaattccccaaagccccagagaattcccttcaacctgcatttcctaccacccccaccacccacactgtatctctaaccaaccctctccccttcttcaccctcatccctcccagtaccagtgccaagctgcatacccccatcccccacactgcaacgcccacgggaccggtgccaagctgtccccttctccccgtcccccacaactcccacctcagggtcctcttactagaatgccaa

SEQ ID NO: 120344 - DNA, 425 bp, Homo Sapiens
gcttttttataaagccaactttgtacaaaaaagttggcagagtattcctctcttcacaccaggaccagtcactgttgcagcatgagttcccagcagcagaagcagccttgcaccccaccccctcagcttcagcagcagcaggtgaaacagccttgccagcctccacctcaggaaccatgcatccccaaaaccaaggagccctgccaccccaaggtgcctgagccctgccaccccaaagtgcccgagccctgccagcccaaggttccagagccatgccaccccaaggtgcctgagccctgcccttcaataatcactccagcaccagcccagcagaagaccaagcacaagtaatgtggtccacagccatgcccttgaagagccggccaccccatgctgaatcccctatcccattctgcgtatgagtc

SEQ ID NO: 120345 - DNA, 973 bp, Homo Sapiens
gggtcagtccaccgttttaaagaaattctggaaaaccaaagggaaactgacctctgtgacctataggcccatcctgggtacacatgccacacaagcacagaaaggaaacacaagaaaggatgttttatcgtggcctgtatccggtgccaagggttcaggggcacccaggtgtcccccactttaggcaatgtgtgtaaactgcaattgacattgtggagtgccacatggcaggtcaaagcaatattgcatttctagaagagtcaatggggctagatcttagcacacattgagtgaaaacagcataagacctattgcacaatagcactatgtacagtaaaagcacatattcacacatgaaacgtggtattttacaaatacattcatattcaaagacatgggtgcttatgggagaggatggtgtaaagaaagggaaaaaagccataaaaccagagaatctttgcatgggactgtattcctgagatcccaaaccaaagggatgaatgtgctgttatgccttaaatgtgtgcaccaggaaatgcaaactagaaagggtggctctgaagggtcctcaggtgaggaagacccccagggctgagaatccaccaccttcatccttcaaaagagtacctcagttgtctgcttacgcttcagccagcatgtgtgagcttggtcatttcctgcaagccaggcaaccacaccagtgtataagcctcaagcaaatgtcactcccaagccccaaatgggactaaggcctctgctgggctaggcgtggtgtaaatcccaggcctggaagctcctacccaaccctcatttgtttcaactcactttcaatatgtgcatagtttcataaagcagacatttccatgaggaaaagaggatggtggtgaaaggggaggggtgaagggacatctccaagtcacagaggctgcaaaactcagcatgacttgtggacggagccccaacttttttgtac

SEQ ID NO: 120346 - DNA, 1017 bp, Homo Sapiens
ttggaggatttttagggtttctcaaaaataggattcttgtcagtgtatgcatgctgagtaagtcacctttctggctctaatttctgggtggccatctgttgtccagctctgctgccaactggactttccgaaagccatgtcaactaattttttatatgctaagacaaatcgaatatgaaaagaggaagaatattctagatattctaagacatttcttaatttggcatctcagaggaggtaggtggaaagtaaaggaagagataattttgggggaaaatttgtggaaacatacaaaacgttttgctttgtatagatgctaaacagaatgggaggcagcatatttgtaacaacaaccattctgaccttttgaaacacaagcttttggagaagtcagggagagacacagtatgaataaaagcaattaacattttctttaatgtatatttttcaaagaggaccacggaatcctgttctctaacccaaggggcagtgtaggtggttttaagcccacagaatattgagatatttctcttgtggttttggtggggtggtgggatgcagaaggttattaaagatcaatttaagcatcagatagactatcccttttatttttttaacttttaggttcaagggtacatgtgcaggttgttatataggtaaactcatgtcaagtggttttgttgtacagattattttgtcacccaggtgctaagcctagtacccagtagttattttccctgctcttctccctcctcccaccctccaccctcaagtaggccccagtgtctgttgttcctttctttgtgtccttgagttctcatcatttagctcctacttctaaatgagaacatgtatttggttttctgttctgtgttagtttgctaaggataatggcctcccagctcagatggaatatctctatcatatagacctgttgttacagggcagatcggatgatgggacactgaagtcctcagcttgctaagttcagttgctctccctagcctccttttgggc

SEQ ID NO: 120347 - DNA, 817 bp, Homo Sapiens
acactcagctctggggctcctggggagcctcgcccccctcttccccggcgttgtcggccgtccacagtgtcagggtgtctcgcagcagctgcatgatgagggtgctgtctttgtaggagtcctcgctgagggtgtgcagatcagccatggcctcgtcgaaagtggtcttggccagagagatggcctcctcggggctgttggcgatctcgtagtggaagacggaaaagttcagggccaggcccaggcggatggggttggtgggcggcatctccttcttgctgatgtccatggcctcctggtaggctgaccgggctgagtcaatgatgcgcttcttgtcgtcaccggtggccacctcggccaggtagcggtagtagtcacccttcatcttcaggtagaagacccggctctcggcgtccccggcctccttgatgaggtggctgtccagcaggcccagcacggtgtcgcacacgccctggagctcagtctccaccttctcccggtactcacgcacctcgggccccttctcctccgagccctcctcgttgcttttctgctcaatactggacagcaccctccaggcagccctctggccgcccaccacgttcttataggctactgagagcaggtttcgctcttcgcaggagagctcctcgcccttctccacggcgcctttcatgaaggctgccatgtcctcatagcgttcggcctgctctgccagcttggccttctggatcagactggctctctccatggctctggggacacacaggcgggcggcgggctaactgctgcctgggaccaatccaacttttttgta

SEQ ID NO: 120348 - DNA, 464 bp, Homo Sapiens
tgacttccacctccactcctggctcaatactgatggaagtaatctgcttaacaatctcagaaggactgtgcaagtcaatgagtcggggggtgaattctcatctggaaacgatcccacgtcttagaaccttcaccacaaggagtttttcttgtagtgattctcaaagtcttggtaggcattcgaactggtcctttcactttgagattcttttcttttgcgcctcttatcaagtcagcacacaccttttccaaggattttacgttgcggcttgttagggtgattcgaattcggtgaattgccacctccggctccacgggtgtttttccggtatccttaaaagccatggctgttgcgcgcgggcttcctgaccgacttgttcctcggcgagagcgaacagcggtgagtcaggagcaggagcgtgcggaccaaaaatcctcagccccaacttttttgtacaaagtggg

SEQ ID NO: 120349 - DNA, 1453 bp, Homo Sapiens
ggggcggggagggggtgtcaggccctggacccatgcccaggacagaaaagcaggagcagaacactatcccaagaaagaccctacggaggacctctggaggcgcagggtgcagcaggaagttacaccccggcttccccagctcaggcacttttctgtcttgccccatcgcagcacggagagcctctcagatgaggaaccgcactggggccaggccgcctaggccagcatgtggtctgcagtggggtacgggggcctgaggccgtcgctgtaggtgtcgatggggtagtctccatccatgtccatgtgcatctccagcgggtcaaggggcacatcgctggagtacatggggcggtaggtggcatccaagtcatctccatagggctcattgatgggaatcatgctctgggcagcctcccaggcagccgggtcatgcttgaagagggagttggtgagctccacggacacgcgcttccggtagtctgggttcttgtcctcggagatgcggaacaggacggcagcagcgtaggtggcagtgccctcgttgcgggagtgcagcaactccatgagtggggccgaggccccctctgcatcaatggcgtcggccgcctccttgtcctgggccagctcacacagcaccccggcagccacgcgctggatgttctccaccgacgagtacaggagctgcacaaacaggggaatggtgttgagccggaagatctccatgcggttcatggggtcccgggcgaggatgtgcagtgctccggtgcagccctccacaatctcctccatcctcacaccatccgtgtagggctgctgtgtgcctgcagctacgtggcgctgggcatcctggtgggccttcaccagcagttggacgaggcgggggatgaccgctgcctcctgcagcggggcatggttggctgggcacagggccagattcctgatcaagccgatggttgccttgaccagtggccactggttgggctggttgagcagcttcacgatggctgggatgccatagttgagacgcacagagttctgggccatctcggcctcagggtggcggctagtgaggtggcgcagagcgcagacggcaggctccgtgatgtcgtccttgtcaccagcacgcaggatggcatggatgagagcctccacaccgctgttctgtgtcaccagcgtcttgttcttgctgttgttgcatgtcaggttggagagtgtgcccgtggcacaggtgaggacgttgacgtcatccacactcagctgattcaccagaatcttcagcacactctccaggccctcctgcttggtggccacatctgagaggttgcgcagggtccacaggcagttctgcaccaggcgggggctgttgctggtcaggtgcttgcccagggcctgcatcccaccagcctccacaatggcaggcttattgctggccaacttttttgtacaaagttgg

SEQ ID NO: 120350 - DNA, 1245 bp, Homo Sapiens
tggagcttggacacttgggtttgggagtgaacgagaaaaaagcttcatggggtgcctctgggtggctgtggtgggagagcaggggcagctctgaggccaagggaacatgtgatgggggccgggccttgcgcccacatgcaccctttgggagccagggagaggcggtgatggggcatcgagctggggtcagggacctgaggtggggggctgggttggacgcagctgggccctggcttagcttcctggctctgcctccccatcaggatgtctggctgtgttccccagagacccccactgaggccccgcggtggctgcagctgcctctactttttgtagttgccaaactggatggccaggcggtcagtgacgcagcggaaagtggccggctgcacctcccagtagggcacggggttgttgaagaggctgatgccgttgtagtaggcccgcttcaccccgaagcccatgggacagaagtcgttgacacccactttggtgatgttgttggagtgcagatagaccacctggaggagcttgaggtctgggagccctgagggcaccctggccaacttgttgttgtccaagtggagctcccggagggtgggcaggaagctcaggctcccgttctcgatcatcctgatctggttgtggcctaggcccagcctgtacagcttggagtagcgaagcaggtcctccagttcgatggcctggattttgttgtggtctaggtggagttcattcagggtctcagggaggtctttggggatgccagtcagcttggcctctgagatgcgcaggtagttgagcttcaggccatcgaaggctccaggttcaaagccactgttctccagtgggttcccgcccatctcgatgcagttcatgttccggagcccactgaacactcccttgggcaccttgcggatgcggttgtcgtggatgcggagctccaccagggagctgggtaggttgggcgggatctccaccaggtggttcttggagatgtagagcttctgcagcttccgcagtgggctgaaggccttctcatggatcttggagatcttgttgttcaccaggacgagggcgtagaggtgctggagacccttgaagtcatccttgcggagctcggagatgtcgttgttctgcaggtccagcagcgtggtgtcaggggagatctctttgggcacagacttcagacccaggtcggagcactgaaccacccgcaggtggcagtggcagccgaaaggccaa

SEQ ID NO: 120351 - DNA, 826 bp, Homo Sapiens
tctagggatttttggaaaatccattgtatatgttcaggatcatctccatctaatggaacccctttctccaaagggttgctcttaggccactgcaacatcgttacatactcaatacagtgttatggtagcctgggcatagatgcaatggtgcacatgggaaaattaacatgtggtggataaagttccagcgtgcatttgatacaagcagtcattccaggcagaatcacccgggcatttcctttaacaccttctgtccccccatctatcaaagggacaatggagcttggatgtaagacaccatcttcgtaatttagaagagatatcagcatgccatttatccatcttctggcgatgatagagtccagtccacatacaataatatgaaattgtcgatagaaagtgtcgttaaaatctcgaatcttgttgaaacgtggaactacattgcaattaggaactctgtcatttagaaattgtgcagcaagttcagccgtaggtcttccaatatctttatgcgtaaataaaaaatgcgtacttagattggaaacatgtatagtgtccatatctataacaggaatgtgtataaaaccagacaagtccagattattctggagatcacatcgtaagccgccagctccaatgactagaactttacatgtatctaacaagaactggagagattcagtgctcggttggaaatcagggggtgcgaagggtccagatcgctcgaggaacttctttacatggttccagcgaccttcccagtctccagtgtccccacacccaccatcaaccgccattggctcctcgccatccgccattttgccaa

SEQ ID NO: 120352 - DNA, 961 bp, Homo Sapiens
ggcccctgcagaaggcacagccgcgctttcttccaatgtccagcatggactcatccccgcaatgcagcacctgcagcacgggcggcaccttcagcttggctttttgcagcagcgttttgaggtccatcagcactgactcatcacacgctttgttgaggaaggtagtgggcgatgcctgtgtttcccgagcgcccggtgcggccaatccggtgtacatagttctcaatctcctctggcatgtcataattgatgacgtgctggatggcagggaagtccaggcccttggaggcaacgtctgtggctactaggacgtccttcttgccctcccggaatgcctcgatggccttagtccgttcctcctggtctttgcccccatggatggctacggcctcaacccccttgagcagcaggtactcgtggatggcgtccacgtctgccttcttctctgcaaagatgagtacaggcgggggtgtcttctgcaggcactcgagcaggtacaccatcttggcctcctccttcacatattctacctcctggatgacatccaggctggcagccccagcacgccccacattgatggtcacaggctttacaagggcactcttagcaaagttctgaatcttcttcggcatggtggcactgaagagcagggtctgtcgctggcccttgaagtaggagaagatggtacggatgtcaccctcgaagcccatgtcgatcatgcggtcagcctcgtccagggccaggtagcgacagatgtctaggctgaccatcttcttctgcagcaaatccatgaggcgccccggggtggccaccatcatgtgtacaccgtgtcggatggtctccatctgctctttcacggacatgcccccaatgcagagggcgcagcgcaggagtggtgagctgtcctcctgcagcaggcggcagtagtactccaggatgccatgggtctgccgggccccaa

SEQ ID NO: 120353 - DNA, 869 bp, Homo Sapiens
ttggggaagatgaaaggcagacaggtcgagaacatgcagtggcgatcttcccttttacccaggaacagtttagcttcaggactcctggtcaaaaggcccttcctgtcattggccgctctctactccccaaaggcccgcagttcacaggcagtctctgcccctaccagagtctctctccccagtctccacacattgcatatctccttgtcacacacatcctgcaaatcacagtcttgtggagatgactctcattcgtcctcgtcttcctcctcatcatcctcatcctcgtcctcctcttcctgccctgggaactcgggagactgggatcctagctcgttcctgtcggcacataagctctcgggcctctggaattccccacattccagtggggccatgccaggcagctctcttgggagtcctcctaccatccccggtgaggctttccccgtctcggagcaccaccagcactcagacctcactgctccccctaacagccccaccggccaccacccgcagccagcatctctaatcccgtctcaccccagctcctttggctccccaccccacccacacctgctgcccaccaccccggcagcacctttccctgcccaggcttcagagtgccctgttgctgctgccactgccccccacactccagggccatgtcagagctcccatctaccctccaccagcatgccgctcctgaagatgcccccaccattctcggggtgcagccacccctgcagcgggcactgtggtgggcactgcagtgggcctctcctcccacccccgagctctcaaccactccctagcactcacagggatcccgggtgctaggggcacaagtttgcacacagtggcctggcttg

SEQ ID NO: 120354 - DNA, 979 bp, Homo Sapiens
gaggctgctgaggtggagcttgcggctgctgtgcaccataagccggcatgttgctggtactgtggtacatctgacttcaatctgacctgcttgagtctgagctcctgtatatggtggctgctgtggctgaacgcctggtgggtgagctgctgaggaggaggaagcaatgctgtcgggtgttcctgaacgatcttctgcaggagcactgggtggccttgaaacctgatcatctgttaagccaaacgctgacataacatttttattgatttcatcttggttttttaaaggatcaaaagcagacatacttgctgccataacctgagtagactgttttccagaagaatcagaagcagacttttcttccctaccatccacagtatcattttcaggaatattggtggaaggtcctggttctccaggtggttccaagctatccaataaacgattcactttatttcgaagttctatcagttctcgacggagatatttcacctgacttgattcaaggggtcttggctggccattaacaaataatgtcagtttcagtatcctactgcactgaattgcaaaggaaaggtcagaactatcaaaaattgttataagatctccatcttcatctttatactttattgttacttcatcattactcagaagttttcctctgaaaactcgttgcatcattagcactaattcatcataagtaatatcttcattatgaataggaattcgccgaatatcctccccaagttgagctttgatgattagcttcccacttagatccaactgtccgttcatggtggactccaggatgttctatatatacaactctagagaaagacggcttgcggaggccgcggccgccgcctctccgcaggtctccgctgaatgggcggacgcgaggccactggactggggcgtcgcggggaggcggtggtcacggccccctcggttgcccttcgcgaccgccgcacctcgccaa

SEQ ID NO: 120355 - DNA, 973 bp, Homo Sapiens
atgagcaatgcttttcttttaatgccaactttgtacaaaaaagttggaatcaaagccagctgctaccacacgctcttctggaggaggaggtggtggcggtggaaaacgaggtggcaagaaagatgattctcactggtggtccaggtttcagaagggtgacattccatgggacgacaaggatttcaggatgttcttcctctggactgctctgttctggggtggagtcatgttttacttgctgctcaagagatccgggagagaaatcacttggaaggactttgtcaataactatctttcaaaaggagtagtagacagattggaagtcgtcaacaagcgttttgttcgagtgacctttacaccaggaaaaactcctgttgatgggcaatacgtttggtttaatattggcagtgtggacacctttgaacggaatctggaaactttacagcaggaattgggcatagaaggagaaaatcgggtgcctgttgtctacattgctgaaagtgatggctcttttctgctgagcatgctgcctacggtgctcatcatcgccttcttgctctacaccatcagaagagggcctgctggcattggccggacaggccgagggatgggcggactcttcagtgtcggagaaaccactgccaaggtcttaaaggatgaaattgatgtgaagttcaaagatgtggctggctgtgaggaggccaagctagagatcatggaatttgtgaatttcttgaaaaacccaaagcagtatcaagacctaggagcaaaaatcccaaagggtgccattctcactggtcctccaggcactgggaagacgctgctagctaaggccacagccggagaagcccatgtccccttcatcaccgttagtggatctgagtttttggagatgttcgttggtgtgggccctgctagattccgagacttatttgcccttgctcggaagaatgccccttgcatcctcttcatc

SEQ ID NO: 120356 - DNA, 900 bp, Homo Sapiens
tccactttcctccgggtgttgatgaagatgactgcctgggtgatggtcagggttttcatacaagtcacatagtgtgtccagcttccactcctctcgttccacgttgatgtagaactggcggatacctccagggtcaactcttccttcttgacaagaatccgaatggggtccctcatgaacttcttggtcacctcaagcacatcagaaggcattgtggctgacagcaaaactacctgggtgttgctgttgagcttttggaatatgtcatagatctggtccttgaatccacggcttaacatttcgtcagcttcatccagtacaaacatcttgatgtatttgggggacaggtatctccggttaagcatatcaaacacacggccaggggtacccacgatgatgtggggagcttccatctgcagtttctgcacctcagcacgcacgttggtgcccccgatacaggcgtgacaggaggcgcccatgtagtctcctagtgccatgaccaccttctgtatctgctgagccaattctcgagtgggtgctaggaccaaggcctgggtggcttttagatctaattcaatctgctgcagaatcgatatggcaaatgtggccgttttcccagtcccagattgggcttgagcaatcacatcataacccttgatacaaggtagaatggctcgctgctggatggcagagggcttctcaaaaccataggcgtagatgccacggagaagggactccgagaggttcatgtcatcaaagctgtcaacaatctcattccagttactctcgatgacgccttcgggctccatcccatcggggccattgtctctggatcgggaatcctggctcgcagacccaacttttttgtacaaagttggcattaaaggaaaagcattgctc

SEQ ID NO: 120357 - DNA, 917 bp, Homo Sapiens
ccaaaaactcggtactggtaaaggtgggtgcctgtaattgggcgccgccacagcttaaagtgtttcttatccatcaccatttcccaacgttgctctttgccctctgaatcttcattcccttctgtttgggcttttggttctggagggtggtgctggactccagagctctgaaacatatttgacatttcttccaaccgcttcatctcattaatagatctctgcaactcctcctcctggatcctctcctcgtcccaaacgaagacgccggctaacgccgccatcaaggcagaggcatggccaggacggccgtgcagccggcgccagaggcggccgaggagaacgcggcgtgagctctcggagtagaggcggccgtagagctgcgcgatctgctgcgcgcgccgcacgcgcaggcccgtgacgaagcggcactgattggccagaagcgccagcaggcccccgccccgcgtccccgccagccaggcggccagcagcctccgcgggagcatgccgcctcccgcagggcccgccgcgagcttccggggcccaaggaaccagtccggaggggcgcaggcggtggtcgcagcgtccccctaaatggccggccacgaacccgtctcacggtcccgcggccaggagccgcggctcatctgtctctgcagccaccgctgaggaagagtctcctctgaggggagagtcggtcatggcagcagacgccgggatggctccgcgactgctacaccaggcactcctgggcccgggcagcagaccagtcagccctgtggctcctcggcgacctccagcgggcgcccggggccgggatgcagggcgcgcggacagaaacgagacagacagctcaggcccagcagcacgcaagctcccgcgccttccgcgactgccacacgcgcggcgcgcgccaa

SEQ ID NO: 120358 - DNA, 996 bp, Homo Sapiens
gcatggcctgggcctctgctgagtacttggacgctcccgggccaggagctctcgcagaaggtgatgttgacctcggtctcgcagccctggtgccacaggatggtcgtgttgatgcggacttgacaggagtcctcctcacaggagtagcagcagccggttttcgtgaggctccccctgcagctggacacatctgggcaggatgcaggctgtggggtcagcaaatggactccaccctcagcctcacagaggtacacggtgcagttgtccacatggctgttgacccaggtttcattcagctggactggctggccatcgggcgtgaggcaggcggtctggacgcactccccacagcactgcccggccactctcttgtactcaaagccctggggacaggtagtattgttgcaggcatcctcctgacattgcaccgttgggtcctgggtgtccccagagaggcaggtacacatgtggcagggaagggcgcctgggaaggttgcaccaaccccgtagaaggtgccattgtacgaacacagctgaggtctgcagcggaaggtgggacagcagtcgccctcctcctgggtgcagatggactcctgccctggcgggcacacaggcaggctttgggggcaggtggttgtgttgcacacgcacaccgtctcggggcagcaggggttgtcggcccggggcctggtcacggttacgaagccgggacggttgcacggcgggggctgaccctgggcgtcacagggcaggggcttgcactgcaccgacactgaaccctcgtcacacatgcaggactggcagttgctgacccaccgctccccgggaaatttaggaaacccatcgggtcccacgcaggggcaggcctgcacgcagatgcccatgtgtgcgttgaagaggatctggtcctcagggcagaagcagccctccgccatcccctccagctgtgggctctggttcctagagttgcaggtggcaggctgtattgggccccaa

SEQ ID NO: 120359 - DNA, 879 bp, Homo Sapiens
tttcagtaatatccaagtattcatccttctggcaaagaaactggctacaattctgattttaaagaaaacctttcatgcagccaagaaactcagggctctggaggggagaggcttactctgatactttccacatgcactgcccactggcatcaagtttaactccatccaaaaccatcacatggatggccagggacaggactggctacaaaaaaaagccatgaactcagctcaccatgctaagaagactgcctctttccaggcaagattttactggagcaacataaccggagggtgtgattccaaaataccttcctttccaagccccgggttgtggataaggtctggattttggttatatgactaagggcgacagaggctgctggcatctctggccaccgtcccagtggcttagggttggaggcttcactggcaaaacaatggcactgtttaactagctcgtgttaaccattcatctacagcaagtagaatcatcagttttgcactgagcaaggaagcacatgggtctcctatgagagctaatgccagaattcacatgctttgtaaaatataggatgaggtttctttctttcttctgccccctccagaggccaaatgggtagggtggttcctttgccttctgagtgcctggatgcccccagccctcacaagaccctgctaagacactggcagtgtgccaagccttgggtgggatgggtgaacacccttcaatgactctgagaggattctggcacctggaatgacaagacagatgcttccctgcaagccaggtatgagcctttctggaaatgagatgggagctggccttggggttgaaggaagccaacttttttgtacaaagttggcattataaaaaagcat

SEQ ID NO: 120360 - DNA, 956 bp, Homo Sapiens
tgcagagttgatgaaccggtagcaatcagggcctgagaaagtcctttcttgtggaagaataagagccaagcaggaaagcttttcatcatgcaaagttggggcagaaggttcctccttgaatgtggtcatttgcacttcagctcaggagtcctgttgggtgaagtccagagtgccctttctgattcttgaagtagatgaatagcccggccccaaggaagagcaggcccagcacaaagcccccgactccactcagcatcttgctctgtgcagattcagaccgtgctctccattccactgtgagagggctcatcacacttgggtgctccacttggcaggtgtaaacttctccactccgaggaactgtttccagcatcaccagggtctggaaggtccagtctccattctggatcaggcctgtggacaccaccccagccttctcttcctggccgttccggaaccacctgacttcaatgctgcctggatagaaaccactcacagagcagaccaggaggttgtggtgctgcaggggctgagtcttggcaggatacacagtcacctcaggatggactcgccgctgcactgtgaagctctcaccaaccccgtagttgtgtctgcacacggtgtccacctggccccgcctgtcctccaggatgtccttctggctgttccaggactcggcgacaggccgccctagctccgtcaccgcccggtactcccccacgtcgctgtcgaagcgcacgaactcctcctggttatagaagagtctttccaggaactgcacccgctccgtcccgttgaagaaatgacacttatacttaccctgccacaggaaacgtggttgggtgtccccagccaaagccagtggggagctcagcaccatcagtgtcactgtcagagctgccatgcaggagcctccagggagcttcagacacaccatgctggagaacaggacccaa

SEQ ID NO: 120361 - DNA, 676 bp, Homo Sapiens
ctttgtacaaaaaagttggggtgtgtctgaagccccctggaggctcctgtatggcagcgctgacagtgacattgacggtgctgagctccccactggctttggctggggacacccaaccacgtttcttggagcaggctaagtgtgagtgtcatttcctcaatgggacggagcgagtgtggaacctgatcagatacatctataaccaagaggagtacgcgcgctacaacagtgacctgggggagtaccaggcggtgacggagctggggcggcctgacgctgagtactggaacagccagaaggacctcctggagcggaggcgggccgaggtggacacctactgcagatacaactacggggttgtggagagcttcacagtgcagcggcgagtccaacctaaggtgactgtgtatccttcaaagacccagcccctgcagcaccacaacctcctggtctgctctgtgaatggtttctatccaggcagcattgaagtcaggtggttccggaacggccaagaagagaaggctggggtggtgtccacaggcctgatccagaatggagactggaccttccagaccctggtgatgctggaaacagttcctcggagtggagaggtttacacctgccaagtggagcatccaagcatgatgagcccttctcacggtgcaatggagtgcac

SEQ ID NO: 120362 - DNA, 899 bp, Homo Sapiens
aaaaacccttatgttgtagcccacagctggagcttgagtccgctgcacgggagactctgggtgtgggtcttgacgaggtggtcagtgaactcttgatagggagacttggtgaatacagtctccttccagaggtcgggggtcaggtagctgtaggtcttagaaatggcatcaaaggtggcctgggcgaagttgcccagggtggcagtgcagccccgggctgaggtgtagcagtcatcgataccagccatcatgagcagcttcttaggcacaggtgcggagacgatgccagtgcccctgggtgcagggatgaggcgtaccagcacagagccgcagcggcctgtcaccttgcaagggacagtgtggggcttgccgatcttgttcccccagtagcctctgcgcacggggacgatggagagcttggccaggatgatggccccacggatggcggtggccacctccttggagcacttaacacccagaccgacgtggccattgtagtccccgatagcaacaaatgccttgaacctggtgcgctggccggcacgggtctgcttctgcactggcataatcttcaaaacctcatccttgagagaggcccccaggaagaaatcaatgatctctgattccttaatgggcagggagaagagatccagggacttgatcttcatgtccttgaccaagcggcccaacttggtgacgggcatccactccttatcctcggccttgcctccgcgagctccgcggcctcggccccggccccgtccacggccgcgaccccggccccggatgccactgccgaaacctccgcggaagccaccgcggttccccatcccagggccaccagggcccccgggcccccccgctgcaccggcgtcatccgccatttggtgttttgccaa

SEQ ID NO: 120363 - DNA, 848 bp, Homo Sapiens
ggtggtcagtgaactcctgatagggagacttggggaatacagtctccttcccagaggtcgggggtcaggtagctgtaggtcttagaaatggcatcaaaggtggccttggcgaagttgcccagggtggcagtgcagccccgggctgaggtgtagcagtcatcgataccagccatcatgagcagcttcttaggcacaggtgcggagacgatgccagtgcccctgggtgcagggatgaggcgtaccagcacagagccgcagcggcctgtcaccttgcaagggacagtgtggggcttgccgatcttgttcccccagtagcctctgcgcacggggacgatggagagcttggccaggatgatggccccacggatggcggtggccacctccttggagcacttaacacccagaccgacgtggccattgtagtccccgatagcaacaaatgccttgaacctggtgcgctggccggcacgggtctgcttctgcactggcataatcttcaaaacctcatccttgagagaggcccccaggaagaaatcaatgatctctgattccttaataggcagggagaagagatagatctcctccagggacttgatcttcatgtccttgaccaagcggcccaacttggtgacgggcatccactccttatcctcggccttgcctccgcgagctccgcggcctcggccccggccccgtccacggccgcgaccccggccccggatgccactgccgaaacctccgcggaagccaccgcggttccccatcccagggccaccagggcccccgggcccccccgctgcaccggcgtcatcggccatttggtgttttgccaacttttttgtacaaag

SEQ ID NO: 120364 - DNA, 1185 bp, Homo Sapiens
ggcatcaggtcctttaggagatgtaaaaccctcctttcccattttgcacacgtcacaaacgatcacacacagggctgggctgacagctggccacagagcccagcaagtcttctgggagagaagagttagggctgatactgaaggtctctttcacatctgggcacacgtctgccttcaggctgtaagaatttcattgtcgatgttaaataaaaccaggagaaagcaatgcaggtctctgggaatctcatcccttccataaggaaaatgctctgccaattcaagtttcattcagtcaggaagacagaaggatttaaggcttcggtgacaattataatcctctgagaaattatttccccttaaagtcaagataagataatagtgtttactgtactttctcttgactcttgaaatccctggtattgggtgtaggcaacttgcacctgcaatgaagtccgcaggagaggaaggtctctcctcccccgaaagctatcccaggtcacatgcgtggcgaatgcccactgaacctcggctctcatggaagcaggaaagacaccgagattcaagccttctagtaggttgaggacgctgtgctcatggcatcttcggagattttggtactggcagggtggatgcttgcaaaatacttgacatcgctgtcacggtccatctgaagagccatgatggtctgctccacagcctcctggtggcagctggcagaggccaagaaatagtctttttctagtagagtttgtcttaatgtctttgcaagcagcactcgcacgttaggaaccctgtcatttgctaaggttagcagatgcggcatgagatgcacagcaaactggtccatgggaaggcagtcatcctcaatgacagtctggcagacaaagacaaaggcttgccgaccagaccacttgggacatctgccaaagttctccacaagctcattgatgaggtccactccgaacgttggtggtgttgccgcgtgcagcttcttcaccatctcgctgaccaacttgtaggaaatccaacgaacagaagaaactttgtctgcacacagattcagagcaatgggacgtaaatagtcataaacatctctgggactatataactctagaagtaaaatcagctgttcagccagttcagctcgaaaccgccaatttctactattatctgtcaccaaaccaa

SEQ ID NO: 120365 - DNA, 636 bp, Homo Sapiens
ggggtggttgcggccttccctttccagagcagtgccctcgtcgctgcaggcaccgatctccccctgctcttgctcttcctctgtgggtgaggaggcagaagaatcacccccaccctccttccgatttctcttgaaggacaggccgctcaatttgaaaggcttcttgaaagagaatttcttcttcttcttgggggtctccttgggggggacctcccccttggcctcagcaccctggctagggggtgctggctcgatggcatcgccagtggccccggctgcctcatctgttccgttcacagggggcgactccccttcacccttgggggataagtctccattgcttttcacgtggccattctcctggccgttggccttcgcgggggaagcgcctgctgcctcctcggcggtcacgtcgccccggggagccttggagctctggctgcccatgatgggggtctgctggggggcgcttggagccgccccgggctcgcgccgcaggggatagtacggcggggtcggcccggccggcggaggggtggggctggcgcccgagggggaggggtgccgggggaagccgagctgcacctccgctccgcggccgacccgctagctgcgcccgcggccgctccgctccaa

SEQ ID NO: 120366 - DNA, 1393 bp, Homo Sapiens
  misc_feature (755)..(797): n is a, c, g, or t
gttttccctgtcaacagaatgtgtgtctgtagctgtgtatgcgcatgtattcaatatatttttaagtttttctcctaaggtttttgctgacagtgttgggaacctcacatgcttttgaagcattaaatattgaacctgtgaacctttcagaaatcctcaggttgggaaagaccccacaccttctttaaggatcatttgtctcgccatcacaggatcttggaaatgtttcctagggtgtgtaaaaattaaccaggggggaatgaagcacatttttctggcaaccaaacttgagttcctcagagaacagatgcagagagacctgctcctgcttgcccggctacaggggccactgtggagtcacactgaggctgtgaccggccataagcccaggagagcccgtggcagctgtgccgaggcgccaggacctctaagcggaagcttcccaagctaggaatggagcaacactgcaatgaaatgtgtccaccaagctcattgttcctcccgggcgcttataaagctcagatgtatagtgacgtatggacaaatacaaaaaagcattttttaaaaaggaaaggcatgagttttcccctttttgataaaaagcagcctgtgatgaagtctggagcacaagagagatgggtctcccatctggaagcctttcgcacgcagctataaaatgtaaaaactgaccgttggtaaaaagtgcttcataacaatatataatttgtgttttatgcctgtgagaaagaaaggcnnnnnnnnnnnnnnnnnnnnnnnnnnnnnnnnnnnnnnnnnnnaatctgcaaagtcctttgcacaagtctcccaactggtttggagttttcccttctgaggtttttcaccctattcttcgtagaccctgcgcttctcgttccaggcgttgtaccacttgatgaagcgcttggtgctctgcagcttggggtgcaggcagtgctcctgacctcggtacctggacacgctcttggtggtgatgataaccatcttctcctcgcagtgcgggtactttggcttcatttccagcttcttcacgtcgctgtagcggatcttgggtcccttccgggagcacttgcatttggacccgtccacacgcgcggtgtacagcgccagcagcagcaggagcagcgcggccgccaggagcctcatgctgaccggaggggcgcggcgtgggagcagggacatggggagggcgctggcccgtcggagcggcggcccggagacgccacccagctctgctcggctttctctgcccggggcgcgccttccggctctgctggctccggctgcgccgtcggtggatgcccagggctgtctgtggccgtgcgctgcgctcttttttttaaaggctccgcgctctccaacttttttgtacaaa

SEQ ID NO: 120367 - DNA, 667 bp, Homo Sapiens
  misc_feature (363)..(500): n is a, c, g, or t
gcaccagcgcttttgattggagttcttgaggtaggtgcgctcattctgtttttcgaaccacggaactttcttggcctcggtgtagattttggccagagacgagaagttgcgctcgcccaacctacggatggtctccaccaccagctggctgtatttgcccggctggttcttcttcttgctattcttcctcttcttagatggggacaacgccgccgagccgccagccttggtcaccttcttggccattccctcggcggtcgtcactggcagggcctcctcgagctccacggacatggtagcaagaggattggtggcgggcggcgcgcggaagccggggggccgcgccgggaagaggaaggcgannnnnnnnnnnnnnnnnnnnnnnnnnnnnnnnnnnnnnnnnnnnnnnnnnnnnnnnnnnnnnnnnnnnnnnnnnnnnnnnnnnnnnnnnnnnnnnnnnnnnnnnnnnnnnnnnnnnnnnnnnnnnnnnnnnnnnnnnnggggccggactaggggaccgagttgggggtcagagaccgagtccgagccggcggctggagctggggacgtagacctaggccgagccggagcgaagagaaatcccgccgaacgcgagacaccgccgccgcagcttccactggcgcctctggaactcgctgggcgccaa

SEQ ID NO: 120368 - DNA, 1142 bp, Homo Sapiens
ccttataattaagttcctgcagccacagtggtggagaagcatacttgtagaagcaaggcccagtccagcatcagaaggcagaggcagcatcagtgactcccagcccatggaatgaacggaggacacagagctcagagacagaacaggccagggggaagaaggagagacagaataggccagggcatggcggtgagggactgaggcccctaaattttggtcccaggggaaaggaagaggccagttggtccagttttgatggctatggggaagggaatgtattagtaagcatgggggagaggatgccagcaggcacctcagaggtgacaggacaggctgaaccccccaccctgacagaaaggagcttgagagctctggggctctctgggaatgtcactgctaaaatatatatctacatatatattaaccattcgtgggagggcaggggcaaggcctggggtgggatcagaggatctggcgtggcatcccgtagccagtcatgcctgcctgagacgccccgcggttggtgcccatctgtaacccgatcacgttcttgccctcttgcagctggttatccgagaagttccgaggattctccttggatttcttagggaaccagttgggatccccagagaagagcccatcatctcgggctactgccagcccacccagattcatcagcgtccgctgcacacaggccatgttctttccttcccagaggtccacagtttggaagatgtcagtggtgttaatgccatagcgctcagctgcttgcaggaactgagagatctgctccatctgcttgaaggccatggtggaggcctggatcttctttactggggcctgcccctcggggtacagtgcattaatgagctcacatagcaccgtgccatccttgagccagttctggaagttctcgcgtccaggctggggccggcccacatcctttcggcactgggtggtgatccactggatcaggatctgctccagatctgcatcatattgtttctcaatcttctgctgcacctcccggctcaggccatatgcaggtcccctgttggccattccaatgggtggcggtggctgcggggagcgttcaagcgggctggagagcggcgcactgactcaaggcaagggctgcccaa

SEQ ID NO: 120369 - DNA, 1717 bp, Homo Sapiens
  misc_feature (350)..(514): n is a, c, g, or t
tttctttcactgtgggaaataaaggctacttggttgctttagggagggcaacaatgtcagctgcataagcagcaagaatattatattttattactagtccacccttaataaagagagaaaccttaggaaatggaaagaggtgtctgttttatatttcctttgcttttcaaccattgtttagacactctcccttctagtgcttggagaaccttcatggaaactctgttcaggttcttgactctcagcgacagatgtggaggtctttgtgtcttagctctctaggcctgagaatcacatacacctgcagaatttgcctccaagtccatgtccttgtggctaatccctaggcnnnnnnnnnnnnnnnnnnnnnnnnnnnnnnnnnnnnnnnnnnnnnnnnnnnnnnnnnnnnnnnnnnnnnnnnnnnnnnnnnnnnnnnnnnnnnnnnnnnnnnnnnnnnnnnnnnnnnnnnnnnnnnnnnnnnnnnnnnnnnnnnnnnnnnnnnnnnnnnnnnnnnataacttctctagggtggctgggcccaggcttggtaagactgttggtgaactaaccaaagtgtgctgaacattattaggctctccagacatgtctagtttatattggtaaatgcatatcaattgtaaatataaaaataaaatttgcattgaagtcacattatatatataaaccaacaaagtgctatgttattgcttttcttacatgtacagggttacactggcagatgatgagagtatggcatgcaactggatttttctagtagtaacaacagtgagccctttccattaacactgccccaacagaacctgcctcagaccaagctaaatgtgctttccatcatcttttaaaatttcctaaatataaaaacgatgcttctcttcttcaccatgacaatgacctagcttagctccccaatgaggttgtgcctttttataagagacagaaagggctttcctcttgcctcaacttaacccttttaaacaaagatttcagtttcaaattttgattctattgcagtctctctaaagtaaactgtgtttgttttagtagaaaaatgagtttctaaaaatatattgtacaaagttcagtgctacataaagagaactatcccgcaacaaagttacaaaaatagatttacatttaaaaatcctgtctgtgtcttcaatagtacaaagctgtacccctggtatggcaggtgtggctggtgaaagaggcaaggatttctgttctgtaaggttttacagcccccaggcaaggaaatgtgagcagatcattatgttgcaataaaagtgtgtgcttatcacaagaaagaaatgcagagtagacattgagggcaatttcaacaggtgttgcctacgtggaatagcagctcactcacaaaggagggaagagactggtttctataacttacttagagaatgcagagggtcccagggcgttttcaaagctcaggtgggggtatttgcccctttccagctgaactgctggtgaggatgaattgaacgcttttgaaatgagccaagtctcaggcttatcagtgactgcagattgttctctccactgcacatgggaatctctaccctacccagccttttattctactctgacgggggctctggtacagacccacagtcttgtacaactgaagaccctagaaataagggtttcaaccctggttgcccattagaatcatgaaagccaa

SEQ ID NO: 120370 - DNA, 1223 bp, Homo Sapiens
ctttgtacaaaaaagttggggcaagatgggccaaagtcagagtggtggtcatggtcctggaggtggcaagaaggatgacaaggacaagaaaaagaaatatgaacctcctgtaccaactagagtggggaaaaagaagaagaaaacaaagggaccagatgctgccagcaaactgccactggtgacacctcacactcagtgccggttaaaattactgaagttagagagaattaaagactatcttctcatggaggaagaattcattagaaatcaggaacaaatgaaaccattagaagaaaagcaagaggaggaaagatcaaaagtggatgatctgagggggaccccgatgtcagtaggaaccttggaagagatcattgatgacaatcatgccatcgtgtctacatctgtgggctcagaacactacgtcagcattctttcatttgtagacaaggatctgctggaacctggctgctcggtcctgctcaaccacaaggtgcatgccgtgataggggtgctgatggatgacacggatcccctggtcacagtgatgaaggtagaaaaggccccccaggagacctatgcagatattggggggttggacaaccaaattcaggaaattaaggaatctgtggagcttcctctcacccatcctgaatattatgaagagatgggtataaagcctcctaagggggtcattctctatggtccacctggcacaggtaaaaccttgttagccaaagcagtagcaaaccaaacctcagccactttcttgagagtggttggctctgaacttattcagaagtacctaggtgatgggcccaaactcgtacgggaattgttccgagttgctgaagaacatgcaccgtccatcgtgtttattgatgaaattgacgccattgggacaaaaagatatgactccaattctggtggtgagagagaaattcagcgaacaatgttggaactgctgaaccagttggatggatttgattctaggggagatgtgaaagttatcatggccacaaaccgaatagaaactttggatccagcacttatcagaccaggccgcattgacaggaagattgagttccccctgcctgatgaaaagacgaagaagcgcatctttcagattcacacaagcaggatgacgctggctgatgatgtaaccctggacgacctgatcatggctaaagatgacctctctggtgctgacatcaaggcaatctgta

SEQ ID NO: 120371 - DNA, 952 bp, Homo Sapiens
gggctgaagcgcaaagccaaggacctagatgagacccaataaagtgcaaggtggactccagaatgcacaggggcaaatgacactctgatgccccagagaatggaagactctgaaacactgctttcgaaaccctttaattctatacccagccaaagtatccaacaagtgttaggggagaatgaaaataactcccaaactgcagggcctcagatctctcacatgctccctccataagaagctcccccagggaaccagggagaggatgcgagcccacagcaacgtggagagagagcagcagcctagccaaccccacatggagagagagcagcagcctagccaaccccctcagactggagcaggaagtggacacctgcaagaatggggcacgccacctacgtattcttattatggggttgggcaactctaggcaatgcggaaaaactaataatgacaggttcgcatgaaaaacccaagcatgaaatggaacgaaaagagggccttttatgagttactccaggaaaacatatggtggaggatactcagggagtcctgatgttgttattactagggggttggaaagctgaggcgagggtgtgtggtgtcaaaggcttgttaactgtacaagttaacaagtataggaggaataaacctaggacaccaagtcagcagggactcaggaataagggtcgcctgccagttgggcagaggcagcaccagactgccacgaccactgaagcacagcacttgggagaattgacagtaacacccagccactcaggggaaggggtgtcacaccgtcaccaaccccctcgaccccagcactgtccgtgatccacacatgcctgctgcctcctcatgcccggggcagtgccgccaaccatgcccaggagatcatgcagcctgcaggcagtggggtttgtgatgccagtaatcccaggccctccccatccaa

SEQ ID NO: 120372 - DNA, 914 bp, Homo Sapiens
tcacgggcccttctgctccttctcgtaaaggactttgaactgttcttggtcaagggctggccaggctcgggcaccacctcaatcacatccatgatcaagatccgccctcggcacgtgacctcctccccctgcatgaggcaggtcccggcggccacgtagcctttgaggcccgacacggtctcctcactgcgcagagacactgtcttcatgcaggtcacatgctcccactcctgcagctcgatcctggcattgggaatagcctcccagctgaccggggagatgagctggatggagaaggcctcctgctgggggtggatgtaccgctcatctctctcgatggtctcaaactccttctcctcgccagtcatgcgtgggatgcgggcacacggcgtgttggtgctggtggccacagcatacaccttagactccacgtggtaagccacatagtgggccgtgcagcgcagcgggatcttcctgacaggccatggggcatcataggacaggtaggcaggcaggacactgatcctcagctcgccctgtctgttgaagtacaggaagccgcggggacagttgacattgtggaatggagcgaaagagtcgaccgggccgtcgatggccatggggtgtagccgcagagcccctcggccggtcaccaagagccagtgaggggaggggccgcagatgaagacccctgagtagccataaatatcctcgaagtagcggaaacgcgccacgcggccccgggccccagccccctcctctgcgccgccaccttctgctttcttcttggatggctttggcttcttctcacggaagttgatgttgtgagggaccttcttaaagcggactttgagattgccctggccgagctgagagtcgtgggggaaggcctcgccaacttttttgtacaaagt

SEQ ID NO: 120373 - DNA, 942 bp, Homo Sapiens
tttcatggcttgatgaagcttctctgcaaagaaagctggtttgcttgtggcgcacttcacgatagctgtgaggcatttctcaatgtcacctttcaactccaggtccagaactttgttcatgtcatgcttactgtacttggtgtatttctgaaacactctgcgaagttgtggatagcttctggtggtaaggatggtattgaacacgtttacgtctgtcccctttctcctttctcctgcttcatacaaggccctggcatctgaatcagccaagtcttcattcacaccaaagtcctcagatcggtcacccttagcaagagaaagcaaagcgttccgaaaatctccagatgtgtctgaggttatgtctttggccagatctctcttcagttcctctctgtagaccctgttaatgtctctgatttctttgttagttcttgatgccaaaatctcaattagagtatcttcatcagttccaaggcccttcatggcagcacgaagttcatcagcatcaaattgcgctggagtttttagcagagctaaaacaacctcctcaaggtgacctgtaagggctttcttcagtgtttcatccaggggctttcctgtttcctggagatatgctgctttgatctgttgacgctgtgcattgtttcgcttagttagaatgtcaatgatggttgcttcatccacacctttaaccattatggccttatgcaaggcagcgacatccgaggatggattgaaggtaggataggggctcaccgctgatccgggaccacctttggatgacttcacagtttgaacatattcctgctcttcattttcaataaaccaggcctgcttgaggaattctgataccattgccatttttgaaaaagtgtctttatctctaccttcttgcaaagaactaaagagaaattcttctcagccaacttttttgtacaaagt

SEQ ID NO: 120374 - DNA, 1909 bp, Homo Sapiens
gttgcttgtctgaatagattgagcaacagtcttgctttgttaaaatcctggagccgttaagtcttgaatattcttctggacatcattgctggctggagaaaggagccccaggcccggctcggctgacatctgtcaggtttggaagtctcatccagctgcctgtgctcctgagagatcttagggctgctgggagcaggccgggctggtgatctggggcgactcacacttgggaatcagcccccaggggatggaacagctcctcgggtgtcttgtcactttggctggctcccccctgccggaagccggaagcgatctcatcgaaggtccggcctttagtctcaggaactttgaagtaggtgaagatgaagaacagaaccaggagcacagtgaagatgatgaagacgtagggaccacacagttgctccacatactggaagcacatgcccacaatgaaatttgaggtccagttggagaagcctgcaacggcaatggcagctggacgtggaccctggctgaagagttcagccacgatgaaccatgggatggggccaggacccacttcaaagaaggccacaaagccaaagatggccacgatgctcagataggacatccagggtagctgctccagcagtgctagcgcgatggtcatgagtatggcacaacccgccatgccagcgaggcctatgaggtgcagggtccgccggcctgctcgctccaccacaaacagcgacacgacagtgaaggccgtgttgacgataccggagccaatggtggcatacacaggctgctgcacccccgccttctcgaagatgctcgtggagtaatagaagacagcgttgatgccagacagctgctgggacagctgcagcaccacagcgatgaggatgggctggcggtaggcgggggagcggaacagctccaggatggtgaccttcttctcccgcatcatctgccgactctcttccttcatctcctgcaggtcatgggtcacgtcagctgtcccgcgcagcttctttagcacactcttggcccggttctcctcgttgcggttgatgagcaggaagcggggactctcggggcagaagggcagcacgatgcactgcagcagggccgggatgaagatgatgctcagcagcaggggccacaggtccttgttgcccatgatggagtccaggccgaacacctgggcgatgaggatgccgacgacgatgcccagctggtgcagggtgcccagggccccacgaagggctgtgggtgacacttcacccacatacatgggcacgaagcctgtggtcaggccgcagtacacaccgatgatgaagcggcccaggatcagcatctcaaaggacttgcccagtttcgagaagcccatgagcacggcggacacgaaggccagcaggttcatcatcagcattgaattccgccggccaaagcggttaacgaaaaggcccacagagaaggagccaatcatgcccccaacagaaaagatggccactgagagggaccagagcgtggtgagcgtggtgggcaggatgctctccccatagcggtggacccatgtctggttgtagaactcctcgatcaccttctggggggcattgatgactccagtgttgtagccaaactgcagggagccaagcactgctcctcccacagccagcatgaggcgacccgtcagcttcttgctgctgggctccatggcagcgctgcgctggtggctctggctgcgccgggtacgcgggtggcgacgggcgtgcgagcggcgctctcccgctcaggctcgtgctccggtccggggactcccactgcgactctgactccgacccccgtcgtttggtctcctgctccctggcgtgctcactcggggacccgcgactagcgaccggcacgctcgcggttgctaccccaa

SEQ ID NO: 120375 - DNA, 965 bp, Homo Sapiens
ttggacttgttgatgttgtgaagaagaagaacaagggtggtgttgcagtaaaagcacatcaggtgaaaaatcacatgtggatttttgtaaatgccttaattgaaaacccaacctttgactctcagacaaaagaaaacatgactttacaacccaagagctttggatcaacatgccaattgagtgaaaaatttatcaaagctgccattggctgtggtattgtagaaagcatactaaactgggtgaagtttaaggcccaagtccagttaaacaagaagtgttcagctgtaaaacataatagaatcaagggaattcccaaactcgatgatgccaatgatgcagggggccgaaactccactgagtgtacgcttatcctgactgagggagattcagccaaaactttggctgtttcaggccttggtgtggttgggagagacaaatatggggttttccctcttagaggaaaaatactcaatgttcgagaagcttctcataagcagatcatggaaaatgctgagattaacaatatcatcaagattgtgggtcttcagtacaagaaaaactatgaagatgaagattcattgaagacgcttcgttatgggaagataatgattatgacagatcaggaccaagatggttcccacatcaaaggcttgctgattaattttatccatcacaactggccctctcttctgcgacatcgttttctggaggaatttatcactcccattgtaaaggtatctaaaaacaagcaagaaatggcattttacagccttcctgaatttgaagagtggaagagttctactccaaatcataaaaaatggaaagtcaaatattacaaaggtttgggcaccagcacatcaaaggaagctaaagaatactttgcagatatgaaaagacatcgtatccagttcaaatattctggtcctgaagatgatgctgctatcagcctgacctttagcaaaaac

SEQ ID NO: 120376 - DNA, 1000 bp, Homo Sapiens
tgcaagtgttggtttgaacaatgaggttatgagttttgggcagcagggctttgatgttggcccaatcggtgccttgcgtatgggccccgagaaggcaggcgggagagccccgaagcctccaggcagcaggagacagaagagaggacacagcattccaccattcaggagcagccagaagctctgacggaacagacttggggggagatgggaaaagcaggtttggacgcttccactcgagccagacgctgctttgtccccagggttagctgaacacggtgttgtgctgctgggtcacccggatgaatgttgccctcctgctgagctccttgagtttggcggcccccacgtaggtgcacgtggacctcagtcccccgagaatatccaggatagtgttttccacatctcctttgtaaggaacttccacagtcttaccctcagaggctctgtactcagcaactcctcctgcgtgcttgttcatggcggtgtcagagctcatcccgtagaagagcttgagcttccgtccgttcctctcaatcacttctccagcacactccgtatgacccgaaaacattcctcccagcatgacaaaatctgctccagctccaaaggctttggcgacatcccctggacacgtacagcctccatcagagatgatgtggcccttcaggccatgggcagagtcggcacactcaatgacggcactcagctgggggtaccccactcccgtcttggtgcgggtggtgcacacagaacctggtccaactcccactttgatgatatctgctccggaaagaataagctcttctaccatttctcctgtcaccacgttccctgccataatggtgtgttcaggaaatttggcacggacaagtttcacgaattccacaaaatgttctgaatacccattggccacatccaggcaaataaacttaacctgtggcacagcttccaggatgctggtcatcttttccagatcattctgcccactgcctgaacccaa

SEQ ID NO: 120377 - DNA, 945 bp, Homo Sapiens
caccagctcactgttggtggccaccttcgcggttcagtccttctgtcttgctgaagaaccaatcctcggcatccttgcggttcttctctgccatcttctcatactggtcacgcatctcgttgaggatgcggctcaggtccacgcctggggcagcgtccatctccacattgatctcaccacccacctggcctcgcagggcgttcatctcctcctcgtggttcttcttcaggtaggccagctcctccttgaggttctcaatctgcatctccaggtcggctctggccagggtcagctcatccagcaccctgcgcaggccattgatgtcggcctccacactcaggcgcagggcctgctctgtctcaaacttggtgcggaagtcatcagcagccagacgggcattgtcaatctgtagcaggatgttggcattgtccacggtggctgtgaggatcttgttctgcagctcctcaattgtcctgtagtactggctgtagtcacgggcgggccccggggcctgcctctggtaccagtcacggatcttcacctccagctcagtgttggcctcctccagggcacgcaccttgtccaggtaggaggccaggcggtcattgaggttctgcatggtggccttctcacctccagccagcagcccatcaacacccccaaagctgctgccatagccaccaccagagccaaagctgtagcagctggagtagctgctacccccgagggtgctgcccaggccgccagcagatcccagcctgcaggagccggcacccaggccgccagacagccggcaggaggtgcgggacgagccgccccccaggccggaggagcccttgatggagctggaggaggtgaactggcggatggaggtggtcatggtggcggcggcaggaggcaggcacacaggagaagggtggaagagccaacttttttgtacaaagt

SEQ ID NO: 120378 - DNA, 900 bp, Homo Sapiens
tacaaaaaagttggcgcagcttctgagaccagggttgctccgtccgtgctccgcctcgccatgacttcctacagctatcgccagtcgtcggccacgtcgtccttcggaggcctgggcggcggctccgtgcgttttgggccgggggtcgcttttcgcgcgcccagcattcacgggggctccggcggccgcggcgtatccgtgtcctccgcccgctttgtgtcctcgtcctcctcggggggctacggcggcggctacggcggcgtcctgaccgcgtccgacgggctgctggcgggcaacgagaagctaaccatgcagaacctcaacgaccgcctggcctcctacctggacaaggtgcgcgccctggaggcggccaacggcgagctagaggtgaagatccgcgactggtaccagaagcaggggcctgggccctcccgcgactacagccactactacacgaccatccaggacctgcgggacaagattcttggtgccaccattgagaactccaggattgtcctgcagatcgacaacgcccgtctggctgcagatgacttccgaaccaagtttgagacggaacaggctctgcgcatgagcgtggaggccgacatcaacggcctgcgcagggtgctggatgagctgaccctggccaggaccgacctggagatgcagatcgaaggcctgaaggaagagctggcctacctgaagaagaaccatgaggaggaaatcagtacgctgaggggccagtgggaggccaggtcagtgtggaggtggattccgctccgggcaccgatctcgccaagatcctgagtgacatgcgaagccaatatgatgtcatggccgagcagaaccgaaaggatgctgaagcctgttcaccagccggactgaagaattgaaccggga

SEQ ID NO: 120379 - DNA, 875 bp, Homo Sapiens
agcacgcgggtcaggtcaatgcctggggtggcatccatctccacgttgacctggccgaccacctggttgctaaattcatcatctcctcttcatgggtcttcttcatgtaggctagctcttcattcaggctctcgatctgcatctccaggtcagtcttagacagagtgagctcatccagcacccggcgcaggccgttgatgtcggcctccacgctctggcgcagggccagctcattctcatacttgagcctgaagtcgtccacagccagcctggcattgtcaatctccaggatgacccggttgttttcaatggtggcggtcaggatcttgtcccggagctcttcaatggtcttgtagtaggggctgtagtcccgctcagggctagctgggctctgcttcaggtgccagtcacggatcttcacctccaggtcagcgttggcctcctccagggcgcgcaccttctccaggtaggaagccaggcggtcgttgaggttctgcatggtgatcttctcattgccagtgaggaggccgccatcacaagcaccaaagtcaacaaagccaccagcaaaacccccaccaaagccacctccaaggccacctccatagccacctccaaggccacctccatagccacctccaaagccactaccagcccctccaccaaaaccacagctcacgccgcctccatagcccccagctgatcccccagacacaaaccgagttgaacaggtagagacaccacggcctcctcccagctggcaagagccacccccgaaaccacctccatagctggcagaggagctctgcaggcggaggctcatggtgagagcaggattgagagcaggtgcagatagaagcttgccctaacttttttgt

SEQ ID NO: 120380 - DNA, 897 bp, Homo Sapiens
aaaactttgtacaaaaaagttgggcccagggttgctccgtccgtgctccgcctcgccatgacttcctacagctatcgccagtcgtcggccacgtcgtccttcggaggcctgggcggcggctccgtgcgttttgggccgggggtcgcctttcgcgcgcccagcattcacgggggctccggcggccgcggcgtatccgtgtcctccgcccgctttgtgtcctcgtcctcctcgggggcctacggcggcggctacggcggcgtcctgaccgcgtccgacgggctgctggcgggcaacgagaagctaaccatgcagaacctcaacgaccgcctggcctcctacctggacaaggtgcgcgccctggaggcggccaacggcgagctagaggtgaagatccgcgactggtaccagaagcaggggcctgggccctcccgcgactacagccactactacacgaccatccaggacctgcgggacaagattcttggtgccaccattgagaactccaggattgtcctgcagatcgacaatgcccgtctggctgcagatgacttccgaaccaagtttgagacggaacaggctctgcgcatgagcgtggaggccgacatcaacggcctgcgcagggtgctggatgagctgaccctggccaggaccgacctggagatgcagatcgaaggcctgaaagaagagctggcctacctgaagaaaaaccatgacgaggaaatcagtacgctgaggggccaagtgggaggccaggtcagtgtggaggtggattccgctccgggcaccgatctcgccaagatcctgagtgacatgcgaagccaatatgatgtcatggccgagcagaaccggaaagatgctgaagcctggttcaccagccggactgaagaattgaaccgg

SEQ ID NO: 120381 - DNA, 945 bp, Homo Sapiens
gtacaaaaaagttggccgagctctactgactcccaacagagcgcccaagaagaaaatggccataagtggagtccctgtgctaggatttttcatcatagctgtgctgatgagcgctcaggaatcatgggctatcaaagaagaacatgtgatcatccaggccgagttctatctgaatcctgaccaatcaggcgagtttatgtttgactttgatggtgatgagattttccatgtggatatggcaaagaaggagacggtctggcggcttgaagaatttggacgatttgccagctttgaggctcaaggtgcattggccaacatagctgtggacaaagccaacctggaaatcatgacaaagcgctccaactatactccgatcaccaatgtacctccagaggtaactgtgctcacgaacagccctgtggaactgagagagcccaacgtcctcatctgtttcatcgacaagttcaccccaccagtggtcaatgtcacgtggcttcgaaatggaaaacctgtcaccacaggagtgtcagagacagtcttcctgcccagggaagaccaccttttccgcaagttccactatctccccttcctgccctcaactgaggacgtttacgactgcagggtggagcactggggcttggatgagcctcttctcaagcactgggagtttgatgctccaagccctctcccagagactacagagaatgtggtgtgtgccctgggcctgactgtgggtctggtgggcatcattattgggaccatcttcatcatcaagggagtgcgcaaagcaatgcagcagaacgcagggggcctctgtaaggcacatggaggtgatgatgtttcttagagagaagatcactgaagaaacttctgctttaatgactttacaaagctggcaatattacaatccttgacctcagtgaaagcagtcatcttcagcgtttt

SEQ ID NO: 120382 - DNA, 957 bp, Homo Sapiens
gggaaatggaggaaaattgatacagaaaggcaatggacagggaagcccagctagatgttagagtacggagcaattgaggaggcataaccacacttggggtggctatagggctggaaaacgctgaagatgactgctttcactgaggtcaaggattgtaatattgccagctttgtaaagtcattaaagcagaagtttcttcagtgatcttctctctaagaaacatcatcacctccatgtgcctacagaggccccctgcgttctgctgcattgcttttgcgcactcccttgatgatgaagatggtcccaataatgatgcccaccagacccacagtcaggcccagggcacacaccacattctctgtagtctctgggagagggcttggagcatcaaactcccagtgcttgagaagaggctcatccaagccccagtgctccaccctgcagtcgtaaacgtcctcagttgagggcaggaaggggagatagtggaacttgcggaaaaggtggtcttccctgggcaggaagactgtctctgacactcctgtggtgacaggttttccatttcgaagccacgtgacattgaccactggtggggtgaacttgtcattggtgatcggagtatagttggagcgctttgtcatgatttccaggttggctttgtccacagctatgttggccaatgcaccttgagcctcaaagctggcaaatcgtccaaattcttcaagccgccagaccgtctccttctttgccatatccacatggaaaatctcatcaccatcaaagtcaaacataaactcgcctgattggtcaggattcagatagaactcggcctggatgatcacatgttcttctttgatagcccatgattcctgagcgctcatcagcacagctatgatgaaaaatcctagcacagggactccacttatggccattttctccaacttttttgtacaaagttgg

SEQ ID NO: 120383 - DNA, 562 bp, Homo Sapiens
gaggaggtaacgggggtttccgattgaacaagatcctcacatttcatctaatacagtcaatcttggctagagtataacaaagtggaaacaggattactatgatacaaaacttccactacagcacgctgtacacacctgtgttccaagcccaccccaacccccccagtgcttccaacacaattatttcccagcctgttgggcctgccgacgaaggagcacgtagatcttctctttaatccagtctttgttataaggctggtatgtctgggtatcagctcggtaaaccaggcagctgaggtctgccagatcatcgatgaaatcaaacaactgactgatgtcatatgtgatagagggactgttgggattcattcttttcagatgttcttcatacattttacaaacaccttccatgcattcattcacagattcgtagtcagcataagttctgccttctggcctcttggtaggctgtaccagcaaaatggtgtgagacatcgcgccaaactctcttcgctacagcagctgccgacacggccgccgttacccaacttttttgtacaaa

SEQ ID NO: 120384 - DNA, 1725 bp, Homo Sapiens
  misc_feature (163)..(186): n is a, c, g, or t
  misc_feature (792)..(828): n is a, c, g, or t
cccccgccagcctgtgtgggatcgcgcccgcgtgtctgcccgccaaagcaggcagaacctgcccgctgggtccaccatgggctaagtgaagcatgaggtattgtgaaacagcaacctttttggaatagagcagtaatcacattaagtcaaaattgatcacatnnnnnnnnnnnnnnnnnnnnnnnnggcatctgtaatacaatgttctaagagaaaactaaaactagtacatggcagtatatgacattgtaaaacaaaaaactgatcctccaatagcagcaaacaatgtgaaagagatacacagaagcgatgtgaatatttccaaaccgtgcctggaagtcaacggtagcagcgcaataagaaaatggagctgcggcctgtccccggtgtgggcaccgccccttcccctcgggagcctcctcctcacacctcctcccgcctgtcctccctcacacgtcagcctccacactcttgccacctcccttcaacacttcctaaataaaaattacaagaattacatagccaagatgtgcaaattgtctattttgtcactaagttttttaaaggaaggggcaggggataagaattcatcggaaccgaacttaggttgagtaccctaattttccttgcacccatgcctgtccaatcagatgactctgggaaacgccaaacaggctgaatcaatgtctttgtgtggtttttttcttccagattgtttttttctcacctataaaaggatctatctttaaaaataaactgtattaaatctgtaacatcaaaggcagaaggttnnnnnnnnnnnnnnnnnnnnnnnnnnnnnnnnnnnnnttaaatcaaggggagattgcatttataaatcatactggccttatgaacatcctctgcaataaatatactttttagccttaactataaattatatattttagtgtttaaaaaccttccggtgtgaaacatctaagataaccttaaaaaccactgttctctaggtaaacctctgaggtccctactttcaaacaccagttggcaccaaaggattcctaaacttcaacttctttaaagaaaaggaaaggaacttatcatcctggcaatgtgagaatgcaaacctttttcttcttgactggcacgcagcctcccaaacaccccacctccactgccaccacagtggcccacacttgcctcaaagtcctgcttgcaaacaagtacatggatattcccaaaccattccattagaaaactgccctccctgcacacacaacaaaaacagcgctatttcctacacctattggactgaaagtgcttggaaatggaatggttttagaatatgaagaagaacacaaaccaagtagctgtgggttgaacctggacgtgagctggctgcagggccgttgggtagaaaaccagcatctcataaacaggtcactacaaaaataggaagagtataaaaatagaatatattatgtcactatttcgtcttctctttatagtagcgtatcgtaggagtgggacaggtggcctttcccgaccctgctacgctggctggtgcccgacaaacctccactggatggtttgtcactggatggtttgttggggtggtggtcacaggcgcaaaggacatgcacacgggcacgctacgctactgtaaccaagaggtgacttcagccatgaataaggtgaagaggttacacatctacctacggaatatccaacttttttgtacaaagt

SEQ ID NO: 120385 - DNA, 1619 bp, Homo Sapiens
ttttaatgaaaaagacttagaacaatgttatatttacatgtaaataagaaaagagagcagaatccccatatcctcttcaaaggaagggagacggcaggccatttatgagaagaagtcccatataaaccccattaagtagaatctggatctaaatacttccaaacaggagtacacagcaggtgaacagtctccctcatcccactgatctgctgcttcagataagatcagcaacgttcatcggcatctcatcaatctgagtggaatagtactgctcgatatctctgaggatgcggatgtcgtcattctttacaaagttaatggccacacccttccggccgtatcgacctgatctcccaattctgtgtatgtacaattctctgttattagggagatcatagttaatgatgagggacacctgagggacatccaaccccctggcccagacatctgtagaaataagcactcggctggcgcccgaccggaactccttcatgatggactcccgctctttctggggcatgtctccatgcattgaggatacagtgaagttggcttccctcattttctccgtcagccagtccacctttcttttggtgttgcagaagatgaccgcctgagtgatggtcagtgtgtcgtagaggtcacacagagtgtcaaatttccactcttccctctccactgccacgaaaaattgcttgatgccttccagagtcaattcatcacgtttcaccaagatgcggattgggtcggtcatgaacttgttggtcatctccagaatctcgtgtggcagcgtggcactgatgagaaccacctgtgtggctggaggcaggtacctgtatacatcgtaaatctgctctttgaaacctttattcaacatttcatcagcttcaccaaaaccaacattttgatagcacgtgtccttaggcttctgcgacgaatcatatcaaaaacacgccctggagtgcccgcgacaacatgctgtccgtaatccagcttcctgatgtcctcgccaacattggtgcctccaatgcaggcatggcactggacattcatgtagtcaccgagagcaagcagccccttctggatctgcacagccaactctcttgtgggagccaagatcaaagcttgagtttcacgaacctgaatatccaaacactggaggactgagatactgaaggtggctgtttttcctgtgccggactgagactgtgcgatgacatctctccctttgatgatctgcttgattgctcgttgctggattgctgatggtttttcaaaaccgtaagcgtagatgccccgcagcaggtcctcccgcaggcccatggtgtcgaacgtgggggtcacatccacctcctcgctggtctcgaattccactttagtcatgtcttcctctttgagcagccgctttcgcgccgagcccgaggtcgccatcgtggccgtggtcgccatgattcagagtccgcggaagagcacagcgcgcgccgctgccgacctcgctgccgctgccgacctcgctgtgccgctgccgacctcgctgccgctgccgacctcgctgtgccgctgccgacctcgctgtgccgctgccgacctcgctgtgccgctgccgacctcgctgccaa

SEQ ID NO: 120386 - DNA, 936 bp, Homo Sapiens
tgaaaccccaacttctccccagtctttaagtaagacatctctctccattccacttgcgaataactgtgccgagttttgcaccatacttgaattctgtcacccggccattaccaaagtagtcactgcttttaattggctcaccacccagatcaattacctcctggtaaatgaaaggtttactaccttccgggaaccagttactgtttagattatgcagtttgtccaaaattgcctttatgtctccaggccacatgtgcttggaagcatcaattctgaaccctgcaacaccaatgtcaatgagatggttcatatattcggcaatcttagaacgcacataatccttccccagtgcaagatcgagaagaccagacagacgacaatctctgacctgagtagcatcattatagttctcgatatctccacttccagttttacatttaccatcattaaaatcccatccagaatatgggactgctggaaagtccctacttccagggttgaagtaacttccacaggtactgcttgttcctgcactcacagcattaccacacatatgattaattacagcatccacataaatacgaaccccaacattgttgcatctagtcaccatgtttctaaattcatcttcatttccagatcttgtgcataatttatagctaactggttggtatctttcccaccaaggtctgaaagggttgtgaatggcaacattttcatttggtggagagacctgaacccctccaaatcccttgggagctaaatatcgctcacattcaagagcaatatcaacccatcgccattcaaacagatgaacaatagatgttcgtccttgttgtgtatttgaggaatactgagcccagcagaacccaatggtgaaaagcaaccaaaagagcttcattttgctttgaagttgtcagtgtcctttccagccaa

SEQ ID NO: 120387 - DNA, 524 bp, Homo Sapiens
gaaagatgcaaaactttattgagatagtttaagtcaaatatctaatataaaaccagcttgcgttgtttcagcttgtcttcatttaaacttgtggttgctcttcacctgcttctggcattttacagtgttcctctttaggtattatcttcaccttgacgccggaacccaaatccagatttatccccggtgtttgactgatgcagctcttgcagatcaccttccatgtcgcgcactgggatctcagctgtatcctgatcttcttctgtctgctgcccaggtgtaggatcccgactttcagctgctggttcttctttttggggctctccattactgggctcctgggactggctgtgtggttctgtgtttgtgtgtgtcgctcatgccgtccctctcctggtcccgtctggggagtccagaatcttctgtcggggttccaggtgcttctgggactcggatacccccaacagcaccccagcttcgcctgagcctttctaaggctcctcggcccccaacttttttgtaca

SEQ ID NO: 120388 - DNA, 1005 bp, Homo Sapiens
ggaggggtttgagaaggcagaggcgcgactggggttcatgaggaaagggagggggaggatgtgggatggtggaggggctgcagactctgggctagggaaagctgggatgtctctaaaggttggaatgaatggcttagaatccgacccaataagccaaagccacttccaccaacgttagaaggccttggcccccagagagccaatttcacaatccaggagtccccgtgccctaaagggtctgccctgattactcctggctccttgtgtgcagggggctcaggcatggcagggctgggagtaccagcaggcactcaagcggcttaagtgttccatgacagactggtatgaaggtggccacaattcagaaagaaaaaagaagagcaccatctccttccagtgaggaagcggggccaccacccagcgtgtgctccatcttttctggctggggagaggccttcatctgctgtaaagggtcctccagcacaagctgtcttaattgaccctagttcccagggcagcctcgttctgccttgggtgctgacacgaccttcggtaggtgcataagctctgcattcgaggtccacaggggcagtgggagggaactgagactggggagggacaaaggctgctctgtcctggtgctcccacaaaggagaagggctgatcactcaaagttgcgaacaccaagctcaacaatgagccctggaaaatttctggaatggattattaaacagagagtctgtaagcacttagaaaaggccacggtgagtcccaggggccagcactgctcgaaatgtacagcatttctctttgtaacaggattattagcctgctgtgcccggggaaaacatgcaccacagcgcatctcgagtcagcaggattttgacggcttctaacaaaatcttgtagacaagatggagctatgggggttggaggagagaacatataggaaaaatcagagccaaatgaaccacagccccaaagggcacagttgaacaatgccaa

SEQ ID NO: 120389 - DNA, 1285 bp, Homo Sapiens
ttaaaacatttttataatttgtttcattttcaaggcacaaagagtttatgtcaatcattttaatgtctaagaatacaaagttagcactagtaacatctggtagtctaatcatttatcatgcttaaatgtaacattacaaaactacattttaaaatctgccccctaaccagatgtgaaacaacgtggacaagggtgacatgtgctagacccaatctccaaaaacgtatggttgacaaagacagctgactgctggggtaaaactgcagcagtcataatcgaagagcgaaagaggccactctattaaagactttgtttcttttgctagacatttttcacctaatcccaggatagtttctgttaatgcatcttactctctttcaaacgaatcgtccctagagcaggtgtacacattaaaaatgagctttatagcatcaaacacataccacaaccaactctacaaggagggttttctgtaagatgtgtacgactgtccgaagaacacattctggctgataagtctcagctcctgtgaggtcctgatgagtatctaaacaacctcacattttctcttccacgcctagggttaaggccagcactcagcccacacacaaagctgtgatgagaggttggttagggatggtggaggcaaagccacagatcagccagaaactcttttgagtcaatagtttctactccctccctaactggaccgtttaccagaactgcccaggacttgtcaccatgaatttaatctccctggattttccctgcttgatgtctagatgagacaatgaagggcagagaagtattgctatccccacacgataccaccagcactgagggactgcagccttgggtctcagagagagccgcccggagaaggaaccaaagtgtgcttggttcacatttcagggcagggaggttctccaagttgcagcagatattaagagtcctgctgaaggcacagtctctaagagaggggagggagcaaagacaggaagctggaaccagagacacggataagcaccctcccccttgcctttcctggaagcagaggcagtggcatcctggaggcagaaatgaggcagagtgggggtgacccagggcttccggttcctgctggtcattgcgtgcgcatctgtgggcttcacaattccccactccttaaaatctaacctcaagcatcttctctggcactgcggtgcccaatatttttgtatggtgtaagtcctctgtgtatgatcatccaggaatcaccaagaggtcccaacttttttgtacaaag

SEQ ID NO: 120390 - DNA, 933 bp, Homo Sapiens
actttgtacaaaaaagttggccaagggagtggttgtgtgatcgccatcttagggaaaagatgttctcgtccgtggcgcacctggcgcgggcgaaccccttcaacacgccacatctgcagctggtgcacgatggtctcggggacctccgcagcagctccccagggcccacgggccagccccgccgccctcgcaacctggcagccgccgccgtggaagagtacagttgtgaatttggctccgcgaagtattatgcactgtgtggctttggtggggtcttaagttgtggtctgacacacactgctgtggttcccctggatttagtgaaatgccgtatgcaggtggacccccaaaagtacaagggcatatttaacggattctcagttacacttaaagaggatggtgttcgtggtttggctaaaggatgggctccgactttccttggctactccatgcagggactctgcaagtttggcttttatgaagtctttaaagtcttgtatagcaatatgcttggagaggagaatacttatctctggcgcacatcactatatttggctgcctctgccagtgctgaattctttgctgacattgccctggctcctatggaagctgctaaggttcgaattcaaacccagccaggttatgccaacactttgagggatgcagctcccaaaatgtataaggaagaaggcctaaaagcattctacaagggggttgctcctctctggatgagacagataccatacaccatgatgaagttcgcctgctttgaacgtactgttgaagcactgtacaagtttgtggttcctaagccccgcagtgaatgttcaaagccagagcagctggttgtaacatttgtagcaagttacatagctggagtctttgtgcaattgtttctcaccctgctgattctgtggtatctgtgttgaataa

SEQ ID NO: 120391 - DNA, 907 bp, Homo Sapiens
ttggtggagagcccggtggggtgtaagtacactgcgcttataaaactctagcaggaagctagcagctgtctccaaacccagagaaggggaaacaggaatcgattaggaataaaggattataatccactttccttctgaggaaaagctgggaaccttctcattttgccttatgaaaactaagctgaatcgactgctgccaaacatctattaggcaaaattggcctcttgcccatgatttgactttccagcacagccagttctttttctcctctgcagctgattggctctggagtgtggccagaagcctctctcctgcaattaaaggagtcgggtctctaactgttgatctgtttttttcccttctgagcaatggagcttaccatctttatcctgagactggccatttacatcctgacatttcccttgtacctgctgaactttctgggcttgtggagctggatatgcaaaaaatggttcccctacttcttggtgaggttcactgtgatatacaacgaacagatggcaagcaagaagcgggagctcttcagtaacctgcaggagtttgcgggcccctccgggaaactctccctgctggaagtgggctgtggcacgggggccaacttcaagttctacccacctgggtgcagggtgacctgtattgaccccaaccccaactttgagaagtttttgatcaagagcattgcagagaaccgacacctgcagtttgagcgctttgtggtagctgccggggagaacatgcaccaggtggctgatggctctgtggatgtggtggtctgcaccctggtgctgtgctctgtgaagaaccaggagcggattctccgcgaggtgtgcagagtgctgagaccgggagggctttctatttcatggagcatgtggcagctgagtg

SEQ ID NO: 120392 - DNA, 480 bp, Homo Sapiens
ttgtacaaaaaagttggcgccgcgcggtgaggttgtctagtccacgctcggagccatgccgtccaagggcccgctgcagtctgtgcaggtcttcggacgcaagaagacagcgacagctgtggcgcactgcaaacgcggcaatggtctcatcaaggtgaacgggcggcccctggagatgattgagccgcgcacgctacagtacaagctgctggagccagttctgcttctcggcaaggagcgatttgctggtgtagacatccgtgtccgtgtaaagggtggtggtcacgtggcccagatttatgctatccgtcagtccatctccaaagccctggtggcctattaccagaaatatgtggatgaggcttccaagaaggagatcaaagacatcctcatccagtatgaccggaccctgctggtagctgaccctcgtcgctgcgagtccaaaaagtttggaggccctggtgcccgcgctcgctacca

SEQ ID NO: 120393 - DNA, 1139 bp, Homo Sapiens
  misc_feature (602)..(709): n is a, c, g, or t
  misc_feature (725)..(732): n is a, c, g, or t
  misc_feature (736)..(789): n is a, c, g, or t
  misc_feature (807)..(863): n is a, c, g, or t
taaatacaaacacaattcttacatatcagccacttaattctgcaaaacaacatgccaagatcaactttgaaaagtttataaaaaccaaaatccagaaaatatcttcctcaactctaaggactccatatacaaatgcaaaaattgctatttgtcaataatcacattaagtgttgagttattgactgagcagtaaaaaacaatttctgatttttaaattaaatagctccagataaaagcatgttattttccacatacgctatctttgtattctgcacagagttccaaggcaaagattgctcctggctttatgaattaccagagatgatgacttgtgtggctgacttatcacaggtcttttactcttccttcctgatagatccttagcttctttgggaggtggcatatgaattggtttccacggaattggattataaaaggctggttctggataggaatttccactgtaaaaacctgtaagttttccattggcataaccatagctctttgcagctggacgaggtttatgtttcgcattttccaaccattcttgaaactttttttctgctatttcctttttctcctgtattgcagcttgctgttgnnnnnnnnnnnnnnnnnnnnnnnnnnnnnnnnnnnnnnnnnnnnnnnnnnnnnnnnnnnnnnnnnnnnnnnnnnnnnnnnnnnnnnnnnnnnnnnnnnnnnnnnnnnncagttcctttgctgcnnnnnnnnccannnnnnnnnnnnnnnnnnnnnnnnnnnnnnnnnnnnnnnnnnnnnnnnnnnnnngaacccattccttgtgcnnnnnnnnnnnnnnnnnnnnnnnnnnnnnnnnnnnnnnnnnnnnnnnnnnnnnnnnnagttgttgatttaattcctctagagctttcagttgcagccggtcacgttcttctttttctttgccaataaaccacacctcccatggtgtcaggcggctttctggtaagcgcacctgtttctgttcttcttggttattttctgattcaacctgagtgctggcgcacccctgtaactccattcctctcaggctcgccactttggcctctgaatcatgggcatcttcatccacgtcttcctcatcgatccacgtcttccccaacttttttgtacaaagt

SEQ ID NO: 120394 - DNA, 1096 bp, Homo Sapiens
cgatttatcgttatttattatcaaaatcatgaccagtgtgtaaacatacttgtgaaaatatacagcaacttggggcttataacacatgagcaaagatgacattaacacgtgcactgttcacatcttggggtctagaggtcaagaacaaagatcacagacaaaacgttactaaacggacccctgcagtaggtcccgaattgcaaaatcatccaattccagcatggtcagcacggaaatattcacagaaagaaacccagcaaagtcctctctgagccgctagagtcaacaagcttttcatacacactatggagagcccacgccccacataacccttgaaaacacagttccatgtcttggctaacacggctctcaccgctggcctcaacacccctgggccatgctccctctgctcttccatccccaccacaacgaaaaaaggtatgaccgcacgttatatatagtaaagaagaactttgaggccgcaggacagggccgcagcagcaagctctctgggtagtgccttactgctccacccacctgagccctgttccaagtgcaaggagcttcccaaatcctagagaatgactgtacttagaaagttttgttttgtttaagagaaaatggctttacatgaatttatgttcctcatggcagatatgttacacttccctctaaacagaaagacaagcccaggtggggcccgggcatcctcgaggaatgaagcagccattcccaccacctctcagggattaacaggtgcatgtggacacttgaaccacgactgtgtccacagctcctcctggaccaggcctggtgcctgagtgtgaagactcctggcctgcgtggcaggggcagctatctgggagggctaaacagcctggaggctgagtctgcagaggaagggggacctgaaagagcccaggtacaggtgcccatcgtgttcgtgcacctcgatgatgtaggtggccaccagcccatcgggatcatgcaggcttttccggaaggcaccgctgtcgctgagttctaggacgaggctgtaccgcggcacaaacttcatcaccgtctcttgactaaagagattaaaaatcatccccaa

SEQ ID NO: 120395 - DNA, 944 bp, Homo Sapiens
gggaatggggatgttgttaaaaaaaatacaggctcccccacaactggggtgcctggggggaacttggtctgtttcagcccaagaggaattcaaaagatcaaaagcagttgggaaggccagaaccgtcaagggatgagggagaaggaaaatccagggggtggggggtctgtttggcaactggggtgaagggattgccctccccctgctgggatccccccagcccctccggtctggcaggaagggggcagcctgcaacccccaagggcaggtgtggggctgccagatgctccaggcagggggccagaaggggctcacaaaggcttgccctccagggagatgacggcactgccccccagcttctctgccagggtgcagcggtccttgacctcctcgtagcagtttgcttgcaattcatgcttgatccctgtcagcttcttcttgatggcgtccttggagctggcataaatcattttgctcttaaggggcgcagactcgggggcccagaagataaacaccagatcctccttcttgctctccttggtctcataggttgcatcatagagggcatagcggcagtccttatctggcagcatcttgacaaaggtggcgtagggatcgtcgacagtctggcccacatcgcccaccaggatctccttgccctcctccaggatgatgttcttcttgtcctcactcaggcagaagagcaccgccttcttgcgcttcttcacctcctctggcgttgaagacttacgcaccttcatgtcgttgaacaccttgatgacaccatcagagacagccacaccggaggccatgtttccggaaacgaaaaggagagggcaccgagagccgcagaagacgagagcgctgcagccgctgccccaacttttttgtacaaagttggctattaaaagaaaagcattgctcatcaatttgttgcaacgaac

SEQ ID NO: 120396 - DNA, 1002 bp, Homo Sapiens
gggaagggagaagagcgtcaacaatttacggagggtccagccgctgggtcagattgagacaaaccattgtgtggttgggtttgggtcagcaggctggagagggttctgttctttttgatcattatcgtttggggccccaagggagggtcttgggagccacctgagccccaaagctgggaaattcctcagagctgctcatgtcaggagccttctcactgctgctggcggtccagggtgcgtcccgcaccacaaagcctctggaaggtgccttggcctcttcgtgtgctgggggtttcatgtatacctgcagcgcctcactgtccaccacgtcagctaggtattcctcctccagattgaggatgtggtcgatggcttcctccacattctctgggagccccgtcacagtgacgcagttggggtctggggctccgctctgtgggaagcgaatgtccaccttgaattcgtccatgattttgcgaatggctttgccgcgggcaccaatgatgcgggcgtgaacgcggtggtccagcgggacgtcctcagaaaccatctgctcaagttcacccacaattctcagtatagcatccctggcagcttctgtgttcttttcgtaccctgtgatggtaatttggtcctggggctggttcccatcgtccttatcaggaaactggatgttcacgtcatgctccaaccggatttgggtaattactgccccctttctcccgataatcttgggatggtatttggggtctacagtgacactcagcttaaaactccttaaagcccggtcctcctgctcggcctgtagctccttcacacgctccagcagtccagccttggcccggtccaaatttgcagcgaggcccgtgatggcgatgatgtcagactgcagctcaggtgccgggacatgtatgttcacctcaaactcatccatcatcttgcggatcccacttcctttctgcccaataacgtaacggtgaagccaacttttttgtacaaagt

SEQ ID NO: 120397 - DNA, 1756 bp, Homo Sapiens
gggtagttttaaataaatggagaaagcacctttcagaagctacactagcaggaaaaaattccatcaagcatttacatagtaaatttctataatttcacaaaagattcttgatcttacttgaagtatacatgagggaaagagccccctcagcaggtgttcccgttgcttacagaagcaaactaaaggacctaaaactggaggcaagccaggatgccaaaaagggggaagagaaatgataaagaaccattcataaattccatgtctacttcaagacatttgtctaatgacccttacataataagtattttagggaaaactaccacccttttaagataaaagtacaatcttaaaagctgtagttctcaattatagtaatatttcttacttccagtaatatgtctcaataccttggactgctggatgtcaaaagacaatacctgggggtcatctatgagatctgaacaaatagaggaattctctaggactgtatactctctattttggctttttgaatgaagtacagacaggcttctctgctatcctccaggcagtgtaatagtcaaggaaaagggcaacagtattggatcattccttagacactaatcagctggggaaagagttcattggcaaaagtgtcctcccaagaatggtttacaccaagcagagaggacatgtcactgaatggggaaagggaacccccgtatccacagtcactgtaagcatccagtaggcaggaagatggctttgggcagtggctggatgaaagcagatttgagatacccagctccggaacgaggtcatcttctacaggttcttccttcactgagacaatgaattcagggtgatcattctctgaggggctgagaggtgcttcctcgattttcactaccacattagcttggctctctgtctcagagggtatctctaagactaggggcttggtatatatgtggtcaaaacgaattagttcattaatggcttccagcttggctgatgacgtccccactgacagagaaagggaggctggtaaggaactgggtccttctgggtagacctctgggagctcctccaggctggcaggctctggggaagggcatttgaagaacatgactgggtccaagttgtccagaatgcccaacaggatatcagactctgaatctgaagagtcaataccgccagaatccatggggagatgttctggaggggtgacaactgggcctgcacctgctgcagaggtgcacgtagtctgagtgctgcggactcagcagacccggccactggcctcacttcattccccttggcttccgcctcctcttcagcaaccagggcatccatccccaagcgctgtcttaactcctggttctcaactacaaggccatgagttttctctcgtaaaagctgattttctagcaaaagtttttggttctcttcttctaaatctaccacttgctgttccagctcactcattcgagccttctttcgatctctggcagtctgagctgctactctgtttttcagtttcctcctcagcgccttctcctcggggctcaggtgcgtgaggcgctgtcgcttgcgcgcctggggcagccccccgctcgctgcctccgggctggcccctctctgggctggcaccatgagcggcagggcctggccggccggggctccggcggcggaggcgggctgccccgacagaagcagaactttaggggtcccgtcggccgggttcggcgcggctgccaccaccaccatagcccaa

SEQ ID NO: 120398 - DNA, 888 bp, Homo Sapiens
ggtcccaacctaggcctggatttgaaatctactccccacttccttcttttggacttaggtgggggcatggttcagtcagaactgtgtttcctttggatcgtgcagaaggaggacctaggcacacacatatggtggccacacccaggagggttgattggcaggctggaagacaaaagtctcccaataaaggcacttttacctcaaagagggggtgggagttggtctgctgggaatgttgttgttggggtggggaggagttatttcaatggaggagttatttgcagattgcagagagaaatgagggaagttcgcctacaccgggccatctgcggggtcagtgggggctgctgtatgtcttggctgccgaacggggaaggtgacataggcatcatagccaaagaggcacgtagcgattaggcccagtacccctgcgacgattttggagtggtttcctctctcaacaaggacaacaatggaggtgatcaggtagaggattgccgctatgagggttcggaagaaatcactccagggccagttgatgaatggtatcttggtgtgcaggtcacacatgtagacaacaaagaaaatagcagcaaggatcatctcaatcaccgacagggaggagtagcctggtgtggaggcactgaagcagatcaggatcaccaggcataatataatctcagcaaacaggaggattccctttcgagtgcgcgagaagttggtgcaggcggcccagcagccaggagccgagaggcgctcagaatccgccatggcatgggctggagtccctggtgcctcggaggatctgctcacttgctcgtggtttcgaggacgctgtacacccagctgtcttgccggccgtctggccgccaacttttttgtacaaag

SEQ ID NO: 120399 - DNA, 707 bp, Homo Sapiens
actttgtacaaaaaagttggcggggagctcggccaggctgctggtacctgcgtccgcccggcgagcaggacaggctgctttggtttgtgacctccaggcaggacggccatcctctccagaatgaagatcttcttgccagtgctgctggctgcccttctgggtgtggagcgagccagctcgctgatgtgcttctcctgcttgaaccagaagagcaatctgtactgcctgaagccgaccatctgctccgaccaggacaactactgcgtgactgtgtctgctagtgccggcattgcctcatttcccatgcagggaatctcgtgacatttggccacagcctgagcaagacctgttccccggcctgccccatcccagaaggcgtcaatgttggtgtggcttccatgggcatcagctgctgccagagctttctgtgcaatttcagtgcggccgatggcgggctgcgggcaagcgtcaccctgctgggtgccgggctgctgctgagcctgctgccggccctgctgcggtttggcccctgaccgcccagaccctgtcccccgatcccccagctcaggaaggaaagcccagccctttctggatcccacagtgtatgggagcccctgactcctcacgtgcctgatctgtgcccttggtcccaggtcaagcccaccccctgcacctccacctgcccagccccctgccctctgccccaa

SEQ ID NO: 120400 - DNA, 742 bp, Homo Sapiens
ccgagagtatataattcttgctttattatgaaccaagtcacattttgtctcttccaacagatgcttgagccaaaaaagcaaacataggcagaaatacaattgagaatatcttcatgtttcaacctttaatctgacttgccttttactatcctttccccatttcttctaatctcttttgccttacaatatattaccttctaggtatcacctcatcctatagaatcccttctagtttaatgtcctgccccaaacaatactaacccattgaagataactatgaaacctttaaatggacagtggttccttttaaaagcagccttactgaaaattttatatacacttaaatcaagtaacagttaccgtgagttttctaaacttttgtgttaacagaaatgccagttcagcagtgtgactgttacttttaaatgtctgtcttgccgccctagagtgacagacatcccagttaaacatattaggaataagaaatacataaatccaatgaagactgtagaaaaagaattttagcacttgaaggaacttcagtcatttaacccaacccattcatgttatagattgagaccatagaaataaaagtagcctataggatacaaaagttagcggcagatctgagataaaaatccagctctttggatccccgcgtttttcaccacacttagctgtcgttcccatgtattacgaacaaagaatcaaatataatcaagtgcagcctcacttcacccaa

SEQ ID NO: 120401 - DNA, 1719 bp, Homo Sapiens
gaggtaagacatatacatagatggcttttactagccaaggcaatgtaaatggactaagatctcatgtgactgaggttatctgatgaatttattctcttcaaaaccactacttttagagggcatgtttaacccctctctttatttaaggagggagagaaaaacacatgtaaccagaattcagagtgggttactcaacgtaagagaacatacggagttctctttgggaaaacgacaagactacagtgttcacttcgcaccatgaagtggcactcctgttatggctgtcagagtcctctcacttcttatgaaaggatgcatctgattctgaaattactgatatattcgatcagttagggatgttttaaaaagtgaaaacaaatgccacacatacactttctagctttctgaaatcaccgaacacattacaaaaaatagagaatttaccctattaacttttagagaattttccaataatattcttggttaaagaagccaagtttgtgcatattcccaattttcagtgttcttgtttttatgcacaagagccaaagtagtatacacatatttttaagggctttttacaatgaacgatatataaaatacattctatagttggtgaaagaataatcttaagagttggcattaatctttgaacaaaaaagatttcaagccactttctttacaaagaaaatataatttcattgtgaactatatttctctaattttgccaattttataaaatacagcatatccctgctttaatacaaccaggcatgctgtgctgactggtccaataaatctaagtgttatttaagggaaagcaggcaatctgttcatacccaaattcatacaagtttcaaagaagcatcaaaggatgctacctacattcaagccacattgcaatattagctaagccacagttgcactcatgagagtgaaactacagaataacaactattgaagattttaatagagtcaaaagatgaactggcaaaccaggttgtggaatctattcagcctctctgctctgctggagtggttgatttagtctggtaagtggcatattcagctccaccatctgctttccctttcttcttcctcctttgaagatatctgtacgggacaacacaaattactgcaactccaacaactatggcaataacaatcacagcaatgacccaaacatccaaactgtcaagtattccttcctcaggtttaggatatcctggataatttgagactggaggcttgtaagtaggcctaggacctgaggcactggacgctggagattttgtagtggaagaagtcgacactttaagacactttggaactgggggatcccaagtactgttactgtcacagacaattgtgtcgctgccatcgaggtaaaaacccttatcgcattcaaacataactgttgctttgtagtaaaatttttttccaaatcctgatatctgttttccattttcgactactggaaatcgacatttgaccactttacactctggagcagcacgactccacactgaattgtcaccacaataaatcgtgctctctccaataagtgaaaatggatctggtccaggtgcaggatcacaactataagttactgcatcaagatactcaaatacttctacttcactaaaggtgtgttttccattttttatttttggaggtggtgtacacaaaaccttttcacccaacttttttgtacaaagt

SEQ ID NO: 120402 - DNA, 989 bp, Homo Sapiens
ggagctccaccaccaggaaatcccccaggcattcctcctggcatgccttctgcactctggtacagctttgtgatgatggggttgcaaacttctcccagctctttctgttgatgttcaaattcttccttcctcagcagtctgattcttatcaagccagttgataatttcattacacttgtccagaatcttctgtttgtcctcatcgttaatcttgccttgaagtttctcatcttcaacagttgctttcatgttgaaggcataggactcaagtgaattcttggatgacaccttgtccctctgcttctcatcttcagctttgtacttctcagcttcctggaccatacgttcaatgtcttccttgctcaaacggcccttgtcattagtgatagtaatcttgttctcttttcccgtactcttgtccacagcagagacattgagtataccattggcatcaatgtcaaaagtgacttcaatctgaggaacacctcggggtgcaggaggtatgcctgtgagttcaaacttgccaagcaggttgttatcctttgtcatggcacgctcgccttcataaacctgaataagcacaccaggctggttgtcagaataggtagtgaaggtctgtgtctgcttggtaggaatggtggtattacgcttgatgaggacagtcatgactccaccagcagtttcaataccaagggaaagaggagtgacatccaagagcagcaaatcttgaacattctcagacttgtctccagacaagatggctgcctggacagctgcaccataagcaacagcttcatcagggttgatgctcttattcagttcttttccattgaagaagtcttggagaagcttctgaatcttggggatacgagtagaaccaccaaccaggacaatatcatgaatctgtgacttgtctagtttggcatctcgaagggctttctctactgggtccagggtgccacggaacaggtccaacttttttgtacaaa

SEQ ID NO: 120403 - DNA, 940 bp, Homo Sapiens
gttcaaacttgccaagcaggttgttatcttttgtcatggcacgctcgccttcataaactgaataagcacaccaggctgggtgtcagaataggtagtgaaggtctgtgtctgcttggtaggaatggtggtattacgcttgatgaggacagtcatgactccaccagcagtttcaataccaagggaaagaggagtgacatccaagagcagcaaatcttgaacattctcagacttgtctccagacaagatggctgcctggacagctgcaccataagcaacagcttcatcagggttgatgctcttattcagttcttttccattgaagaagtcttggagaagcttctgaatcttggggatacgagtagaaccaccaaccaggacaatatcatgaatctgtgacttgtctagtttggcatctcgaagggctttctctactgggtccagggtgccacggaacaggtcagcattcagttcttcaaatcgggcacgggtaatggaggtatagaagtcgattccttcatagagagaatcgatctcaatactggcctgggtgctggaagagagggtacgcttagcacgttcacaagcagtacggaggcgtcttacagctctcttgttctcactgatgtccttcttatgcttgcgcttaaactcagcaataaaatggttgaccattcggttgtcaaaatcttctccacccaagtgggtgtctccagctgtagacttgacctcaaagattccatcctcaatagtgaggattgacacatcaaaagtgccacctcccaggtcaaagatgagcacgtttctttctgctccaacctttttgtctaagccgtaagcaatagcagcagcagttggctcattaataattctaagtacattgagaccagcaatagttccagcatctttggtagcctgacgctgccaacttttttgtacaaag

SEQ ID NO: 120404 - DNA, 1433 bp, Homo Sapiens
  misc_feature (391)..(414): n is a, c, g, or t
ggtagggcacaaacacaatgggttaaattgctaactcatacccaaaattaggaacccgacaacatgctgaaatcaagaagaaactgagggatcaaagaacaaagtcaagagacactgattgggtcttttttctttttggacacgttacgaagaaatatcacataggtaagagtaagaaaactgaacagccgccacattaaaatgatggagaacaaagaaaatctggcccagtttttctagaaatctcctccttaaggtgtgagatgagagccctagtggaattaagtcctatttctctctacatccttgctgcaatgaagtttacagcaggttcccttatagagagcccactctcctaagcagatggagttacaaatgaaaacccatagcnnnnnnnnnnnnnnnnnnnnnnnnaaaggagaaataagagcagcaagatcatccaagaatactacatgtgctgccagaataattcctttaaaagtcaaatccaggaagcacagatcaacatctcacaaaaaactttagcagtgggaggcccctgaggaacttttcttctcttcccacaatggtatcccattctctcttcgtgctccactgatgggccagccacacaccctacataccttggcttctcctctaaaagtgctaataatctggggacatattctctttaaggataaaagcccctaccttctaggagattagacccctacttgttttcacacaatagtcctgaagactaaagaaaggcaattcctatatatttgagaccagaggtcttggctctattttcctttcagatagttaatagggatcttacactgagaccaaagtggcctgggagtgctatcctgatattttaacaaaacgggaggggagaggaccaagatggtacacatacaaattatttttacaaagtgaatggagaagctcattaggtacatctgtttgtttcaagatgtagacatttgccagccaaaggaagcacctatttccacactctccccctaccctccctaagtctctatcccaccaccaagagttctgctaaaaggatgaagcccaatgaaggaatacttgagaagtgatgtgatacaaggacatttatacaggttttggcatgccatcccaaatactaagtgcttttgtttacagctgtaacttgttctgaaactaaccatccccactttcttttccaaagattttggtttttgagcagtaaagaaattgttatccattaactgaaaaaataatcacagccaaacatcccttcccacatgactgtatcacagaatagtttcaaatgaacaactatcttttcagacagttatctaccaactctccgatgtcttttctactctgtgaagatggcttgcttcatcgcttcacttgtcattcctcttctggtcctaaagctcatggtgagccaa

SEQ ID NO: 120405 - DNA, 1359 bp, Homo Sapiens
  misc_feature (204)..(213): n is a, c, g, or t
  misc_feature (678)..(700): n is a, c, g, or t
gtttaaaggaaacagcttccttacgatttgcctcaaggtttggtggaaatgctacaggaactagctaataaacaaaaaacaagagaagcacattcaaaatactgatttactttggtagcaaatggttttctttgaagactaatgaagatagacaagacccattaaggtgaagtggactatttcaaatattcaacagtttacatnnnnnnnnnntcttttaagagctaagcgtctgtatccacggatagcaatgcaatacctagtttatgatgacttgaaacaaaacaaatgcccataaggaaaaaagctgtattttatctaaatttactttcagtcaatagttcagtaacattttcttcccaatacaatactccctctctctataaggctgttcctgggagccagacaagtttaggtaataagggagttaagagagttaactgcttgcagttttaaatagacagtaactttgcttccctcttaatgtgctaatagttgtgtctaaaaaaatatgcaattcttaaaaaggtaccatttctgatttctttattatctgtaacctttggaaactaatcacatgaaactacaaaattagcaaatgtcttgaaatctgtatataaaacataaattacctctaatttcaaactctcatttattagtgtaccactcaatcttttnnnnnnnnnnnnnnnnnnnnnnngcggctccaaagatagtcttataccattctttaaaaaaggaaactgttccttttaactttacacccaccccacaccccaatttcaaaacatcatttaattgtcttggtcatggacatttccaagatgagattttatatttcgctcccacagcttctggttatcagaaaacccatgctttcctttattgaaggagtttggtccagctgatgttggtgtatcccttccaatattcttcatcctcatctttgcttctggaggcatttcctctggttcactatcttcatcttcattaaaagctgctgctactgaaagagtttttggagcaagagttggaacagtttctttaggcttacttgatccaagtttgatggatatggctgatgctttctttgtcgtctgactacctatggcaaatccaaacttggagatctttgtaggctttgttgggaggtcggcagcttcttcttcagctgatcgcttctcagcgctgcgactggaactttcccctccattactggaagaaacagtcttagttttcacaggtttttctgcttcttcttcaggtcctccggcggctccagctcgctgcgacttttcaggcttctcgtctcccgccttcccgtccagccattttccccgcccaacttttttgtacaaa

SEQ ID NO: 120406 - DNA, 1020 bp, Homo Sapiens
aacctctccagccattttatcaactgcaaatccctcaactgatagctttatagtctggatattaagaatcctccctggtatcggttataaagttcttcccagttgtcctttatgaatttccaagcagctttcctaccatgcttgctgcctccagctactccaccaattaccgatacagtgtcctgtggacgtacctcttctgaaagtgcaaacgtgaggactttttgaatcaggtcaggcaaaagagtagcgccaaggactctttcgattcggtttttctcttcttgcatatctgcttgtttatgaagttttaacataatatctaaagtagtgccatcaccatgcttcaaaacagtcagatagacaggactcctcagatcagcggagagaatctgttttccttccacgtggtccttaaaccgacgacgggcttcttctaacgttgccttatgtcctgcttttcctagttttcccagaaccaagcccctcaggagtgcatcgagatgaccttctccaggtttggggtcccagcccagtctctcccctataggtgaaaagacatctttcacaaactcctggatttcctcatagaagtctgtgtgggacaagagagttgagagaatccccaggttacagctcaggtcgctccatacagtataattgggctcattcacaaaagcctccatgacttttagaacctctacagtgctaatgattccagctcgagccaaggagaagaggtcattctgtaatccaagtcgatccacagggggcagagaaaggtcacgaatgcctggtaataaactttccagcatggcagagctgtactgggtccgataaaacccaactgttcctaagtttaacttcacccattggtctggtttgacatttttcaaaaccacattcatctctggcttgtccattagaatttttagtttggcctggttggggtcttcactagtagagattgtgatagggaccatccactggggacaatcttcaccaacatatgacccccaa

SEQ ID NO: 120407 - DNA, 535 bp, Homo Sapiens
aattggatctatcttcttccttaacatttcagttggagtatgtagcatttagcaccactggctcaatgcgctcacctaggtgagagtgtgaccaaatcttaaagcattagtgctattatcagttaccaccatttggggcttttatccttcatgggttatgatgttcccctgatgacacatttctctgagttttgtaattccagccaaagagagaccattcactatttgatggctggctgcatgcagacatttaaagcttttagagaatacactacaccagggagtatgactactagtatgactattaggagggtaataccaagagttggactacgcaccttaggcaagatacaaaccaactaaaatagaataaagaatgagtcagatgagtgtagccattttaaccaagcagcacatttgttaatttctacaacttagtctcagcgatacccattgtatttagccatgttcaacaacaagtgtcagaaactgcacagactcctccctgttcagctccaacttttttgtacaaagt

SEQ ID NO: 120408 - DNA, 919 bp, Homo Sapiens
taaaatagaataaagaatgagtcagatgagtgtagccattttaaccaagcagcacatttgttaatttctacaacttagtctcagcgatacccattgtatttagccatgttcaacaacaagtgtcagaaactgcacagactcctccctgttcagctggtagggagcaattctattatttggcattgcatggctgggttgaattaaaacagggagtgagaacaggtgagtctagaagtccaactctgaaaaggaccactgtacatttgaacacacggctgtgttaaagatgctgctaatgtcagtcactgggtgcactaaaggatctcttattttatgtaaaacgttgggattgacaagatagatctgacactctgttaagttaccctctgaagctacttcttgtgaaatactaatgacagcatcatcctgccaagcgaaagaggcaggcataagcaaggacaaattaaaagggggtaagagccttatcatgatgaggagtcttgttttgacatcttgggaaaagctgtccatagtgtgaagtcgtcaatttctcaccatggtttgcagtttgactgtctctagttaggtgaagtctctgagtggcacacacctcaggcctgagggttttccctttaaattttcattgagttgtccatctccagcatatagggcttcaggagcagagcagaccttgtttttagtggttccatgggataaaatgggattggaggagctagaagaattcagggtctggtccaatctgccagtcttcctgaaatatcgaaaatacaccagggctgctatatcagagccaccctggccagcactccaatcgtgatgccgacggtggccacagctgagaggacaggagcacttccagagactgtgatcatcgtgacccaacttttttgtacaaagt

SEQ ID NO: 120409 - DNA, 977 bp, Homo Sapiens
tttcctttcggcagtgaggattaggacagctgaacctcttcacatcactgtccaacagagccggaaagctacaggacgggcactgacaagctcgtcggcgtaggctgccgcaacctcctcctcggcttttcgctcatagtacttatacaggatggtctgggggagcacttctccagctcactggttgggaacgaacacgtgcagctgccttccatgcagctgagctccaactttccagatccaaagactgcctcttgggcatatctgatgagacactctttgcagaacaagtgagcatctgcgcactgcgtcagctcctcgaatggaaattccccatagcagcagcgacactcaatcagctggccatccttttgatactgttcttcattcatctgtagggcaagcaaaaagtcttcatgctctgccatctctttgattttctgctcatagaactcctgctcttgttgcacagctggaaggagagcacgtcggtcataggacctacaatgtcgtcgcttattttcaagaaagaacatcctcttttctatttttatgtcaccttgttcaaacttgaaatcaatgtaagaatactggttcatttgttttctcttcttcctttttccactggtttctggtgacagctcctgccattttttaatggcatcagacaaggcctttcgggtgattgcatagtgtcctttgagctcgtgcagggcccacttgatgtcctgactactgagcactttgaagtcggccatgaggaggtcagcagcttggatgaagcagcgctggtcaagaggggtcaatttagaatagtcaaaaaagtctattttaggcaactttgtctcatcttggctggccagcagactgctactgggatttataatgattctgtcttctctctttggataatctgggttttccagaagaaaattacaaagtacattcagatcataataattcttaaaatgaaccaa

SEQ ID NO: 120410 - DNA, 1239 bp, Homo Sapiens
ttggcagccgctcccagatggaggaagatgtcagacgcacacggctcctaatccagcaggtccgggacttcctaacagaccccgacactgatgcagccactatccaggaggtcagcgaggccgtgctggccctgtggctgcccacagactcagctactgttctgcagaagatgaatgagatccaggccattgcagccaggctccccaacgtggacttggtgctgtcccagaccaagcaggacattgcgcgtgcccgccggttgcaggctgaggctgaggaagccaggagccgagcccatgcagtggagggccaggtggaagatgtggttgggaacctgcggcaggggacagtggcactgcaggaagctcaggacaccatgcaaggcaccagccgctcccttcggcttatccaggacagggttgctgaggttcagcaggtactgcggccagcagaaaagctggtgacaagcatgaccaagcagctgggtgacttctggacacggatggaggagctccgccaccaagcccggcagcagggggcagaggcagtccaggcccagcagcttgcggaaggtgccagcgagcaggcattgagtgcccaagagggatttgagagaataaaacaaaagtatgctgagttgaaggaccggttgggtcagagttccatgctgggtgagcagggtgcccggatccagagtgtgaagacagaggcagaggagctgtttggggagaccatggagatgatggacaggatgaaagacatggagttggagctgctgcggggcagccaggccatcatgctgcgctcagcggacctgacaggactggagaagcgtgtggagcagatccgtgaccacatcaatgggcgcgtgctctactatgccacctgcaagtgatgctacagcttccagcccgttgccccactcatctgccgcctttgcttttggttgggggcagattgggttggaatgctttccatctccaggagactttcatgcagcctaaagtacagcctggaccacccctggtgtgtagctagtaagattaccctgagctgcagctgagcctgagccaatgggacagttacacttgacagacaaagatggtggagattggcatgccattgaaactaagagctctcaagtcaaggaagctgggctgggcagtatcccccgcctttagttctcactggggaggaatcctggaccaagcacaaaaacttaccaaagtgatgtaaaa

SEQ ID NO: 120411 - DNA, 892 bp, Homo Sapiens
ccctctaatcccagatcttgatgctggggcctgtggcagcacacagccagtagcggttagggctgaagcacagggcgttgatgatgtccccaccatctagcgtgtaaaggtgtttgctttcgttgagatcccataacatggcctggccatccttgcctccagaagcacagagggatccatctggagagacagtcaccgtgttcagatagcctgtgtggccaatgtggttggtcttcagcttgcagttagccaggttccataccttgaccagcttgtcccagccacaggagacgatgatagggttgctgctgttgggcgagaagcggacacaagacacccactctgagtggctctcatcctggacagtgtatttgcacacacccagggtattccatagcttgatggttttatctcgagatccagagacaatctgccggttgtcagaggagaaggccacactcagcacatccttggtatggcccacaaatcgcctcgtggtggtgcccgttgtgagatcccagaggcgcagggttccatcccaggagcctgagagggcaaactggccatctgaggagataaccacatcactaacaaagtgggagtgaccccgcagagcacgctgtggaattccatagttggtctcatccctggtcagtttccacatgatgatggtcttatctcgagaggcggagaggatcatgtccgggaactgcggggtagtagcgatctgggttacccagccgttgtggcccttgagggtgccacgaagggtcatctgctcagtcatggcggcggcgagagcgtgtgtcgctgcagcgacgaggatggcactggatggcttagagaaactagcaccacaacctctcctgccgccaacttttttgtacaaagt

SEQ ID NO: 120412 - DNA, 418 bp, Homo Sapiens
gagtccagttgctcccagtgactgcagagtagccacaaggctgcccgaggcaactccacccccaatggcaatggccgccgcggacatcattttggctgctatggaggacgaggcgattcccgccgcagtgaagcccatggcactgagcaccatgggcacagccgccatggccacaactcctccaatcacaactgtagcaatcctggccaggggcaaaactacggcagagccagaggccaccctgaccactttggccacactggtcactgctgatgaggtgagagcagaggcctccatgcctgctcgggttaattccgtggcctagagagtaagagatcctcaacttcagccagacccaaagaaggagagttcctgagaatgtgaatttgacctcaccgtccaacttttttgtacaaag

SEQ ID NO: 120413 - DNA, 1651 bp, Homo Sapiens
tcccccagggccttctgcagctttctcagaccgggccaggtacttgctttccacctggcagtttctggcttggaggtaggcgcacttcgtcagaagggcttctctttctcagccacttttctccagatctttgtgacctggtggatctcggagttgaggaagcagttctgggtccggtaagcttccatgtcatccttcaggtgctctatcttccatgctggctcaggaagtccctgttggcagcgtcggggcgcaaaggagactggtcaggggggtgcgtgaagtcctgggtgaccttctcagagagcttgcagatgacctgctgcttggcgtggttcttgtccataagcagctgcacgtgctgctgtagctcctgcacctgctgctcccgcaggctcgctgtgtgcgccaggctctcccgctcctgctccagggcctccacccgccggcccagctccgcgatctgccgcactttgtgccgcaccagctccagccggtccttgtcctcagccgccgccaggtatgcgctggacgcccgcttctcctgctgggcggcctccagtgccttgtgcaggatcttcactagctccttctgagactttaactccttggtgagcatcagaacctgttgctccaaggctgccactttctcctgggcagttcggttccgtgtgattccttcagaaaagaatgggaaggtgttgttctggcgcttggctttctgagcgaaactgatggtcagagaaggcttgggtgcaggctttggagaatcctctggctctctccctggggtgctggcgtcagaggccgagggctgctcctccctctgaggctccccactctgtggagaatcttcccctggaggttcatggcctgttccctgggcctgcttgttgccacggatgttgtgcattgtgttctgtatttcagtccccaggtgcttgagggaaatattctgaagggcagggaagggctgcaaggcagctgccacgcccactagcccagggggtgttttcacagggcacaggaactcctccagctctgcctcttcttgccctagctcgaggtgcaggacgggcccattcccagccagggcggcatcaggggtggcaggaggtgccggcgggctgttgtggaattcccagcgcttcatctgcagctgctgcagccagtacagcatcgcttgcttggtggcggccttcagggtaataacccggctgggagtcttgatttcgaagatcccctcctcagcgtccgccttacagtcaaacactgcactggagaggtcgatgctgtccaagggattggcatcctgagcggtccgcgagtaatacagctgacatttcctttcgtcgtagaagaaccagcgggatttccagccccggatgggccctttgccgccgaacttacttaaatacccacagagtttcttggggaccgcctccagggaccgggcgcagtcccccgattcttcctccggaggcggcacctgtggatccctggcagactcttcggacccaggggcagaggagctggactccggggcgttctccccagcgccctccatcgctgccagccggagactgcggagggacgaggggtccgcgggaccaccagggacaaatctcggagactcggcgggcagctccaa

SEQ ID NO: 120414 - DNA, 881 bp, Homo Sapiens
ttggggagtctaagagaatatacgcttatggagctgcttgtgatgcacatggaagaaccttgttttgacttccttcgaaccaagcagacccttgggtaccatgtctaccctacctgtaggaacacatccgggattctaggattttctgtcactgtggggactcaggcaaccaaatacaagtgagtgagtgagtgaatagatgagtgtaacctattatggacatggagagtaggggctacatgtgtttccttaaaccttgggcaaccctgaccaagcaggtttgctctatttagtcagtggaagctgggaagatgggggttgttatagatggtctgttccaggactgatcaatagttccagtggccctttcagacttgattcaagtcctgtggtcattgtgtggggcttgccagtgtttcttctcttcaggcagacctgaggacaagaagggaaaggatgcctgatctgacaggcattgctgaaacctgttagttttcagctttggaatggtcatacatggttgtgactgcttcattatgaggataccaggaaactgggctggaggtggggtgagggggagggttctttctctttctgtcctcaaagtcaggtggaatactgaggcctgggaaaacactttagctttttttcctggatatatgtcttagtcttaattccttcttttgccttctgcctgagatcgggtttctgatgacttaattgaagatgttttgttttagttctgattgaagatgttttgtttcagttctgaaattgttgataagaagatagaagagtttctttctagctttgaggagaagattgagaacctcactgaaaaggcattcaacacccaggtgactgtgccagcctggtctttt

SEQ ID NO: 120415 - DNA, 924 bp, Homo Sapiens
ccaaatttttgaaaaagtgacttggtattaataaaaactggtgaataaatcaccaatgatttgtttcctcatgctgtcatattattttcagatacaaccataaaggcaaataagccataaagacaaacaagatgacatattaagaatgtttaaaattgcttcttccgaattttccggattctactggcaaagcgaagctttggcatcttctttttctttttcaaagcttttgcacatgcacgtttgcaatcctccctgctaacaaagttattgtcattccctccacagccagtataggtgaaagcatcacaggttctgtatcttggattaaaataatagcgagtcacattggcagagcacagtccctcatcttttggactgtagcaaaatgatggaattttctttggtgcgcagaagcccatacaagtagcttcatctggaaacctgttctcaatccggttccggtgacacccaccggaaaagaatttttcacatgtcatggaacttagattaaagaaatacttttctgtggacccctcacactggtcgtccacactcacttgcagccggcaaactttgggaactttttctatcctccagcaagcatcgtcgcaagcctcccaggtgtagaaattgttggcgttgccctcgcagcccccgtacaggaactggcggcagctctgcgtgtacctgtcgtagtagtaacggagaagtagggcccggcagggtccgtagtctaggggcaggagacagatctccgcgttatttcctgttggctcctgagcagcatcgcccagtgcagcctccgtcaggaaaagcagcagaatcgacagccccagggggcgagcggggtccatggtgcagggggtcgggcggcccgctgggcaaggcgtccgagaaagcgcctggcgggaggaggtccaa

SEQ ID NO: 120416 - DNA, 1084 bp, Homo Sapiens
ggggaacacagtgaccacttcataaccctcaggttggtgtgactcgctcccgggcatgcttctcacagtagatttgatcctccacaaagaaatggcccttctgtttcaggttggtgccacagtcagtgcacacataacactcagggtggcggtgacggtcccgcagcttcacaaacacaccaacaatcccagtgccacatttgtcacacataggcaacttctgagcatttccaatcgacgcagccactttagtgacaggagctttaacacttctgaatcctgagggcttgttgggatcccctttttcttcagactccaggatttcctgcaaaaccaagaaagacgtggactgtttcgggggctcattcaactcctgtttctcctgaagcatcttgtaaacttcagattctttgtcgatgacaaggctgcttggaggctgagcatggtctaagggtctgctgctcgcctccaccccgctggcagcagtctttgactccagggcattgttgaagttggagatattttcagaagagtagaggccagctgggttgttgtactggtttgtgatgaccctggcagtagtgctggaggcaggcgaggcggtaaagggcatggcacttcggttgtgggcgcttcctatgtgcaggacctcctggggttcagaggctaaattcatcttgtatggatgacgcttcccttcctccgtcaccagaggagaccagactttatgttcagatctggctacagtgagagtcaagttgtctgtgcagcctttgattctgttctgagcttccaagtgtgtcatattgctagtattttccccatcaatggctgtgattacatctccaatacataaattagctagagccgccttgcttccaggagtgacccgggaaatggcgagaggctgctcgaagtccttgccgcccacgaggcggaagccccacggccccgggccctggaggtctatctgctgggtggtcatggcgcggctgtggcgggcgacgacccgcggggacagacgggcaggacgcgcggaacagcttgcaggggacccccggcggcccaacttttttgtacaaag

SEQ ID NO: 120417 - DNA, 944 bp, Homo Sapiens
gaaaaatgaaggtaaaaaaattcaaagtgttgagaatcctcctgtccttctgggatttttattttaatcatctccttccacagagaacaagcagtactttcctgtagtctccagatgtgtcaccccttgatgaacgagtacagagactttccatagagtctcttgaagtgtgcccggatatccaacatgtcaatttctgctcgagaaaccatcactctgatgagggtgttatcatcggtgcccaagcccttcatcgatttatagagcttttcagcaaaatatgcagatttgttcctcatgcactttactatagccagcagagcatcttcaaagctaccagatgtttcagatttaatactctgttcaatatccttctgtgatatccttttgtattcatcaaacacatgcaacaggtgatttcggttccgggaacagagaacagttagaaatttcacctcatctgtcccccatttcttctctccagcctcatacaggtcctgggcatcctgtctcacgagagcatcgtccagataatttccttcatccctcccaccagctgacagagacaccagcactcgctggaacatgaacgatgtgtcagagcgaatgtcatcttcaaggctccgtccatattgctgctggtaggtttggcttatgcgccggatctcctcaggggtccgggaggccaggatctcaattaggcagccctcatcagtgccggctcccttcatggcccttcgcagctcttgcacgtcatacagcaccgtgggcgtcatcatccccacaatcacctgctcgaagttgccactcagttctgacttcaggtcgtctatcaagtccctgccgatggtgctcttgtaggctgtcctgatctcctggcgctgggcggtgttgcggtaggcaaggacgcgtaataatggcgccaacttttttgtacaaagttg

SEQ ID NO: 120418 - DNA, 643 bp, Homo Sapiens
caggtgcacagccctggctcccgaggcaggcaggcaaggtgacgggactggaagcccttttcagagccttggaggagctggtccgtccacaagcaatgagtgccactctgcagtttgcaggggatggataaacagggaaacactgtgcattcctcacagccaacagtgtaggtcttggtgaagccccggcgctgagctaagctcaggctgttccagggagccacaaaactgcaggtagtgatgtgcaagagtccatcctgcagttttccagcaatgagaaactcctcgctgcggttgtgggacctgtggaagtatccgcagacactctccatggcgggggtgtagacgaaccggatgtcagcggcatcccctaaggcttggaaccctttatacatcttggtcatcttgatctcataacgctggtataaggtggtctggttgacttctggtgtccccacgaacttggccctgatgacgaggtcggaattgcagaaggccgtctgtgggtggggtgggacacaggtgcaggccctgctgggggctatcagccacagcaacaacaggatgccagaagccaggggctcaaagggggccatggtgggttctctggtgtggtctctgggcccaacttttttgtacaaag

SEQ ID NO: 120419 - DNA, 1561 bp, Homo Sapiens
ttggcgctgctccagcctctggggcgcattccaaccttccagcctgcgacctgcggagaaaaaaaattacttattttcttgccccatacataccttgaggcgagcaaaaaaattaaattttaaccatgagggaaatcgtgcacatccaggctggtcagtgtggcaaccagatcggtgccaagttctgggaggtgatcagtgatgaacatggcatcgaccccaccggcacctaccacggggacagcgacctgcagctggaccgcatctctgtgtactacaatgaagccacaggtggcaaatatgttcctcgtgccatcctggtggatctagaacctgggaccatggactctgttcgctcaggtccttttggccagatctttagaccagacaactttgtatttggtcagtctggggcaggtaacaactgggccaaaggccactacacagagggcgccgagctggttgattctgtcctggatgtggtacggaaggaggcagagagctgtgactgcctgcagggcttccagctgacccactcactgggcgggggcacaggctctggaatgggcactctccttatcagcaagatccgagaagaataccctgatcgcatcatgaataccttcagtgtggtgccttcacccaaagtgtctgacaccgtggtcgagccctacaatgccaccctctccgtccatcagttggtagagaatactgatgagacctattgcattgacaacgaggccctctatgatatctgcttccgcactctgaagctgaccacaccaacctacggggatctgaaccaccttgtctcagccaccatgagtggtgtcaccacctgcctccgtttccctggccagctcaatgctgacctccgcaagttggcagtcaacatggtccccttcccacgtctccatttctttatgcctggctttgcccctctcaccagccgtggaagccagcagtatcgagctctcacagtgccggaactcacccagcaggtcttcgatgccaagaacatgatggctgcctgtgacccccgccacggccgatacctcaccgtggctgctgtcttccgtggtcggatgtccatgaaggaggtcgatgagcagatgcttaacgtgcagaacaagaacagcagctactttgtggaatggatccccaacaatgtcaagacagccgtctgtgacatcccacctcgtggcctcaagatggcagtcaccttcattggcaatagcacagccatccaggagctcttcaagcgcatctcggagcagttcactgccatgttccgccggaaggccttcctccactggtacacaggcgagggcatggacgagatggagttcaccgaggctgagagcaacatgaacgacctcgtctctgagtatcagcagtaccaggatgccaccgcagaagaggaggaggatttcggtgaggaggccgaagaggaggcctaaggcagagcccccatcacctcaggcttctcagttcccttagccgtcttactcaactgcccctttcctctccctcagaatttgtgtttgctgcctctatcttg

SEQ ID NO: 120420 - DNA, 885 bp, Homo Sapiens
ccgggcttgaagaagtgcagccggggaaacgggaccatgttcacagccagctccgcaaggtcagcattgagctggcttgggaagcgcaggcaggtggtgaccccactcatggtagcagacaccaggtggttcaggtcaccataggtgggcgtggtcagctttagggttctgaagcaaatgtcgtagagagcttcgttatcaatgcagtaggtctcgtctgtgttttctacgagctggtggactgagagggtggcgttgtagggctccaccactgtgtctgacactttgggcgaaggcaccacactaaacgtgttcatgatcctgtctgggtactcctcccggatcttgctgatgaggagggtacccatcccagacccagtccccccacccagggagtgggtcagctggaaaccctgcaggcagtcacagctctcagcctcctttctcacaacatccagcaccgagtccaccagctccgcgccttctgtgtagtgccccttggcccagttgttcccagcaccactctgaccgaaaacgaagttgtccggccggaagatctgcccgaagggccccgagcgcacggagtccatggtgccgggctccagatccacgagcacggcgcggggcacgtacttgccgccggtggcctcattgtagtacacgttgatgcgttccagctgcaggtcgctgtccccgtggtaggtgcccgtggggtcgatgccgtgctcatcgctgatcacctcccaaaacttggcgccgatttggttgccgcactgcccggcctgcaagtgcacgatttccctcatgatggcggcggcggcggcggggaagcaggaggaagtagacaaacagctggcagaagagcgccaacttttttgtacaaag

SEQ ID NO: 120421 - DNA, 968 bp, Homo Sapiens
actttgtacaaaaaagttggacttcctcctgcttccccgccgccgccgccgccatcatgagggaaatcgtgcacttgcaggccgggcagtgcggcaaccaaatcggcgccaagttttgggaggtgatcagcgatgagcacggcatcgaccccacgggcacctaccacggggacagcgacctgcagctggaacgcatcaacgtgtactacaatgaggccaccggcggcaagtacgtgccccgcgccgtgctcgtggatctggagcccggcaccatggactccgtgcgctcggggcccttcgggcagatcttccggccggacaacttcgttttcggtcagagtggtgctgggaacaactgggccaaggggcactacacagaaggcgcggagctggtggactcggtgctggatgttgtgagaaaggaggctgagagctgtgactgcctgcagggtttccagctgacccactccctgggtggggggactgggtctgggatgggtaccctcctcatcagcaagatccgggaggagtacccagacaggatcatgaacacgtttagtgtggtgccttcgcccaaagtgtcagacacagtggtggagccctacaacgccaccctctcagtccaccagctcgtagaaaacacagacgagacctactgcattgataacgaagctctctacgacatttgcttcagaaccctaaagctgaccacgcccacctatggtgacctgaaccacctggtgtctgctaccatgagtggggtcaccacctgcctgcgcttcccaggccagctcaatgctgacctgcggaagctggctgtgaacatgggtcccgtttccccggctgcacttcttcatgcccggctttgccccactgaacagcccggggcagccagcagtaccgggcgctgaccgtgcccgaactcacacaacaaatgtttgaatgccaagaacatgatggctgcctgc

SEQ ID NO: 120422 - DNA, 713 bp, Homo Sapiens
aactggtaatagaatttattcaaatgtgctttaatataggcgctgggggcttgcccatggtgctcttgatatataaggcccggacattctgcccagtttttcttgagcaatgacaccaagaagttgacagccaggtgaatgttatacacaagctcatcgtctgtcatcttcacgtgaccaacagctacagccagacataacaccttcttcatttggaacttgattgtggacttcacctcatccactttggccaccatgttttcgttgtgtgtgagcagggaagggaactttcctgccttatttaaacctgggccgaggattcgtggaatctgcttgatcagagactctgaggccaaaaacgcatcatacttcttggccagcttcttgaccagttttttattcttgttgagtttttttcagcgcctcgatgtccatgtgggggatatccacggccttagcctcgtcacagtgctgctggtcccccaggacacacacagagaacttagggcggggagtggacttaagcctgacggtgcccgagaagcgcttgtccttctggggatcatagttcttcaagctgatctgcaactccaccgtctccaggaacttgcggcgcttgcgctggttcccgtgcaggacttcccgcaccgcctcgtacagggtgtcgcgagagactttgctgctcatggcttctcccaacttttttgtacaaa

SEQ ID NO: 120423 - DNA, 1033 bp, Homo Sapiens
gccatgatccaggatggattttagatcttgttgaaagcagccacatccatggactgcacatagtcctcaaaagcagtgatctgctcctccagcatatctgttccaactttatcatcttcaactacacactgtatttgaagtttcttaattccgtatcccactggaactagtttagatgagccccagactaagccgtctgcttgaatgcttctgacgcactcctctaatttcgccatatctgtctcatcatcccaaggtttcacatctagtaagatggaagacttggcaacaagtgcaggttttttggctttctttgattcatattgtgcaagacgttcttcccttagcctctttgcttcttcactttcctcctcatcatcagatccaaagaggtcaatgtcatcatcatctttactatctgtagctccacttcctgtagtgtcttccacatcggcaggaccatatttgcccaaagctttcttcactcctggcaggctggccttttccttttcgtaagacttgatgtgattataccaacgtagggcatgacacaagtcggcaggcggtgggctggacacggcttcaaatactgccacatctgcttgtgatggcacatacccctcgatgtagctcttgtccgccaggtaatcgttgagcacctggaggccggcagggcttttcaggtctccgaaacccatggtgtcggctgtatccgagagctggggagcagcagaaagagagcgcgcaaattgtgggcgccccacgctgaagagaggaaaaaggacccgaagagaccggaaaattccttatatagagacggaggcgtttccctccaccgcgccggaccgaaggttaaaggtcaaagtacttttgcattcccacttctccacgtacgaattgggggccctgaattaaatggcccacaaattgtccatggacctttcgttgcgtttggaagtaaattaataaaataggcatgtcttaagttcgtacctccacggctcccgaagatgacccaacttttttgtacaaa

SEQ ID NO: 120424 - DNA, 1030 bp, Homo Sapiens
tccccaaattcagaatttctctgttccaatgacaacacctttgctttgccacatctgaccagtgttcccataaaggcaatgttacttctcgatgcaagatctcattagttgcagctggctgaggagctgtcacttagaacaaggcgttgtctcacctgtcaagctggactcatcaatggaaagatccacagcctcaaacaagcgtaagtcagcaggaactctatccccaacagaaaggcaaactgtatcacctggaaccaagtctcgggcaagtgtatgctccaattttccttcacgcacacaatggcattctggtggcacaagtttactcaattcttcaagagatttttctgaacgatattcctgaacaaaggcaactgtaacaacgataagtattgccacagtgatactgacggcatcatcaaactgatgcattaaaacactgatgactgcagaagccagaagcagcataataaggggatttttaaactgagaaatatacttcttccacagtggctcatcttcactaatatcaaactcattccagccatgaaaggctcgcctatgactaacttcacatttgtttagaccattctgaagatcagcttggagaatgcttgcaacttcactgactggtaattcacttgctttttttgatgtcaatacaggaatcattgtctcattttcaccattaggtattttttgaaaacgtgcaacctgttcttcggctctttggtttctcagcgtcgataaatatctcctaattgcatggagaggatattttttgaaataagagaatctagatggaggcaacagactatccatagtgaggaaagcaagagggtccttgtctgcacctccttgtcagcaaccatatgaaattagaaacttagcaattcctcagatgcctaaagatttgtttgtagctcgaccacttccctcctacaaacaaagcaaatgttctccttgctgtttcctcttttgggtagagttcctggtgaaaccagacagccaagccaacttttttgta

SEQ ID NO: 120425 - DNA, 908 bp, Homo Sapiens
tttgtcgcactcaatatatctgtaaggttttccctaatgcatgatttctgttcttgtgtgagtaatgaagaacagatgaaatcagtcccacatttattagaaacatgggttttgacggtagaagaaagtatttggggtggtgaaactgaggaaccatggttgacagacttctcaacatggttacattcataaattttccctttcagcttgaaactgctgcagttcatggggatgtggtagaaagcttaatccaagctgatgtttaatagacttgtttcctatacctcttctatcgcgttggtctctcctacaagtaagattttcttttggggccgtagtcactttgttgcaatttctttcgtcatctctccactgacagtcaaagtcgtgtatttttttcttgatttccctgaagcaaaactcttcaatgtcatgtttttcatgttgttccaatgtcactgtgtggaatacttctcctgggttaccttcctgttgtggtgctagttccttgattacacagttacgagacagatctgttttcacacctttgatccattcccacccttttggttttcttgctactcgtacttggctttctatggtccagggctctttcctgtgctcccacataggataatactctggtcaggaagagaatttcccgcttataaaatgaatggaacatgatgtgctgtggcttttcaagaatctcagccctttgcttggataagaagagaggctatcacagatggatccagggagaccaggttcctgtagttctccaacatcacatccctgtataaagtcctctgtgtagagttcaggcatttccactcatcttgagagaattcgatggccacgtccctgaatgtcaagctcgacgccgtcaccttcaccaacttttttgt

SEQ ID NO: 120426 - DNA, 1695 bp, Homo Sapiens
tacaaaaaagttggcaccccggcacctcctctgcggcagctgcgcctcgcaagcgcagtgccgcagcgcacgccggagtggctgtagctgcccggcgcggcgccgccctgcgcgggctgtgggctgcgggctgcgcccccgctgctggccagctctgcacggctgcgggctctgcggcgcccggtgctctgcaacgctgcggcgggcggcatgggataacgcggccatggtgcgccgagatcgcctccgcaggatgagggagtggtgggtccaggtggggctgctggccgtgcccctgcttgctgcgtacctgcacatcccaccccctcagctctcccctgcccttcactcatggaagtcttcaggcaagtttttcacttacaagggactgcgtatcttctaccaagactctgtgggtgtggttggaagtccagagatagttgtgcttttacacggttttccaacatccagctacgactggtacaagatttgggaaggtctgaccttgaggtttcatcgggtgattgcccttgatttcttaggctttggcttcagtgacaaaccgagaccacatcactattccatatttgagcaggccagcatcgtggaagcgcttttgcggcatctggggctccagaaccgcaggatcaaccttctttctcatgactatggagatattgttgctcaagagcttctctacaggtacaagcagaatcgatctggtcggcttaccataaagagtctctgtctgtcaaatggaggtatctttcctgagactcaccgtccactccttctccaaaagctactcaaagatggaggtgtgctgtcacccatcctcacacgactgatgaacttctttgtattctctcgaggtctcaccccagtctttgggccgtatactcggccctctgagagtgagctgtgggacatgtgggcagggatccgcaacaatgacgggaacttagtcattgacagtctcttacagtacatcaatcagaggaagaagttcagaaggcgctgggtgggagctcttgcctctgtaactatccccattcattttatctatgggccattggatcctgtaaatccctatccagagtttttggagctgtacaggaaaacgctgccgcggtccacagtgtcgattctggatgaccacattagccactatccacagctagaggatcccatgggcttcttgaatgcatatatgggcttcatcaactccttctgagctggaaagagtagcttccctgtattacctcccctactcccttatctgttgtgtattccacttaggaagaaatgcccaaaagaggtcctggccatcaaacataattctctcacaaagtccactttactcaaattggtgaacagtgtataggaagaagccagcaggagctctgactaaggttgacataatagtccacctcccattactttgatatctgatcaaatgtatagacttggctttgttttttgtgctattagaaatttctgatgagcattactattcactgatgcagaaagacgttcttttgcataaaagactttttttaacactttggacttctctgaaatattaaaagtgctaatttctggcccaccccaaacacgaattcatagtaaaggaggaagaagaaaggggctcttccctctcctcgaatgacgttaatgggcacatgccttttaaaa

SEQ ID NO: 120427 - DNA, 960 bp, Homo Sapiens
taaggaagacatcatcctttatccgtaaagaccttaatcatggtggaaactgggtgcacccgcctaagattcttcattatactctctgccaaatctgctacagagagtccaatagcccaggatgtgtagcctttgagtttgatcacctcataagcactctcaaccacgtgcttgtgaacctctttccactgttcgttatctttatcagtccctaaatctgggtgcagagtcttcagagagacaccagcaacattcattccactccatacaggcacactggaatctccatgttccccaaggacccacccatgacagcttaatgggtgaactcccagcctttcccccattaggtaacggaatcgggctgaatccagattgcaaccgcttccaataacacggtttttgggaaaaccacttatcttccaagccacgtaggtcaagatatccactggatttgaaacaataagcaacttgcagttcgggctgtattttacaacattaggaatgatgaatttaaagatgttcacgttacgctggaccaaattaagacggctttctccctcttgctgacgtgccccagccgtgataatgaccagcttggagtttgcagttacattatagtctttgccagagacaatctttggtgttctaaggaaaaggctgccatgttggagatccatcatctctcccttcaatttgtcttcgatgacatcaacaagagcaagttcatctgccaagtccttcattaagatactgatggcacaggccatgccaacagcaccaaccccaacaactgtaatcttattctggggggtctgttcttcctttagaagattataaatcagctgatcctttagagttgccatattggacttggaaccaaaaggaatcgggaatgcacgtcgggcggtcgtcgggggcgcgtggcaatgagatccggccaacttttttgtacaaagt

SEQ ID NO: 120428 - DNA, 217 bp, Homo Sapiens
atctctagagaattttatttttggagttcttcacgaaaaagaattttttgttttgtgtctcttttacttgagactttcacaaaactactgagcaagtgctgagggtttattatattttgtggctacttggtgatcagtagcgctgttccaggaccaaggagagaggtagacgggggattccgctgttatcagcaccagctccccaacttttttgtac

SEQ ID NO: 120429 - DNA, 963 bp, Homo Sapiens
ttggatgatcatgcttaggatctcagatgacaagtatggccgaattcgtcttcatgtggaaaatgaagataagaaaggggtgcagctacagacccatccaaatgtggataaaaaacttttcactgcagagtctctaattggcctgaagaatccagagaagtcatttccagtcaacagtgacgtaggggtgctaaagtggagactacaaaccacagaggaatcttttattccactgacaattaattgctggccctcggagagtggaaatggctgtgatgtcaacatagaatatgagctacaagaagataatttagaactgaatgatgtggttatcaccatcccactcccgtctggtgtcggcgcgcctgttatcggtgagatcgatggggagtatcgacatgacagtcgacgaaataccctggagtggtgcctgcctgtgattgatgccaaaaataagagtggcagcctggagtttagcattgctgggcagcccaatgacttcttccctgttcaagtttcctttgtctccaagaaaaattactgtaacatacaggttaccaaagtgacccaggtagatggaaacagccccgtcaggttttccacagagaccactttcctagtggataagtatgaaattctgtaataccaagaagagggagctgaaaaggaaaattttcagattaataaagaagacgccaatgatggctgaagagtttttcccagatttacaagccactggagaccccttttttctgatacaatgcacgattctctgcgcgcaaggaccctcgactcacccccatgtttcagtgtcacagagacattctttgataaggaaatggcacaaacataaagggaaaggctgctaattttctttggcagattgtattggccagcaggaaagcaagctctccagagaatgcccccgttaaatacctcctctacctttacctaagttgctcc

SEQ ID NO: 120430 - DNA, 939 bp, Homo Sapiens
  misc_feature (104)..(146): n is a, c, g, or t
ttgtatattatttacaaaacagaaaattaagtcagcattaagtcaacatgagcagtcacagaatttttcccctttataaatggtacatattcaaggagacttcnnnnnnnnnnnnnnnnnnnnnnnnnnnnnnnnnnnnnnnnnnnctatatttttgaacattagctctatagcattcaagacacttttgtaagtgatgataccagctatttagtccatccctaaagaactgagagttctgggaatttatctacatcaatgcagtttctttatacattaacttgagaaaaatgtactgccctgaaaaatttttttaagattaggaaacaaaaagtcagaaggtgccaaaccaggactgtagggtggatgcctagtgatttcccatcaaaactcttgcaaaatggccttgtttgatgagagggatgagcaggaacattgttgtggtgaagaactctctggtctttctcggggatttttctgctgaagctttggctaagtttctcaaaacactcccatgataagcacgttaccattctttggccctacagaaagtcaacaagcaaaatgccttgagcattcaaaagctgttgccatgacctttgctctcaaccagtcctcttgtgctttaactgaactacttatcttggtaaccactgctttgtgttttgtcttcaggattgcgctggtaaagccatgtttcatctcctgttacaatttttcaatgaaaggcttcaagatcctgatcccatttatttaaaatttccattgaaagctctattcttgtctgtagctgatctgggtgcaatggttttggtacctatcaggtataaagtttgctgaacttttccagtcaaaattgtgtaaggtgaaccaactgagatgtctatggtgttggctgttgtttctggtgttaattgttgccaacttttttgtacaaag

SEQ ID NO: 120431 - DNA, 860 bp, Homo Sapiens
tcagcttcactgatagtagttgctgccccagtcagggtaggaacccaggccaagcttacgtccaaaagtgggcctgggcttcagccagaatgggggcgatggaggcttcatcagcagccacatatagctcctttgagtggaactgaacagctgggttttggaatagtcccttcatcccctccagcacccgccgcagcagctctggaatgcctgggaagaggtagacgtttcggacggagaccagagggaatctgaaaggttgaccagtgcaaggatctgtgccataatgcaggcgggcagaggagggcaccaatgatagcttctcccagccttcccctcctagggctttggtggctgcttccaacttggggtgtggcttcagctcatctccaaaggcctgtgccactgcctcaaaggtcacatcatcatgagtggggccgatgccccctgctgtgaggacatgggtgaagcggttggagaaagaagtgacctcagctgcaatggtggctacctcatcaggtacaactgagactcggcaaacctggacccctagggagcgcagtgtccggcacagaaagaaggtgttggtgtcctgagtgtgtcccttaaggatctcatctccaacaatgatgatgccagccgtcacgctgcgccccggagaaagttcagaggccctagatgtcatggtcctgccttctctgcccctctgcaaggccctccagtagccacccagacccccaaataggggtcgcaagcacggggggcctgccaggtctacagggcactgggggccatagcctgggaacagggggtcctgggtcgagggaacctgcctgttctccaacttttttgtacaaagt

SEQ ID NO: 120432 - DNA, 1001 bp, Homo Sapiens
aaaaacacaaaatcttaaaaactaaagcaagtcagggaagcctggaaagatacccagatttgataacatgttagaaggaaatccaggctaaggaatttcattttctagctttgatctggttgtcagttgggatggacttgcccaagtgatggcccacagaaaggccaaatttcttgtttttctcctcatcctgtacctcttttttcattaagaatcatgcctggaagtttaggtcaaagaggctgcttggagcaaaatacagtggtgtctcatcccaaatattctccaggcgtttcttccatccttccaggatttgaattcgggcgtctgctggagtgtgcccaatgctatatgtcagttgaggttctaagacttggaagccacagaaatgcagaatgccactctgaattggccagagaatgacattcatgtccccgtggatcccttgcagagagtacatggagccactgccaccagtggtgatggaaagcactgccttcttactccggaagggtcctttgtcatacatggcagcgtaagtgtaagcaaactctcctatgaacactcgctcaaaccagcctttcagaatggcagggactccaaaccactgcagggggaactggaatatcacaaggtctgcggcttccagcttcttttgttcagccacaatatctgggctcagatggccttctttataagccagaacagactcggcaggatactgaaagttcgcagggtccttcagtttacctgtgatgtcctttctggaaatgatgggattgaagttcatggcatagaggtccgactccaccacctcccatcctttcttcttcaaagccgctgcagcagcctccttcatggcatagttgaaggacgtcctctctgagtgagccagtacgatcagtgctcttctgccgaccatggctctggtgcagtccggggcgctgattggctgggctcgtggttgccgggggcgaccctgccaacttttttgtacaaag

SEQ ID NO: 120433 - DNA, 612 bp, Homo Sapiens
gtagagatggggtctcactatattgtccaggttggtctcaaactccttgactcaagggatccaggaaaggataacaggtgggagccaccacacctggctatgtgcatgaacttttaagacaaacacaaggccccacaaaagttaaggtttttcccacctaatttccagggggatcttttggtgcaaggctgagaagcccttaaaagtacacagacaactccaaagattcaagacagttcatttgggctgagccagcccactgggcagtctgaccttccaaaaagacccacccatgacatacaccagatggctctccaagaatctcttcagtcctcagggtccctaacgtactggacagagctaggaaagcaaacccatttgcttcttcctgcaggaaaccccttgaggttaagaccccacaatcacatgaggatggagtggctcaccctcagtcaacaggccagactcaaggtggtataatgtcttaaccacgggtgcgggcctccaggtctgactcccaactcagttcttctttaataaccacactttgttaattttccttaacaggggttcctggcaagtcatttctcccccaacttttttgtacaaagt

SEQ ID NO: 120434 - DNA, 1580 bp, Homo Sapiens
  misc_feature (406)..(449): n is a, c, g, or t
  misc_feature (892)..(900): n is a, c, g, or t
gtaaaatgcccagccctagctccactgttacctttcaaatgcagcaaaacagaagaaaatattggttaaagttaaggcacagccctgggaccaaagacctgcagctatgtttttttaaatttatatatctttaagtattttatagttttcttgaatcttcccataaacaagctctaaggtgacaagactatattacaggagaaaagaaaaatgtacagagtatgtatacacaccattcattctctcaccaagagtttccaaatatatcaacaccatcccatcatgggatgatgttttaataagaacagataatttacaattaacattacagtatgtacattgcaataaatacatggttgtaaacagacaaacaagactgtattacaggtaaggtcatttggtgagnnnnnnnnnnnnnnnnnnnnnnnnnnnnnnnnnnnnnnnnnnnntatcataaagctttctgtaaaatccatttcattcaagttttttctttccttgtctgtaatttgttctatctacattattgtgaattttaactgatataaaacaaaattaaaacagcattattgtgttcagtaacttgcaagctgaaatgcactggttttacacaaacttggacatttttttccccatacagtacccagatattgcattttcttatggcattttaggaaatgtaaagccacttgtaaaaggatattcttttattcttttttaaagcagtatatatttctgaagcacactttggcaagagagaagggcaaggataagcagattgtacagtgcattagtccctgtctcttggatattgagccttttctgcaatttgattgtccattagtgggtatctttacaacacggtaccattaaaaaccaacaaactggaagnnnnnnnnngagcctctctttattagtgcagttataaaccctttaccctttcaggtctggatttgttaatgacatattgctgctttttattttattcattattaagattctaggcactctgtgggggaaatactaagagtagggaggagaggaatgagaatgttttggaaagaggaataaactctagactctttacctttctttctagacttcactcagggacaaataaaattaaaagaaacaagttcccaaatattcttgtgaaactacttggtcaaacatacgtctttatttttttcttatttgaaagattaccatctgatctttacagaggaaacagagtagaaaccttgcaattaactagttgattcctcttctgctttatgtaaaagatcagagttataaagacataatttttatttcaaaggatctaagcatcagctagatctcaggggactgaaatggggactctcttcagcatgagtcatttgcctggctgatgacttactttccagtccccaggaggctccttgagaagttccacatataaatgcttttcagagttgtaattcttcttaaacgtttgattttccacttgtcagatacccactttggcttctatctatctcaattcttgaatatcaatgtgaaaaatgattatttgggctttaaagtcttcatagagccaa

SEQ ID NO: 120435 - DNA, 925 bp, Homo Sapiens
tcaatgttggctcccaacaatgtagccattgacatcaaagttgatgcgaatgaatttgccgaagcgggaggagttgtcattcttcacggtcttggcgttcccgaaggcctccaggatggggttggcttgcagcagctgccgctccagctcgccctggtctttcttgctcttgtgcgaggacgccacgtacgccagatactggatgactttcttggtgttctccgtcttgccagctccagattcaccagtgcacaagatggattgatcttctcggtcttgcatcatactcctgtaggcggtgtctgtgatggcatagatgtgagggggcatctcgtgcctcttcttgcccttgtacatttccacaatctcttcagagtagatgggcaggttcttgtaaggattgatgaccacacagaacaggcctgaataggtgtagatgagccctgagtagtaacgctccttgaggttgtgcagcaccgaggcttcgttgaggcacgtgagctctgccatgtcctccaccttggagaacttgggcgggttcatcttctggatgtcatccttgttcaccttcaccttcttcccattctccaccagctccacgatggcctcttcgcccacctcctccttgaggctggctggctcaaagccactcttgtcggaaggcacccataccagcttcttggcagcccagtcggcctgggccagcggattgttgatgaagtttttatccacatagagatacttatcggcagcttgctgtgccatggtgacttatagccaggacctgaacctggatctgccccgggaacaggcgctgcttctcccgagaggactttctcgagcgctcgggcggcggccgggtggggcgagcgcacgaggcgggagctgcagcaggtcagccttgcttagccccaacttttttgta

SEQ ID NO: 120436 - DNA, 973 bp, Homo Sapiens
aaagtcaactctatgcacaaacaagtgtatctctgtcaggatatcatgcagtgccaaccccttcagagttttcaactctgtaatatttctgtaggctgtggtgaaatcttgattcaacatccagtccaggatgttggcaatgtctgacttgagcgggtgcccggtgcaggtgtagacagtctcctctgtcaccttcccaaaggccatattggtgctctgcaaaatgttcagagccctacgcatgtctccactggaaagagtgactagtgctttcattccatcttcacttatatcaactttctcttcttccacgacatgttccaggcggggaaccatgagttcaggagtcaggggaccgaaccgaaacctcgtgcagcgggactgcaaggcagggatgatctttgacagatagttacagatgaggcagaatctggtattttctgtgaatttctcaattactcttctcaaggcattctgggcgtcctgagtcatggcgtctgcttcatccaagatcactagcttaaagcctttcttaaatattgtccttgtgctagcaaagctcaggatcggtcctcgaatgatgtctattcctcggtcatctgaagcattcagctccaagaccatggagccaaattctttgtctttatatagctgtttcgcacaggctaggatggtagatgtcttgcctgtccctgggggaccgtagagaagcaagtgtggcagtcggtcttcattgataaacttctgaatggtactcagaatgtcctgatgagaaatgagatcattcagggtctgtggccggtatttttcaacccagggcaggttcctgatcttggtcgccgcgggctgctcctgctgcttgagtgctgaggtctccatggcggggagacgaaggtgaccagatccgctgagatcgtcgcgtcacccaagcgcctgcacagtgaccagccgcgccaacttttttgtacaaagt

SEQ ID NO: 120437 - DNA, 937 bp, Homo Sapiens
cccgggtgactggaagtgcagtgtcaggcatttaataaactggacagccatttgtttttgcacgacaaggcatctttacacaggagcaatcgggagaaaacaggaaacagccaagcactctgcactgcaacacgccaccttaacagctaaccagcattactcaactgttacacaactgcgcttagtgcacaaaaatacataagagaagagattagaattgtgtttgataaacaatcctttcaaaaaatcaagtcttttcacctgaaaagtctttatacaaatttgggttcagattaccatttagatctgaaggtaaataacatatacaaatttacaccaacttttgtaggtttttaattttaaggaatgaaggcaatgccgagtcaatctcttgacagctttaggctgtgtgtaatggctgcacacgttttccttaaaagtcaggaggccacaaattaggttaccaatctgtttaatttcaaacaaaaaaagtcagcactatataacaaaatgaaattttacctcaaatatccaaatccaataatgaaatctgaagtcgttcacctcactaaattacaagaaatttgaataacagcaacaaaatggcacataaaatgaagtttgccaactgaggcaaagcttaaacaagtaaaaagttagacaaatgttacaaaataaccttttcaatagccagttgcttgttccaaggactcttcttcgatggactatgtggtcctttttccccaagtcctccgtttacactgcttgccgatacatctaggtttgaaaagaaagaagttcagcttaccttccattaaagtgcacatggtttcagtttcaggcacgtacttactaaggctctggtcaaaccagtagggtacagaaatgttccccaacttttttgtacaaagtgggcccttttaaagaaagcattgct

SEQ ID NO: 120438 - DNA, 914 bp, Homo Sapiens
ttttaaatggaggcaaaaatcagtccacaatacaaaatctaaaaatcacacccacttttcccacctggctcccggggaggggggaagctgggggtttctttgcttgcagggtgtggggaggagcagaggagggccaagaaagggagaaagaaacagaggccacagaggcctggctggaggtatcctgctgccccatgccctgtcctggagctgcccttggcctcctgtgccctctaccggtgcacgcctgtgtgggcccagcccccatctgtctggtctggccctgagaggctcgggcaccagctgcatcatttctctttcttctccagccccttcgatgctgatgcctctgttccctctttggattctgtcactgccgctggatccttaggatttgactcctcataactgaacatctctgtcacttctcccttggccagcgccaccaggacaggaaaaccgatgcaggcggggaccaggtataggagggcaggctgagcatgcttgaagatgtgcatgatgaagatggtaaggcccaggccgaagatgtaggctgcaaagctggtgtagaagtaggtgtgggtattcttcttcaagctgatgtcaaagcgcagcagcaaggcaatgaagatccctggaatgacgacatctccaagtcccagcatggcaaagttgtttgcttcgaggcctttctccagcagatcctggggaaacaccaattttattggtgcctcgaaggacttggccactgtcaccatcacattggtgccaaatacccagaagacatcgtagatgaagagtccgcccagcaggatgcagccagtgctgacattgttgaggtgcaggagctctactccattaagggagaaggccaggccaaaattgagtttgttggcaatccagccaactttttt

SEQ ID NO: 120439 - DNA, 933 bp, Homo Sapiens
cctttttcatcacaaaagaagtctccatatgattgactggtttctgatgtaaaagaagcaacttctcaaaaatgaatgactagcgctgtgaccatgagagacgggtggaaaactccttggtgggctttggctcttagttgtcccagaggtgctccatcctgcaaggctactggcataaatctttaacagcttcctgccaacccccatccagcaggaaatacttgcttatcttttttgggcgcggacagacaaaacactgaggtggggagggaggtgagaatcacaataattttgaaatgataaccacccatacttctaccaggaatgagccactttctcccttatggacagtgatcgggccatgccagttcaccttcattttgacaggagttgactaagtgagaatatctttgtgagtgtaaaacatttttggcaaagtgaaaaatagaaaaacttcaaacttcattgataaaaaggagcttatgattacccactttaaccttggtgagtgcagtatttaaatgtgtaatcatactcagatgtttacatagtgcatgtgtgtgaacgtatacggtgtgtacacacacgtgccccgaatggctcttgaataaattcattcctctagcagagtgtgggggtgcacttttcatagtatataatttctctctctctcatcatttcttggatgctaatacaaggtctcagtgaatgccaacaaaaccctgatactctactactttaatattcctacaaaaacagggctatactggaaagctctgcacctccaccccatcagtgtgctttccagaggggattgaagtatacccagccatcgccctcctggataaaatatttgggcttccatggtgtgcggaggttctcgcgcttccgttcctccaccgcgttgcttctccccaacttttttgtacaaag

SEQ ID NO: 120440 - DNA, 945 bp, Homo Sapiens
tacaaaaaagttggcgccaccaaagttaaccagaagggttgttatgatctggtaactagtttcatggagactaacatgggaatcatcgctggagtggcgtttggaatcgcattctcccagttaattggcatgctgctggcctgctgtctgtcccggttcatcacggccaatcagtatgagatggtgtaaggagaagtctttcaagaatgacggaataagagacctgttttaaaaaggaactgcagcaatctttgaaagacttccaaagaatgttagagcacagtacataatacacttgccctgctccctctaccccttaccccacaacgtgcaactgacactcccacccagtctctgctccacctttcagcccacgtcacgtgtagtgtccattttgtgaagccctgttgtgccacagagtgtagccaggtccccctgcagctagtcctagtgaacctcaccccgaggccctgcatgggccagcccctccatctgtacttggtccaactgcaactcatcatcggtgactggttatcacaccatcgctggcccctttgggccctgcatgtagtgtgggaggctcctgttagctcctcactgtggtaaatgccacacacctttaagtagataagcagacgatagttatctgttcttttgacttaatctcatttggtttgattttccctctactaaggctttcctaccttcttcaggctgcctaagacatgtaacgaaacacttcaataattgtccatgaggagaaaaaaagcatgtgtcatgcatgaaagaaactgaacttgaggtggcctccttgcttgttacatacctgggtatgtgtaggcagttaagtgcatcctttgcctctcagttgaaacctgtataaaccctgttacaaagctgtgttgttgcctccttgtgaaggccatgatattttgtttttcccca

SEQ ID NO: 120441 - DNA, 907 bp, Homo Sapiens
caatagatgtgactttgagaggtgtgttgtacgtaggaattttctgctcccattccgaaatacaggaagctacagaaatgctgctgcaagagttagagcgcctatgtagctgtggctggctcatgagttgctggccgttggaaatctgagcaatatagttactagaaagaggcacaggtgatggagaaacagatctttgagtaactttttctcgatctcgctcccgagagggtctctctggcttctcagttttaggttcagtaacaatagccttcagttgtttcagcttttcatctttaacccagagtttattctgcatctccagctgtttggctgccactctacgctcacattctttctcccacttcattgtcgtttctgtcaccatgccttgcaacctggcttctaatctgcgtttgtcagaaaactgtcgctgaagtttctggttctgagtttcaagttcctgttgcaaattgcgtttatcttcctcatagatagtagttgttttctctaaaatctcaatcttatattctaaagttttgtttttcttttccagtcgttctatttccaatttctgtcctgagatcatcttctccttttcatttagtttcccttgcatgtggttttctttacttaaaacagcattgtcaaattcttgtaacaaagctttaaaagcattagattgtttgttaaactcatcaatcatcatttgtcgtaagttatgtcgtttctctaaggcttcaatcagccttggaagtgtctgctcatcgttgatatccaaaatttcgcatgacggcaaaggtggaaaactctgcaaaaccacgtcagtaaccaatggttcatttccaactggacctcgaggctggtttctgtatctcctcccaggcgccaacttttttgtacaaag

SEQ ID NO: 120442 - DNA, 955 bp, Homo Sapiens
aagaagttgggaaaggatgggctggagaggtagtacacacggggtccagcatgctgttcatgtaggtgaagctgagagtgataagaaacgccaggtccaccgagcggtacacttcacaattttgcgtgcccgaagtgtgccaggagccagaagatgcggatccgcacaaaccacgctgggaaggaagcagatgacaaagacgatggccaccaccatgatgaaggtgatggctctcttgatcttggcatgccggtccatttgtctctgccgcaggctccagataattctggctgagcagaacaggatgatgcccaggggcaggaagaactccaggaggaacatggcttcgtgccactggaaggtatggcagatgctgaagctgctgcacaaatttgcaccgccattctggatcggcatcttcttcttcaggaggtggactgtcaggccaatagtgatgccccacagaaggcaagagatgatggctgctgtccgattggagatcttgttcagggcgtggtggggatggaccacccggaaatacctgtctaccgccaccaccgtgaggaagatgatgctgccctggcggttcatagccaacatgaagagcatcagccggcaagggatgtccccaaacttccagtcccaacgcctcacatagttgtccatcaggaagggcaggcagatgatcagtagaaagtcagccactgccaggttgaacaggaaaatccggctggatttccaggacttgaggtggaaacagaaaatccacagggcaaggccattgcccagaagcccgaagataaactccagccccaacaccggcggcaacaccttgacaatgaagtcatctcggaacacacagcagttcttcttgtctatttccagaaagtgatcctgcagatggtgccgattcatgagtgggggctagtgagtccgccaacttttttgtacaaag

SEQ ID NO: 120443 - DNA, 962 bp, Homo Sapiens
tcccctagggcctcccccaggcttccttggctcagtcccaggtgtctgcaggaggaaggtgttgtctgcatttagtgtagagactgggtttgaggaggcaccagataaaaggagatacacttgcagctataaagtcagcttcaaaccccagggcttgtaattccaagaggagggtggggaggcgaggccatagtctccgagtcccaggacgatggctgacaatacaccaaaacatcagcttctctccacagcacagctgggagcattccccagtggaggggccatctggcctgcctgtcctcccaggaaggtttgcaggcctcgagtggtccgtgagtttggtcccgggtatagttccaaccctcagttccgactctggagaacctcttcctccttccagccgcttgagtttttgccaaacttgtagacgagtcgccggccatccacccgttccaggatctcccgtttgtagtagtacctcatggcccggctcagcttctcgtaggtcatgttgctgttctttttcttttggccccatagttgggccacagcctcggagcgcaggaacttgaagacgccttcatgccgattctcccacttcatgaggccctcgttgagctccgggtggatgaggatgtcccggatgaactcccacaggtgggtgcctctgggcgcgtgcttgctcttcttgccctcgagacagtcccagtactctttgctcagctttcggggccggcctcgtttccgcttcccgtgcttgggatcccccttcttgcagtcacgaaaaccatcgctggggaagagcttgccatcagtgggatccaggtccacgtcacttccaccggagtctgaggagtgggagctccgagaagcaccagtccctgcggtggagacgtcagagctgccgggggagggggctcctgcgccacagctgccggggtgccaacttttttgtacaaagt

SEQ ID NO: 120444 - DNA, 220 bp, Homo Sapiens
gttggaaattattcagtccctttttacgtttattttacagaagaaatgaggaaagagacatcaaacagaaaaaggaagggatgagggagattctacaaagaaagaagtcctgagaagccaaagaccagtgagggggtcctcatccagcccgcagggtccccagcctgagaagtcaaagaccagtgagggggtcctcatccagcccgcagggtccccccaa

SEQ ID NO: 120445 - DNA, 891 bp, Homo Sapiens
gtttcttttcagcagccagttcttttcagagaactggcccaagagtttctggacaaatatattttgatctttcagaaatatgttcttattcactcctacatttggcacattctccaaggacccagacttgaaatggaagcttaaatatctgtttcgttttagaccaggtccttttttcttcaatccatgacagtggacttttttctctgtctccagacacactgtcattttcatatactgatcttcctttcgctcttccaaagtggcagacacaagagaaagctccccaaagagggagaccagccaggtcaggcgagagatgccgctgaatgcagggaagccaaaccgctcttcttccaacgggccagctgtgaagaggagcgaccctttcagcaggtctttccccaccacttcttttttcaggaaagcgaattcctccatcaagagttcaacatgctcctcgtgcaagacttttcctttctgctcagccagctcccacagttcctgagcggccgccaatgacagtgtcatggggtattccacaaggacgtgcttgccagcattaaggaactgcctgatgtagtcctcatggctggagctctcactgcagatataggcgacctccacctcttggctggaaagagcatcctccaaagaaatctgctggactccatcaatgctcccgagctcccttctcgacacgaagccaatcaggttcaggaacgctgaggaagggtgtggattccgcaagtccctcatccgcacggagccggctcggccaacaccaaccaccaccacgccaaacttcctctcgggctctgcattcatcttggtctcttccttcggtcactgacgcgggcaccgctctccaacttttttgtacaaagtggg

SEQ ID NO: 120446 - DNA, 935 bp, Homo Sapiens
ttggagggggaatcgctttgttgagaccagactgggaaatactgcacagtccaggcgatcaatatggatagcagaaaggttcccagaaagtagatccagggctgagtgcaggatagccccccagagaagccgcaagtgcaggtaaagccaggccaaggagcaggggctgaaggactcctcgttactggtggctccagcacctttcgtacagttcctggagaatggagatgttattagaatggagagttgagtcaatttccaagaaatccaagatatggtgtgggattatcgtaccttcctcgattagcagggccaggttaaaaaatccctgggagtctccatccagggcggcttgggcgtacatctgcacagacaactccaggtcttgtgactggttttggtggccatagtagtaaaggtctcccatcttcaaatatgcaaaggaaggagcatcgatttgaaaaacagagaaattatagtatctccaaacacagttaacacccaagtatctcctggccaggtctggcctctcctcacagatgtgtgctaaatttgtctgtgacacttcaattccagtttctgctgctaaaacataatacagcaaagcttcatgccatgaaccttccaggtaggcattgaggcctttgcggatgacatggcccaagtagccatttttctcagctacatgttttgcccatacaacagctttctcaggatctctagggaatgtctccaggttgcctgtgatatagtagagagaacaccacaaggtcccttccatgtgtccaccttgcgcagccttatggaaatattcaccagctaaagtttgattccttccaggaactccagggaagatgccatccaaatgcaggactccaagattgtatgacgcatctgggttccccatttcttctccaacttttttgtacaaagtt

SEQ ID NO: 120447 - DNA, 905 bp, Homo Sapiens
tattatttccactacaaacagcatagaaagcaagagaagttgggaatttattttaaatagaatggaggttgtcatctacagcagcactcctcactcctctgttgccattttagcaagtactccttgtcgatcttgaacagtctccaacccttttcactggacagatcagaagcacctcttcttttatagaagttgatggatggttcattccattctgctaccaagaagtgcatgctgctgcagcgacacctcattgcaacctggcttagattcttcagaatttctgatcctatgccaaagcctctataatcactcatcacgaagaagtcctcaagatacaataacttgccaatccacgggtcataggtaaaatagtacatggcaaaaccaacaatgctgtgtcctcatttatcatgatcatctactttattgtgtaaaggatcttttagttacctccccgcccatccatgtacacggaagggccatgtacatggcgaagctagagactgtaaccttccggagtccagtgctctttcggcacttctgcaaccaggcagtggtaaaaggggtgctctccaaaaccatcttctagcagatctttttcagttaagattacttgttcttccatgtattcatatttagccagctccttgatcagccgcagtatgtcactgcagtcggcggcagtggctgggcggatcacgaatttagccattttcgtcttttgcttttcttccctttgcggaccaggcccctgtacttgaacagtaggaggaggtggttcctcattcgtctcccgggagcgtcctcttctcagtcaggctggcaccatgacccaaggaacctcggcgagtgacggataaacaccagtcggcccgcgactaagccaacttttttgtacaaag

SEQ ID NO: 120448 - DNA, 942 bp, Homo Sapiens
taagccaggtcttcccgatgagagaggttgatgggcttcctttccctatgcagcccgtcctcggagagcctggactgtttgaaatccacggagtgccgggggttcaggatcagagggtgcatgatggggctgggcatcagctggatcacgcgtgtgctctcctgccgggggctggatggcttcgggtgggactcggaggacgctgggcagtgattattctccatgggagacactgacagagggtaggactcctggtggttgttctcctggtgcggcctgggtccctgagctctctcagccggggagaggcggcggatcatgttgtccaggggggaccggaggggccgctgctcggggtcaggagaaggccggtgatttgtcgtgataggtgacctggagcggtgcaacagttcaatggtgggagggttatggtgcacattatccacggatggcctgggggtcctctggacacagttatcttcttcatggttctgatgcagtatgacctccggctgtgtgtgtatagagtttccagggtggaagaatggtgaaaaaagaatccgaggtttcctctgcttcagaatatgctgaaggagttcatagagcacatcacctgaatgaggagatcgatagcgaaagtcctctttggtcagcagcaggagagctttgccattcatttcaaacgtgttgctgtcaattggccttaaagaaaactcattttcagcccacttgagccactgggctacgtcatccctgctccagtaaattggctgcaagcctgttggagagagcatgaggcagaaagaaagagagaaaggtcttgtcagttagacagctggaataaagggagaaggtctctgaatagttaacaaaatgagtctccacatctcaagagcccttatgttcaactctgagtcccctcccaacttttttgtacaaagt

SEQ ID NO: 120449 - DNA, 544 bp, Homo Sapiens
cagtgagaggtcagaggtggaaggctcagcaggagaggagaggaggatcagcagaggtcatgagaaggccagaatccagggtcaggcctggtcgaagttgagtttcttagctggaggagtttctcctagcccttcaatatccaccacgtcacagccttctgtttctttatggggggacccccggcctcagggacactggagctgctgggaggaggggcagctggaggaggtgacaagacaccagatgccaccttcttgggccctttcttgggtgactcagctggaagggggatgccagaatcttcatataccttgcgtttcacagtggcctttatctgggccactgtccgttccttgatgacacagctgatgtgattaagatcgtccccaaatcgcttcacagcagccctcagcatctctatttccgtctccgtccacttcgcgcccgcaggagaagagtcggccacgggatgcagctgcatcgtcagctccccgagcttcgtgaaggaggggccggccgccgagccaacttttttgtacaaag

SEQ ID NO: 120450 - DNA, 898 bp, Homo Sapiens
ggaggacaaaataacggcagcagcgaaccatttggttgatatttttccaaatataagcccacatcagctatgtccacatcaatttgagtttttgagaagaattttgaaccagatcaatagtgataacattattctcatacaaaatactcgtgataaattttggatccagttgataacgcgttgtgatctccttctgaagtgcagtccgcaaacttttactatcataaggtttttctcttgctttgtgttttagttcaatgatgatccagtaggttctcactcgctcagagcaggttatttcagtgtccttgtctgttcttctgaccccagcagtgttcacacaccagcacatggaggtgccgttgcactgcttggccttaaagagcccgctctcatcgcagtcaggatcataaagcccatcattgttctggagggccccttcaggttttgctcttctcccaagttttgagccattcatttctgccttcatcaccaaacatttggcagccagctttgagcaaatgacagtattttgtgcaccaactgaagtacactggcattgacgattattattcacaaagcagtttacggccagcttgtagttttcacagacacattcttcctgagctgcggcaaaagtcgccgtcgccgcggcaagcagaagcccgaacgcgaggacctgcgggggcgccatgctgcgcgcgcgccgagaagaggggcgcgggaggggcccgggactcgcgggagggcgtgcgccgggagtgggacacgaggagccggccgggcagcgcgaggcctggggcacgcgggtccgcgtcgggaggacagcgacgagggggtccccggaccgcgtcgaaggtgctcgctcgccgaaggacccaacttttttgtacaaagt

SEQ ID NO: 120451 - DNA, 735 bp, Homo Sapiens
tggggatagtggggctaggcggctgctgcaggcccaggcataccttggtggtgaagggatggataggctcttgtgaccatgcgcaggccatcaagcatcctggggcagctttgaggggttgactggctccacagcaatcttgataacagatgtggtattgaacttcaagggtcggaaaatctgagcttgagatccaaagcacaaaggactgagggcaactggcatgagcaggcacagaaagtgcagaggtatgagaagagaagaggacttgcttaggatcagactatgtattccccaaccaggagcctggtgctgagtgggggtaacctgaagggccattcttcccaggtattctggcagaacaaagagaggaggaaaataataaaaggcacccgtcctaattcctcgcatctgaactgagtacagggagaatccagcagggtcatatctagaaggctaagcctgaaaccaggacatggcaatgactgtggattagtcccgtttgtgctcatgtgtgtccctgggaccatctagcttaagccaacccagttggtctcttcagaaactctacctcctcattgcctcggggttcggttatggttgctgtcttcacaattggttgatcaacaccttcaatcagaacccagttgccagcaggaacacggttcacctcgatgtggtacctgaagcaatgtccaataagcagcagtgaaacttaggcagagcattccctaa

SEQ ID NO: 120452 - DNA, 782 bp, Homo Sapiens
ttccatgagcgtcatgagataggacacggcagggttctaagggaagcgggaaggtgggggctgtggacacagggtggcgggcgctgcctctcatggcttcttttctccctggtgggctggtgggctagtagctgaggccggcggtcctctcccccggggagcaggcagatgactttggcaaggggtggtgtggcgggggctggggttactccgtctgggcgtcgtaattggctccccccgccttcttcagctcgctcttgatgaaatcttcctccagctccttccgatcactgatcacaaactccttagcgaaattctgtacgacctccttcaccagggtcttgtccgtcccggttttggcgcgctgcagcccgctgacgttctcaccgatccacgtgatgagggcaaacttggacctcttgctcatggcatccccggtggtgaagcgcacgaaggcaaacaaccggacgtcatctgtgcactgctggatgaagtgctggtactccgctccctgctcgccggggacgatggtggagccgtcatatttaaaagtcacccagatgacggccgagccgtcgtcgcgcaccaggttgtacgccgcccggcaagcctctttgtcgatcttggtggccatcgccgcggagccgcagcgggacactgtccggggcggccgagcgcgcccctggccggcggcggggatgggagcgcggcgggtacgcgccgagggcgcacgggctggcggcggtgggggcgacggctacgccaacttttttgtacaaagt

SEQ ID NO: 120453 - DNA, 898 bp, Homo Sapiens
  misc_feature (442)..(467): n is a, c, g, or t
  misc_feature (555)..(569): n is a, c, g, or t
gaaaactctgggattaatagtaaattctctgacgtgctgcccccctcccccattcagcatcatctatgaacacatttctgcaaaagcatccccaaatcatctgtaactaggaaaagaaatggatatgttggttccaccaaatggagttttagctagaaatgatggaacatttttaccttggcaaaaatgaagcacaaacgtaacatttcacaggttcgggcccatgcaaatgcatgttatgtgggggtgttttattctcaccccgaaaccacgattagcatgcaggttgctttcaactattgaattagagatacttattggcagtgcacctcttttgtgtaatcatgatcactaaggcaagattatttcaacttgtttagaatatcagcagtatcttatcagatgcatgtttacacagtgtggacctgtgacttactatttnnnnnnnnnnnnnnnnnnnnnnnnnntctcaaacacagatccctaaacacaatttagttgaaaacgaactgttaagcttttagaaatatattttaaactacaagactgccctgnnnnnnnnnnnnnnnaaatgaacatttaaaaaagttcccacccctaaaaatttgccagattatttcctcattattggtcacagcctcaccaatttgctaccatggttgacgtttgctgaagcacagctaccaaggtccttaatgtgtaatacaatctcttcagggttggtacggtgaagtcctccaactgtcaacctggaacctgagtgacctttaaaaggcctcaatccattcactggacagtggtccccggcagtgggtgttcaatggtcctaggggtgctttcaattggggttaacttggttgtccagttgccccattaaactctccaacttttttgtaca

SEQ ID NO: 120454 - DNA, 956 bp, Homo Sapiens
cccgttctttttccggagttccaggacagcttccacaaacttcctgccacctttcttctccagcgtgtttcctacttcaccaccgatgtagaagtcagtgtttgtcgggtgaacgacagcatcactgtcgatcgaggcaatgtcagcctgtacaacttgcaacttctggccaaggaagaggctcttggtggagaggactgtgaagccgtcggcaggtgtgccctcggttgtgctgtcggcgctggctgccttactgacttcaccctgcttcttcttggatttccgggcccctttcttgcctcctgcttttttagatacaggcttcttctgggatggagacttggcctttttggctgggggtggtgtgatgatggcttccaactttcctttggatccccgcttcttcgctagcaactcggggtggatgttgggtaacacacccccactggctatggtgactccttttagcagctgattcagctcttcatcattggccacagccagcaggatgtgccggggtgtgacccgtcccttcttgttgtctctcgctgcattgccagccagctccagaatctccgctgtcaggtattccaggacggcggccatgtacacgggtgcccccactccaatcctgtacttggggtggcctttcttgatgtaccgcagcatccgccccacgggaaagatgactcctgctttggcagacctggacgtcttggtggacttcttcttcccaccgcggctcgacatggcggtggccctggaggcggatcagtgagcacagcggcggctcggtggcggcggcggcagctgcaaggtgtctcggcctgagccctcctggccgctcgcgccttttctctccgcgctcctcgctggcccgcccgcctcttcgcttcccgcccgcgcggcccgcgctctccccctccgcccggcgccccaacttttttgtacaaagt

SEQ ID NO: 120455 - DNA, 648 bp, Homo Sapiens
gaagaagccttaagggataggggagttgctggctcaggtgggatacctggaagttcccctagcctttaccttgcccttcaccccagagctgagcccatgaggatagttcgccagccaacgcctccacctggggacctagaacccccattccagccatctgctctgcctgcagaccctctggagagcccaccaacaggtaaggacttgggtagagatcggatgagacttgggtgtctgggacatcctagttgagcttggaagtgtcaggtacagagttggggatagggcttaagccacctcccagggcagggcttggtatataaagatgggatgttgatgtcagaggcttgaagttcaattcttaaatgcagaacttagtgttttaagggtgggctaattcccctgtgcacaaagttgagcatgtggggaggggctgagacactgcagccaaggaatatccacctgtgaccctctcctttcctcagccccagatcctgctctggagctcccatccaccccaccaccgtccagccttttacgcccccgcctcagtccctggggcttggccccgctcttccgttccgtccgctccaagctggagagctttgctgacatcttcttcacgcccaacaaaaccccacagccccc

SEQ ID NO: 120456 - DNA, 989 bp, Homo Sapiens
cccggcccaggctgtatgcttttcttcgaatccatgcagactgtatgtgctggcaccagagaagcccacccaggacttggtggaattcttgaaggatgttaggtctggggtatgaagcaagattctgtgcccggagttccaagctgatggtagttggagaggccgaagcatacacgtggccctcatgggagatggcaaaggtgaaataggcaccacaaaaggcatcctggaatctcacgtggccccggcttcccctggatttcagcatcacacacttggggaccaggagtcgtttgaggccttgccggccaccacggttggcaaataactcaggcacacggcctagctggccctgttccccgcagcccaaggtgtagaggtcaccatcagctgtcagcatcaccaagtggtcgtttcctgaggccacctttaccacaggtacatccagctgcacctgcacaggcaccatgctcttcttcatgggctccaacagtccaatcacaccgttattgtcccggaaggagccccagaggaagacacggccatcatcggtgagggctgctgtgtgactgtctcctgctgacacctgtaccaccttctcttgcagctccactttcccagggaccatctccgagccctccactgatgtgtcccttcccagggcaccctcatcattgcagccgaaggaatagacctggccacttttgcttagacacacggtgtgcatgcccccagcctcagcctgcacaacatcctccggaatggataccagggccggcttcttcctctccatcacattctcacccagccccagctggcccacgtcgccctggcctagtgtcagcaccaagccgggttctgtgctgtgggacctgtgtgagaccttcaccttcttgcttttggggatggcatctgctgggggggaccttcttttagctatgcgcttgggtgactatccttcctgtccttgccaacttttttgtacaaag

SEQ ID NO: 120457 - DNA, 466 bp, Homo Sapiens
ctttgtacaaaaaagttgggtataaggttccatatgaatgttttacaaagaataatgtaaggcagataactaatttgtcttatccaaagtataaaactgctactttttccctagaaaagggaagctcattttaggcatcctaaaccattaagattttcttcctcctccaagtgcacatttttgtacctttcgtttgtcaaaacattctttggccctatgcatgccagagtgatatagaaaggaagttaccacatttttttgagaacaaatcactcctgataaaatttcttagacaattgataatcattttaagaagaaatttaattgtatttagctctgtgtctcgcccctttggtgtcactcttctacctcttccatcactatagctaaatatttagaagtatatcttgacacctatcacaaatgttttggttaagtatcttaaaactgatggatggtatggctg

SEQ ID NO: 120458 - DNA, 977 bp, Homo Sapiens
tttgtaataccatacttcagactacaatacccaaaattctaaggtcctaatgttaatgatagtatctcaatgtccattttcggtttgtttcaacatgattttctccttttgcctctgtgtcacacgtagtctttcccgctggaaggtgcaggttttggatagggcttggtgttgggtaagaggttgtttttcggggacaggaacagcaaagtagggcacctcccagaaggcagagagaagcagcagcccagccagtgaagagagcctgaccaaattcgtacctggcattgactggggtcatagggtcatagaattcttgaacgattctattgccataccatgctgtggcaactaaaatagccagacctgcaagaagaaatatcgcgcccccaatgacagccatcctcatcttctgcacctcatcgtcttccaagcacttcatacacttcatgccaacggtggccacaaagattgctatcactcccaggaggatgccaaccaccatcaaggcacgggttgcttgcaatgtgctgctcagattcagcaaggagtcaaagactttgcactggatctgcccggtgctctgcgacacgcaggacatccacagcccctcgtacatggcctgggcggtcacgatgttgtcgccggcataggagtaaatcctccactggggcagggcagtgctgacgatggcgccgatccatcccaggaaggcgagaatgaagcccaacagctgcagccccgcgttggccatgactcgctcgggcgcccgcgctggctcaggggtggcaggtgcagaaggcggagagtttgcaggtgggcaacccggactcccgaaggtggctgggccccgcggaggaagttaaggcggggagccctgctcgctgcgccgccgctggagaagctctgggtcggggttggggtccgcgcccggggcggcgctggagtctggatactagaagctgaggttgctccaa

SEQ ID NO: 120459 - DNA, 1033 bp, Homo Sapiens
aaaatagtagtagttgtttttcttgctctaactgttctttgaaggagcagaggatgaatctgtttcatcgctgggggggtttacttcactagaaatgtactgtaagaagctagtcattaagatgttcacaaatcctttatctacatgaagtttgggagagatgttatctttaatccatttatatatggtttgaggggatggatccaactttatttgcttcaacagttcttctccaatttgaggagtgggaataagaaactcagtccctttccttccaaaatctccaacatgcggtccttattctgatcaatttctgaagagacaaagccacctgcatcatctaatagttcattttaccaagttgtcctgtccagagagcagagcttcacaaatgatgtccccaagtatgtaagatccatgtagcagaatagagaaccaacccagcaaatgaaaaaaactcaacatacggatcaaatgaaagtagttaaattataaatctctctttataggtgagatctgtggtaatgtttatcattatctgagcaggacaatcagactgtctgacctacataaatccactcaaggtacctgaaatctctagatataatattaaaaaaacaaaacaaacaagtcagcattctcttacctgggagcattttctgcatattgaccttgctttgttgaaaaagttctgttaaccattctcgatcttgtaatttagctaactgctgaagacaaagtaggaagagaggaaaatgggtgccactttctagtggttgagctagttctgaaatgctcaccagctctgaaatgatggcacgagctgcaaactgtgctaaataggatttcaccaaagggatgtcaacctccagtttgggacactggtccaatacattcaggaaagcctgcatgaagttgtcacttgtggctatcccttcctgtttgagtaaagctgatcaaagaacccaacttttttgtacaaagttggcactttatatatagaaagcattgctcatcaatttgttgcaacgaa

SEQ ID NO: 120460 - DNA, 954 bp, Homo Sapiens
gaaaaaagtatactattccacagaacaggagaatgtttaaagtcctttttccaagacctgttcaggttaaccgtaaagtccaccatgggagaattctacggattcttgaagatgaggtgatagaagtattctcaatacttttctcatgtcacatctcaagaggacagaataaaatattttatatgaaacccagttcttggttcatgccgatctttggagtgcgtccttttgttctgcccccagggaatgaaacaggtaagagtgacaagatcagcatttctttgggatggcagtgagaattccatgcaattccaaaatcacttccgttcaatatttgaattccccctggcccttgagaatgggagggcagaattatttccattactttccttcatgtcacacctcaagtagaaggaataaactcttttatatgaaatctagtttttggtccacattaacctcaggagagtattgttttgttgcctcccagatgcgttagctggtacaagtgacaaaatcagtgcatcattggttcagcagttaaagtccatggaattctgtgaaaaccaatctcaggagtgtgttgttctgtttcctcccaagttagttaactggtacaaatgacaaaattagccctccactggttcagtggtaaaattccatggaattgtatctcacccaatcaatattagagttcccactggcccttgaggatgggagggcagcattattcccaatactttctttccttcttgtcttgcctcaaagggaagaataaattcatccatatgaaacctagatcttggtctatgctgtccttagaagtgtattggtgtgtttcttcacagctacgttagctggtacaaatgtcaaaattagcacttcactggtttggcaatgaaattccatggaattctatctcacccaatcaataccaacttttttgtacaaagt

SEQ ID NO: 120461 - DNA, 901 bp, Homo Sapiens
ttggtttgaatgttatcccaccccttttttcttcttctgatttatttgttgaagaaatttgtcttataaagtttcctggattctaaatttttatctgccatgttaagaatgctaccagattctcttcccttttttaccacataaatgtgtgttgaggacttgaatactatgaggaatactttgatatttttagaaaaaaagttgtcctgattagagggaactctaagagttataatgaataataacaaatgtggaggaagacctgttgggaaaacaaatggtaaactgcaaactgatgttcaaagttgactttgatttatgattatttttcaaaaattttgctattcataaatcgaggcacttagaagtattggaacttcttttgaaattaactacaaatacatcagtaacttgaaacttcttaaaatcatggagagttggggtactgaaatttatgacaaagtatgcaatttaaattagtgataatgcatcgttttaattgatagcaatgaatgttaagtctgcataaaattgtactgttgcagattctttgtattgttacattcacacctgaaaagtaaatacaggtagaatttgtgtacataaaagtatatattttttaagctccgaaatagtaatcttttggctcgacgccgaggaattccagaatgcattctgttggtcactcagcgtattacaaaataccctgtcttggtggaaaggatattgcagtacacaaaggaaagaactgaggaacataaagacttacgcaaagcgctttgcttaattaaagacatgattgcaacagtggatttaaaagtcaatgaatatgagaaaaaccaaaaatggcttgagatcctaaataagattgaaaacaaaacatacacgaagctcaaaatgg

SEQ ID NO: 120462 - DNA, 378 bp, Homo Sapiens
caactttgtacaaagtgtaaaccttaaactgcatttcaccagcccctgttctcgtcagcaaaagagccgttcatttcaataaaccgggcgacctcagccatcccttcctgattttccgctttccagcgttcggcacgcagacgacgggcttcattctgcatggttgtgcttaccagaccggagatattgacatcatatatgccttgagcaactgatagctgtcgctgtcaactgtcactgtaatacgctgcttcatagcatacctctttttgacatacttcgggtatacatatcagtatatattcttataccgcaaaaatcagcgcgcaaatacgcatactgttatctggcttttagtaagccggatccacgcggcgt

SEQ ID NO: 120463 - DNA, 862 bp, Homo Sapiens
caaacgtatttaaaattcccattacttttgttttcagccatgaaagacaggaaaatacaattttctgttcaccaaggtggcaaaaaggtgctaaatactgctaggaaacaaatgccactgatccctgtcataaagaacagcaagtcatctacaagaaggcagccttgctcaaagtggttagcactcgcatgtgtaaagatttccaagagttctgaagacagccagccagcactgcttatcacacacacggggaccctgaacaactgactccatcccaagaacattgtgaggttcaaatgacattatgtgagtgaaggtgctctgaaaatttgccaagttccacagaaatcccagatatcattaaaagcgaagagccctatcgtatatggttagagaagaatattgagtttcctacgtcttaaaatgagtaagaggattaccatgtattggtgcatctgcccacagtgagtacatgctgggagaaaggtgagtggtataaacagttcttttctgagtaccaaattcactctgggcaggagggagggtggggcagaggctgacgttttcatttgtgagctggtgtatcttcggaattatttttaattttaaaaccatgcaaaatgaataagcaaaaagactagtgcactccagccctaaccatattatcttcacaaaaactgcctcaactttattttctaactgaagctccctgactcatttcattctactgcagttttaacatctctaaaagtctccatccactctctcccccactttccacgcagctgttaatccattctggggaggagagaacttagccatctgctcacattctgactaaagttaatttggcacttcaaat

SEQ ID NO: 120464 - DNA, 776 bp, Homo Sapiens
ccccacaggtgactgcgactgtgactgtgactcttgctgcatgtagattctgaatcttggtcttccggatctgttcttcagaaaggacgcagtgctccctcatccaagcttctgtgcacttgagcagccggcattgatggcacttgcgcaaacatgaaagcgtccatcgggcaagttcagacactccggcaggcatagcgcctggccccaccacggaccacattgcgcaggaagaagcccttgcagctttcgcagcagagcacgttgtagtggaagccggaggccttgtccccacagacacggcaaagctcgtggcccagcatgttaggggctgggccgttctttcgcttgcgctctggttcctgttcgggatgccagatgacccagtctttgtttcaggttgagcgggcatcatcagtgcatgggacatcagggtctggacccccggaccacggctcaggaccctcttcttttacaaggtgtgaagaagaaggggcgccaggctgaggggggccatttccaggcaggggggtatccagggaactcgtggtaggagaggacagggtggggtcagggagcagcctcttttcaggtcccgcctctgtacaagcaacagcggggggaggggttcaggaatgcgcgagggggtcttggcgacggcctctcggggagtgaagtattcgggtaatcacgggagccctgaatccagcttcttcctcctctgggtcagcccgtgacacacagcagctactccaataccatcaaaagtaacccaa

SEQ ID NO: 120465 - DNA, 724 bp, Homo Sapiens
tcagcctcatcatcgcttacttctttatcacgttccttctccacaaaaagagtaatgggatatccaataaactgagaatgtttcttcacaatctcctttattcttcgttcctccaagtactcagtttggtcttctttcaggtgtaggataacttttgttccacgacccataggttcacctgtgtctgtcctcactgtgaatgatccccctgctgaggactcccaagcgtactgctcatcatcgttatgtttggtgatcacagttactttctcagcaaccaaataagcagaataaaaaccaacaccgaactggccaatcatagagatatctgcaccagcctgcaaagcttccatgaacgctttggtcccagacttggcgatagtaccaaggttattgatcaagtcagccttggtcattccaattccagtatccacaatagtgagagttcgatcttgtttgttcggtataaggttaatatgcagctctttcccagagtctaatttactgggatctgtcaagctttcataccggattttgtccaatgcatctgatgaatttgaaatgagctctctcagaaagatctctttgttcgagtagaaagtattgatgatcaatgacatcaactgggcaatttctgcctgaaaggcgaacgtctcaacctcctcctcctccatcggttggtcttgggtctgggtttcctcaggcccaacttttttgtacaaag

SEQ ID NO: 120466 - DNA, 786 bp, Homo Sapiens
  misc_feature (66)..(89): n is a, c, g, or t
  misc_feature (222)..(245): n is a, c, g, or t
acagaggcttcacacatgtgcaaaacgcattggtcaaggtcaacatggcgtctgtcttttccattnnnnnnnnnnnnnnnnnnnnnnnncgatacttgctttttgaaattgaacgaaaaacaaaactgaacatttctctctcttgcaggatcaggaaagggatgaaatactgggttatacaatccactgttgcatgtagcctgaaaataacactttttgttnnnnnnnnnnnnnnnnnnnnnnnntcaagaagagctcaaacactctttgtgctccagggagcttggatttacctgccaaaagtaaaaagtaaactcaggtccgtggatgtgtctttaaaaaacagccaaactggctgggctgtcagcagaaaggagcgtcctggacaggatgaggccctggtggacgcccaaagccacgtgtccaagagccgaggcctctccagcaagccctgcagtgggagaccttgcctgcgggccctgcccccaaggatggtgaggggcgctccgacaccgatcagcctgggcctctgggcacaggtgacatctgggggttcctcaggccagaggtggcgggcttgggctctcccacctagccctgtggagagccgagcaggggcctggtgccatgccccccgtgcaccaggcctcacgtggactccagcgtattgagtgggaacaggttgtggttggtgggcgtggaaaagtagagctgctcactcgacgcgtggttgtcgcacgggctgcttagccccagggtccgctcaaagtccccaacttttttgta

SEQ ID NO: 120467 - DNA, 1002 bp, Homo Sapiens
ctttgtacaaaaaagttggcagttgtggagtgcagtagacgagttaagtcctggtctgcgtggaggtcgacgactccgtcgcagactacggacctgtctgggtctcagccgccaaagaccccgtccggaagtactagccggacatcatgagtggctgtcgggtattcatcgggagactaaatccagcggccagggagaaggacgtggaaagattcttcaagggatatggacggataagagatattgatctgaaaagaggctttggttttgtggaatttgaggatccaagggatgcagatgatgctgtgtatgagcttgatggaaaagaactctgtagtgaaagggttactattgaacatgctagggctcggtcacgaggtggaagaggtagaggacgatactctgaccgttttagtagtcgcagacctcgaaatgatagacgaaatgctccacctgtaagaacagaaaatcgtcttatagttgagaatttatcctcaagagtcagctggcaggatctcaaagatttcatgagacaagctggggaagtaacgtttgcggatgcacaccgacctaaattaaatgaaggggtggttgagtttgcctcttatggtgacttaaagaatgctattgaaaaactttctggaaaggaaataaatgggagaaaaataaaattaattgaaggcagcaaaaggcacagtacgtcaagaagcaggtctcgatcccggaccagaagttcctctaggtctcgtagccgatcccgttcccgtagtcgcaaatcttacagccggtcaagaagcagagcagagccggagccggagcaagtcccgttctgttagtcgtctcccgtgcctgagaagagccagaaacgtggttcttcaagtagatctaagtctccagcatctgtggatcgccagaggtcccggtcccgatcaaggtccagatcagttgacagtgccattaaactgtaaatacttgccctgggggccctttttaaaaacaaaa

SEQ ID NO: 120468 - DNA, 349 bp, Homo Sapiens
acagactgtatacatgaaagcattaagctcgtaacatgagtagggaagcgggaagggtaagtgcagtggtgtgaggaactcccagtcctttggcaccactggagggtgccaggacattcttactccaaaaattgatcattaaagggaaataattaagtgcttatgctgcctttctagtatgaacgcacttcagggtaacctgacttaccctaagggataaagggaaggtctgagagaattccagccactaaatgtccttctgatgagacagaagacgagaattctgcagtcccagtgaaggttctgggttctagcaatggtcacccacaagtggcaaaactgtcaggga

SEQ ID NO: 120469 - DNA, 608 bp, Homo Sapiens
aagtttatttaaccaacgtaaccatattgaataaaatcagcttgggagaaaattagttgcttgctaaatcatggaaaacaacaatatctttttgaacaatatatcccacagaatgttgtagagttcaatgcgaacttcagtccaggtcaacgtcccttggcttatgctctctcataaactctcgtggaagtgacgcctttcatgacgcattccaccaccagtttatcatcctctcgttttctctttatggtggttgattttccatcccatttctacacatgtaccaggacacccccatctaaggttatggtgctcttgactttcctgtcatctgcagtgacttcgtcaaattcctggcccagtatgaaggaaatctcagtatttttaaaggtactttcagatttaatggtgatcacatccccattcacactgatgatcatgttaggtttggccatgccagccactttcctggtggcaaagcccactcctacttctttcatataatcatcaaagttttcactggagacaagtttccaggtacctacaaaagcatcacactattttgtgagttttctagccaacttttttgtacaaagttgtctttaatg

SEQ ID NO: 120470 - DNA, 951 bp, Homo Sapiens
ttgggcctgccatggagtcgacagtcgcactgttgggttactccagtgaccagacaaaagcagggcagcgctgcaactccaaagagccacctaagagggagtggctcccatgaggcggcaagtcagcaagggaaaagggccttctctcctgtgcacaggagccaggatttacttatctgttaacttgtcaccataaatattctgggagattaaatacatactttagaaattaaaaaaacatgattgtatcaaagttttgagtgtagtggatatggaactgtgggtaagcaagcatttggtacttgttgccttgcattgggtaagatgggaaagttacaatggggaacttggaacaatttcaatcccttcatggtttttctgagaatatcagcaaactatgaactattaaaccttcccactacttccttttcctccaatctcaaaaaagaaagggtgctagaaatgctatgtgtagagcaagcctattatttgctgtctacaatggtatgtgcttcaattatgcaggaacgacaggtgtaatctgagcctgtcctgttcagacttgggacatgtggtcactcagttttgggttctccaaatcaatgttggagagatctattttttttaaccagaacattcttgattgtcacatcttacaaaaatgactctgctctcagcgcaacttcaggtcagaggagctggggatagtggggttttccagagcattagcagggagtgtagagaataaaggatgatatttctaggaactcagaacagggtgttactgttttgtaaagtgttgaagaggattggctctgggcatagagtctgtagtcagacaacgccacctttcttgaatccactaggaagagttaattattctactcttgttctgctgaagcacagagcttacatatcttatatcatccacacctcacacatgctactgta

SEQ ID NO: 120471 - DNA, 951 bp, Homo Sapiens
ctttgtacaaaaaagttgggaagcggctcccggggacactgggggcattttgtgttggctggagctggagtaacaagatggcgtcgtccgcggagtgacaggggtccctctgggccggagccggcggcagtggtggcagcggtatcgccgccctagctcaccgcgccccttttccagcccgcgacgtcgccgcgcaagcgaggcagcggcggccgccgagaaacaagtggcccagcctggtaaccgccgagaagcccttcacaaactgcggcctggcaaaaagaaacctgactgagcggcggtgatcaggttcccctctgctgattctgggccccgaaccccggtaaaggcctccgtgttccgtttcctgccgccctcctccgtagccttgcctagtgtaggagccccgaggcctccgtcctcttcccagaggtgtcggggcttggccccagcctccatcttcgtctctcaggatggcgagtagcagcggctccaaggctgaattcattgtcggagggaaatataaactggtacggaagatcgggtctggctccttcggggacatctatttggcgatcaacatcaccaacggcgaggaagtggcagtgaagctagaatctcagaaggccaggcatccccagttgctgtacgagagcaagctctataagattcttcaggtggggttggcatcccccacatacggtggtatggtcaggaaaaagactacaatgtactagtcatggatcttctgggacctagcctcgaagacctcttcaatttctgttcaaaaaggtcacaatgaaaactgtacttatgttagctgaccagatgatcagtagaattgaatatgtgcatacaaagaattttatacacagagacattaaaccagataacttcctaatgggtattgggcgtcactgtaataagttaatcccttattgattttggttt

SEQ ID NO: 120472 - DNA, 914 bp, Homo Sapiens
ctcaggaatcgcttgcattttggaccccaggtgcgtgcggcagcattctaaaggttctcaaacagtcgctgtttgatcttctccaggtactcattcgtgttctggttagtcatattggaaggactgatgtggagcttgaaatctggtccaaagtattcaaagtagtcattgtatggaagctcattagggatctccgtatccagggccacagctgtctcatatgtccagcaccgggcaacgttacgaatggtgtaaccaccgcctcccagcatcagcataggcaggttaaagctcttgacaaattccacacacttggcgtgtcctttgatagttagattgaagcaacctaaccgatccccagatagggagtctgagccacactgtaagaccaccgcactaggctggaacatctccattactttggacatgaccggcttgaaaatggcctcataggactcgtcatcaatcccgtctcggagcgggtagttaacagcataatacttgcctttgccagccccgatatcccgtaggtccccagttcctgggaagtactctccatacttatgaaaggacacagtcatgacccggtccgtggtgtagaaggcctcttccacgccgtcaccatggtgaatatcaatgtcaatgtacagcaccctctggtgatactttagcagttccaggatggccaagacgatatcattgacgtaacagaagccagatgcctcggacttctttgcatggtgcaggcccccagcccaattcacagcgatgtccgtctgctgcttattaagtttcacagcacttgccacagaaccaccagtagacaactgacagaactcaaacaggccatcgaatactggacagtcctcaccaacgttgaatctctgcatctgcccaacttttttgtacaaagt

SEQ ID NO: 120473 - DNA, 816 bp, Homo Sapiens
ttgggggagcgcgggctgcggagaggcgggccgggccaagcggagccgagcgagcgggagcgcggcgtccgggaggcggcggagacgcggggctcggagggtcagcctcttatcgtagcaggtctcctcggcacgccccccttgtttcgccccacggccaaacccgccgcgggccggcgtgcgctggtcactgaggcccaggtcgccgccgcggcgcgtttttgaaatcatgaatcctgtttatagtcctggatcttctggggttccctatgcaaatgccaaaggaattggttatccagctggttttcccatgggctatgcagcagcagctcctgcctattctcctaacatgtatcctggagcgaatcctaccttccaaacaggttacactcctggcacaccttacaaagtgtcctgttcccccaccagcggggctgtgccaccgtactcctcctccccgaacccctaccagactgccgtgtaccctgtgcgaagtgcctacctccagcagagcccgtatgcacagcatggcacgtactacacacagccgctgtatgcatcacctcctcacgtcatccaccacaccacggtggtgcagcccaacggcatgcctgcaacggtgtaccctgctcccatcccccctcctagaggcaacggggtcaccatgggcatggtggctggtaccaccatggccatgtcagcatgtaccctgctgactgctcactccccaactcctgtcgccccccacccggtcactgtgcccacgtaccgggctccaggaacgcccacttacagctatgtgccccctcagtggtg

SEQ ID NO: 120474 - DNA, 869 bp, Homo Sapiens
caggccctggctctcatgctccagggcctcgactttctcggtggctgtctccagggaggtcactttcctggccagcctcccgttctcctcctggagtcgctgtagctccctctccagcttctctgcccgctccccttctccttggcgtgctccaagtccctgtgcagctgccgcttctcaaactccaactggctgagcttgccattggcctccgtcaccgtctggtggagggctttgttctccttctccacgtctttcatgcgggcctcactgctgacctgcgacctctcccgcagcgaccacatggctcggttgaggtggtccttttcctgctcaaggtccttgatctgcctggctttgtcagccttcagggtctccatgtcactctgcagctgctccttctctctgatcagctcctcactgagggtctccagatcttggttgctctgcttttctctctccagctgggtttgtaacttttcaatcttcttgctgagctggtggttctccttctccagctccccgcacttgaggccgctctcctccaacaccagggacgcgtcccgcagcccctggatggtgctctggaggctctgattctccttctccagcttcaggatgcggctggacgcacattcgttcagctcaaacacaaacgacttcctggaggcgtctgacaagtctgcgttcttggacagctgctccagctcccagccaaggtgggcagattcgttcatgctctgcttctgtgcaatctcaaggaccatgttttcttccagcagctcctcaattcgtttcttatctgtgtcccggtccaattccaggtcgtgaagcttggatttcagctgcaggttctccttttccaccaa

SEQ ID NO: 120475 - DNA, 878 bp, Homo Sapiens
taaagaaagtagtaaaggcacaatgtttacttacacatttacatgtagtgaattagcacttttgtaaactcagagacatgaatgtcaacaattttagagcagagctcatttgcacggtcataaggttttcatggctgctgtgactctgcagacaagcatttcaaagcaggccccccagccagtggcatcggaaccagtggcatcaggggaagtataaacaaagaaaattacagattattgtgcccacaccccagaaattttgattcaagtttgagatagggctgacaaatctttatttttccaaagctccctgagtgatctatatgtataaccaggctctgaaccactgatgcagagcaccatcatttcttgattggaatggatgcctgaggatagtaaaacaacaaagttaaaacatgctgactttttttagaccctgaaattaccgatttggtgatgggtgttaaggttgacaataaaaaccatttctccagtgtggtcatggcttgagagagccatgcgctttccccaggtcatggatggccttgttctccagcagttccatctgcttgtctcttggtctcaccacattgttcagcattgctctaaccacggtcaccacaggcacagaatgccccctggcccaagagtctggtaaggagccaaagaactttctaaccagccattcacctgggcgagattcttgcctatcacataacagaactccaggcctaaatacagagtaacgatcaaattttaattcttcaaccttggcttctacttctcccttaacttgtagatataaaaaattgcttgatttatcagctcctttagaggatagcaagttgaaatgtttgcaccaacttttttgtacaaag

SEQ ID NO: 120476 - DNA, 797 bp, Homo Sapiens
caagagacagtgctttcctgttctcccctcccacaggccatggtcttgtcagtagcttcgctgagttccgagaggagaggagagaagccgcagcacagaatggagagggagggccaggtgaaggctggaccagggctgagggccggggaggggacactgaccgatccggctgtccatgacgtaggtctcaatgatggcgctcttccggcagaggtcctctgccatggaagcactgctcacttccaggtgcttcaccttctcctccagcatccatttctcctgctgtgtctctgccagccgctgaaagagctcagccacttcctcatctgacagctctgctggccgagggggctgggcttgagggctgctggataaggacctggctggaacagccgagctctccttttcccgcaagatctcccggtagctgaaggaggagatgctactgctgtcccctgtctgggtccggcttggtgagttcatctctgagagaaccagctcctcaaggcctgagcggctcttgctgttagtgaggatgtcctgcagtcgctcctgcagcttatctgcccgtttccgctccaaatgcagctgccgcttgaggtccttgagcgcagcactgcccttcttctccaggatcctctgcccatccactgtgtccttcacctcctgcttcaggctgctaatggtcttcaggtggcagtcccgctcctcctgggcctgctcgagctgatcccgtacatcctgtagctcctcctccttgcccttcagctttgacgggcgtgctgctcccccaactt

SEQ ID NO: 120477 - DNA, 887 bp, Homo Sapiens
gtacaaaaaagttggagctggttctctcagagatgaactcaccaagccggacccagacaggggacagcagtagcatctcctccttcagctaccgggagatcttgcgggaaaaggagagctcggctgttccagccaggtccttatccagcagccctcaagcccagccccctcggccagcagagctgtcagatgaggaagtggctgagctctttcagcggctggcagagacacagcaggagaaatggatgctggaggagaaggtgaagcacctggaagtgagcagtgcttccatggcagaggacctctgccggaagagcgccatcattgagacctacgtcatggacagccggatcgatgtgtctgtggcagcaggccacacagaccgcagcgggctgggcagcgtcctgagagacctagtgaagccaggcgacgagaaccttcgggagatgaacaagaagctgcagaacatgctggaggagcagctcaccaagaatatgcacttgcacaaggatatggaagttctgtcccaggaaattgtgcggctcagcaaggagtgcgtggggcctcctgacccagacctagagccaggagaaaccagctaaagacctgcaggctgcacccacctcctccccttcctaccccctaggatgctattcccttgggctgtggtggaaaaatgagggctggagccaaaatcaaatagcttgggagactggacattaaaggggctagaggcctgatggttagtgttaatgatcctgtcttaggcagggcccaccaggagtggggatcctgaggaggggcaggggatttctcctcttctggtcctggcttcccaggggcttctgtcttcatctctgcatgagctctccttccagaaacaactc

SEQ ID NO: 120478 - DNA, 1340 bp, Homo Sapiens
aactttgtacaaaaaagttgggttttgaatgggcgcccgtaagagaggtgggcaagtacgtgttacagacggccacgccgccctttaggcggtcaaggtggggcgagcagacgttcgcccccctgcagtcggccgggtcactacccaagagcctttggaggcggaagcatggaacggtctgcaaacgttcccgagcgggcctctgcggctctggcgggcgtttcgaacttgggcgccgggcacacgcccagtcccgagagcgctgagggttcccttagcgtcgccctcaccccggccaacccgcggggcgccagagtcctggccctttaaacgccgcgcgtgcctcggcgtcttcgtttcgcgcgcccgcccgcggcgccggcggagcgaacatggacccggctgcgcgggtggtgcgggcgctgtggcctggtgggtgcgccttggcctggaggctgggaggccgcccccagccgctgctacccacgcagagccgggctggcttcgcgggggcggcgggcggcccgagccccgtggctgcagctcgtaaggggagcccgcggctgctgggagctgcggcgctggccctggggggagccctggggctgtaccacacggcgcggtggcacctgcgcgcccaggacctccacgcagagcgctcagccgcgcagctctccctgtccagccgcctgcagctgaccctgtaccagtacaagacgtgtcccttctgcagcaaggtccgagccttcctcgacttccatgccctgccctaccaggtggtggaggtgaaccctgtgcgcagggctgagatcaagttctcctcctacagaaaggtgcccatcctggtggcccaggaaggagaaagctcgcaacaactaaatgactcctctgtcatcatcagcgccctcaagacctacctggtgtcggggcagcccctggaagagatcatcacctactacccagccatgaaggctgtgaacgagcagggcaaggaggtgaccgagttcggcaataagtactggctcatgctcaacgagaaggaggcccagcaagtgtatggtgggaaggaggccaggacggaggagatgaagtggcggcagtgggcggacgactggctggtgcacctgatctcccccaatgtgtaccgcacgcccaccgaggctctggcgtcctttgactacattgtccgcgagggcaagttcggagccgtggagggtgccgtggccaagtacatgggtgcagcggccatgtacctcatcagcaagcgactcaagagcaggcaagtgtgtgtgcacatccggggcctgctgtccccgagcctccggtgccacgagcagtgg

SEQ ID NO: 120479 - DNA, 974 bp, Homo Sapiens
taaaaagtttttttatcaatggttttcaagctttccataacacagggcaggtctactaatttgaggccaatggaacacggtccactctgacgatttcatgacgcccatcaggatgtaactcaattgtcagtctgtccttgaggtgacatgaccagactgtactgcccttctcacagtagaggcatattctggaggcagacgtaagataaactggctctccagttcgtgaggagcatcatctttgcttttactcatctttatttccttgtgattcacttctccaataaatgctggttacactaaaaagttccagctactgcaatagtttaaaacaccagtttgctatgaattgaaatcttttaattacaagaagttctctgtagatcagcagctaagcgtctattttgccttagtttttatttaagctccaagtcttttctctaaatatgctgtgaccgaataccagtcgttaacacaaaggcttattcacagacttaagttcattaaatcagatgcaatgccaagtcccaacctctaggtgccgctgccggacaacgcggagagagctagctagctagctagggaacaggaaagcaaatggcggctcccccggaacggttttcggcccagaaagcccagcagagatactttcaactcacaaactctcccggaacaaagacactcaaaaaatcagggctcagcgagctctcttcgcctcgggtacttacaatccagtgacgattataagttcagtttcaccgggccggagcgaagggaagaggaggccgcaaggagccaagcgggagagagccgagcgtctccttgtcgtttccttaattcttcctgccgcttggcagagtgatccactaccgattactgatgaaagggcccgggatgggcagcgcgaaatcttgccgagaggcgcagctcgcatcaccagaccccgcacctcgccggccctccgtccgggccaa

SEQ ID NO: 120480 - DNA, 937 bp, Homo Sapiens
ttgggagagccggacgggcactgggcgactctgtgcctcgctgaggaaaaataactaaacatgggcaaaggagatcctaagaagccgagaggcaaaatgtcatcatatgcattttttgtgcaaacttgtcgggaggagcataagaagaagcacccagatgcttcagtcaacttctcagagttttctaagaagtgctcagagaggtggaagaccatgtctgctaaagagaaaggaaaatttgaagatatggcaaaagcggacaaggcccgttatgaaagagaaatgaaaacctatatccctcccaaaggggagacaaaaaagaagttcaaggatcccaatgcacccaagaggcctccttcggccttcttcctcttctgctctgagtatcgcccaaaaatcaaaggagaacatcctggcctgtccattggtgatgttgcgaagaaactgggagagatgtggaataacactgctgcagatgacaagcagccttatgaaaagaaggctgcgaagctgaaggaaaaatacgaaaaggtaagaagtgtgggtttgcttggtaaaatgatgacaagtacgccagatgtatgattgtacttagtttgaggtgtaataagtttttagggtaacagctacattaagtatggtgttgatataagtcctcatccttcaaagaatgcagaggaccaaataaattagggtttttttgactaaaatgtaatcagactcagacaaaggctgtgtacatttatgttggttttgttattccccagtatcttgaagttcatgaaaatgttggtagtcacttcaagtcaaaaatgagcattttcaaatggcttggcatacagtacaaaaacaggctagacaaagtaatatagggctatatttttcttagtcatatcctgaaacatttatgttcttttcctttaaaatactcaaaaaa

SEQ ID NO: 120481 - DNA, 685 bp, Homo Sapiens
caacatcctgttatgcggcttccttggctctttttgcccgtatgccgaagagccgggcgttggcacgggccatacggagactagcgaaggctttgaaattcttctattcctcagtgatgactcgagctttctccttcttatagacgttccggacgggcatgaccggtccggtcagctgggtggccagtttcagttcttcagcagaactgtctcccttcttgggggccgagggcttcctggggaagaggatgagtttggagcggtactccttcagccgctgcacgttggtctgcagggactccgtggacttgttccgcctcctcggatccacagaaatgccgatggtccgggccaccttcttgtgaatgccggccaccctgagctcctccaggctgaagccgcggccggcgcgcaccttcgtgtggtaccgaaccgtggggcagcgcacgatgggccggatgggacccgacgcggggcgcggggcgatgcggcgcgccttggcttgccgggccttacgtctgcggatcttacgggccggctggttgaaccacgtggccacgcgccgctgccagtccttgtggaagtggggcttcaagaccatgccattccggctgggcgccatggctgcctacggccctgcggctcctgcgcagggaaacagccgagccaacttttttgtacaaag

SEQ ID NO: 120482 - DNA, 1718 bp, Homo Sapiens
tacaaaaaagttggctcttctccatcgctttccacaaggcgttaccggtgacggagctgggcgagcgggcattttccttcacgtaggtaaggatggctacgtcgtccgcatccgtgaaggcgatccgcccggcgtgccgctgcggctccggctccgcggcgccctcggccagggccccgggctttgcttccgagccggtgtccgccgccgaggcggggcccagccgataggcctccagctccagcctctcgttgcgctccacgcagtccaggatgtactgcgtggagatgaaatcacccgaggcctcggccagcgcctccccgggctgggccagcagcacggccccgggctcctgcactcggcacacggtgccgccgccgtgcaggatgagcgtcgacagccgacgcttggccgggctgggccgcacgtagaaggacatggagctgccgtcgtccctcacgaacagagtcgaggaatgggtgggcccgttggggtctttgcccaaatccatcgcctccgccatgtctgacgccgagcactactagaagagctaccccctcgcgagcgcctggcacacagagctcaactgactgagctgtcaccgcagacgcctctgccgcgaagcgcagcactgggcctgcgcagcagcagccgcggcgcatcgagagtgcccgccccctctcccccggaagaggtggggcttcgcaccttgacctggaaattaacgtactatcctccttacttttgggtcgggccctccgggaagatggcggccgtgcaggcggccgaggtgaaagtggatggcagcgagccgaaactgagcaagaatgagctgaagagacgcctgaaagctgagaagaaagtagcagagaaggaggccaaacagaaagagctcagtgagaaacagctaagccaagccactgctgctgccaccaaccacaccactgataatggtgtgggtcctgaggaagagagcgtggacccaaatcaatactacaaaatccgcagtcaagcaattcatcagctgaaggtcaatggggaagacccatacccacacaagttccatgtagacatctcactcactgacttcatccaaaaatatagtcacctgcagcctggggatcacctgactgacatcaccttaaaggtggcaggtaggatccatgccaaaagagcttctgggggaaagctcatcttctatgatcttcgaggagagggggtgaagttgcaagtcatggccaattccagaaattataaatcagaagaagaatttattcatattaataacaaactgcgtcggggagacataattggagttcaggggaatcctggtaaaaccaagaagggtgagctgagcatcattccgtatgagatcacactgctgtctccctgtttgcatatgttacctcatcttcactttggcctcaaagacaaggaaacaaggtatcgccagagatacttggacttgatcctgaatgactttgtgaggcagaaatttatcatccgctctaagatcatcacatatataagaagtttcttagatgagctgggattcctagagattgaaactcccatgatgaacatcatcccagggggagccgtggccaagcctttcatcacttatcacaacgagctggacatgaacttatatatgagaattgctccagaactctatcatagatgcttgtggttggtggcatcgaccgggtttatgaaat

SEQ ID NO: 120483 - DNA, 970 bp, Homo Sapiens
ttcggaacagccacattgtttcacagtctgtttgtgctgaaagctttactggttcgacttgcaaatccaacagcatggttaagacagtctgctagagaggcttgcctttcttcatctggtgccagcatcaacttttctaacagaatttaaacttctccattagtggagtcaacagattcctcattaaggcttgtttcctttctgccggatattcactattaacaatcagcactccagctgtctcataaataaaaagttgatcatcgctgctcagtaaggactggtggccattctcaggtggagaaagctctaataaatcttgtattctattcaaaatatcctcaatgaaaggattcatttgcttattgagagatttgacaaatctagaaaacaggtaagccgtcctgctccgaacttttgcactggaatgccgcagacctctgtgatctaagaaagccattagtacacatggaatgtgctgaggttcaactgtgaaaaacttttcatatctaacaacagtttcgaagaactccaatgtcacagatgtatgctgataggaactgactcctgatgttaccagagttcgcatcatatcctgcaaagcactagcttttgaaacatcacctgagaagtgagcaccatgagatactggaagagcttctgccaacatatacagcaatcttattgctacttcaacttccataaaccgtgtagtctgccaattctgcagtgtagaactaaaaactctgcgaacagaggccagtagtaactctggtgaaacttgagcaagcctgtccaacagtaacttcagttgttttctatattctacaaacatggcttcatcttcaccctcattttcaaagttatattcttcatcgtaagtcaattttttcataacggccaacatgattgcctctacattagctttttgctgatccgagagcactgtaagctgtttcaaaatatccaa

SEQ ID NO: 120484 - DNA, 529 bp, Homo Sapiens
tgcttcattgagtacactggcttctgtactcagctcccggcctggtgaggcaggcagggcctggctgagcctacactggggtcagcagggcgaggggcctgggctgctgctcaggcctaggaaaggccggggtcagtgtgaaccggaccgaggtatgaggcgttcgcgccgcgggcgctctgacccctctgctcacaggggaggatcggagggaggcttgaagcacttgccaaggcctcacacctggaggggacagagtcttccccagccgctggcgtcagctggacctgccctgagctggggacgggaagggcttgggcgggaactggaggcccacgcaggtcccccgcggtgtctgcggcctgtgcctctggggccacctggccagggagggcaggaggtgccccgcacatccctgaatggccgcagggcaggcgaaggagactgccgggtcccaggttgtgggacgggcccaggcgaccgtgaccacacacggcagacaccccgccccaacttttttgtacaaagt

SEQ ID NO: 120485 - DNA, 918 bp, Homo Sapiens
ttttgtatgaagcaattctctcagcacagcggcacagttcatcacggcagagcttgttcagctttccatcctccttttccggatggtagaaccgggtacagctttcctccaggttgtaataggcgtagaccttgactgctccaggctggataagctctacattaaagtattggtgaactttgaaagctagacagtcatcctcagagtgtgagaccttgtccaggtagatgatgagggtgttcctatcggagaaggctttgtccagctcatacttggagatgtatctgtcaacaccattggccagctgcttcaggtcatctgtgtctggagcaaagccagtcatcatggatatgtccaatatagacatagtggcatcctggtctccccggtacctggtacagatctcaaggatcatagtgttcttggcatcctgaggcctcttttctgtttccggtgctggttttatggtgaccttgaggtcgaatttattacaggtgagttgatctttggccttagcatggtacattgtcaccaccgacaaggtgccttggccttttccttcagctgtgactgtgaaaccctcattttccttggtctcttctgatcgcaggaggctggcagattcccagtggatacggtgggtgatcttggagctgcggctgggcagttggagggacacatcaaggttcagttcctggtggtcaggggcgtccttttggtattgagccaaggcttggaacaccatgaaggtggcctgggtagagccatagccaccaccgtagtatctctgttcattgagccaacgcacgacgggaggcacaaagtcaaagtcttttagctgcagtagggccaagagggcataggatgtggcctccacgttgtagagctgcttaccaggccaacttttttgtacaaagt

SEQ ID NO: 120486 - DNA, 912 bp, Homo Sapiens
tccatctggcgggataaagctgatgctgcgttcagagtcaaacttgctgagtcgcacacactggtggaaggtgcagtcatcaatggcaattgattgcttcccgctcttgcttgtttcatcagctgtgcctttgccctgcttttcaataacaatcttgtcattcatcccaaacttgcattcaggcatgccactcaggtagctcttcatcaccacccggcccgacacatgggcactcagcacctgcccttgtggggacatgagcaggttcacactctccagcacatccaggaagagctcattccgacgatacttgataccctctcgccgccagccaatctgcccagttacctggctggtgatctgtgactgctcttcttttgtctgatgctgactcttgatgccctgctgcgtgatgaaggttttcagcgcgcctgtctcggaattctgtgggtagccaaagtctagaatctcatccagcagctcatatatgagcacaaaattgttcttgatgttttcctcgctgatcttgccaaagtaggcagccatcacgtcacacatcttatagaggaattcgaagaccatggcagcgttgacattctgcttggtgactgctgccagccaaatgttggaccgcttaacgtggaagaagctggtgcgagcaatgttggtgacggggctgcgcacctgctgccgggcatggataacattgacccgaaaggcatccactgcgttcctcccgatgtcatctcggtagactcgggagatgagcacctcccccttgtgattatagatgaataagcctccaatcatggcggcagatcagtctccgcggcccatcgctctgagaacagacctggtgtcctcggccccctgctctgccggcccggccactctccggatcccaagatccaa

SEQ ID NO: 120487 - DNA, 876 bp, Homo Sapiens
attttccagcatagcacgctccatctgcttctggtgcttctcctcccgggcctgtgccttcatctgctgcacctcaatggtatcaggcttgcgacggcgcatgtatagttcatggttccccatgcacaaggccaagatccgcttgttaatccgcagccggggagcatagaagacgaagtccggggcttttttgtcaatgggcttgatgacaaatttcttatcattgaaagagatgttcctgatttcactccaggggaagcctatcttgggagttagtctgtcattctgctcatagatgttgagacccagggcatccacccccagccacagctctgagcctttcttgttcttgatgctgaagtagttcacaccatacatctccagatcttgagcaatcttcagatattccaggacagcatcctccctgagcatgccacggtgttcctcatgccacacctggatccgctcctcccactggtccttgttgagtttgtgctgttccaggactctctgcgggagcaacttgtctccggccaggtagccagacttatgcacttccttattgaagtcgccatacttagactggacagcatacgaggccagcagcacagcggtctcaggcgggcagtaaatatcatcattgagaatgccctctttcacttgcagaaagaacaggcgctgagtgatgtcctgaatcaattcctcggacacatcctcagggtagaacttggcacggaacttaaagagcagggggctttccttccgcacatcctgggcagtcaccttcttattgagtttcagccaggtggagaaacctttagtgtcctggtactgcagaccaaagaaccaaacttcccaacttttttgtacaaagtt

SEQ ID NO: 120488 - DNA, 615 bp, Homo Sapiens
gcgctcaggcacttgtaaaatctttcgttgtcaagaccatcaagcaactccaaagtagccatagggttagcaccagctatcatccatagttctctattctctcttcatttttgtttcctcaccactcatttatacattaaaagatttttcttatattttattcagcatttctaggtgttttgttggggaaatagtttcagaacaccaatttccagaaacaaattacagacccaattctataatcagttctttgaggctagatggtactatctttaaacaggacaaggaatggacattacttatgtaagtcctgggaaagatttggctctaggaaatgaagagataaacatgacagaagtgccactgctttaaactgcatgtaatttattttgttttattcccttggtattagaaaggctacctggattcaaatccccaaaagttactaaattgctctttgcctcagtttcttgaactttttatactagcatctcctttatagctacaactgggaggattaaatgagttaacatgaagttctttgaacagtgtctggcatagagtgctttatgtgcttaataaattatttttagggccaggcacagtggctcactc

SEQ ID NO: 120489 - DNA, 912 bp, Homo Sapiens
ttgggacagactccggcctgaaggcagaatgaacccacacctggagtgaggaagggggcctggcacggttggccaggctctgcctgattgccagccagcgggcatctgaagccgggtccttcgcccgccggaggctgccgtccgtctctcctgctgcgctcgtgccagctccgtgggtgtcctcccagggagcttctcttctcaacaggccttgcgaggctggggtgagaggtgatagaggcagcactgtgcatgattccgagagggtgtggtggcactgccagccgactgctgacagcttgggagctgctgtgcccaggacgtgggttcagcgtgggcgaggaaagcctggcgagcgtggccctgtaaaagctttctgaggcgggaggcgctcacttacctctgactgcctgggcgctgcgtgtagcatcttggcctacaggacagattttaggtgacacctggttatgacagtcagaaatttgagaagcttctcacaagtgatgcactttaaataatctgcatgccattgagacacctgcatgtctggtgtttgtggttcaagtgtcttgccgccggccttcggatgtaaacccactgataacggacagaaagagaatgcccacaagtgggtcttctgtggaagatgcagaaggaggaagttagtgcttacattttagtctttttctccctcaaaaaaataggttaagtttcagtgccagctagaaaatactgctttctgccatcgattgggggtggtttttgtcaaatatactgttgataaatatttatttttgtaaacttgaagtgtgtggtggccgtgggggagggacatgctggcagcaagcgccttcttcagctgtgggtcctaaaggcctttgatcctttgaaaagaagacatggtatttgttc

SEQ ID NO: 120490 - DNA, 931 bp, Homo Sapiens
cgtttaaggaagacactgtgccatagcaactgtaagcggttcggtaccccgtgatggtgatctttcaggttctggccttctgcaccttcgatcatctgtgaggatggctcaaaccggaactccttcatcatgggtttgaagtaatactggccagggctcaggtttgagaatgtcagaatgccgttgtcctgggtcaagaggttggaacgaaacaggccaccactcagggataagaggactcccgggaggggctggtcatcctcagcttttatctcaaagcttacgcctgccagggcataggccttgaagtctccgatggttccttccactgcagtcagaacatagccctccttctgtgaggtcaccgtgtactccaggtcactgtgcagggggccaacactgtaggcacctttgtcatcagtaaagactgtgatcagcggtgaacttgcccccttttcactgatgacaatctcgactccttccaactcggggtggatctggccttctaaaaacaggcctgccttcccgtggatctcgatcagcttccctgggcagctttctccactgacaacggcttccattgaagggggataaaagagcagctctttagatgacggtgtaacagtgattttctctccagaccgcgcccagtaagagaaatcatacgagaaggggccttgtaactcatctaccatctcctgcacgggaggcttggtcattctttcttcaccttcctcattgccgtttttctccctctcctgcctgcgggcctcgatctcagccagctgctgctccctccgcagctcctgcacagacttcagagggcctaagaccaaggcgggttcactgtcgatggaagacttgatagtcacagtgacatccatcattttgtcggtaggggatagttccaagccaacttttttgtacaaag

SEQ ID NO: 120491 - DNA, 924 bp, Homo Sapiens
tcagaccccaggctgcagcccttcaccgtgccctccccggtccggtctgccctgctggggccggtgggtatcatggggacccctgtgtagacacggacaccggagagcgtgggacaggaggcgtctcagagctccccacccacacactcaagggtcagcgtcactcatgtttccttctgttcccatggtgcctccaaaagggtttccaaacaaagtcatcattgattaccctggagtatgtcaataagccaaacaccagcagccagataccaccaagctagtcaccactttaaaagaagatgagctggagaacgaagcagccctctgatggacccagtcagtgcagtcgggactcagggagacacccggggacccctgcccagctccctgccggaggaaagactagggaagggaagcagaggaggaacgaagggcgccggcagagagagtaacaagtagaaacttcgccgatctgggagcaggccgagaaactctgttgagctgctaaagaattcttcattctcatgtgattttcttcatttctgtcttcccagttactaccaaggagctaaggaaagttcaggaatactttgtttagtgtcgccataacatctccaaccatgcattaagtttaaccaaaagctgcaatattccagattcttaaattctcaatggcaaccaatttatgctcaagttgaaaatctggcaagcaccgtacgccttcagcacacgcgtgggtccggattttcccatcacacacacgctctcccccgtccaaggtgcctgtttacttctggtctgcgcgggctcaggtttcaaagagcttgctgaaggcggcccccacctcggcgatcatgtcggaggtggtggtggagcgaccgtgcttctggaaggcttggtggttgcactgcctgtgatcaccaa

SEQ ID NO: 120492 - DNA, 985 bp, Homo Sapiens
actttgtacaaaaaagttggcgctgtgctgtgtgatcccccagagccatgcccgagatagtggatacctgttcgttggcctctccggcttccgtctgccggaccaagcacctgcacctgcgctgcagcgtcgactttactcgccggacgctgaccgggactgctgctctcacggtccagtctcaggaggacaatctgcgcagcctggttttggatacaaaggaccttacaatagaaaaagtagtgatcaatggacaagaagtcaaatatgctcttggagaaagacaaagttacaagggatcgccaatggaaatctctcttcctatcgctttgagcaaaaatcaagaaattgttatagaaatttcttttgagacctctccaaaatcttctgctctccagtggctcactcctgaacagacttctgggaaggaacacccatatctctttagtcagtgccaggccatccactgcagagcaatccttccttgtcaggacactccttctgtgaaattaacctatactgcagaggtgtctgtccctaaagaactggtggcacttatgagtgctattcgtgatggagaaacacctgacccagaagacccaagcaggaaaatatacaaattcatccaaaaagttccaataccctgctacctgattgctttagttgttggagctttagaaagcaggcaaattggcccaagaactttggtgtggtctgagaaagagcaggtggaaaagtctgcttatgagttttctgagactgaatctatgcttaaaatagcagaagatctgggaggaccgtatgtatggggacagtatgacctattggtcctgccaccatcccttcccttatggtgggcatggagaatccttgccttacttttgtaactcctactctactggcaggcgacaagtcacttctcaatgtcattgcacttgaaatatctcatagctggacagggaatctagtgaccaacaaacttggg

SEQ ID NO: 120493 - DNA, 933 bp, Homo Sapiens
  misc_feature (795)..(803): n is a, c, g, or t
actttgtacaaaaaagttgggcttgtgcagctggaagagaaagggcagggttcagtgccctggtcagtatatggtgtctacatccaggctgctgggggccccttggcattcctggttattatggcccttttcatgctgaatgtaggcagcaccgccttcagcacctggtggttgagttactggatcaagcaaggaagcgggaacaccactgtgactcgagggaacgagacctcggtgagtgacagcatgaaggacaatcctcatatgcagtactatgccagcatctacgccctctccatggcagtcatgctgatcctgaaagccattcgaggagttgtctttgtcaagggcacgctgcgagcttcctcccggctgcatgacgagcttttccgaaggatccttcgaagccctatgaagttttttgacacgacccccacagggaggattctcaacaggttttccaaagacatggatgaagttgacgtgcggctgccgttccaggccgagatgttcatccagaacgttatcctggtgttcttctgtgtgggaatgatcgcaggagtcttcccgtggttccttgtggcagtggggccccttgtcatcctcttttcagtcctgcacattgtctccagggtcctgattcgggagctgaagcgtctggacaatatcacgcagtcacctttcctctcccacatcacgtccagcatacagggccttgccaccatccacgcctacaataaagggcaggagtttctgcacagataccaggagctgctggatgacaaccaagctccnnnnnnnnngtttacgtgtgcgatgcggtggctggctgtgcggctggacctcatcagcatcgccctcatcaccaccacggggctgatgatcgttcttatgcacgggcagattcccccagcctatgcgggtctcgccatc

SEQ ID NO: 120494 - DNA, 966 bp, Homo Sapiens
ccgggggtataggtggagctggaggtgaaggtgaactgagcacgggactgaagccaggttggggtgaagcctggagtgggactgaagcttgggtttggggccaggggcttagtagtagttcttcaagctccccctctttttcaggtgtcgatttcccacaaacaatggagtagagcttggacttccaccgttggtagcgatacattaaaccaatgaagaggagggataaaaggcaaagaccaaagaaaatgaccaggggcaacagcactgtggtgcctgagtcctcagtgcccttaacattctcaatctggggtaggcacaacttcgtgcactccaggcttttcttacagttactacaggagacacactcgttttctcttagaaagaaacctgcatggcaggtgcacacggtgttctgtttctcctggcaggagaggtgcacggtcccattgaggcagaggctgcaattgaagcactggaaaaggttttcactccaataatgccggtactggttcttcctgcagccacacacggtgtcccggtccactgtgcaagaagagatctccacctgacccatttcctttcggcatttggagcagctgaggcagtgtctgaggtggttttctgaagcggtgaaggagccgctctcacactccctgcagtccgtatcctgccccgggcctggacagtcattgtacaagtaggttcctttgtggcacttggtacagcaaatcgaattattttgagggtggatatattttccttggggacacacactatctctcttctccctgtcccctaggtgagggaccagtccaataacccctgaggggtatattcccaccaacagctccaggagcaccagcggcagcagcaggtcaggcacggtggagaggcccatgccagacagctatggcctctcactcccccagttgggctcagggcccaacttttttgtacaaagtt

SEQ ID NO: 120495 - DNA, 886 bp, Homo Sapiens
tcccatttacgcagatggcaatgacagagttgacgttttggaaagtaatggcgaccgaaggcgcagatgcaagtgactcagcaggcacagtgaagctcgccaggctccattgagagtccacgtactgcccaatcataggccccaccttgcccacgcgagccagcgcggagcggcggttgaggcgggtatccttgagagcaaagatatgggacagtacccttatcactggaagcgcagaggaaggaggagtcgtggctgaagttaatgcagtagagggtggcagggtcagtgcctcggcgcagctccaccagtttctccttggattgtgtgtcaaagaggcgaataagggtacccttctgggaggctgaggccactacagtgcctggctggtttagagacacacaggctatgtcactctgatgtgcattgatcgtgaatggagcagacgaggtgccaggctttgtgctcgccaggtccacaagttgcagactcccacacttgtgtcccgggaacactagcagttgcttctccaggctggggcagaggtcacagagccccttggggttgtcccgggtatcaaactcaaacagctttcggggattgtcggggaaggagtacacatagatgcggttcttcagcacgatcacgatcttgtcatggcgcatgcgcacagaaagcactggcttggtgaaggtgaactccagcaccagcttctccttggagtccttgccctcccgggcatcgtcccagatcagcactgagatctctgagaacttgggactactaccaccgcccaccaaggccagaaggttggagcggtgcagcatctccaccaagcccatgctgcccaccggctcgtggtccagccaacttttttgtacaaagt

SEQ ID NO: 120496 - DNA, 667 bp, Homo Sapiens
ggctaagttgccctttattaacgaaaacatagagctttcggtcaattccaccacggagaacacaaaccagagataaaacccacaccaagggctatttcccaagctggggaatttgagaacacacgggcagagttcacgccacacaactacactgggctcgtccttgggaggcgttcacaggaagcaatcacgagcgccaagccacccacaaggcagtgcggcaaggctcccgggatccttacaggcatccaagcgaggtacagaaacctccacagcagtggggataaggggaaaatattttctcttgctaaagaatatccttagttctcaacataaacatgactacgtatatattcagcttcaaatgaaaaacaagtttacaaatcactactggatacttaaactctatgttgcttttctttttggcagcaccagcctaaactctgtgggtttgcaatatttcagaaacttcaggtacattacagtcttctgagaaaggcccagaacttcagaattcctggagcggctgtgaagaaagaacattactggcaacaaatattaaaacaacatttcaagaactccaagaatacactgagaggtttgtaaaggtgcacatatttaagcattcaagctatatcctaaatcatttccaacttttttgtacaaa

SEQ ID NO: 120497 - DNA, 922 bp, Homo Sapiens
ccctctcagcccttttcattggagtcatactcttttccttatcccttacattgttggccaaacatcttgattatttttcttcccagagtgattctaaatgcctttaggcaaagggattagaaatatagtcaacataaagaattagaaattaaaacaactcatctgttgatgagtgccctctgtttcttagtatgttattgcatgtagattatttcttgctcatcctctctaggccataagaactattcctctgctcatcacagctgtgactattctgttataagcactaaataactctaacaaacaaaatgtagtgaacagtgcacacagaagacctaaattccaatccaatgtcggtctttcacatcataataaacacagcaaaatcctactcatttacacgtagtagagagaaaactctaaagttgtgaaaagtctgaattagagactttaaaaaaccaaatcattcaaaaacaagcaatggggaaaggattccctatttaataaatggtgttgggaaaactggctagccatatgcagaaaactgaaactgaactccttccttaaaccttatacaaaaattaactcaagacggattaaagacttaaatgtttaagacctaaaaccataaaaaccctaaagaaaacctaggcaataccattcagaacataggcatgggcaaagactttatgactaaaacaccaaaagtattggcaacaaaagccaaaattgacaaatgggatctaattaaactaaagagcttctgcacagcaaaagaaactatcatcagagggaacaggcaacctagagaacgggagaaaatttttgcaatctatccatctgacaaagggctaatatccagaatctacaaggaacttaaaggcaggcggatcatgaggtcaggagatcgagaccatcccaa

SEQ ID NO: 120498 - DNA, 897 bp, Homo Sapiens
cccacccaccctcttaattcacaagtgtacctctactaaccataattacatcactaagcctgttagtttgagagggtcttaaatttgttaaaactggaaaatctttgtataggggctccattcatttgactcaaggttatagacttccaccgtattcagaaattcattgccatcgaatcctcccactgcataaatggtgttccctacagttgcaatcccagcattgctccttggtgaagtcatatttcccatcatcttccattcatttctagttggatcatacatttccacacaactgatggcatgagaaccatcaaagccaccacatacaaacagttttccattaagaacagccactccagctcctcgcctagccacattcatgggtgcaattaaagtccaggtattattttcaggattgtatcgttctactgtgttcagacaattccaagattctgcacctccgattatgtacaaataaccaccaagctcacagactgcagactggtgtctccgaatgttaagaggggcacagcttgtccacaactttgttacaggatcaaatacatcacaatttttcagtcctttttgaccatatggatcagagccaccaacgatgtataactttccattcagagcacacactcctgcattacaacggttagttctcaattctggaacaggaatccagtcatctatgtttgaatcatacatctctccacaactcaggtcatctgagtggccatttgatccacctaccacatagagctggcccatgagtacagccatttgaaatcgggctcttggtgttctcatgggagcaagaaaggaccagtgatctgtatgtggattatagcattcgactgttcgaagacattcctctctgttatagcccaa

SEQ ID NO: 120499 - DNA, 907 bp, Homo Sapiens
actttgtacaaaaaagttggaggagaggagcgggccgaggactccagcgtgcccaggtctggcatcctgcacttgctgccctctgacacctgggaagatggccggcccgtggaccttcacccttctctgtggtttgctggcagccaccttgatccaagccaccctcagtcccactgcagttctcatcctcggcccaaaagtcatcaaagaaaagctgacacaggagctgaaggaccacaacgccaccagcatcctgcagcagctgccgctgctcagtgccatgcgggaaaagccagccggaggcatccctgtgctgggcagcctggtgaacaccgtcctgaagcacatcatctggctgaaggtcatcacagctaacatcctccagctgcaggtgaagccctcggccaatgaccaggagctgctagtcaagatccccctggacatggtggctggattcaacacgcccctggtcaagaccatcgtggagttccacatgacgactgaggcccaagccaccatccgcatggacaccagtgcaagtggccccacccgcctggtcctcagtgactgtgccaccagccatgggagcctgcgcatccaactgctgcataagctctccttcctggtgaacgccttagctaagcaggtcatgaacctcctagtgccatccctgcccaatctagtgaaaaaccagctgtgtcccgtgatcgaggcttccttcaatggcatgtatgcagacctcctgcagctggtgaaggtgcccatttccctcagcattgaccgtctggaagtttgaccttctgtatcctgccatcaagggtgacaccattcagctctacctgggggccaagttgttgggactcacagggaaaagtgaccaagtggttcaataactctgcagctttcc

SEQ ID NO: 120500 - DNA, 918 bp, Homo Sapiens
gcagccatgcagcttttcaccacgtcttgactcacgatgaggctgaacgggatgttgtcccagggtgggcattgtcagggaagctgcagagttattgaaccactggtcacctttccctgtgagtccaacaaccttgccccccaggtagagctgaatggtgtcacccttgatggcaggatacagaaggtcaaactccagacggtcaatgctgagggaaatgggcaccttcaccagctgcaggaggtctgcatacatgccattgaaggaagcctcgatcacgggacacagctggtttttcactagattgggcagggatggcactaggaggttcatgacctgcttagctaaggcgttcaccaggaaggagagcttatgcagcagttggatgcgcaggctcccatggctggtggcacagtcactgaggaccaggcgggtggggccacttgcactggtgtccatgcggatggtggcttgggcctcagtcgtcatgtggaactccacgatggtcttgaccaggggcgtgttgaatccagccaccatgtccagggggatcttgactagcagctcctggtcattggccgagggcttcacctgcagctggaggatgttagctgtgatgaccttcagccagatgatgtgcttcaggacggtgttcaccaggctgcccagcacagggatgcctccggctggcttttcccgcatggcactgagcagcggcagctgctgcaggatgctggtggcgttgtggtccttcagctcctgtgtcagcttttctttgatgacttttgggccgaggatgagaactgcagtgggactgagggtggcttggatcaaggtggctgccagcaaaccacagagaagggtgaaggtccacgggccggccatcttcccaggtgtcccaacttttttgtacaaagt

SEQ ID NO: 120501 - DNA, 645 bp, Homo Sapiens
ctcatgattctttaaattccaaagctgagagagaaagttaaaatttttatttaaaataaaaattttaaataggaagcagaggtttagtaggtataaagcatccagttgtacccaaatttgtgcaagtatttaaatattgccaagttatactaatagtaacaataattatgcttatctactactaaactgtttcattatcattagcagaattaatagaacaggatgcaaatgtgttccatagaacactagaccagcaagatatctcatatgataaaaatggaaatatgccgctcggatcctctttcaagaagggacgtttacccagccccaaaaggtccagttagctgtcagcctgtggttattaatttcttcatatctgctccaggtttcatcccaaggtcgtgctcttctcaaggtggcatcaatcgatggctgagcaagaatgtagtaaaaggacccagccacttactactcaacatgagacacctctgaaacaagcaattttcacttcagattcttcagtgtgttaggagactgtcagatctacattgcaatcctatttccctactgtcaatattatttcttcccttttcctgtcttaggtgttaatctccaataaatctttcccaacttttttgtacaaag

SEQ ID NO: 120502 - DNA, 940 bp, Homo Sapiens
gggtcttcatcaaagagctcaatctctaattctgtccaggatgttcatacactaaagctcatagacttcattccactttggactgaggtttcttgatgactctgctttggaagatttggttgccaactctaatgattccataggggtctgactttcccttgacaagtcccttaaggtaagtgtctttcccctgaagatctgagcttcaataaaatgtatccttagaacaccctttggtacaggaaaccgcaactgagctatttgaacttcactgacaagtggaacggtgattcgattgggaagcaccagatagtttgatattatatccaaaatgatagtatctgataaaccattcaatccagggacatccagaagattcgtcagtcctgtccagttaatttctaaaagtggtttcctaaggaagaagatagacaaagctccaactaagggcatatctccaatcaacggttccaggatcacccgcatggtaccatgaatctggatacttttcacaccagctctacaaaaatatcgtttgatctccaaatcaatctcacaatttcctacaaaactaatctgaaggtccaaaataatttgccttttgtctacattttcagtgtataccttaacaccattgatcctgaggggctgctggcccacgtcgaccttcgtgaaactaaaggtgctaaggtgggtgtttgctccccgcacggctggttctatagtttctcgaaacaacttctctataaattggcaaatgaaaggccacatgtgttttacagtcttatttagccattctgctctttcagtgtctggaaaatgaacccaggcgggcaggtcgcaggcgcgcacccccaggcgcacgacgcgctcctcgtcttccagcagcgccagcgcgcggcacaggcgcagggccttgaggccgcggctgcggcgccaa

SEQ ID NO: 120503 - DNA, 607 bp, Homo Sapiens
gctccttgggacaggagactaggatcagaagtcagggaagggacagcccgggtgaaatgactggaaagaggagcaatcactcagcagtaaggcaggttcttccaaagacaaaaaggacacagagataagtcagggcacttccaaggaacccaactactactccacactcccaaatttattctgggtgggccctttttggttccaatatcactcagataccataacttgtccaaggtctcttcttacctctcccaccctaaatgaagacgggccctgggtcctaatcatacattcctttttcctccactgtgagctgagacaaagcccttaagaggagattctccttggcaacaaacttaaagggttaaaacctagaagaatactaattcttgctgagctcctactatgatttgataatcactgtactacagactaattactacaattcaaatggtttatataaaccacttaaaacagtgcctgttacatagtaagcaccatataaatactgagttttaacaataataattgttattattgttatcactatttgtcaggcattcttacactctcttaacactattcccatcattcctcacatccattc

SEQ ID NO: 120504 - DNA, 521 bp, Homo Sapiens
ctgtatgttaagggagactccttcagtatctaagagcacttgggggtggactgggggagaagggatgacttcatttacccccatagttatggagtcttgagttctaagaaaattttcatccctattgatttttatgctaaaaacagaatcttacaaatgtgatagctatatatccaaatgaggtggtctagtacaagcatttctgaaaaaatttttgaatgacaaaattttatcctaagcgatatgttttccaagtgaatataattctagtttaacacaacattgcaagtcaggtgtgcacattttactaacaaacatatatcaatgtgatttcagggccttctccagaagcaaaaggagttggaaagtagtctcctgcctttagctgaaaatcaagaagagagttttggttcttcattttaaatgtagaaaatcaaatccttcacatttgatttgtgtcttccaaattataaaatgtgctcactggctcaactgtattttccaacttttttgtacaaagt

SEQ ID NO: 120505 - DNA, 923 bp, Homo Sapiens
ttcaggaaagcatataatccgtaagaggaaagacgatttaatatctttcccagttgtagagattaatattgatctggattgcttgataaacaaggccagctgaagaagtactatttcagctcctgtatgttcccactaaacagtagtatgtgggccatttttgattctttagatggaagattttttatagaattgatgtactgaaccttatcaatttcaccaattgctgcataggctatttctgcagtagtcatatctcgattagcaactgccatagcagctagacaagcccacatggtttgctccttaacaaagcgacaaagtctcacagcatcttcccattttgaactgcttacatattcatggagaatagcaggatatggtgatatgctgatgtgaaccagggagccatcagctcttctaatagttacttgatttccaacaaaactcacaatatggggatttttactaaattcacttgcatccctttcatataatgttttaggcaaaatgtctctgtccacataaactgtattggggtaataccacactataaatcgagtatcttgaagtccacaaaggatattgcatgtatcgttccatgccaaagtatgcaccattgttccaagcttgataatttgttcttccttcccaaatcgtttcacagaagtgatacagagatctctatttttatcaatgaaagcaatttttctatcattggtaagtcctttttgatccagagcaatttccaagatttcattcttatgagaaagaaactttccatcacctaacggctttccggttgatgcctcaaagaggaagattattttttcatcagctttgtctcttattgctatggtatcattactcaaagacacagtctgtgcattcagaatatctgttccaacttttttgtacaaagt

SEQ ID NO: 120506 - DNA, 862 bp, Homo Sapiens
actggaagcttgtttcggcagatcctatgacatttgttctgagaacagctgtctgttgtttcaccagcttcccaaaaataacctcccaatagagccctcaacaatttcaagtggcactagacaattgctagagggaacacacatatggaagaaaaatattcaaatggaatccaactggatgattaattcacttaccccttcacatggttatctaaagtctatgcaatcgagttggttactaaagctgggtgagtttcactctgaggtttccactagcaaccagtccctttttgcctgttagatattatggtaatcataatactgacagtgtgacatcagtaacccccatagcaacagattgatgtgcaaatcagatgattaatttaaccaaagttcaaacaaaaggaggtactggttgacttcataggcacactgccatgatacaatgtcaagagatgcggagaagttatcattatgcacagcaagtaaggagctgctaccaaaccaaatggtgtcaagaaacaaggaagagaaaggagaaatcagacaaacccaactgtctagaccacccatcaaaaggcccatactagtagttgggcaatttgaccatctactccagggaaaataggaaagcggaagaaacctgtattaatttgttaaggattattcaattaagaaaataagaaatcaggatggagggcagataaataataatacattgcagaagtttgatggatttggccttttcaaagcatgttcgtatcatctcacttcatcctctggatactcttataagccagctgagacagatattatcatctacatcgcaaaagcctacttcttgtggtcttattttgtccaa

SEQ ID NO: 120507 - DNA, 896 bp, Homo Sapiens
ttggcaaaatcggactccgggaggagaaccagccaggctggctatgcccggatgaggacaagaagagcaaagccccattctggtgcccgatcctggcctgctgcatccctgccttctcctcccgggcactcagcctgcagcttggggccctggtccacagtcctgtcaactgtcccctgctgggtttctcagccgtcagcacctcccttccacagggctacctctgggtcgggggcggacaggaaggcgcagggggccaggtggaaatcttttccttgaaccggccctcgccccgcaccgtcaagtccttcccactggcagcccctgtgctctgcatggagtatatcccggagctggaggaggaggcggagagcagagacgagagcccgacagttgctgacccctcggccacagtgcatccaaccatctgcctcgggctccaggatggcagcatcctcctctacagcagtgtggacactggcacccagtgcctggtgagctgcaggagcccaggtctgcagcctgtgctctgcctgcgacacagccccttccacctgctcgctggcctgcaggatgggacccttgctgcttaccctcggaccagcggaggtgtcctgtgggacctggagagccctcccgtgtgcctgactgtggggcccgggcctgtccgcaccctgttgagcctggaggatgccgtgtgggccagctgtgggccccgggtcactgtcctggaagccaccaccctgcagcctcaacaaagcttcgaggcgcaccaggacgaagcagtgagcgtgacacacatggtgaaaggggggcagcggcgtctggatgggccttctcctccggcacctccatccgcctcttccacactgagaccctggagcatctgcagagat

SEQ ID NO: 120508 - DNA, 884 bp, Homo Sapiens
atgttcttctcaatcccgattgatcatctcccctgcatttccacttcggtagccagaaaagtgaatatttcgtgcagctcacgaatactgcgttcaagctgctggatctcactgtgccgggccgagatctcatttaaggcctgtcgagtcacctgcgtgtccttcaggatattggacacaaacacctcgctttgcccactgtccagcatctgctccaactcctcatcagacaccatcccagcattggtgatcttcagctgcctccgaatccgctccacgttcttctcccggtattcggactgcattgaattgcacttgttgatgagctccacgaattgctgggacaggaccccatgctgggtttttctcattcttgtgttgacggagttatagttctcatcagcttcctccttctggggctctatggccttcagctgcaggcggatctccctccccagctgtttgatctcatcgcgcaggttctgcagctcctgcttcatgcctgaataagagaaggccaagactcccaaacagcagcccccacctcaacaaaccactctggccaccacctgcgtggaactacaacccccacaatccctggggcggagcatgcgccctgcagccggggtttcactcactctcctcgggaaggggggtggccaggatggtgacctgctgtttctccaactcctggactttattccccagtttgacaatagtctgccgaattgtccggaccttgtggaagaactcctcgtccgggctccccagccgtgccgtgcccgggtgcaccaccagcgcgacccgctccttgtcctcttcgtccgagctgtcatccccctgccaggcccggagtcattggcacccaacttttttgtacaaag

SEQ ID NO: 120509 - DNA, 575 bp, Homo Sapiens
ttggaacatactctactgcatatgttctagtggaagagaagccggggttctaggaaagaagagccaaactttggtggcctttggtgccccctctcagctccccatgacaagacaacggggctgcagacactgtgtgttcagcctgcccaggggctggggctctttaaggctttgtaggtgaggtttccatggaccttcaaaggtgccagcagcctgcaggggaaaggcaaactccctccttgcaaggaaaggagatgtccagccaatgatgcccggcttctgaggcccagaggagcaggtgggatgggagcagcccctggggctggtgtcccgaagatgaaatgaagggggctgcctatctcagttggcgggaggtgttagaagtggatgtgcaagaccagccactggaggtagctctctggagtcaaagagaggcctgcttttctaccagacatgggagcagcatgtacgatacaagggcctacccagaaaccagagagagtcagcctagtccttgcagcctcaggaagtcctcggcccaagtgagtcctggtccaaggatccccctggaaagc

SEQ ID NO: 120510 - DNA, 961 bp, Homo Sapiens
gggcccaaacagctaccctgtcctgccccatcctgtcctcggcccatcaggacggctcgatgtctgcttgaagatgaagcctcgataggcgagtgttttcatgatgttggcaatgtcttgcagttcgtcaaatgccgctgtggggccggcttatgtgttgcaggctgaggcccttgttcatgtctagaagtccattcttgggccagcagcccatggcgaagctgtaagcctttttcagattaatccactgcttgaagtaatccgccactggcaagcccaagtactggcactggcctgggagcatgacttttaagtcccagtctccacaggtgacaaaaattgacttgacgtttggatctaagaggccttccttcgccatccattcatcgaccctctccagcacttgctgcaggcttggctgaccatccaccatggcttgaataatcccggtgagctctgtacagaatggggtaagctgtggatggactacaggctggacatacatgtgaaaggtagactcaatctccatggtccggccatttagctttaggatggggaactcgatgatttcctgaggatgaatctgtggcttgtcgcacgtggcctcaaagtccagcactaaaaagtagtgatacctctggggagggaaggacaccattgccgccatggatgcgccaaagccgtgggccgccagctttctggtggatatggagcagaactccggaacaccacagggagaaaataagtgggagcccagcacttttcttgctcttgaaagtaaatacgaagaaaatcgagctgctccagtctgtaaaggtgctagcattgaacatccagaagcatctaaaactctccttacttcgaagatgccaagaccggcagctggggatgctgaaggttctgtgagagctggaaagccccaatgctccgcgcactctgaccccaacttttttgtacaaag

SEQ ID NO: 120511 - DNA, 906 bp, Homo Sapiens
ctttgtacaaaaaagttggtgcagcggggaggagtcccggctgggctgagcgcagggagctgcttggcagtgccagagcccaggccccagagccctgctggagaggaggcagactgaggcagcaggccccgccagcaggcgaagcagggagatgtcagactgctacacggagctggagaaggcagtcattgtcctggtggaaaacttctacaaatatgtgtctaagtacagcctggtcaagaacaagatcagcaagagcagcttccgcgagatgctccagaaagagctgaaccacatgctgtcggtaaggcctctcacccaagggccttgcctccctctccccttccctcccctgcaagcctctggcctctgagggtgtctttccctgctgaggcctctatccttccagtgtccccgctaactccagggtcttctacacccccaggcctctgtcttctcaggatgcttaggcctagccagtgagggctatatttgcatttcccaagggaagcagctgtgcaggccagatcctgggtctctgcctagggtcctgcctggagtctctctggggcttccaccatcagcattgctgaccctgcttcctccccaggacacagggaaccggaaggctgcggataagctcatccagaacctggatgccaatcatgatgggcgcatcagcttcgatgagtactggaccttgataggcggcatcaccggccccatcgccaaactcatccatgagcaggagcagcagagcagcagctagagacccctttggccacaccttccaagcactggcctgatgccccgccctggtgctctccccagctccctcctcaacctcctgcccaccaagggccttttactctcttcctccctccaaaccttcctctgacccttgct

SEQ ID NO: 120512 - DNA, 966 bp, Homo Sapiens
gaactgcatagaagatcgctcagggctcacgtcaggaaggcgcaggaattcagaaaactctaaagcttggaaatgctatcgtttgtgccacaaagattaccctgaaaaggtagagagaggtcaaaaagcagaaccaaatgggggattttcaaagggctgctctctaacagagtttaaaatatccgtaaacataagtgcttctgctccctccccttgctttcagcatctggtaaacactttagaaacttaaaccactgttagcatgtcagaatgtagaaaggctgtaggtttttctttcttctcatcttgtaccccaaacaacaactctactggcaattgtaatcatgtgactcctctgcttggaaacccagtaaggatcaccaagacaaggggtctcactgctaccagacagataccagctgtgcaaaaagttgcaggattctgtgtattatttggagagggagagctgtaagacacaggaatcccaatacgtaagtactaaagagaaaaagaaaactcctttcactcatctattcattatataggaaagagcaaaaagacagtcaaaaccatctgcttcgagcagcagcacagcccagcaatacaggcataccaacaaaccgaaagcaaacactcaggaaagagcctcttggcccttctcaaaggagacttctctcagactggatcttgcccctaatgtagagaccaaagcattataacttcagagactggtactcttgagggagttgagaggtaaggtctaagagacccaaataacaagactgttatcaggtaactaactactccactatgtacaatacatacagcaataagaaaacgccactccatccctgcagcactttaaacatagcactgaggacccaggtagggggatattttaaggtctgttagcagtttaaaacgttgcaacactggcacaatatgttccaacttttttgtacaaag

SEQ ID NO: 120513 - DNA, 506 bp, Homo Sapiens
gtaataatggcttaggggtagaggtagtaagaaaagcacgttgatttcttcatttttttcagagattgtgaagattaaataacatttaaaacatgcttagcctaaggtctttcatacaggaggcccttaataaatggtagctgtcatatcgtattattattgacagaaggcccatactggagttggggagggttgttcatatctaattaagaaggcaagtaattttagtacaagtggtaagtgctatgtttgaaacaagtgggaacgctgaggagaaacacttagcccagctagggtaggaaggtccaggaagggtgttagagcaaaagggacagctttagcaaaggcatggggatggggaattagaaggaaagtggaactgcttaaagtgtccacacctcccgattcaggtgataataagatcacagcttcatccttagcattattagcaaaataatccgtgatctaaagcaacagcgatgatttccaacttttttgtacaaagt

SEQ ID NO: 120514 - DNA, 883 bp, Homo Sapiens
  misc_feature (825)..(834): n is a, c, g, or t
cacagagtgttgggagggagcagagcccacatgggtggtttgtgttctgacctctgaccccaccataggagtgagctgtgtggcagagccacattccaaatgcgaaagcatggcctctgtcctttgaggtggcctccagtgttctgcctgtgtgccagaactgtttccaaggacccagtttgtttgtttgtttgttttctctaagtgtttgctgaagctttgtgtacagaattcctcagttggttccaaaaaatctggctttttgcttgagtccaaaaattgtagaagccagttactttgtaaacacgtacttcagatctctcatagagggaagagaagagctgcggggaggaggagggatctggaatattttccttcataggcagtcttagcacagcagcagcataaaccacagggatcattggtggagacttagcacccagaacattcttcttggagaaggaatggggacaaaggccaagtggctgttacctgtgcccagggactgggtcatcccaactcaaggagcataactgctgctctagccgagaaatacggaacgccaggtaggatgaggacatgaccaggaagcagatcagcacaaagaagaccttgaggagccggtaatcccagagcctcagctccccagtgctcctgggctcctcctccagctcatcctcctcatagacagcattctttgcagtgggagagcagttcggcatcttcttagggcaggcaggaccccagcctggcatgggccatgcccacctcccaccattttctgaagctacttgggctcttgacttttctttatggattgggagnnnnnnnnnntcagctctcagaagccctgctggctgtgccaacttttttgtacaaagtt

SEQ ID NO: 120515 - DNA, 802 bp, Homo Sapiens
gtgtgagccactgtgcccggccagacctgggtataattctctcatggctttgtccattgttgatgctttataacctagctaggttgatggaaaatgaaatgttaaaagtcccaatctctgaagattcattcctttattcatcatttaacaaatttttattaagtatcttcaatatgatgtaaggcactgtgctagatgctcaatgatgttaattctcaaagaaactgccactggcaataatggtggactgattataaatcaaggatgctactttcttgagtccactgtgttttccctacatctcaactattctatcatctccctgactcagctgattcctgctccttttctgttctcttggcagcactctgttttacatcaaataggagctgtgctccatgaaggctgtcataggaccaaagccatcctggaaaaggaccctttccaagtcacatttcacctcctcccataataattgctttaaaatttgcacctgtaccatttccagctggcttttaatcatgacaaagaaaaaatgaacagctagcatgaaaagcagcttaaacttttaaaatatactttcctattttataaattttagatgtctctattctcagttgctcaaaggaatgaggcacatggagaatgtggatcagtaaaattgagagataatcaccgaatgtcattttaatgtatgccaaagcatctaataaacaacagataaaaatttcactactgtccctcctttccatatgttgtaaacaaagagaagctgtgaaacagctgaaaggaggtgctatgg

SEQ ID NO: 120516 - DNA, 936 bp, Homo Sapiens
gctccctccatatgcatgaaagacaacagactcctttcctgtactaatacagcccagtgattgtctccaacattccagagttgaccattttatacataagtaaacgtgtcttaggatcaactgctttttctgctgtagaatgctcctttttctcatgtaggcgggcacttcgacgttcttctgagtaggcatgttgttttaaagcattgaaaacatggtttgatagttttaaatccattccaattccatctcctacctgaaactcaggtgcaaaattttccattcttgctgtgttctttctcccacatactacttcatcatgtttggtggtgatatcttttccttttccaataaagccctttttaggagtgggaaccggttttgctggtctgtagggatcatcacgagtatcctgccagtcaacctcatcttcagagctatcgctgtcttcataaggatgcacttttcgataattttcaaaggaaatggaaactttgctatctccattgaattttttttcttcacgcctaagctgtgcatcatattctctgtcatattccatctgtagcatctgagccagcataaggtcactggaagtatcaatgttttctccagtaataaatggtccttcagcaacagcaacttcaggaaaaacggcagcttcttcttctaactgcaattctttggccagctgttcactcattacatcagccaaagaacaagatattgtattttgaggaatagcccatggacacttgctgggtccccaggccgctgccgtcccgggctcaggcgatgccactcctaccagatccattcgggaatgaaggcagagacaagaacagagcagagaggtggcaggacgggcagcaggctccgccgaggagacaggcgggacacgggcgactggctgctgatgccgccaacttttttgta

SEQ ID NO: 120517 - DNA, 280 bp, Homo Sapiens
tgagatcaagcaatcctcccatctcaacctcccaagtagctgggactacacatgcatgtcacccatgcccagatcatttttgtagagtcagagtttcaccgtggtggccaggttggccatgttggccagatggggtcttcttttgttgcccaggctggccacaaattcctgggctcaactgatcctcccacctcgtccttgtagagatgagatttagttatgtcgtccaggctgatctcaaactcctgggctaaatcgattgtctcacctcagcctctca

SEQ ID NO: 120518 - DNA, 731 bp, Homo Sapiens
cctccattcatgcaactgaggaaatggcccgctgatgctgggacctgacgtacccacactaaggcatgagggtggattcctcacagcccggagactgcctctgccaatgcttcctctctccagaaacagcaaagcctctctgcctccgctgagagtttgcagcagtgcgggaccccctcgcacacagtcctgggcaggaacttttatcctcgtcgctctggaaagatgagacctagaaccaccactgctgtcccccagaaagcggtgggcagcttattgaatgtgacttgggacccataccagtggcagcccaattcttgggcgcgtttccccgctctgcctgtgtcaacagccctcgaaactgcttctgcttctctgggcaggtatcacggggagtgtgcgtggggaacggcttgctgcacccaatagaacttcatggcatctttctatgtcctcccggatcgaatgcagggccttctcggcgtctcttcagagggtgcctgcatttggttgcccacgagtctccccgacagcttcaccccgctgtgtgtgggctcgggggatggaggtggggagccgaagggagaaagaggacaccaaagtggacagaggtggagaccctgcaagccatccccagagctaagaaatgggctttgcctgtcagagcctaaggttgcagactacggatcactttgttagagaaataaataatccaacttttttgtacaaag

SEQ ID NO: 120519 - DNA, 907 bp, Homo Sapiens
ttggtgccttcaaaatctggctcaaaaatacctcagtaatgccttttcacctctttcaggcagagttatcttataacaaagttcctacctttcccattataccgtgagcttttttttagttatctcagaattcccaggacacagcaaatgtgcgttgtcttgaactaaatttgtggaatttcaggtaatgagggagccaggacactgctgggtgggtgggccagctcttatgattctgccccaacccagagccagcccctagattttcaggtttttgtcttcatccacgtttatccccacagatcctctgaaagctccaaacaaaattttccccacagctccatggtaacctcagcagaggctcctggaggtgacagttctgggatgcaaagaagggcgaatgaagtggggcagctatttgtccatgtgagtatttggacttccttgatacacataagagcaatttccttcctttttgctttgaatcctaagaaaatgcctcaataaaaaatacttaggggagcacatgaattaactcactttccatcacctgaaccacttagcgcttccaacaaagctttggggggaaatctgtatttaatcaatgttgaaacaatcactctgatgcagaaatgcacacaaaaagaggaccagcttttattttgcgtactgtattccttttgacagtgatgactaatggagtaagatttttgttcactagaagaagctcagtagcatgtatcagggcaattaacttggaaatctgtgaataagcatgattcaggggcctattgaacatcaacttgcagactcttatgaatcctggttgcttccattggctgaaaaatactgtaaaatcttgaattttgcagtaaaaaaattcattttggttgtgactcctacttga

SEQ ID NO: 120520 - DNA, 909 bp, Homo Sapiens
tgtagggcccgcaaagctgctgcatgttccaggcgctcccctgccgctgatctctcagctctgccaagctctgattggcagctcaagttctgctgcagcttctgggttcgagccaactgggctttgtgatcagcttccttccgttgttgtaattcctcaatcttgttctgctgtcattaaacagagtctccttttctgtctgcagacggcaaaaactttcttgtttctttttcagtttctcggagagcttagcaagttcctcctgcagcctggatgtttcggcctgctttgagctctctaagccttgcagctgttcccagagcaatctcttctcctctttctccatttcccatttcagctccacctctgccaacggcatgggggccaggacggtgggggccgggccccctgggggatccccctggccctcactgacagctgagaacttcccggcttctttcccatagcgttcctgcagggctgccacgttcttctgcaaggctgtgttttcagcctgtagcctcagcagctccccatccacgaggggcccagcttgggcaacccctgctcctgcagccccctccttcagttgctggttctcttgctccagctgttccatctggctgcagagcttgctgaactcggccattagtgtgctgttctgcaaacggaagtcctcctcctggctgtgcagctttgcctgcagcatctcattttcactcagcaatacctcgacttcctgagctttcttgctcttgctcagtgccttctgagctttgctgaactccttatccaagtaggcgaccttctgtcgaagactggtgagttcaacaccattcttgcgtagttcatctgaaagctggtagttgtttgtccggagttccaggagctgagcctgcatccgcccaa

SEQ ID NO: 120521 - DNA, 891 bp, Homo Sapiens
agatatgtttgcaaaattacaaaacattatacaggtgacttaataatatctactccaaatatacacaacacatcatgctgaagatttagatttatttgaaaacacttagtctaatttatattagtgcagaaaaatcacattcaataaaccacaattgtagaagagacagataagtgtgttgtcacattttcacacaaatataatttgatatttaattaagggatgatgaatcacaatcacatgtaaataaatgatttattctctcagtaatagtaagaatctcttttgagtatgtagggtcttctgggtttattctcatacagctgccgtttcagaatataaggaatttttctctttatgacttcttcctttccatttttgtcatttccagtatcaagaatatcttcctggattaactcccagtgttgaaaagccctgctgtgacagattttgtggagctggtatattgtcaacattgcttccaagctaaagccatctaaagcagtaggaagtttccttcttgcaacaagctcctcttcatgaacttctcctgtttcctcagctgggctgttcaaattatttacaagactgcaaacatttagcagagtcatcttccaagagggaacatgtgctttactaatctttgatgtatgcatattggtcaagaaatctgcttctaatgctttcatttcctcttctgaatctgagcacagactccaggagctgaaagccaggagtagcatgcatacaagctggattttcattcctgccatcatctttcagccttctaacaagccaagtccgtaaaagtcagaagcacactgaagggggctctctctagcacttcctctttccttcagctggctttgaaaccaacttttttgtacaaag

SEQ ID NO: 120522 - DNA, 888 bp, Homo Sapiens
ccccacccaacggcgggtcgaattcgcacctccttccactgcaggtgatggtttacttcaatgacattggagtccgagaagccagggaggcgctggtctttgcagatgaccccagcatcctcatcgtgcgtacagtcactgttcccccagccccgggaggcacattcagtcacactctgctcggtcccactgcagctcaagttgtccagccagatgcggcctgttccagggccatatttggcactgtgggtccagcctgtggcctctgtgaagcccagctcccggcagaggatgtgggcagcctgcagcgtgaagtcatcatcgcagatggtgccccattcaccagctcgctgtatctccacgcggccctcgtagggcttcctggggaagccagccagccggaaccgaagcccctggctcccggccttcttctcagggcccgtggaaggggacggagaccccaagcacgaactgcacagcaggcacagcagcagcccccaggggctccactgccagacactgacaggtcgcatggcagggaaggcctgggtgccccagagacaaagtgtgcgtgagagaaacagattgagtggggcccagagtcagaaagagagggagaagtcacgaaagaaaaacagacactgagtaagacagagacagcgagagacaacaggagagaaagagccccagggaccaagagacagggagagaaacacattaaataagggctgaggcacaggtcatagaggcacagcctgagagacccagagataagagacaactatgagagatcgagagtcagagaagggtcaataaaaagagatagagactgagcaagagacacgtagagagagaggaagacccagacagacaggatgtgagagccaa

SEQ ID NO: 120523 - DNA, 257 bp, Homo Sapiens
ctttgtacaaaaaagttggcagcagaaacccaggctgagcccctttctgggaagctccccagaccctagcaaatacatttctgttgggcctgccctgcttctgcactgtggactgcagaagaccacagttccagtgaggactcccccacatgctcttacacatagctattttttgtaagctatgtgtaagcttctgtttttcaaacattaacaactgcctatccaatggttccttcaggtatacatgcactatcata

SEQ ID NO: 120524 - DNA, 777 bp, Homo Sapiens
agttattataagtcgcttcataaaattaacatcagtgcttcaaaaccaaatgccataaaaatgccttcaacaatcaatgtcaagtcattgatttacagaacatttaatacttagaatcaggagactgggatgtcacacccactagctgtgtgaccttgggcaagatttccagcgttattggggcactgatttttctgtctccagagtggaggttaggtagaccatgcaacagcacactggcaggtcccgttagttgtctactcaataaccatgtccctcgtatgctaacagaaccctaactccaggtagaggagcaaggacttcaactaaaaataggcattttccagcctcccttgcagtgaagataacctgcatggacacttctggacaatcgaagtgcaagaggttcctgtcccttccagaataaacaggaaacccttactaggagaaagccctttacctcctgtcctttctcccttcttcctgcctggatcttgaatctgagatctgcagctacagcaagtatctggcaaccaggaggagaccagcaataggatggtgaggattggggatggaaagaaagcccagtgtcctgacgcatcgctgagctgtgctcccaggctgacaggcgacttctgaactccttgttatgggagaaaaacacacctgcacatctaggcaactgtcggttgcgtttcctgagcttgcagctgaatgcattcctaactgattgaatgaggaagatgaggaggagggtgccagctacaatcctttcaa

SEQ ID NO: 120525 - DNA, 898 bp, Homo Sapiens
ttggaagttttgtccccagaagcagaaagcaaatgggtgctgtcgggactccaactaatggcgtaaatcccaccgtagtgggccttgtttccgcccagcgcgcacaccttctccccagtcttcccgtcatagatgtatatctggccgtcagcactggctgtggcaaatctgttcccatcaggagagaatcgcacacagttgacaaagcggctgtggtcgccaattgtgaacttgaacttgaatgggggtccctcaaagaatgccgcgcagttatcatcgcttcccgtggccagccggtatggccggctctgcttgatgtccacgctgttgatgactttgttgtgtcctgtaatctcgcccacagaagagccactatcccagaggaagactgctccaaacttctcccttccttccccgaccacggcgatcctcttactgtcttcagtccaagcaatgtctttgatcttcccagcgaaaggctggtactcatacttcaacaggtgctccttctgcgtggtatcccagatcctcagcttcccagacacatctccggaggcaatgtagaatccgctgggcgcatacttggccaccaccacctgatgggcgtgctctgtgtagatgtcagcaagggctgggttgtcgatgttccttaggatgacgcactttccattggtgtacagaaaattgttgcccttagggtcgccgccgatgatcttggagacgcccctctccacctgcgggaggctggcgaacaccttcttgatctcgtacggcatcctcgcccacttgttaccgcgccgcgctcgccgagagcctccggggccggcccgcgctgcgaattacacctcgccgaggccgagcccggggactggagccggaaggcggcaccgggcgccaa

SEQ ID NO: 120526 - DNA, 602 bp, Homo Sapiens
ctttgtacaaaaaagttggctggtgtgcccgcacacgcccacccgcctggtgttctctgccctggggcccacatctctcaaagtgagctggcaggagccgcggtgcgagcggccgctgcagggctacagtgtggagtaccagctgctgaacggcggtgagctgcatcggctcaacatccccaaccctgcccagacctcggtggtggtggaagacctcctgcccaaccactcctacgtgttccgcgtgcgggcccagagccaggaaggctggggccgagagcgtgagggtgtcatcaccattgaatcccaggtgcacccgcagagcccactgtgtcccctgccaggctccgccttcactttgagcactcccagtgccccaggcccgctggtgttcactgccctgagcccagactcgctgcagctgagctgggagcggccacggaggcccaatggggatatcgtcggctacctggtgacctgtgagatggcccaaggaggagggccagccaccgcattccgggtggatggagacagccccgagagccggctgaccgtgccgggcctcatcaagaacgtgccctacaagttcaaggtgcatgcca

SEQ ID NO: 120527 - DNA, 797 bp, Homo Sapiens
tagagagcaacatccagactccagaatacagctgccaaggagaccctgttatgctgtggggactggctggggcatggcaggcggctctggcttcccacctttctgttctgagatgggggtggtgggcagtatctcatctttgggttccacaatgctcacgtggtcaggcaggggcttcttagggccaatcttaccagttgggtcccagggcagcatgatcttcaccttgatgcccagcacaccctgtttgagcaacacgtggcgcacagcagtgtcaacgtagtagttaacagggtctccgctgtggatcatcaggccatccacaaacttcatggatttagccctctgtcctcggagtttcccagacaccacaacctcgcagcctttggccccactctccatgatgaaccgcagcacaccatagcaggccctccgcacagcaagccctcctaggagtttgtaacgcagagactctgcctgggcaatggcacacagacctctagtggccaccttttcagcataaagctctacactgccctctggaaagccaaacctcttctgaactacagcagtcagttcccgaatccgccggcccttctcaccaagaacattctgtgttctggtggctaagataatgatttctgtcctggttggtgtaactcgcacctcaactccagagtagccatcttcagccagctcccgagtaagaaactcattcagttcagctttgaagatgccatcagcgacaaacttcctcttcttggatatttgcactgccccaacttttttgtacaaag

SEQ ID NO: 120528 - DNA, 605 bp, Homo Sapiens
aaaaaatagaaatggcggtctttcctgacactgtcaccggtctcttgcatgtggcttccagtaagagtgtttttttctttctatttcactgatgatttggctgtggaatctcagaaatcttgggctcttgcctataactaagaatataaaggctttccacggaaaatgttgaagtatataaaaatcttcaatatatgctatttttggattgcatatcaacataagatttaggattcaagtgcctcgttttttctatctagatgttaccaaaagacgaccaccttcctaggctgaaacgtgtggaaatggcccgtggcatcttcaacatttccagaacgtggcttcttttgtccacattgaccaagcactaggcgtgaaggtgtaaccttcaattgtgagattgaagaatgccatcagctgcgtgtatgcttccagtaattaaaagaattccccacaaaaaagcttcatgcataaggcagggaggggtacaaaactcctgaactgtatccttggcatttagacctcgaaactcatttcaccttttcattctgcttattcttaggataatcatttcaagagcagaacttgttttgttttgttttgag

SEQ ID NO: 120529 - DNA, 924 bp, Homo Sapiens
ttggttataattcttgagcctcccagaaattggaagctaaataaagcaactcaagtttcctttattttgcactcaattacagtgattattgatgaaagcgatgcatggatattttaatacttcctacatgtcctgacttctgaaagagagtaggtaacaggcatcccgagttcaggaactacctcagaacaccccaggccaggttggtcataggctgtgattttagcccccggcaagtgtgagtgaagcatctgtaccaccgcgcaggctgagcgcctgcgcagggtaaggtgccacctggcagtggggcacacagagggaagaccaggcctgtccatcagccggctgccttcagaggcagctccagcaggaccttggcttgtctgacaggaaatgcttgtggtcgttggttatttggtttgagagcccttgttcctccatctagtggagtccttattaaatgctagcaatgtggcaattgagtgccagtagcttaatttcatgtttctaaatggacactgggtgcaaatcggcaaggtgattagattattagaaaattctgctcaatgagtacctctcacattgtaacctcttaaatgtacgattataatgttggatcttaggtcaaataacagacttgagaatactttataaactgccatgatacagcaaaatctcatttattcaaagtgcaaacatactgtgtgtctttctgttttgtgtatgcctgactgcaagataaatgacaaactagctaatatccgagatttatttacaaatggccagggaccccatcaagtgaaacacatagcccattgtcttagagcttctccatcggtcctgtacaggaggattggtgacctactaacagtgaccctgtggctctgtggaattttgaagtgccttttgtgaatcatgaatgaa

SEQ ID NO: 120530 - DNA, 891 bp, Homo Sapiens
gaggttaaaaatatagggcccgaaggcgagtaatagcaagatggatgccacaggacttggaaaggggagaagccatgttgcccaaatccagaggttgatataagagtttgaaaggttttgtctgattccagaagccttttcctgtaaatgccgggtggcatctcatactatccctcactggttagtgtaaaaacagcactcttctcctaagaaggtgcagagtcctcctttctcagcagtgaggaggtctaggcctcggcggttttgaagagtcactgctgccaaagagtctaattgggattgtaaagtaaggatagattttgttatttcttgcaaactgtctgagaaatcctttgagagtgtgtggtagtaggataatgcatgttacactgttaacttttagcaaactttacttttgctgaaaaccttgtagtttggggttttaattattctttgttattaataaaaccttgttcagcccatattaacttagaaatggtatagatagctccttcctgattctgtaagtactttaagatttggctgagtgcaaacagctcgcatgtttaagcagaccaactattaggcaattttcctaattctgcttctgttagcgtttccttatcacttactgaatacccattgtgtctttttcccttaatcacctaggaggaaacatctatcatcctgtcctgaagggagttcctccttggtctggttggacctttgtatggtaattaattaagatttagatcacctattaggaaaccttctgagttaaggatttttgatagaaaggctacggattgtcagtgacctcagtgcttttgggctatgcccttgtttacactgacaacaaggtggtaatggagccaacttttttgtacaaag

SEQ ID NO: 120531 - DNA, 758 bp, Homo Sapiens
gcgcgagccaccttgcccagccaagacttttttatcaggacaaaggattgtgcatttaaactatttcactagaactgggtggtggttttgctctctttcttctgggtgaattggatttgcaggttatgctgttgagtgatgacgcatagctgcttttgctccatttcccccagatgacttggtaaattctccgtgaatgactctgctacataacctagataacctaacgtgtgtcctttaaatgcatgtaagccagaagatgtatgttactttgaaaacataagtaacaaaattttgaatgtattgctaaagagatgtctctctgaagctcttttgatgtttggtgtcttgtccttcttattaaaccatatcttagtaaatagtttggtacgaatggatttatcactgagcaggtctgcaaaataattaatcggtaccgttttgtttctgttgatagaaataaaagagactgatggaagctctcagatcaagcaagaaccagaccccacgtggtagacctcttccctcctagggtaaatcagcttctgtgtcagggatgctgtgtggtgtccatctgaaccccctgcatacgcgtagctaatgtgatctccccactttcacataagatggtggccctgccttcaggaatgtgggagccaggtgggagccttcccggatatttaagctagaagattctacagggagattctccttggatcaatatatgtctctcagtcaaagatgtaaaagcacttttg

SEQ ID NO: 120532 - DNA, 899 bp, Homo Sapiens
gaggtctaccacgtggggtctggttcttgcttgatctgagagcttccatcagtctcttttatttcttctgtggctggaacttccaaactggcttggttcagctgattcttgtatcacggggccttctgactcactctgatcaaccagctggttattaatcacaagtcctggaaatggtctaatgaccgtgaatttgataaactcggcagagtctaagatccttctcatggagctgatttccaggtagctgggggctttgaaggacacccccgggggcatgccatcaaccaccacacagccagggttaattgtgattttcctgtagggaactttcacaggaaaacccataccaatagcttcaccaaatttccgactaaagaggtcattcacttgttctcttagctgtctagctttttcaactttcgagagtctttcattatcatcatctggaattgtcacctgaatgatgttaaggtcttcaacacctgatgcagtagtattaacattgggtgatgaatttatttttctgggagggctcttagaggaggtgctctccttaatcgccgtctcaaacatttcgggctttttaatgatgaacttaattttggctttgtttctgagtatcttctccagcctcggaatgccaaaagtcgatggtcttcggaatggcacaccctcaggtaagccttccacataaaagtcttccgggaaagactcaaataacgcgaacggcaccttcacagcttgtttaaggccaagagcttccccacatttctcattgaagagattttcaactttctgttttaggtccgtgattttggcattccaggcctcaaaggaaaactctctccctcgtggcttgaagggaacgttagaaccgttagtctgggtcgggccaa

SEQ ID NO: 120533 - DNA, 528 bp, Homo Sapiens
caggggagagaaggggcagggaagtcctgggggagggaatggcagacccccacccaccccaggcaggttctgtacaggagaaaggactcacaggagggagggacactgttttcagggggctctctggagccacgctgcctacgaaaaatatttacatgcatttgccacgctgaggccagggtcactgtggtgccaggcaggcacctgggggatgctggggccatcggctctcagatggcaactcccagggcccagtctcgatgcctctgtaaatctgtacagtttgcgggcttctatttacaggcaagaggcctggggaggcaagtccagggttgtagttgttgggagaagaaatccagagaacacaggaggcagccactcctaccccatgaggcagagggtctgctccctgtgtccaggggcccccaccaggaggcctgacaggcggctttgccaaccccaggggggtttggcccacacaccctaagccctgcccagccctggttgccccaacttttttgtacaaag

SEQ ID NO: 120534 - DNA, 932 bp, Homo Sapiens
aaacttctaggtttgcagactttaaaattgcacattttttctaacaaaatcagggaggtataggagaaaacccactggctagactcagaagatttgggttccagttacaatgctggtttcctttcttccaaaatgaatgcaaggtttcctccatctctgaaatctatatttctttgataacattgtcatagcattataacatttaaaggcagaccataacctcctattaaccagcagaaaatcacactcctgcccctagagtcaccatcacatgtccttcagggcctctaagtgtggctccagtgaactctccagacatatcttcttccactcctccctccacagcttccccaaagccaccaagacttcttagaattgttcacagaagttctccatcaccctcttcaaggcccagctcctttgagaatcctccccgaaacccttgccttcaactttggcagcattaaagtgtgtaaaagtacactggagtctcaagacttatttaatggaacacagtcatgcccattgctttaaggattgcctacggctgctcttgcactaccatagcaacttcagtagtcatgacacagacagatgacccacaaactgaaaagactatctggccctttacagaaaaagtctgccaagcaccaccttaggtgattactaagcttgatgactaaagagaatgtgctggagtcactaagagcacctgaaattctcagcaggactcaaggtcagtgtacacagtgctttaagaaagtgtgtgcaggatgagatggctgccttgctttattttgataaagcacctggaattgtggcaggggttgtcctggcttgcaccaagggaggtaaagccttgtggatgaagcaaagagcaccagcagcaggcaaggtagtctgcttatcagccaacttttttgtacaaagtt

SEQ ID NO: 120535 - DNA, 872 bp, Homo Sapiens
ttggcagactgaggcactgacacaagaagagttgtagctggtcataagtgacagcatcctctgttcactcgattggtcagttgtagcttcatccaggagatggtcatggggttcctgctgcataccaagctctaggtgaggccacggggactcagcagaaacaaggccgacctgggtcctcccttgtggacatgacagtctggggagatagaccgagaggaagcgattttgaatgagatgggtgtgaagagcaggggccatgaatctgtgtcagagcagccaggcctaccagggaaggtcaaagaaggcttcctggaggaggtgatgtttctgctgctatctcagagttgactgggagctggtgaggggagacaacattccaggcacagaacatccgaaggcctgagatgatgaagagcaaatatccgccctggggcctcagaggggtccagcttgctggagggagggcagagaggagagcagcctgccatgagtcccgaggcttccgactcaagacttgggttgggggtgctgagcccctttctcctttttacatttccctacccacagacctgagcggccatgggaggttggggttggcatttgcctgggggagtttctgagcgagcagcacctgctaccttggtggaacccattgctgggaatggccagggctcagcaccagcgctcagcagatgctcagtgcgttttgctgagtttgctgagggaagactgttttctgttctctctcacacacacagagtggatgaggatgaggatgacctggaggaagaacacataactaaagtaacacaagtgtcctcagctggtgctgtgctgggggtataggctgggctgtgcacccctgggga

SEQ ID NO: 120536 - DNA, 846 bp, Homo Sapiens
tccccaggggacatggatgcacaggaaagtttaaaagcactgctccaggggatcctttcttcctgaccttctaatactaaactgtacactccatgttctgggtgaaacacacagacctcatcacccaggcctcactcacttctgactccaattcctaggtatggctctgttacacatttttgtctgttaatcagtttggaaaatatttttgtctcttttggctcctgaatatttctgagtgtttcttttctctcagcctaagatgtcagagtgaatcgaaaggattctcttctgagagagattctactttggatgctgttatagctgccattttgcagcaaaactctggcttttaatacagtatccaacttaagatggtccttacatacaacagggactgcaaccctcaaatctgcaagtccttttccccactttttgctcatcaattcagaaagtaagggagtaataggtttccctctactgcaaaagaatagcggtaggagcaagctaacagaccgcaattcccgaagaatatttacccccaacttaacacacgccaccatgtggatgtatttttgatacttcaagttacattaaacttattttcttcataatgggtaaatgaaaatactaacaattgtgattatatagaatcgaatggtactatcaccacttagtaaaacttaaagcacttgatagtgagttgttcaccctaattggcacttagaaaattgtattttatgggaaatagtaattgggctccaactaatcaacctataagttaacctctgaaatacaaactttatagaggttgtagtactgtccctgtatttgtatatgaaccaa

SEQ ID NO: 120537 - DNA, 893 bp, Homo Sapiens
ctttattgtcctctgtcaagtgagggcagataccaaaaatgttttcctggataaactttttaattttgccactggtcattttttgctctgtatatgccacagtcttgtcctcaaacttgttagtgagatgtgaaggacgaaataagatgataccctctccattatcatcatactcgttcaccagagactcaacattcgtatgtgcaaatcggtagttatccctcaagttgctggctgcttttaggaactcggagtgagcctcactgaatgaatcatcgaaaaaacctactatagaggcatctttatcactaatgaatttcttaaattcttcctcagtcctgagaggcactgaagctggtcctgcctgcttcttcaagtggctgacaattccatcagcagtcctaggtccatcataagcacctgcttcttcaccatctctaaatatcttcagggttggatatccactgactccatatttattacaggtgttagtgttggcagtgcaatcaacctttgctaatgggactattccttttaatctggtagctgcagcttcatactcaggtgcaagtctcttgcagtgtccacaccagggagcgaagaactcgacgagcatgaggcccgcagagcccgtgtcggagatgcgactctcgaagttgtcgtccgtgagttctagcacgtcggaggcagcggcgaggcgggccgcggcaagaagcagcgccacacccgggaacagcgctaggcggcggaggcgcatggcggcgaggtggggtggggacggccggaagggtcgcggctcggctgggactgcggaggtcgggcgcgcgaccactaacccgctgcttgcgctcgcgcgtctggcccaggcggaccccaacttttttgtacaaagt

SEQ ID NO: 120538 - DNA, 866 bp, Homo Sapiens
acaatcctttcctccacagtaaggtaatgttattaaataatccaatccaatcacaaaatggctctctgcatctgctctggtgtccttctgccatatcactgcatatttatgcatgactgagataagagtttccttaacattgttatttcgataacctgaagctgttctgttacctctgggctctcatcctctcctatttatacagtgaagcccatggcaaataggaagaagctcagtatcggctcctcccaccataacccccacttcctccactgcctcctggaccatagtttcctccaccatatggtccccccatgttcctgctaccaccaaagtttccactcttcattggaccgtagttagaaggttgctggttataatttccaaaatcattgtaatttccacttccataatttcctcctccatagttgtcataaccacctccgtagcccccaccctggttgccatatccaggtcctccaccaccatatcctcctcttcctcctccataaccggggctacctccaaaattgccacctccaggtcctcctccatacccattatagccatccccaaatccacgtccactgccatatccatcagatcctcctctaaagttacttcctggtcctggtccgaaatttccaccgccaccacgtgaatccccaaagccaaagttgcctcctcttccactcctagaactctgaacttcctgcatttcttgtctagacaaagcctttcttacttctgcattatgaccattgatggtatggtatttctgcaatacgattttatccacaggatcatggtcatcaaaagtaacaaagccaaagcctcttttctttccagacccaacttttttgtac

SEQ ID NO: 120539 - DNA, 913 bp, Homo Sapiens
  misc_feature (665)..(674): n is a, c, g, or t
ctttgtacaaaaaagttgggtgaattttaacttgaactcattcctgatgtttgataccctggttgaaaacaattcagtaaagcatcctgcctcagaatgactttcctatcatgcttcatgtgtcattccaaggtttcttcatgagtcattccaagttttctagtccataccacagtgccttgcaaaaaacaccacatgaataaagcaataaaatttgattgttaagatacagtagtggaccctacttattcagtcaattaagagtaagtttttttatgtggttattaaaacagtatgaacaattagtctaactctgcatagacagggtctagattttgttaacccaaatgtataactgcagttagcttaaattacaatttgaagtcttgtggtttttatatagctaggcactttattactcttttgaactgaaagcacactcccttataggttcatgtaactgtcctgtaataaggtgcttataaatggaacaactacacagcctagttttgccacaacctttagcatctaaaaagttttaaaagcttctaaatgtctaatataaagggagatgcttatagccacaacatctattttaccaatattgtttccattacactaccttggattttgcatgagtgagtatagtaacccaagatgccatnnnnnnnnnncttgatcgttttctgacttaatcagttactgtggtttcactaaaagctaccgtggtggagtgaagtcagtcagggaaggtttgtttatgttacatttatttcaccagaactattttaatatatcaaaggggtttactatgccaaacaaaattctagggaaaaatactgctaaaaatggatgcctcatcagaacatgctgttgagtccaatgtgccatagacattttagcatgttaaata

SEQ ID NO: 120540 - DNA, 860 bp, Homo Sapiens
ttgggacgcatgtgctccaccccactccttttgggggaagccaggcaacagtggcctctgggagggggtcaggaagaggcgaacagctcaggcagcgcaggtgtgatgggcacagtacgcagagcaagctcgggaagttggtaggatctcaggcttggggccgggactctggagtgaatccccatttctctaccggcttgcttggagtttggacagaagcatttcacctctgatctcagcttccccacctgtggagtgggtttagtgacctgagtcactagggaatgtcacctgaatgcacagcccagcccatgcacctgccccagcccctccagctttggagccaaggccatcgttccagccacttgactgtcctcgacggcctgttccagacagggcgtttgttttgtccatgccttcctccctgcacgcacacggcgtcaaaaccaagctgccggccactgtctccagaacgcaaggctccaggcccgtgtgtctgaagcagtgagtggtccacacaggtgccaggagtgcccatatgagatgacgaggaaacccctttgcaggtgaggggacagctttctagaaaagccacacctgcatctggggacacactttggaaagtgggaccctccagcctggagaccccatggactgatgcctccactgctgtgtgccccatgttgtgttaacacctgcgtgtggggaccccatctgaggtcttggctgagttggcatctcctgaagaacagagagcacggtgtccagagctggcccttcccccagcccacagccagctccgtgcccgagtgggcgtccccagcgagccttccctctctgccgcttgtccttgtgtctgg

SEQ ID NO: 120541 - DNA, 636 bp, Homo Sapiens
agtctagtaaggtatgtttttgttactgaaatacagctaaagttttggattttaatcaccaaaataacagtacttctggtttacaattgactttaaaataaaggatactaatatatatttattttcacattttttttaaatcttcaaaactgaaatacaattctgaaagtatttgtgccttgtcatttgttcaataaatttgatttgtttttaaacaggtcacaaaagttcaattagctaaccagaattctatatctattgcctgtctactggggttcagtcttaagtctgactatatcaaaagcagcagctcagaatttatttcataaaattaatcccaagagttactgggtagcttttaaagtatttcatcgcttataatacaactcactagatagatagtctatactagtgactcgtgacatcaaaattatctggagagttttttaaaaaatacgtaggatccacatcataactacactaagaatcaagaatgtctgtattttttttaacgttcccaggttataatgctatgcagcctagcgtgggaaaccccaacgtaccactaagcctgtggttctcaacttttcaggtgcactggaatcactgggggaaacccaacttttttgtacaaag

SEQ ID NO: 120542 - DNA, 927 bp, Homo Sapiens
cctgcagacagttcttggttctgccttggggtccatggtgagtttttgacgtctgagctttatctgccatggcatggccccgctgggcaccctgggccgggcaccagcccttgtctaagcactcttagtacccctggtatctgctctcagagctgtggtaccactgccacccccaccaccctgggacccccaggtggctgcagccttctcccagaggtgtgggaagcacccgtcccaccccgagcagattggagctcaatgtagggctttcgtaggagtttattctctgtgtcttttttcaaagaggggttgtatatggacggcatgcagggatgctgccttctgctgatgtcgggaagggggaaagaggagcctgtgttggaatcggtccttgtcccatggaggcagccacggaggatgagggaagaccagggacctctgtccatggctacggatgccggtccaaggtgcagggtgcggcggccccagcggcaggcggctcagtgagttggcaccaggtggctgtcgcgctggcggtatgatggcgaacgtcactggtagaggaggtaggccttgagggaagccggcagcggcagcgtgtggatctcccccaggcgctccctccccagggccaggcgcaccgagcgacggcacaaatccatgagcggcagcggctcgggatcgagtccgttcaagtagcgcattcggatctcacagtggccccagacggcactcactacaggatacagttttttgcccttgagtccccgaaaagccactcccatgtactgtccatccacaatgaagctcagagtcccgtcgtccatgtccagggctaccaggaaggagtcagggacaatgaatgtctcatctggttccagaaaggctgggtatgttttgcttggctggttcttgccatcgtgccaa

SEQ ID NO: 120543 - DNA, 724 bp, Homo Sapiens
ttgggttaggggacccaaggtttgtttgggacctgggtacaggtaaaagccagacttggcagggacccctctttctaggctgaaccttgagtccccctgctttttggcagacctaatggatcactgtcttgcagctagttcttcatgtggggcctcttaggccagtgccggaggaggcatgctcctctttctatgccacagaacaaacactactctagcagagcctttcttgcactttaaagtgagattaatttagctgtaatttggttaaaaacttcctaagagagaaaattaagtctactgatttggtataggtaaatggacattaaacttttttaaagtaaaggagatggtagataccgttagattatagtcttgaggttcatgtgaagccagtggtgttaacttactttgatttccttgttcaggtcagggcctggaacgcctgtgcggggaggtcactcaattcaaaattttctgtatgaaagcatttttcaccaaaatgagcctcatccctttatgcaacacataaccttactgagggagggaaatacggaagccacctttttatttctcttcactgtgtacaagttcacttgttgtcttgaacactgtctcaaatacctgctttttgttttggatagtaccttgtctgtataaaaagctggcctttccatagagaggccctggagtctaaattatgagaaccattaattttatttgt

SEQ ID NO: 120544 - DNA, 884 bp, Homo Sapiens
tcactcagtgagatttagagcagctttctgtatcatcttgctttacatagccacttggaacatggacttgggaggggagagttactacgtcatcctcgaacctcactttccgcccccttaacagtgatagaaagacacttttagaatagccgccccactaaaaggacactctaaattcaccaacagtgaaagcccaggccaaacctgcgtgaagctcttagcagctacaggccaccattattggttgccattaactctgtcagctgaaatcgtcttcccatcacccacaatgtgtggttaatgattttatatacagagtttacaaaactgctgagtaaaaagctcatggcactcctatactcacgctctggagagttggtagaaaaaaataatgtgttctgataaaacctctgatcctcactgttcacatccatgtaacagggctcggtcccctcaaaatctcatgatacagcttctgggaaggagttattaaccctgtcacttcccagattgctgatactcacaatgtttccatttgcagattcctgccaagaatgatgaggcaggattaggcccaactggtgctctcccactagctgctgtatttacatacacttctgttcatcatctctgcccgtttcaggagtagctgagagcttgaataggtggcggtaagctcccaccaccaccccatgcccagtgcagctacccgcctgaatgaaggcagctcctcggacatgtgaggtgtgaggagtggggggaagatccagggaagtcagctgctttgtatttgggtttgtgggatgtaatggccttggcaggaatggtggggcctgaactggtatcctgcagagaaatgcttctatatccatctatcgccccaa

SEQ ID NO: 120545 - DNA, 868 bp, Homo Sapiens
acatcaagtatcacaatgtttattgatagatacaaagtatataaaatcagggcatgaacatgacttgataaataagtagacttaattcaatactataataggagggaccaattcaaattctcaccatttgtttcacacccacaaaaaccacttcaagggcattaacgatctctcaaaactgatcagttttgtgcaagtaaaccatgtttcttttaaaaagacttgtgcacttgcccaggctcaaggatattaaaatctagcacataaagcccattactagaggtagaaatacaggcaatatactattacggcaacaaccatcaattacagttaagaatttttctgtaacaaccaaatggataatcaaatattgcaacaactcaagtattactgagcaaagtgcatttctacagtattcagtgttgctattcagttttctaacttaaaacagcctatgataactggcagcaaagaaggtccttgcaatagactgcctctgcttgagaacttatgatgtaattattgcatgctgctaatatactatctaaacattaaagatactcctaaaatatttgatggtagactatgattaagacattacactacaaaaaaaccttatgcagaaggaaatcctaactgacgtgcttctgctttaaatattgtgaaaacattacagcggaatgaattttcgcagtggttaggtcaaatgcagttacatcatagcaacagtatgttttgcacaatttaaggctttggctggttctttagtcagcttcttcctctgattcttcttcttcagcagtttctaaccaggttagccactgattcacctggaacaaagccttgccccaacttttttgtacaaagt

SEQ ID NO: 120546 - DNA, 766 bp, Homo Sapiens
atatcgggaaccaagtagtactgtaatgggtttggccaaatatcatctttgatgacctctcctaactcatcagcacctgcatcagaatggtcagtaaaccaggtaaagaagctctctggttcctcatgctgcctcttcctgctggctttattctgcgtttgactcgaacgtttcgtcaaatcctttccagatttccatttgatttcggtggacttcgaagatggatcaccactctcattcagatgaaattctttggagagaactttattttcaaagtaaggattttcatcaaaataaaaatctattctgtaacctgatttaatatcttcaaattctgtcacttcaactctggtcaaataatgcagtgcctcttcatcttcctccccaagcagtgcagacacttgtggatggttgacaaatgttgttacccaaaaatttgggattttggcgatcaattctgacctcttctgaaaaaaatggttggcggagtttgttatatttctgttctactttcaaaatctcctcactggcttgttcattaagtctgtctatttcattttgtacttcatcaatgtgttcaatcgcttcttgctgttctttttctcccttcttcggcaagcctgcagaggccgatgtctcctccggtcccagagcaggaggtggtcttggtttcttcttttgaggcgggagtggagactggcgtttaggggccatgctgttagggaagtcccagaaccagaccacgagtctcctcgcccgtccccaa

SEQ ID NO: 120547 - DNA, 861 bp, Homo Sapiens
ctttgtacaaaaaagttgggctggcggcgccgtcgggcgccgggccgggccatggagctgtggccgtgtctggccgcggcgctgctgttgctgctgctgctggtgcagctgagccgcgcggccgagttctacgccaaggtcgccctgtactgcgcgctgtgcttcacggtgtccgccgtggcctcgctcgtctgcctgctgcgccacggcggccggacggtggagaacatgagcatcatcggctggttcgtgcgaagcttcaagtacttttacgggctccgcttcgaggtgcgggacccgcgcaggctgcaggaggcccgtccctgtgtcatcgtctccaaccaccagagcatcctggacatgatgggcctcatggaggtccttccggagcgctgcgtgcagatcgccaagcgggagctgctcttcctggggcccgtgggcctcatcatgtacctcgggggcgtcttcttcatcaaccggcagcgctctagcactgccatgacagtgatggccgacctgggcgagcgcatggtcagggagaacctcaaagtgtggatctatcccgagggtactcgcaacgacaatggggacctgctgccttttaagaagggcgccttctacctggcagtccaggcacaggtgcccatcgtccccgtggtgtactcttccttctcctccttctacaacaccaagaagaagttcttcacttcacgaacagtcacagtgcaggtgctggaagccatccccaccagcggcctcactgcggcggacgtccctgcgctcgtgggacacctgccaccgggccatgaggaccaactttcctcacatctccaaaaccccccaaggaaaaggggccactgc

SEQ ID NO: 120548 - DNA, 493 bp, Homo Sapiens
  misc_feature (183)..(214): n is a, c, g, or t
agtgaaaccaagacattattccatagtctgggcccttccagccttccaaatacaagaggctctgaaagttgtatataccaattggaagaacaagacaaaaatatgaacagagccatgacatttcattaaacaaattgtatgtaactgaaggatcctttctgggactagctcattgcctttacnnnnnnnnnnnnnnnnnnnnnnnnnnnnnnnnccagaataacagaatgagagtccagtgttccaaatcaacttgttacacatcaatataaacccacagtgtcctggcaaacaacatgctttcattttctgtctcatcctagagctcgaatcctgattcatttcagcagagactccacaggcaacaggaaagattgtggcattaaaatattcatttatacttttgtggtagttcaaaacagtggtcttatttctgggcaagcttacagaccatacaaggtcagaagcataacttaaatgggagctaagactc

SEQ ID NO: 120549 - DNA, 935 bp, Homo Sapiens
  misc_feature (797)..(822): n is a, c, g, or t
ttggtgactattttgcttttcatttttattcctttctcctaacaacaaaataaaggaattcagacaaacatgtcatgtgataattatatagccttgggtaatacattattattttttagttttaaagtactttaaaaattggcagagtatttttagtatactaagatttgaacagtttaaccagtagtgtcgggatttgattacgctgataaagatatgcaagaaataaagtaataaaagacaaaatgtaggtttggaaaattcaaattgtagttttatccattaatcatatactttactttgtgcttgtcattgtgataattacataaagataaataaaataacacacctagcccttaaagtagtagttctttactttttaaaggtcaggggtcccttgagaatctgaaaaattgagaatctcttcctaagaaagtgcacatacacataaaattttagggaatattctagttgtcttttcatccttgaaaccccaattaaaaattcatgtcttaaagaactgagatgatgatcatgctatatgagctagttaattattaatgctgatgtggatattcgtttaaataaagcgaaattttagaaatcagaagttaaatttatagaaggaaaaagtatattttctgttgttaggaaagcattttccagtaatttgatttttctggcaccctaactaagggaagttggctttttaaattttactttgttgcagaagattaaatttaaggttgagttccactttgtttgcaatagtttgaaaaagaatagttaatgcagannnnnnnnnnnnnnnnnnnnnnnnnnaagctttgtgtcttgtacaatgtgagtttgccaaattttcttcatctgctacagattagtatgccattgttgctgccatgtggcggcgcaccccgtgcttcttaaacgcactg

SEQ ID NO: 120550 - DNA, 916 bp, Homo Sapiens
ttgggggacttcttcgtactctaattgatccagagaacatgctggctacaactaataaaaccgaaaaaagtgaatttctaaattttttctacaaccattgtatgcatgttctcacagcaccacttttgaccaatacttcagaagacaaatgtgaaaaggataatatagttggatcaaacaaaaacaacacaatttgtcccgataattatcaaacagcacagctacttgccttaattttagagttactcacattttgtgtggaacatcacacatatcacataaaaaactatattatgaacaaggacttgctaagaagagtcttggtcttgatgaattcaaagcacacttttctggccttgtgtgcccttcgctttatgaggcggataattggacttaaagatgaattttataatcgttacatcaccaagggaaatctttttgagccagttataaatgcacttctggataatggaactcggtataatctgttgaattcagctgttattgagttgtttgaatttataagagtggaagatatcaagtctcttactgcccatatagttgaaaacttttataaagcacttgaatcgattgaatatgttcagacattcaaaggattgaagactaaatatgagcaagaaaaagacagacaaaatcagaaactgaacagtgtaccatctatattgcgtagtaacagatttcgcagagatgcaaaagccttggaagaggatgaagaaatgtggtttaatgaagatgaagaagaggacgaaaagcagttgtggcaccagtggaaaacctaagccagaagatgattttccagataattatgaaagtttatggagactaaaaagcaaagaaagtgaagacagaaaaccttcccaaagacatctcctgtggcttcaatttactttctccc

SEQ ID NO: 120551 - DNA, 933 bp, Homo Sapiens
tcacagcaaaccaccacgcagaatttgctgttgattgctcttttcactcctcctctctgaaactagcaagaacaggaagaaatatgtttgttcccagaggtacatacagtactcaactacaggtaccacctctctagactcattttataactcagctgcttaatgccatatttatcagtcttttaaaaaccatatcttctttgataaatatgaaaatctcacgtcttctccacactccgacctcttaagtctataatgtgcctctttagagggtatacagccaatccccatcttctttgaggttctctccttttctggctggacctggagccaatctatgcattttcaaattatatattcccttcctatttgtgacctgtctgcatgctcactaccccaaatacaagttaaaaatcactgtcctaatttactgcaggccaatgccaatcatcaactagaaaatgaatgtatgctttgcttaaagatgaatttcagtaatatctgagtttttgacacatgagctaattgtctccatctttacagtatagcatttaaatggtttagagttcctttatatagctaagatacaccctatatctctacttttgagatcaatggtaccagacgccaataatttaatccaatcaatagagattcacatggctttctgaaagatgttctactttgctttggattttgttatttctcaactttactgaaactctataagattcaatagttcttattgtaataagcgaggtgaagtcctcaaacacagatctattatacgattggaatagggataaataagggaggtttgtatatctcaaatccgtctagtctctcctgcctgcccagcaagttttaattagtactgatttactgtaatattcatccagttaattcattctccagtacccactgttgccccaa

SEQ ID NO: 120552 - DNA, 886 bp, Homo Sapiens
gggctcgagtaaggaggcctcagacaccccgccgggagctgtgcgggcgggggcgtccaggagagcgctgggccccgcctgtctgcgccggagagcaggtctcctggctcccccacccgagagccttccttcccgggtctctctgacgcccgtggctccccacaggcctttcccctcgcgtcctccctccctttccagcaccttcactcggcctgtttttcttcctcctcctcggcactgagctgagacgcgctgagcagtttgctctcctttttccacttcatgcgtcggttctggaaccatatcttgatctgcctctccgtcaggcacagggcgtgcgcgatctcgatgcgccgccgccgcgtcaggtagcgattgtagtgaaactccttctccagctccagcgtctggtaacgtgtgtatgtctggcggcctcgccggccgctgggcccaaaggaggaactgttgcacgaattcatccgctgcatccacgggtagaccggagtggagcacttctgctcttctgtctcgccgaacacgctcttgtcctgcgcgcagtccgacttccgcggctcggggtggaacgggggctgctcgtcggcgcctgagagtgcgcaggccgactctttctcgcggtagaaggccggcgccggcccgtagtcgcagggcgccgctcggccgtagccaccgcccgccggcgggtaataggaggaagtggcaaagcccttgtcctggcccggccctggcccgtagggcgcggggtaatgtctcagcgggtccgcatagcccgacgaatagagcggtagctggcccaggaaggactcctgcccgctggccagagtgacggggaaggtggagttcacccaacttttttgtacaaagttgg

SEQ ID NO: 120553 - DNA, 909 bp, Homo Sapiens
ctttgtacaaaaaagttggcttttgacaagtgggatggcaaggacctggaggacctgcagatcctcatcaaggtcaaagggaagtgtaccactgaccacatctcagctgctggcccctggctcaagttccgtgggcacttggataacatctccaacaacctgctcattggtgccatcaacattgaaaacggcaaggccaactccgtgcgcaatgccgtcactcaggagtttggccccgtccctgacactgcccgctactacaagaaacatggcatcaggtgggtggtgatcggagacgagaactacggcgagggctcgagccgggagcatgcagctctggagcctcgccaccttgggggccgggccatcatcaccaagagctttgccaggatccacgagaccaacctgaagaaacagggcctgctgcctctgaccttcgctgacccggctgactacaacaagattcaccctgtggacaagctgaccattcagggcctgaaggacttcacccctggcaagcccctgaagtgcatcatcaagcaccccaacgggacccaggagaccatcctcctgaaccacaccttcaacgagacgcagattgagtggttccgcgctggcagtgccctcaacagaatgaaggaactgcaacagtgagggcagtgcctccccgccccgccgctggcgtcaagttcagctccacgtgtgccatcagtggatccgatccgtccagccatggcttcctattccaagatggtgtgaccagacatgcttcctgctccccgcttagcccacggagtgactgtgggttgtggtggggggggttcttaaaaaactttttagcccccgtcttcctattttgagtttggtttcacatcttaagcagctccatgccactgtatttatttttga

SEQ ID NO: 120554 - DNA, 400 bp, Homo Sapiens
cgatcaactaggggggcattctcacctcacgcacttctcctaactattggccgcttcccagaaccttatacttgtctctgcagtttattttcttattctaatacctattctgacttcttttaaaaatgtgtctttccttctgtttttcccccagtgattatgtactccctaccactgccaaactttctgaaagggctgtcattgtctccacttcccttgcctctcgttcactctttgaaatactgcagttggattttgaaccccattactccattaaaatcatcctcaccaagtcaccagctgacctccttatgctgaaaacagcggactcttgtcattcttgcccctctgagcactcgaccgtgcccttcctctcaatcgttcccttccctgtatttca

SEQ ID NO: 120555 - DNA, 753 bp, Homo Sapiens
ggattctgtggtttcatttggtaggaggagagcatcggggcaggcctttagtctgttgctctggcagggggtgggggtgcgggggcttacagtggggcctttagttggcacagttcggaagggccccaggcagacatgaattctcctgagacttgaggtaggttgcttcagccagcccgggcggagaagaagggcagagagcgaacataggagtccagtcgggagcgaaagagctcactttgcacagtttggcccagcgggcacaggggattcttcaccaccagctccacatacagcgcactgtagatgtggtgcagcacatctcggatgggtcccacgcccaagtcagtattcatgacaactttgatcccagtgggcgtctcgtagtaatggagtttgtaacggctagtttggaaggccaggaagccatccttcatgtctagcggggacatcttgctgacaaacgagcggatagagaagagcatcccgtacatcagcttatactcctcctccttgggaatccctgcttgcttcttgcggtgccattcgctgtagtgcagacacactccattccggtcaaacaggtacaggttgtggacagtcatctgcagggcagggagtgtgagcctcgctccggggccgcccccactccttgggctcgggttcccggacccacagccttccaaccaggtggggaccccacccacggactcaccggaactgctccgagtgccaacttttttgtacaaagtt

SEQ ID NO: 120556 - DNA, 793 bp, Homo Sapiens
  misc_feature (536)..(554): n is a, c, g, or t
ttgggaaatggaacttgagatagggcctaatttgttatacatattagccaacatgttggcttactaagtctaatgaagcttccataggagtattgaaaggcagttttaccaggcctcaagctagacagatttggcaacctctgtatttgggttacagtcaacctatttggatacttggcaaaagattcttgctgtcagcatataaaatgtgcttgtcatttgtatcaattgacctttccccaaatcatgcagtattgagttatgacttgttaaatctattcccatgccagaatcttatcaatacataagaaatttatgaagattaagtgccaaaatacccagcacaatacttgtatatttttagtaccatacagaagtaaaatcccaggaactatgaacactagaccttatgtggtttattccttcaatcatttcaaacattgaaagtagggcctacatggttatttgcctgctcactttatgtttacatctcccacattcataccaatatacgtcaggtttgcttaaccattgannnnnnnnnnnnnnnnnnnaccaagtcttacagtgattaatttacgtgtttccatgtatctcactttgtgctgtattaaaaaaacctccattttgaagatctacgttgtacagaagcacatgtctttaatgtcttcagacaaaaaagccttacattaattttaatgtttgcactctgaggtgcaacttaacagggagggcctgagaaaagaatgggagaggggctattaattatttttagcaaaatgttgcctttgtc

SEQ ID NO: 120557 - DNA, 945 bp, Homo Sapiens
gaaaaacagagggtcaaacacttcagtttacagatgctatccagataaaatgccaagggcttggccgggcgcggtgactcacgcctgtaatcccagccattccttgtcatttctatcatttgatacatctatacttctgaataatcataattgatactcaaagagatgccctgacaccctctaaggtttacaaggtgaccaaatcagagaggtcacctcatgcctagtattattttggggttagcatacattttataataattatttaaaactggcaatccattttgggactcaatgacagctctctctattaatcatattgttttattaactgaaatagtccactcagtcagtaggattaatgatcagagattatgacacaactaaaaccaaagctggggcaatgggctctcagaatggaaccacccattatgaactatccatctgaccaactctttaactttcttcctaaatatgagatcaccaaggcgtttcaatgcagcctgcacaattcatggggcagggtcctcagattaaagactttacatttatgtagaattcagtatcatttttcactaagcaaactctatttgctcactctcttctacatgtaattgtccaactttggttgactgctgagtcctcatggaagaattcccattctgcccctgagcctctcctttagggacttggaaacggaaggtagtgcagttctttctggccatctgccaggcatggaaccccaggcttcttggggtaagttcgacgagcaagcttaaagaactcttctgcagcatcaagtgcaatgagacggtccacaacaaagagatatctctctgagagctcccaacttgttgggaaaatattggtttcttcagccagttttaacaacatctctcgagctttccttgtgtttttagaatcactgatgccaacttttttgta

SEQ ID NO: 120558 - DNA, 878 bp, Homo Sapiens
tccggagtcagaggctgcagcgaacgcaggcagggtcaaccactgaagcattgcagaactggtcagtgatattgtccactcgacagcaagacgactgtggcttcacccagtcgaaataatcgtcgatccaggacgagggggcgaagcctattcgggtatagttgtccagctgcgccgcgttaaatatctgctgcaccagggaatcattgttgcagcccatgccgccgcacaccatgttctgccccttggaagaagtgtagtcgtgcccttcctccaggacaaagtacacaggcggacccgcatgcaggtactgactgatggatttgaaataatccaccatgtaggagtcatctggcatcgaaagagactgatccaatccaatatctactttgttcaggactgcgatgctgaatgacagaacacccacaaatattgctatcacaattggtctcatccagtcctttagcagaagtggagaataggagtttttgaagaagcgaaacaaacagctctctgaggcctggacgcttgttccatcttcagcacctctgacacagcaaaagatgtctagccgatttttctcttgacgtttaatgtctaaccccaagagactcacgaaacaggtaatctgcagaagaaagtcaatgaagactgccaatcccgcaaagagagagaaggtgtgcacggctggcatcacggacaatgctcctaagaaaaatgctacagtctcagaaaaggatgacaggaacatactgggagccacttctcctaggaccctgcccagctgctgatccagggtttccccttgaagacgttcatctctctggtaggcctgcaccagaatgaagatgttgtccaacttttttgtacaaagttgg

SEQ ID NO: 120559 - DNA, 956 bp, Homo Sapiens
ttttgcaaaggaaaaaaaataaagggcctgccagattcccagctggatggaaagcagccgacagctctcagccagagggtgaggccaagtcctggcgcctagctgggcccagtccatgcgcgtcactttccagtgagttccagcaccttcctcaccatgggctccgatcccatcatggatgtagtggagtgccgtctcgcacatgaaggctggggtcgtgaccaccttgtttttctggtccacgtgagcttcgaccacttccttcacgcagtgcttggcacccagggccttgatggcctctgcggtcccggcataaggccacttgccaccttcctcctgctcgtggcccacagtcacctcgacgcctctgagcaccttggccgcgaggacaggtgcaatgcagcacaagccgatgggcttcccggcctggtggaactccttcaggacacgctccacttctttattcaccttgcaatctttcccgtccacggcaaacgtgctcaggtttttagccgctccaaagcctcctggaaagatggcagcatcatggttggctgcactgaggttggccaggtctgtgattttgccacgggcgatcctcgcagactcggtcaaaacattcctgctctcgccttcggacggctgccccttggtgtggtcaatcacgtgcatctgagggacgtcaggagcaaagatctggacttcagcccctccacggctcaggtgcaccaggatcgccgaggcctcgtggatctcggtcccatcgtagactccgcatccagacagcaccagcgcgaccctggccgcggggcgcggcacggagaggtgaagggctgcgcgctgggaaggcgtccgaccgccgggggacagggacgtgaatgcagatgccgcagcgagcctcgaggccaccagggccctcacagccgccattgcggtgccaacttttttgtacaaag

SEQ ID NO: 120560 - DNA, 946 bp, Homo Sapiens
ttctcaaacataaattgcaagtatcacagaaaattgtaacaacacatgcaacacgggatgggcttcaacacacagagagcctaagcaagaagagtgagtactgaaaggtctacagaggtcagactgggagcactaccacaggaagtttgaatctatccacgcagctctttcctcccacagtccaggctcaacacctcttcctattccaaggtggcttatccatatgcagaaatccaggctgttccatatacattaatacttgcccagctgtgtttcacgaggcatctccataagccaagccccgactcaaattctgtacaggaagttcccgttgctgtcaaagaactctcggcccctctgcactactttgctgctgaagttatctggctcctctgccttcaactcctccagcttctgaccacttggcaacgcaccactgccagttcctctggggctctcagaatcactggagtacttctgcagctctcttggatgacctaggggtgcagcaacaggcacaaagctctcctccaggtcctggatttctttatttcttcccttccttctccttggtgtatttgtcctgtgagtgtctgactctatcactttcaaagctgtgctgtgatttgggtctttagatgaggcttcatgccctggcataagcaaagagcctgatacagagtggcctgcagggagcagctttgaggtatttccagagccccggaggtgctgcagcgagtgggcaagcccagctttcttaaggactttttgatcctgcttcagcttctgctccaatgtgggtaaaaacttgctttttaaaactcttcggatcacatcagtgctgacatcaaagccttcagccaacctgggaactgaccaggactctggaaattcccaacttttttgtacaaagttgcgctcatttataggaaaaagcattgctcat

SEQ ID NO: 120561 - DNA, 837 bp, Homo Sapiens
actttgtacaaaaaagttgggaatttagactgttaatgttttgaagccacagcctgcatcttaatcactattttatcttagtgcctggtcttagaaattatattgactctttgatagaccatatataaggcaggtggatgagaatgtgggtagctagttggaaaaggctgcttggtcatttgcttgattattttctcacacagtttttcctttactaagagaaaatgcccccatattggcaaacaaaatctccctgcctgagagcgcccagagtatagcagagcatcttaccctgatacgcctcttttcactctcttctctgtggagacagaaggagcttcaagagcagggggagatcagaatcgtccagctgggcttcgacttggatgcccatggaattatcttcactgaggactacaggaccagagtcctcaaggcctgtgatggccgaccgtatgctggggcagtgcagaaatttctagcttcagtacttccagcctgtggggaccttagtttccagcaggaccaaatgacacagacctttggcttcagggactcagaaatcacgcatctggtgaatgctggagtcctcaccgtccgagatgctgggagctggtggctagctgtgcctggagctgggagattcatcaagtactttgttaaagggcgccaggctgtccttagcatggtccggaaggcaaagtaccgggaactgctcctatcagagctcctgggccggcgggcgcctgtcgtggtgcggcttggcctcacctaccatgtgcacgacctcattggggcccagctagtggactgcatctctaccactttcatgaaacc

SEQ ID NO: 120562 - DNA, 912 bp, Homo Sapiens
tttcagggttttagcacttatggcattatagatgtctcagtcataggcacatacattttgctgtgtcatccaagaaatacaaggcatctttgatgacagcagggttaaagccctcctccaccagggtcattttgcggtgtttaaaagttccagtgatctcaatggtgtctgtattcttagaaaccggggccttgcataactaggtaggtaatcagcaatgtgctgaaagagtttctttccatcaaattcatggttttctttcattttgatggaggccatgccaatgcgaccctcatgatctggcacatgcactccataaacatttacttcttggacaaaatcaaccagtccaactgtatcagcaacttcagtggtggccacattttcccctttccaccggaatgtatctccaactctgtcgtggaaatagatgaaattttcatggtcaaccattaagagatctccactgttgaaatagaggtctcctttcttaaagacatctctcagttttttcttctctgtctgagcctttgctccagcatagccattaaatggtgtaagttgtgtgattttgcaaaccagaagtccaacttcacctttgggaactctgacgcaatatccattttcatcacggacaggttcatctttctccacatcatatttaatcaggtcataagttatgatttttttctgtaggtagtttactcttccaacagcaccaacttatctcgcataattcataaatccaatattgccttcagtggcagcatagaactcatagatgcatatgtccccaaatctcttgacaaattgtctccacacatctcctcgtaagccatttcccagtgccagtctcactttatgatcacggtcatttggtttctgtggtgagttgcataaataccgaaccaa

SEQ ID NO: 120563 - DNA, 564 bp, Homo Sapiens
cagcagagctggaggtgctgtcaagagtttcagcagactcattggccagatgcaccgaactcaatgaggcatttagagatgagaaacgatctgtactgggatttcccagcagaagagactttggtttttgtcatcctgaagttgccactccaccaccagttttatagagggatattcgcttttcactggtagtttattcaggtagctataggtcttgtctttttggatagggcagttaattccactcttacaaccatcaggctcaggaatgggaaagggaactgggacgcccatcaggatgccatgcaccacggccttgctgcttttagactgaatattgctggtgaaggtgacattgacgctgtaagactgtcctttgctcagctggcagggttgggtggggcatgggctcacattcacttcctttataactccatccacagaaccgcagtccttgaactgcaccggttcggcctgggcagcggtgctgagcgccaggagcaggaatgtagctgccaggaaacgcatcgcggataacgaagttcccaacttttttgtacaaag

SEQ ID NO: 120564 - DNA, 894 bp, Homo Sapiens
caccaatcaccagagcttttgctcaggggtactttcaaatgccaggggttccattaggtagaaatctttccagtcagggccataggatatacggttcaggtaccagggggcagagagaagggcccggaagccggccttggtgaccagttccagctccttcatatagttcactggaatatcctctcgccacacctgtatgattgtgtctggctgaatctttactttattatcaaacacctcctgccacaccacatagcccttgccataagaagagacgatgtccagcagcgtctggatgtagaaggactccagctgcttgaagtcctcaccgaagcctttcttcctcataaagtcctggatctctgggttggacttccagcaggtgaaatcaacctcatctcctccaagatgaagataaaaatctgggaagacagagctgacttctaagaagaatgtgctcatgaactcataggtattattgagactgggattcactggtccaaaggtgccagagggctcagacccagagtagcaaggagtcagtaatccagggatacctggtccccaggacaaagtgtggccaggagtgtcaaactctgcaagcacacggataccccggagccgtgcgtattcaatgacctccttcacatcctgtgctgtgtagatgtgggtgacagggttgtaggacccctttctcatgagctctggaaaagtgaagctctcatatgggaaggaaggatcatctaccagatgccagtggaacacgttcaatttattgtacgccatgacatccagagtgtccaggatgctagagagtggcaggtaatggcgagatgtatccaacagcaagccccggtgaggaaagcggggaaagtcctcaccaacttttttgta

SEQ ID NO: 120565 - DNA, 891 bp, Homo Sapiens
tcctccccatcggcaatcacccagtggaagcctggctcagtccgcagctccagcttgtccaggcgctttttggtcagtgaagcgcagtcagcattgaagtccccaagcaggatcacgtccttgctctgccagtgctgggagacctccagaaacacatcgtagagggcgttcagctcttctctacggcttaggagtggtgtgcagcgggaccaacaccaggctgggaaggacattgctgggcaaagagaactgggccacaaatggctcccgggcaaagacgtcatcctcatcgttgtacacgtaggaactcaggacctgtgttttgtgtgaccgatagaagtacacatacgtctccatgtaggtgctgcgccccagctgggggctgctcagggtgctgtagggcccagagccatcaaatcgattgagttctcgaagcaggagggggatggcgctgccggaagagtccaccacctcctgcagcaccatgatgtcacagcgagccagtatccgaactaaggtgtccatcacctgctccctggccaccttggccagtgtcagccgctgggcattgaaggcgcagatgcgaaaggcctgggccccattggccaggatgaggaagaggagtgcagttgggtagtgcatggctgtgtgtggctgccggggacaccccaggaatccaggctgctccagggtgcgctctcactgggctcagttctggctctggaagcgctgctcagaccagcttgtcaccaagtctgcctcatccttaagtggatcgcgataccccagaagagcagctcctgcctgaatagggctaggaggggaaaaaaaagaggaagaggctgtgttcctgagccacccggccaggaagggcctggctgggcttgccaa

SEQ ID NO: 120566 - DNA, 926 bp, Homo Sapiens
  misc_feature (452)..(638): n is a, c, g, or t
  misc_feature (649)..(713): n is a, c, g, or t
  misc_feature (726)..(734): n is a, c, g, or t
tcagaaagtaaaggcggttaaagcaacacaaatttcaacatcacatccaggcgcggagcccccacagccagcccccacccacactccccatcccatgcccagggatggccggtcaccccctcatcataggtcaagacaactgctccctgattattgctgtgtccaaggaagcaggacagaaaactcccttcgtgtagaaacgtgtgaaggccgtgtgcttcaggacggtggctgtggttctgggcgctatagaggagatccagatcttggattctttcagtcccaagggcctgggggaataaactgtgactgtcccagccatgagatagtctgtggccatgtgacagtacggactgacacagactcgggtggcccctgatgatcctagggtacagctgcaattatattcaaccaggcaaaagggacccgtggtgttggaagtgaggacagtnnnnnnnnnnnnnnnnnnnnnnnnnnnnnnnnnnnnnnnnnnnnnnnnnnnnnnnnnnnnnnnnnnnnnnnnnnnnnnnnnnnnnnnnnnnnnnnnnnnnnnnnnnnnnnnnnnnnnnnnnnnnnnnnnnnnnnnnnnnnnnnnnnnnnnnnnnnnnnnnnnnnnnnnnnnnnnnnnnnnnnnnnnnctgcttgagcnnnnnnnnnnnnnnnnnnnnnnnnnnnnnnnnnnnnnnnnnnnnnnnnnnnnnnnnnnnnnnnnnagaccgtgtctcnnnnnnnnnggaggaagttaggccagtggaagcctcagaaggggagggaggagttgataggagcaggagggaagacttccagagggctggccatgttctgtttctcctgggtggcagctcgccacgcatgtgttttgcgacgacttgtacacctaggatgtgtgcactttccttgttttttcttttcttagagggagccaa

SEQ ID NO: 120567 - DNA, 861 bp, Homo Sapiens
ccaaccttgcccccaatacctgtccaacagctgcatccccactgcgggaaacaccaattctctatgtgactggagtgagcaggggagaggcaaccaactcaggagtcagatccctggccagactaaaagcgaacattcaggctataattttggggttaaaaaaatgttgtaggagggggggaaaacacaaatgagcacacaaaagtacccacaatatcttgcaactcattttacctgaacaaagataacaattctgattggcccaatttaagttacagattcatccctgcagatatagttttgagttgcacttgaagtacatcaaagagaggaaaatcatcgtggtgaatgtcctcgagtttccgcagacacctttgtggtcggcatggtcacgtgctcaccattcaacagcaatgcgaggatggacggcccgggctggggacgggccctctagaaactgtgccctgccaggctgctctccggcacacctcccgtctgctgctggaacacgtcgatggtgtcctcgtcctccatctccagctgtgctggagtgtcagtttcattgattggctgcccgtcgaacctgaatctgatctgcctcattgacaagccctgcctctcgcagtaggccttcatcagcttgctcagcggcgtgtgcctcttgatcttgaactgcaccacggagccgtcctgcccggccaccttcaggttgatgtggtcattctctgtcttcacaccctccttgggcttctcctcggacatggctgcgcgagcggcgcggggaggcggcgcgggggaagcagcgcggagcgggcgagtcacgctctcggccccgccgctcccaacttttttgtacaaagt

SEQ ID NO: 120568 - DNA, 929 bp, Homo Sapiens
tttaatacaatctatccatctagtaagctttctagactctggtgtctggagggaaatcaaccaaccaaccaatcagtcctctccaccccattcccaagagccagtgtcttatgtaggcccagtttagagtttttaattatttcagtctggaaggatatttcttgcatgctgtacacacagagatggtatgggaacacatatctccgccacttccaggaaagaacctgttattatgagaaggttgtttagaataattaggttctcaagttttcctgacatgtcagacttcctgagtatttgctgttaacaagaattccacctttccaggcccctccttaccttgacatccccaatctgatgcatggcacagggcaggctgcccatctgctcaagaaggacccggagttcagtcaaggtcagctgtggagtgtccatcctataggagccagaaggaacacctcgtaatgtcacatttcaaacaatttgagacttttaatatacttccttccctttcatatttcagtaatacccacaaaggtttttttctaagttcagcgatactgacaagttaagatttgaaaaaacacccgtaggcgtttgacagcagttaatagagactacagatatcaaagtcagagagtccagcttcctgagaaaacgttaacagtattaatctgctaccactatggctactaataccatgccaccacggtactacctggctagtaccattccacagaagaacagaaataaatacaaataggtggggcaagagaaaagaaacatgtgaaaaggcccctggatggtttaagttatattttcatcagtcatccagttaagagttaaagaatgaggaagagatgtaaaaacagccattaggattcagaagtagtagctttcacagtgccaacttttttgtacaaaagttg

SEQ ID NO: 120569 - DNA, 728 bp, Homo Sapiens
ttgggaggtggactcagccctcgggtggtgagaattgacctcagaggaattgggcggtggggattatccaggaggaatcaagcagcagggtcccagggctacagggaggggcggctgcccctggggaggcagaggggcggggctgggcccagcaatggccgtccgtcctgtccatccacccgcccgccagcgtcctctggctggacgtccacaacttccccggcacgtcccggcgcctctcagctctgggctgtcagagtggttatgtccgtgtcgcccacgtggaccagcggagtcgagaggttctgcagatgtggtcggtcctgcaggacggtcccatctcccgagtgattgtgttcagcctctcggccgccaaggagaccaaggacaggccactacaagatgagtacagcgtgctcgtggccagcatgttggagccagcagtggtgtatcgggacctgctgaaccggggtcttgaagaccagcttctcctgcccggcagtgaccagtttgacagcgtcctctgcagcctggtcaccgatgtggatttggatgggcggccagaagtcctggtggccacctatggacaggaactgctgtgttataagtaccggggcccacagtcggggcttcctgaggcccagcacgggttccatctgctgtggcagcggagcttctccagtcccctgctggccatggctcacgtggacctgaccggggatgggctg

SEQ ID NO: 120570 - DNA, 948 bp, Homo Sapiens
aaaaaaaagatgatgacaatgtaactactccagctgctgctgactttgggggctctagagaggcgatgaaaggaggaaggcaggcatgggctctttcagtgagggcccatgagcactcatactaaaagcaaacagcagcacctcctcaaaggggaaccaatatccctgactattttgttcccccaaagtaccatctgatggagagaagcctcccttgggggagcacactctcacttcagtgactgagctcagaaatgggcatccagctggtgggaggggagtgagtgtcctctctaaggaggcctctgagcatcagccaggccacccagcatacaaatataattcaggggaggggagctgagttcttcccttgccccatcaccttaagtgggatggggagaaaaaaacctaaaccacagtgactcccaaaaggagtctctgcctcagtggctcctagaactggcagggtccagctgactcagctccgactggtccagaagttcaaagtcatccccctcagcatcagtgtccaggtctgaactgggggaccggaggaagcctctcgttgctctctgggcaggtgctccagaagggcctggttgggaggcccctgacaaggccagctgaatcataccctgggagaccaggctggcaaggttgctggtgaggttggatcctacaggaagagcaccaagcaggagctccggcagcgcagcctcgtcccggctggcaggtggggcctggggctcctcagcccctggcggagaacggtacatcaagctgggcatgccaatgctagtgtcgtcctcatcatccaggccagcaggatccatattaatggaagggaagtctggaaggtctctggcaaaggattcctctggatcactgtgaccatctaggtcttcagagccttccgttagaggtgtttggccccccaacttttttgta

SEQ ID NO: 120571 - DNA, 918 bp, Homo Sapiens
gttgttgtttgctccgtacgagaaacaaaaaataaagttttctacattattttcagccttgggttatggtatagtttctttgtgtttgtcgtaatatgcacattgtccttctaggacctgtcacccccccatggagaaaagagtcttttggttctttttaacataagtgattagtttaagagtatgctgaggagccactgggcttaaagaaggatgtaaataagacccaaatacatagggaccaggcgctgcttttctcatgttcacaaaagcagtcctccaccactgaactccattctctcagggggctcaatgaaggctaaccaatccgatgcatgtgtaggtaacagtcccatggactggcacttgtaaacagccaatgccaaacccatcaggttcccaatgagatagaccaaaccctgaagaaacttctggcttgaactttctaacatcttgaaagtggctgaaatggccataagtgcctgaatgggtcgccaggccatcatacacaccatcatagtagggaagatggagatagtattgcctgccatgtacatgatgaagagattcatgggaatctgtttgaggggacccaaggcgatgtcccagcagcgcttctccaccaggatccggtctgtctcttgcacgctggtatcaggcacttgcttgtccaagtaaccgactgggtagagcgagtctccctggccactgccccggtcacttcgacccctgctgcctcctccaggcccgcttagctcaatggcccacttgaagcgccggcctcggttagccaccaggcccccctgggccgtcatggcaacagctgcgtcctatagcctcgatgcttctcagtccaaagcgtactccacaacaggcccaccagcgttctccgctttgtctcacccaacttttttgtac

SEQ ID NO: 120572 - DNA, 916 bp, Homo Sapiens
ctttgtacaaaaaagttgggaatccgcccgggctacgctcctccatcacgtggctctacttggttccttttctagcatgctgtctgaccaatttagaaaatttcaattgtctacaggcgttgtcagtctgttctctggggaggcagtaaggggccgtggagctggcctcggcctcggcatcgggagaggctggacttcctgtctctctgtgctgaatggctgcgatggcgcccgctctcactgacgcagcagctgaagcacaccatatccggttcaaactggctcccccatcctctaccttgtcccctggcagtgccgaaaataacggcaacgccaacatccttattgctgccaacggaaccaaaagaaaagccattgctgcagaggatcccagcctagatttccgaaataatcctaccaaggaagacttgggaaagctgcaaccactggtggcatcttatctctgctctgatgtaacatctgttccctcaaaggagtctttgaagttgcaaggggtcttcagcacgcagacagtccttaaatctcatcctctcttatctcagtcctatgaactccgagctgagctgttggggagacagccagttttggagttttccttagaaaatctgagaaccatgaatacgagtggtcagacagctctgccacaagcacctgtaaatgggttggctaagaaattgactaaaagttcaacacattctgatcatgacaattccacttccctcaatgggggaaaacgggctctcacttcatctgctcttcatgggggtgaaatgggaggatctgaatctggggacttgaagggggtatgaccaattgcactcttccacatagaagccttgatgtagaacacacaactttgtatagcgataatagcactgcaaacaaatcttctgtc

SEQ ID NO: 120573 - DNA, 833 bp, Homo Sapiens
ctaaaaaaaatagaagattagttaaagaaaaatgatttggtttttaaaaaataatgtaaggaaacactttaatcagatagccccaaggagtcatcagaaaatatgtgtagcaagaaaagcttcattttcggccctctctggcctttgcacatcttttactaaactagaaagagaatgtacagtactaatatgttccccaacctgcttggatcaaattgtttgtttttaaacccattattgctaaaccagagtgttgacactgagcgccgaggagtccactcatagaggataaaattgagaggctgcttccgaggactggatctccacctgggccattttgaactgagtgcactgcaaccactttcggagggctgccaggccagcactgctctggcccgagcccggcagcgtccttaggctgtggtggttcacgtggttctgaatagcctggaggcgaagctggagtcccgcagataagtgcttgatatttgactgaatcattggcaaccacataggtatcagcttgacaaaaatggtcgaattgcattcctgcaatgcctccattaaactaatcacatggagacacaccatttctaccatcactttgttatgggccattagctgaaggatgctgggtgtcaccctactccaaaattctagtgctgtcagtatcgccgtgaagctgaattcattctgattttggagatttgtagcgacggcactttgctcgcaataaactgtccacagctgagcaaagatgaacgcgtggaagagggagcacatgtgcagcacggaggtctttgattgctctggaaatccaacttttttgtaca

SEQ ID NO: 120574 - DNA, 703 bp, Homo Sapiens
  misc_feature (292)..(374): n is a, c, g, or t
tggacaggatcagcttgtactcttccaacgacaggccactgaagctggtgtctctgtggcgagggtactggtcaccggggcagaaaggaagtgaagggaggggagagatcagcacacaagccctgctctctaactgcatttcacctgggccctgggcaaccagaggccaggaggcctagcaaggagaagagcagcgccacctcgaggtcaagacttggcctcgcaagaaccagtacagtctccaggaggcagctccaactataatgtacccgtgagtcctccctggaaaacnnnnnnnnnnnnnnnnnnnnnnnnnnnnnnnnnnnnnnnnnnnnnnnnnnnnnnnnnnnnnnnnnnnnnnnnnnnnnnnnnnnagcagggaggatttagaaaaaatcaattttccacataggcatatggccacaaatgtttgtggagttaatgagcatatttttcaagtatgggaaaaaccactctaaatggaatttgacagtaatcatgttgggcccagctccgtaaaaggagggcactttcccaatcatcccatctttatcaccagaatgtggggaggtgtcagttccgtcagagtggatgggaaaataggtataaatccaatggctgtcagacattcccaggagcacacactggcatatcaaatacatggcttctattcataattggttttgtttccaacttttttgta

SEQ ID NO: 120575 - DNA, 921 bp, Homo Sapiens
actttgtacaaaaaagttgggctgaaagaatctactgttagaagaagatacagtgactttgaatggctgcgaagtgaattagaaagagagagcaaggtcgtagttcccccgctccctgggaaagcgtttttgcgtcagcttccttttagaggagatgatggaatatttgatgacaattttattgaggaaagaaaacaagggctggagcagtttataaacaaggtcgctggtcatcctctggcacagaacgaacgttgtcttcacatgtttttacaagatgaaataatagataaaagctatactccatctaaaataagacatgcctgaaatttggcaagaaggggcaaaaacgtgactattaatgattgataagcaccagtgaagaagttctaacttttagcatgctgcacagaaactggtataacatgccttcagtatactaacactcatatgctcagttttgttttgttttggcagttgacaagaagttaatttgctttagtaaaaatccctcattccagcctttctatataaatagctctttcttgctgttttaatgtggtgcacactatagcctcacaaacctgttattccagtgtaatctgcagtgtcgtaactaaagttactggcttggtcttatttgcacagtttttgcgtcttgtttgcttcttgcatctgattaactaaaatatttctctttcccccttttaatttgtgatgtcacttgaccccatttatgtgtaggagcactacaccattggtttccaaatactgcacacataaagatacataccttgtgtgcagaaagtatcttcctccaggcttgtaatacccttcacatggaggattaatgagggaaatctttataattctgtattaaaacaaaagcaaatttatatactaaaatcatttgtctaaaaa

SEQ ID NO: 120576 - DNA, 504 bp, Homo Sapiens
caagaaaggtgtgagtcccattttggtagctgaggaggagtttaagaaaacaagccattcctcagtatccctgggaaagaaggggtgagaggacacagatatcaccaggccctgggtgactgcattgctggggccatgcagggcctagctctccaccaagggaaaatgatgattttccttgtcatggtcctggccttgctcccatgctcgtcctccagttttcagaagtcgtccagttccaagaatggctccttcctttagttcactaacattttcacttaggggtgaaggccgcttaccctgtcgtagtgtcagggtgccaggggagttgtcatcctgcaggatggtgaggggggatctccctagtaccttgctgctgtttggtttccatctattgcgcatagaacctgaagatctgggagtctcagggtcccttgagggcttgtcggagctctggctggccacatgggtttctgtgggctgtcccaacttttttgtacaaag

SEQ ID NO: 120577 - DNA, 770 bp, Homo Sapiens
  misc_feature (706)..(722): n is a, c, g, or t
ctttgtacaaaaaagttggaaggaattggccattattattagcttatattattgagaacatggggatggtcaggtatctattcttgaattagatctgaagctggtcttgtttcctcatgttatcagtcactgacctgtgaactggtccatgtgtccacaatgtgggcagcaggtaagtgctgacattttgatggccacatcatatttcagggatctatgagaaggtctgtaatgaccatggaaagccagccaagaatctccttgccatggacaaatgggagaagttactaaatttagcggacattaagctgtaaattatttgaaaggtggaaaaggattctattcagagactatccagaatttccatttactaatcaggccttgtgctgtagaggctttcatcccaggaaaagtattgctttctctcttcctctttccccacacttttgttcctgttatagtgggaggatgattttcagctcttactataacatggacttcagtgcatgttgctattagatgccaagagcctcaggatgataaaatctgaggattctgattctgattctgctatttaaaaattagaatatgagctgagtttgaattttttaactacagaatgatagagacatatatgaaatacagtacatttttgctttttgaaaggaattgttatagtgatgttcacaaatcaccaaccttggcnnnnnnnnnnnnnnnnngtccctgtgagaaccggtgtaaatcaataagaaaagagcagatttccc

SEQ ID NO: 120578 - DNA, 946 bp, Homo Sapiens
actttgtacaaaaaagttggaagagaggccttacggattctcctctctctaggtgctgagccctcacctccctgttccaggctgagaactcaaatggttaccctgcttcttcctacaatgctgtgtgatatgggtgaacccagcccctgaccttcctctatcccctgcccatcctcccttttacctcctctcttttttaaacacctgtttatcccaacctttttgagctcaagctgtgataaagaagggcccatcctatttcccctcatctagtccatttacgattctcactgactccccgtcttcctggcagacacaaataaacccagtgtcaggtctaggaaattaatggctattcttccccagatacattctggcttatttgagatacatgattctcttagaatcctgtcccttggttcaggaaagtagcttggaaaaggagtaggggtatagcttgggtcccttttcctgcaaggccccatggggcagaatataataaatattctgagtgaggagtgtggtctttttctgatcttcctcagcttccgtaagttgcagagtgaggtatattaggagactagttctacacaatattgtaatgctgggttccatcaacacccaccttccacaactcagtctgcacctcagttggcaaaggagactggatggccatctttcctcatgttcccttgagtatttcaatgtagaaagcccttcaagtggtattatattttaaccttttacattattgttattaatgttagtaatatattgttatgttttctaaattatttttctttaagctgacgtggctttttttctgtggctcccagtgggtctactgaccttggctgacatatgttggtaggtactctggtcagctcagctggctgtcctggttcactcagaagatagtctctccaaagcaaattcacatgcatta

SEQ ID NO: 120579 - DNA, 935 bp, Homo Sapiens
cagtttggttaaggttgaaaattcgccaaaatgttttttggccacgttaatgaaagcttgctggataatttctgaccaaaaaagcaaaaaggagaagaagaagaaaacatcagtaaaatgcaagcagaaataaaactggttaaagacacagggaggatgactgatgatacactgacccattccaggagactgagttccctagacctgcaaaccgcgataggagagggtgggacatcattccagggccacacaatccagccctcatgcagcctgggcaggtcctgtccatttcccgtgcctgtgtgcatgttagcctctgactattccttacatcaggggtccccaactcccaggctggaccagttccagtccgtgtccggcaggaggtgtgcagtgagctagtgagcactgctgcctgagccccacctcttttcagatctgcggtggcactagattctcacaggagcacaaaccctgttgtgagctgcacgtgcgagggatctaggttgcgtgttccttatgagaatctaatgcctgacgatctgtcactgtctcccatcaccgctagatgggacagtctagttgcaggaagacaagctgagggctcccaccataatgaggattctatattttggtgagctgtgtaattatttcattatatattacaatgtaataataatagaaataaagggcacaataaatgcaatgcagttgactcatcctggagccatccttcttacccctcactggtctgtggaaaaattgtcttccatgaaagcagtctctggtgccataaagactggggaccgctgccttacgcggctgtgttggtggctgcgtgtgatacagatgaagtgcatgtgcaccctctgcctgccccccaaagacaagagaaaccatcttccccgcctcctccacgtgtttgaaggacccaa

SEQ ID NO: 120580 - DNA, 919 bp, Homo Sapiens
gagaggattcggacgagagtctgagctgtatagcagaccatgtcttgctgttctagggtcatgactgtgtgtactctaaagttgccactctcacaggggtcagtgatacccactgaacctggcaggaacagtcctgcagccagaatctgcaagcagcgcctgtatgcaacgtttagggccaaaggctgtctggtggggttgttcatcacagcataatggcctagtaggtcaaggatccagggtgtgaggggctcaaagccaggaaaacgaatcctcaagtccttcagtagtctgatgagaactttaactgtggactgagaagcattttcctcgaaccagcgggcatgtcggatggctgctaaggcactctgcaatactttgatatccaaatggagttctggatccagttttcgaagattgggtggcactgttgtaatgagaatcttcactgtagcatcagaagaactgatttcaaagccagtttcgttggtcagcatggttaaaacttcagaaggatcctgtgctcttaggctttccacgactttgttccccagggcagcaacagcttccaacgttggcagaatcttgagtatcaccaccaggtcagccacattgtgtcctgtagtcattgtcccctttttataggatcccacctgtcgaacttcttcaatttgcacttcaaatgtccctggagccacaatcagattatcaatcacattgtttatttttgtcaccagagaaaggatagatgcctgttcagcagaattgggagccaggtcctgattcctcttcagcaaggcctcactgaaggaagtttcatcaggtgctggcttgacccggggaaaggccatttcacacaaatagaagtcaaatgggatatgtggtacaaagggcctgaacccaacttttttgtacaaag

SEQ ID NO: 120581 - DNA, 874 bp, Homo Sapiens
tagtaacttagcttaaagatgatctgctggtggcctcagagtttgttttagccagagagtgctacaggttttgaacactatttcatctagtatatcattcattggggtaggcttcctagtcattagtcctatcttatacagctggccaaacaggtgctgaagggcaatgtcaacaacagaacccaggaatcctggttcaggtgtaagtaccgtatccactcagcaaggctcataatttagatttaattaacaatgtggacatctgtttagaataacaaggtaggaattcaaaacctagctgctggttatttacccattcaagtgaaaacagacagagggaggcacagttgcaaaagacctgatttcctttttaaaattgtctttcttctctacctacatgtagccagatgtcatagactaagtcaataactaaattcctcctgaagtgactggaacgctgagaagggaccggtctatctcagagtcactttggtgatgctggtgggtgtgacatctagcaatcagaacccagccaatgactcacaggagatcccacctgtactttgttagggatggtctccccaaggataatagaaactgattttaagataaaaataataaaattcttcaataaaaagcacaaaattcagtccaagagcagggggcttatgaaatgcacaaattaaagtattaagaattaaaataattaaattaaaaagctgaggccccagatttcaccctgatggttgaggtgtccagcattggaactggctgcaccatggttttgggactccatcaaggactgtggccaaaaacctgtgtggaatattgtagaaggaatttctccacatacagccaacttttttgtacaaag

SEQ ID NO: 120582 - DNA, 884 bp, Homo Sapiens
tcatttgattccctccattcaccaaatccatccctcctatcaccacgatttgggctttacaatcccatctccatacaggatgacttcacactgacaaatcactataatgtgtacaaacacataaagtatctgtggagtattagtttccacagaggcagaaaaagtgactttagcggaactgccacttgatattaggcagcatttcacagaaatctaaaagcagggccattttacaacagataaaactccaaactcaaacccttctctggaattgtccaggacaagcatctgacagcactcacttacccccatgactctgccgcgctgctgaacatcctcccacataaaatgaactatgatacgacacatgtacttcccactccggccttcctgcttcattcggactagacacatccagacgtggagtagggttataagaaaccatgaattgaatgtatcaggcatctgacaccttagaaagaattcctcgaagtcagttttctccacacagctagtatacatgcgcagggccgcaatcttaatcttccatttactgtatttcaaaggtcccgtgaatcccatggcttctattatctttgtgaaagcaccaaccttctcctcaacaggctgtggggaatctttggtagtagaaagcttacgtgtggtgtgatacttcctattcagctgtatgtctattccaggaatctgttctgatccaccacatgctcgggactggctcatctggggccactgggaagtgcgagacagagccctgtccccctgtccttgggtaggagacacaggtatcaatcggctgcatactggaacccactgagaaatgctagtctggttcctaaggactcgcaccagcaacgccatgccaa

SEQ ID NO: 120583 - DNA, 944 bp, Homo Sapiens
ggaaggtctgggcatgcagcatctgctggcgggtcctggctgagtgatcacatccatgaccctcttattggctgcctttgcagtactcggcccggtcccctttgtaaaggatgcaccatcccatccaccacctgcaccgtgtcgtccccctgcagctgcagggacacatcccccaccgcgtccaccagctccgtgaagaagtcggcaatctccgcacagtcctgcaggaacacgtagcggtcctggcggttggtgaagtaggagtcactcaggtttgcaccgctcaagatgacgctgttgtcgaagaggtacaccttaatgtgctggaggccgatggtctcgttgaagcgctcagggatgaggagccgaagcagcccacggaggtgcggcgtgtgaaagagggagactcggacctgctctgggaacctccgcaggagtgggagcagcattgtgcgggagttcttccggcctcgtgagccccgcgtgaagtctaagagaatggagaccttgagatttgaaggaaactttgcttggagtgacttttctagagtactttccaggcagtccaccagctcctgttccaaaggacctgtccccaggtagagggatgccatcacgacccgcctcttggctactcttatctgccccttcatgagctcgaaaaactctgccggggaagaaagcaccctaacgtgagaactggagactccaaattctggaaccaggtttctgatccactggaaccggtgcacgccttctggacacaggcagcaaggtggggaggtgacctggggaacagctggggacagcaagggagccaataacagccatggtgacctcctgcgctggcggtcccggttcctgccgaggcggtcggacaggcgtcccaggagcgcggccagccctgggcggccaggcaggaggcccagcagtcgcctccccaa

SEQ ID NO: 120584 - DNA, 975 bp, Homo Sapiens
tttgtacaaaaaagttggccgtccgcggcctctccagccccgggttcgcgctctcgactctcctgcctgcccagctgcgcggcggagcggagcgaggcgcggcctgcgagtccccggcagcccccgacccctccctcggcgctgcgtgtaggccgcgccctcaggcccagtccgcggtgccccggcgggtgatgccaaatacagccatgaagaaaaaggtgctgctgatggggaagagcgggtcggggaagaccagcatgaggtcgataatcttcgccaattacattgctcgcgacacccggcgcctgggggccaccattgacgtggaacactcccacgtccgattcctagggaacctggtgctgaacctgtgggactgtggcggtcaggacaccttcatggaaaattacttcaccagccagcgagacaatatcttccgtaacgtggaagttttgatttacgtgtttgacgtggagagccgcgaactggaaaaggacatgcattattaccagtcgtgtctggaggccatcctccagaactctcctgacgccaaaatcttctgcctggtgcacaaaatggatctggttcaggaggatcagcgtgacctgatttttaaagagcgagaggaagacctgaggcgtctgtctcgcccgctggagtgtgcttgttttcgaacgtccatctgggatgagacgctctacaaagcctggtccagcatcgtctaccagctgattcccaacgttcagcagctggagatgaacctcaggaattttgcccaaatcattgaggccgatgaagttctgctgttcgaaagagctacattcttggttatttcccactaccagtgcaaagagcagcgcgacgtccaccggtttgagaagatcagcaacatcatcaaacagttcaagctgagctgcagtaaattggccgcttccttcagagcatggaagttaggaattccaacttcgctgcttt

SEQ ID NO: 120585 - DNA, 901 bp, Homo Sapiens
cagagaaggtaatcatttacagagtacctgttatttccaggcattgttcaaagtgctttccaagagttttggtttgacagaactaaagaattttgatttttcttccagcaaacaaaagaaaacttaggttctttttattactctattctagtaagaacagaaaggttatcttttgcactttaattaacatcgcttaattccatggctatcaaagatgactcaattcctccgcagaattactatgtgactattagaaatctaaatgcctcccatgtcaattcatctagtgagaatttcctaattttaacgggaacacagcaggcttttacggtgattgctgattgggaagatctctttctcccttacggcgtcattcatgtcaaggcccggtctaacagaggaataaaacagtagaaaattacgatatcctcctgttacttttttttactaaggggtaatgaccaaacagtacttggatttcttttagaaaatgagtaaagcttccccgaaagcagagaacaattgggcagatttgagaaacacaaaggacatacgatgcttccctgctaccagctgggaaagttattagaattagcagaatcctcctgttccttccacacaagcgatagccacaataggaactccagtttccgtcacccccactccctgcccaggttacctgtggaagctgatgttaatgtgcttgttgtaggtagtggcacagcccgccgcagcgcaattggtcggcatttccctttcccactcattcagcgcccttaggtctctactgaggcgctggctgctaagctttcttctggcagaggctggacaatcgaggcaggcgtgccttaatcgtgagagcttagtcgtgagagcggagtgccaacttttttgtacaaag

SEQ ID NO: 120586 - DNA, 896 bp, Homo Sapiens
ttggctcagcaggaaccagctgggcaccatcagccgagaggccctgcagcccctggccagtctgcaagtcctgcgcctcacaggtacctcttcctcggaaagcgtctctgtctgggccacggtgttggcagtagggagcaggctcatgtgtggaggggctctgacatcaggcaactgggcagcagtctggaaggctgcaccaccgcctgcagccacactggagggctgcgggagtgggtgtgctggggaatacagctcaggcaccctgcctggggaaaacagaagacaggaactccacagggtgacttaacagaattgagggttctgcacacttttaggctgaggggaggcagacaaaattgcaaaggagagagacagctgaccaggactggggacattcccaagagagggcatccaaaggcaaggctgagaggacttgtgaggtttcagtgctggtgagatgtctatgtggacgcccaggttcctaaaaacagtggcacttgttgcaggaagacttaaggagcaggtgctttctcagagaccgacggagaagtgatctgtaacaggcaggcatcacagagctaaaggggaggggggcgagggtgaagggcctgccgccccaaggagcttggggtcaaggaaggggtggcagggccttggactccgtgtgaaaacgctgtgggaggtgggaaagaggcctctgtcctggcctgcaaaacccaactgcacaggctgttttagcagcaccctcaagccacctgcctaacgctgctctcccacagagaacccatggcgctgtgactgcgccctgcactggctgggtgcctggatcaaggagggcggccagcggctgctcacctccagggacaggaagatcatgtgtgcagagcccccgc

SEQ ID NO: 120587 - DNA, 925 bp, Homo Sapiens
tggtatggtgtgcactcatccaggatcatgaggccccactctgggtcttgagccactccatgactcgctcggctcccaggatttttggtggtgtggcccagcatggagtaggtgctaatggcaacggagcagccgatgggcttgtccttggcatcggaggtgaaccggcagatctggctgtcgtcaatggtggaccacatcttgaactgggctttccactgctccacagaaacagctgagttgcccagcaccagacagcgttttctgacagtgcatgcagcagtcacaccaaccagggactttccagcaccgcagggaagaacaatgacccccgaacgtgcacgcccgtttccaaacatctttcgcaagctcttctcctgatagggtctgaggacagctgtgggctttaggtcaatgttgatatcagggttgacagaatcattccggaagtcatattctgccaacagagggtactccaggtggatgcaacgtttctggagttcctcaatcatttcctgcttgacttcaaaagacactgtctgtgtctcttcttcttcttcttcatccttgtccatttgctcatagaagtcaaacaggtccatggggatgtcagatttaccctgtggatctgtcactcgggaagtggagggcccaccactgctttcagcagtcttagaaatggcagatttgcttgtgaaagtctctgtgatgagctcagtggcctccccttcagagtttcttaagcggcattctcggatcacggggtcctggagaagatgctggattacatcagggtggcaactttcaacgaagtatctgttgtgcttcaagaccagcttgacttttccatagctgacagtacacaacttaataaactgcataattccatcagggactccagtcttgcccaacttttttgtacaaa

SEQ ID NO: 120588 - DNA, 907 bp, Homo Sapiens
acagctattgctcagaccctctggaggaggggccaggggttagctggctttgaatagcatgtagagcacaggcagtgtggccacaaatgtcacacaggtgaccagggtgctatagatggtgttctgttgacttgggcttctagtctctgctccgtgtctgacagtgccaagatcatgctcccctgctccagcaagaagctgggcatagccccgtctgctggttccaccaggcctgggtgtgctgcagactttacaagctgaaccaccccagccatttggctacaagtcttttctaggccatcaagctgctctcgtaagccttctagacatgaatggacttgcctggaatgactaagctgctctttcaaggcagctgaaaggacatctacatctctgtctctggtcgggggactacctgcctgtgacccagagtcctgccctggcccagcagcatgtaccaggcccctcaggtccaccatgagattgtggaggtccctctgctggcgggagtagctagacgcctgttctcgaatggcctcttggagactcacaggccccttctgcgcctccaggagtaaagccttcagctcctgtagtcgcacacggttcacataggtggagccagccacaccaatcagggcccccaggactgagccaatgagggaccagttcttggtcctctcagcccttgtgcgctccttctcatgactttcccgcacagctgcagagaagagggagaacttctctcgctcagagtcttctgcacgcagataggctgtgcgaagcctcttctcctcctgcagcatcctgtgctcgagagtagccagttccaagtactgactgtcctccctggagacacggtccaagcggtccctcacctccttcagcccaacttttttgtacaaag

SEQ ID NO: 120589 - DNA, 887 bp, Homo Sapiens
ggatcaataaagctcccgtgatgtgggggaattagctcaagtggtagagcgcttgcttagcatgcaagaggtagtgggatcgatgcccacattctccaaactttattatttagaccctgggtctccaaacactcaggtctccaaacccaagtcagagaacaggatgctgctttggttcaagatgtaggagcagcaacaatacagggctggtgacggctccctcctggcattcagtatagtgtagatctaccgtgtaattaattttctgcttctttgaggagctgtgaaaccaagggacataaacaattgctcttttctccctgtttctgcctgtagcttgaatgtgaggcaactgtgaaaagtgcagggcagagccacctgggtaaatacagccctggctttctggtgagaggactgaaaccaggatgtgtcaagtaactagaatgtgcctggacagatactgtagaaagcaaacccataaagttgttcatgagcttgtggacgcacctgccagctgtgaataagtgggtctaatcccaaacaacttacctaaaaagagcctgaggactgaactaaacaatggtccgctttccagtcctcactgaccactggttgcacacactccagagatctctcatccgcagtgtcaaggctttcaaatagagttatctgggcatgtctaggcaggtcctcctttgctaggacgtgcccttttctgtcccggaatactctaaacttggcattttggcagcgtgaagttttcccgttgtgactttctccttgttcccttttctcctccttctttgcagacaatgagtagccactgctgtttgccctggcccatcaatgagaagatctgctcttagagccctgctttcctgctccaa

SEQ ID NO: 120590 - DNA, 967 bp, Homo Sapiens
actttgtacaaaaaagttgggttgttctttgtcagtgctgtcaagtgtgtgccagggtgatccatggtcactttccgggatggcagcaaggtgacttcggctgaggatgaccctgactgaaaggctgcgtgagaagatatctcgggccttctacaaccatgggctcctctgtgcatcctatcccatccccatcatcctcttcacagggttctgcatcttagcctgctgctacccactgctgaaactccccttgccaggaacaggacctgtggaattcaccacccctgtgaaggattactcgcccccacctgtggactctgaccgcaaacaaggagagcctactgagcagcctgagtggtatgtgggtgccccggtggcttatgtccagcagatatttgtgaagtcctcagtgtttccctggcacaagaacctcctggcagtagatgtatttcgttcacctttgtcccgggcattccaactggtggaggagatccggaaccacgtgctgagagacagctctgggatcaggagcttggaggagttgtgtctgcaagtgaccgacctgctgccaggccttaggaagctcaggaacctactccctgagcatggatgcctgctgctgtcccctgggaacttctggcagaatgactgggaacgcttccatgctgatcctgacatcattgggaccatccaccagcacgagcctaaaaccctgcagacttcagccacactcaaagacttgttatttggtgttcctgggaagtacagcggggtgagcctctacaccaggaagaggatggtctcctacaccatcaccctggtcttccagcactaccatgccaagttcctgggcagcctgcgtgcccgcctgatgcttctgcaccccagccccaactgcagccttcgggcggagagcctggtccacgtgcacttcaaggagagattggtgtcgctgagctcatccccc

SEQ ID NO: 120591 - DNA, 800 bp, Homo Sapiens
tgttccagctgattccacatctttaatctcttcctaatccctctccctaacccctctgtcctgtcgctcttgcatttcttgccacctgcctcctaccttgtttccccagtgccagtccctccctttcatcaacctacactgcttctttctgaaagatctggagcaatctttctgagaagcataactgatcatgttactactctgctcagaactcctcaatggcttctcattgcccttaggaaaaagtctggactctctggcttgacattcaagaccttttataatctgattccttctcaagctaaccctcccgtacaaacacatgggcaccacaggcaggccatagcgaactgctgcacacagtcccccagccacctgctgaataccttctccccctgacccatctcaggcctcctcccataagcccacaagctatccagtacccagcctttatcacagcacctgtaacacattactgcccttaaatgggacctgggtctttttggaacagaagagagtagaaggcaaacatcacagatgtaccagggtgctacactttattgcaggtgtcttaggagagaaaaaaaggtagaaaaaggagaaagcatgaataagaagagggccaggaccctagtggtgccagagccatagtcacagggccaaacgccctataccacccaggcctggacaaagcctcctcagttccagattttgaggaagctgtcccaggaacctgtggccacagccatcccgtcagctgtgactcccaggcagctcaccctgttatcgtggccagagag

SEQ ID NO: 120592 - DNA, 568 bp, Homo Sapiens
aaaaaatttatttcatataaatctcatatggtacaaaagtattacatgcttgggcctgtcttgcaaaataagaggttctttcagttcttcaggccaaccttccttcagaggcaaataaataagaaacatgtagaacatatttagaaaattttttaccataataaaaatatgtgaacatcttatatttagcatagtttagcaatccagtttatgtcgacaaatttagttcactgctgggaggcacatgtcacagaagaacctaataggcagcagatattttaacctgtaggaacaaaatgtttaacatttttcttgtattttttgaagaaggtactccatttgtacattcaagtttggttggccctttttagtctttttgttcagtattttaaacacttccattttcttctttttgtactgcctttgggcttcttctctctcctgttttctcctctcgaattcttgtttcttagcagcacgtttggcttgtatctgttcatattcttcttgtgccaacttttttgtacaaagttggcttttatagaaaaagcattgctcatcaatttgt

SEQ ID NO: 120593 - DNA, 801 bp, Homo Sapiens
ctttgtacaaaaaagttggagagctcagagccacccacagccgcagccatgctgtgcctcctgctcaccctgggcgtggccctggtctgtggtgtcccggccatggacatcccccagaccaagcaggacctggagctcccaaagttggcagggacctggcactccatggccatggcgaccaacaacatctccctcatggcgacactgaaggcccctctgagggtccacatcacctcactgttgcccacccccgaggacaacctggagatcgttctgcacagatgggagaacaacagctgtgttgagaagaaggtccttggagagaagactgagaatccaaagaagttcaagatcaactatacggtggcgaacgaggccacgctgctcgatactgactacgacaatttcctgtttctctgcctacaggacaccaccacccccatccagagcatgatgtgccagtacctggccagagtcctggtggaggacgatgagatcatgcagggattcatcagggctttcaggcccctgcccaggcacctatggtacttgctggacttgaaacagatggaagagccgtgccgtttctaggtgagctcctgcctggtcctgcctcctggctcacctccgcctccaggaagaccagactcccacccttccacacctccagagcagtgggacttccttctgccctttcatagaataaccacagctcagaagacgatgacgtggtcatctgtgtctccatccccctcctgctgccaccctgcaccacagccatggggaggctgctcctggggg

SEQ ID NO: 120594 - DNA, 915 bp, Homo Sapiens
actttgtacaaaaaagttggattcctcggctgaccccacaatgtcgcaggagcaagggccggggtcctccacgcctcccagttctccgacacttcttgacgctctgctccagaacctttacgactttggaggtacagaaggtgaaacagaacagaagaagatcataaagaaaagggaaaacaagaagagagatgtgatggcttcagcggccttggcagcagagccatctcccctacctggttctctcataagaggccagaggaagagcgcttcgagcttcttcaaggaacttagagaagagcggcattgtgctccttctgggacccccacaggaccagagatccttgctgctgcagttcctccctcttccctaaagaacaatagggaacaagtagaagtggtagaatttcacagcaataaaaaaagaaaattgacgccagatcataacaagaacacaaaggtaatgagttggttagcttatatatacgtggtgaaccccctggtattgtagtattaggtgaatagctctttagactgtggcaggaatgcctgactatcctcaggcctgcagatttgccaaaaggactcacaggacccaagactcagcatatagcccttatcagtcatgtaggcctacagactgaccttagttattcaagttctagacctccagtgaaaagcaggtattcaccatcaatcacattgctagtataaactgtctgggaaaacttggtacagcagtggctcaagacctcaggtatgcaaaaacactctgatcaggcagaatattctaattgctcaattctcacgaggcagccaactgccagtcatgaaaataggactttcttgggaatgtgcaggtttggtaaacacaggcctgctgagttaactcttacagcaactctttctggcatt

SEQ ID NO: 120595 - DNA, 732 bp, Homo Sapiens
gtttgtctgtttaccttgttggacagtttctatttatataaggttgttggctacttctgactggttgagcttcatttctcttttttcaatatgcagctacaagaaataatttaagttttgtttgtatttgcaaatcaagcgaggttgagatcacttatgagacctaactaattttgtctgctcagagattattgagacatgatctccattttaatttcctttaacaaattttctgtacttttactttccatccaaacagtaacttataaattattattgttgtacatatgtaggcccatgttgtgtatgctttgaagacctgtcctgcattcaaactcatttgtattatgttattattgaatttgccccatttattggaattataaactgcaatcccccaactacaagaggtatgagctctgatgagataagagtaaagatgaatcagaagtgaaaacagtcctccaacccacacatgcagtaaaaacaaatttcacatgaatacaatgagtaattatctaaaatttaaagtaccctgaaaacattaatgtttatctcattattatgtaatatggaaattacaaggcaaaaaaatccaaagacttactgtttaaatataattgaagttttttatatgatgaagtgctccataatttaaatgtaaaaagccaataggaaatatatgaaataaaataaaatgtatacgtaaaagtgccaacttttttgtacaaa

SEQ ID NO: 120596 - DNA, 744 bp, Homo Sapiens
tatttcacagtgcctaacctggaagcctgtgaggaacaggcctcaggctcttgccatgacctaattaggctacaatttcctttaaggcagcccctagctctgggaaggaatactggtagccagtggccagtgttcgccgtgggatcaccttctggccctccagcagcatgatggcacgctgtcgcccaaagacagcttgcaccacagcgctggggagagggatgaaggctcggcggcccagggcagcaccgaaggtctgggcaaactcagcattagtggcggaggatggagccactccattcaggaccccgtgcacgtggtttgcttcaagggcatgggtcaggattcctgccaggtccccgatgtgtatccaggggaagaattggtggcctgagccgatggggccccccaggcccaggcgaaagggcagcagcatgtggcccatggcaccacccccacggcccagcacaacccctgagcgcaccaccacctggcgtgtagaatctccaggaagcctggctgcagcttcccatttggttacgaggttggagaaaaagtcaaagtcccctcctgggctgtcttcatcatactccgcagtcagactgggctggtagtaagcttcggagagggttgaggatgttctctccggccaggttgacggcggcatcgcagctcggcagccccgatgcagcgagctcatcctgtcggagaggagcacacagtgcccaacttttttgtacaaag

SEQ ID NO: 120597 - DNA, 908 bp, Homo Sapiens
tcagcactgcaactttgtacttctctcaccaaatgtcgagtgaagctgccactttaaatctttttttgtaagtcttacaaacattaagtactgcacataacgcttcttgacaagtgttacacctctatatggtacaagtgaccacagtaactacagagtgacactgctgggtgcagtacttcctttttatttagaaaaatgactgcattttctaaaagctgggccaatagcacataccttatatatgttagtgactaccatgatatgagaaaagacgtggacaagtgctccccaaggattccggagacggaagcacttgctgcaggctgcaacatcagccaaggtatttccacaagctcctgctctggggaaacagttatggtcaaaaggtgaagtgcaaataaggggctgtcactgacttaaagtgccctaggtagtagccttccctatcataaagtgagatgccagtgactagagccaattggggaagaatctctctctggtgcggctgcatggtcagcagggcatcatgtagaaaaggattcaggagagggaggaaccactgcatctttcaaaccagaaagcaattagtgactaaagcaacagtaagcagtaggtgcactgaagtacatactgccgcaggtcaccaatgggtgacacacacagggctgccaggaggaattctctggactgaagaaattctttgaaagcataaaagccacaactaccagaaaccgcccctccaaacggctcaaaggagtcaaagtggataagccaagacgggctggagacaggaccaggggtcaagaactgggaagaagaacaccgatgtctgagcacgtccagtcctctgagcccttgtcctgacaaatttaagatctgtatcctgggtggaatctagcagccaa

SEQ ID NO: 120598 - DNA, 874 bp, Homo Sapiens
tcccgctccgactcccacttgatcttcgagatggcttctggtgggactgatgctcactccgaaggtccccagccttgattttatctgcttggatcatattgctcagagcctcgtccactgcttcttggccgttttcaggtccgcaatttcctgtaagagcttaaggcgctctgtgtcaaacagtttccgggcctcctcccgggcctcaatggtgagcgctgtccttactttgtcactgctgccgtcgcggagagcacagagagcagacttgagcctctggatctctccatcacgtaccttcaccgtccttgacatttcctgctcgtgctgcttgataaggttctccctcacagcctgcagctccttcatcttctcctcatggagcttggctttgagttctgtcaccagcaccgtgtgcttgcgctgctccagctcacgaatcctcttcgcttcttgagtcttctctctttcaagctttgataccttggacttctcttgatgcagctctatctgaatgtctgtgagcttggtcctgaggtcttcattggcagcttgaagggcaacaatgagtgcctcgggcttctcgcccttatttcgccctttcttggacattgttcctttctaaatggagtctgttggtttttaatttctttcaagcaggtgctgccatgttactgtttcttatcctggagtacgatgtctcagcatctactgtgtggtgctccttggtaaggtctcctcaatcgctgccctggaagcccatgctgagacccggagaagctgtttaaaggagggagagatgcaaactgaatccattttccttgtgaccgagtcggatgcagcctccgaacccaacatcagcagtggctgccgg

SEQ ID NO: 120599 - DNA, 987 bp, Homo Sapiens
gggtttcctttcaaacgcagaactgattaaaatcagaggtgtattcacctcctccggtggaagaggccccgtgacttcctgtttcagacatgccatggtcaccacaaagaaccagcaaatgggtaaaggcgtctctctctccttcgactgcagtgaggtgtggatcttcatcagcacgctgtccatctcgctcagcttctgcccaatcagggggctgttgggccctgaaatgtggccaatgtggtccagccccaggtagtggaggattaatatgtcccaatctcctctttttaatactttatccaaatgcctcgtgacattattatccacctctgtgtaatctgacacgaaaaatgaggttgttccatcatattccacaaaatgctttgggaataatttaacccaggtttcatctccataaaagactattctttttccagctgcttttgcttgtcttatcacactgtcttccagcagtgcaggagaattgaggttcctgatgacgtcgacaaagccaggaaggctccccgtcatcaatgccttgattcgaggcatagtaactgtaggtggctttgcttcagccacaaaactgtgagatgctcctttttccacaaggtaagttgtgtagggcataaatttcacaccctttgacccaaacacaaaatcatctctcaaggcatctatcagaacaataacaactttactgaagagaggtggtggcagcgtggtccagttagaactggctccagccgagggttcgggcgctgggggctccgctccgtgttccgctctggcagaggaacgaacgggagccgggaagaatccccgaaggaagaccgcgatccctagcacctcgatcgctacgcaacaggtagcgaaagtcccggagcccagccgcatcgtggacacgctaggctggatgcggaaccgaccccacctggagcctcgccctggggcagccgcgcttccaacttttttgtacaaagt

SEQ ID NO: 120600 - DNA, 696 bp, Homo Sapiens
aactttgtacaaaaaagttggtctgtgtattgaagtataaatgagtcccacttaagaaaaaacaaaacaaaccaacttccaatgatttaaaaatactaacgtgaccctcttacgtttacctaaagctagtgtttctcaaacatcagctgtatcagaatccctgaaggacttgttaaaacaaattgctggtctctactctgagcttctgattcattaaatgtgggatggtacctgagaatctgcatttctaacacgttcccaggtgaccctgatgctgttgctctgagaaccactttgagatccacatctctaagctcatcagtctgtccgttacaccttacaagacatactttcctaatctgacacccttctatttgtctttttttggaatgctttagaaatttagcagttatcttttttatgtattttacatttgttacagctttccttggtggacagatatgagttttctacttgaaaataaacacgtttttctttaaaatatcattaaataagagtgtaattagtgatataaagcaagatgactaaaaagaatctcattattatgtttgcacagcctgtatacaaattatttgaactagaaaggatttgctaaataaattatttctatttccctcacttaatagtgaatattatggtgattaggggaaaaaataagctttcttttttcttttg

SEQ ID NO: 120601 - DNA, 871 bp, Homo Sapiens
ttcagcccaggaatcaatgccctctgcccaagggaccaagttcactgtataattctggctttggctggacccctctcccagggtggaggcttggggggtgcctttctctgcctcagacatcatgggtaaggggccctccttcaggttccggaccccaacctagatccccagttgctctggtgagctggcctctccccggtgcaggcagtgctctggccatgcctgtcgtctcacctgaagaagccaaggaccccaaggcggtactggactgtaaccacgaccacatccccataggcagccagagctgatccatcgtaggaggtggcagcgccagttatcagagcgcctccatggacccataccatgacctgcagaggtggccatggggcactgacccccaagctcctgagaccttagctgcccacctgccagcccaggcagtctcaggaccgctagggtgctttggaaacagggacggggaggggacaggtaggcatagtggagctggatcaggtggacagggccctctggggtgcctaccggcctaccggaccctgcggggacctcagctgggctatagacgttgaggaccaggcagtcctctgaaacggagaagatctgctgttttccgttgaggacaaatctgctgctgttcatgctctccacgtcttgtaggcacctgccggcctcgcacacgacccagggtggtgtctacttcaggctgagcaacttcgggcccagtggctgtggcagggcatgccaggagcagacagaccaccccgaccaggaccccggactccactctcactgctctctccattctccttacaactggttcgacagaagcttcagaaggtggaataagatccaa

SEQ ID NO: 120602 - DNA, 544 bp, Homo Sapiens
aactttgtacaaaaaagttggctttcttgtacaaagttgtgcggccgggggacaactttgtacaaaaaagttggcccgtcagcccctggcggtgggaggtgagagcgagtggtttaagtgcctgattaccaccacccgcccccccctttgtccagctgggacacggaatggccgcgggcctcctccccctcccctccagcctctccaccagcccctccagtcaaccctcatcgccgtgcccccccagagctagagagatggggcccctgcgtggcccgaggggcagagctgggcgtcacttcgcaagcgtcctgccctgccggggcgcgggggtgggctctggggaagccggtgcgccccccacgcctccgctgccagtgccttacattctggagcgacccccctccctggtgcctcccagcgaagggggaccgccgtttgcactttcatcgcctaccccgacgcggggcccagctgcgggacgtgcatcacggctgggcccccagaggacataggaggccaacgccagcgatccccgctcgga

SEQ ID NO: 120603 - DNA, 918 bp, Homo Sapiens
cccccacctcgccccaaagcctaccctccttgccgcgttcctccttgcgctccacgcacgcaaccaattgcaaacatctcccgactctttgcagtttgcaaagtgcgctgtgagcttttccatctcagatctagggttctgatgcgcctttttgtgggggttggggtttattcttttcacccttgacttaaaaaataaaacctacaaagcagcacccgtactatcaaaaacttacctgggaggcggcggcggtgggtggactgccgaaggagtccaccgaagacagatattgagactcggcagagggtgaggagctgcaccgggagccggagtcgtagtctccggggaaagcctgaaacatttccctgggcacaggggggcccctgtgaccacgctgaggtcgccgggaagccaaggctatggccgggttggggaagtaaggtgcaagtccggggtgagccgtgggagtccccggtgagctgagcgagtcctcaaagtacgctgtccggggaagctcggggaaggagcaacgtcccgttccaacaatggcaaagtttctgtgcagtcttcctgcggtgcccaggcccccacaggatgccgctgtacctcttgaaagtgcaggctccgtaggacccaggggcgagggaggggttgctcccccaggggcagaaagcgctgtcccgctgtacagaatcagcttcagctacggtctcctccacgcgtccggcgggtcccacggggggaggggagtaataaagaagaccaaaaaaagtaagtcggtcctccaaaagaaaatgaagaaatatctggaagaatctttccaaaaactttctccccggaaaaaaaagattaatgaaatttcataacccccaagaagaaccacaacaatcaagtttccaagtcttggttccgcgccaa

SEQ ID NO: 120604 - DNA, 899 bp, Homo Sapiens
actttgtacaaaaaagttggctgagccacggagacagccctgtgtccacctccacccctctcccggagaagaccctggcttccttcagcacccagtggagcctggatcggagccgtaccccccggggactagatgatgaactggacaccggggatgccaagttcttccagacagtggaagcagtcgaaggacttcaacccactgacactgtacttcagagagaaggagatggagaaagagtaccgactctctgcaatccccgccttcaaatactatgaagcctgcaccttcctggtttttctctccaacttcatcatccagatgctagtgacaaacaggcccccagctctggccatcacgtatagcatcaccttcctcctcttcctcctcatcctttttgtctgcttctcagaggacctgatgaggtgtgtcctgaaaggccccaagatgctgcactggctgcctgcactgtctggcctggtggccacacgaccaggactgagaatagccttgggcaccgccaccatcctccttgtctttgccatggccattaccagcctgttcttcttcccaacatcatcagactgccctttccaagctcccaatgtgtcctccatgatttccaacctctcctgggagctccctgggtctctgcctctcatcagtgtcccatactccatgcactgctgcacgctgggcttcctctcctgctccctctttctgcacatgagcttcgagctgaagctgctgctgctcctgctgtggctggcggcatcctgctccctcttcctgcactcccatgcctggctgtcggaatgcctcatcgtccgcctctatctgggccccttggactccaggcccggagtgctgaagagcccaaactgatgggtgctatctcc

SEQ ID NO: 120605 - DNA, 425 bp, Homo Sapiens
ttttcagccttcagactcaatctacaccattgacctccaactcttaggctctgaattaaccaccagctttctgagtctccagcttgcagacagcagattgtgggacttctcagcctccatactcacgtgaaccaataccgtataataaatctcttcatatgcagtcatgcattgtttaacaatgaggatacattctgaaacacgcattgttaggcaattaagtcattgtgtggacatcatagaacgcacttaaacaagcctataggctttgtggtgtagcctgttgctcctgggctacaaacctatacagcacgatactgtactgaacactctaggcaatgtaacacaatggtaagtatttgtgtatctaaacatagaaaaggcacagtaaggctgggcgcagtggctcatgcctgtaatcccag

SEQ ID NO: 120606 - DNA, 920 bp, Homo Sapiens
ggggattccactcacagcatggacgaggcagcaccagcatgaactaggaaaggcaatgtaaaataaccaatccctgcatagagatccaccagcacttctccagcacaggacaacgatgccactcgaagcttctcagtgatgtttccaaaggagaacatacactgggtcacgtcaaacttataacggataccattatccacatgctctacccagccatggtcacccagcagcagtgtcactgctggagttcgagtaccatccggtgatacccgccctcgttttgccaaacgctggacgccaagtgccaaggcaacggtctcccagagttccggtcccagatttttccactgcttggcttggaaacagtcttcactcagcaacaagagattaccatgccgttgccatgatcggggcaaatcagcctccaactcggctgaccacttgactccccgaccctccacccagcgactcacctcaagacacaatttttgggcaggtgaacaaccctgggccctcttcgaaggaacaggatccgggagctgcgtgagcatacagggactgcctggggcaacacgattcctcagctcctgcaggtgctgctctggaagcgtctctcccagcaccggtagcgccaccgagccatccggcatcttttccacacggtgctgtgtatcaaagagtttctgcctctggagatattctctgtatcgctgggtaaaccaaggctcagtcacaactgcgacaacagccacgggcttcccactttctctctccatgttgctaacaaccacattctctctcatcacctcagcgatactccatctcctcagagtcggctcaccaggctgactaaattcccggtcttaaataaggtagcctgcagctcacccggccatgccggccaacttttttgtacaaag

SEQ ID NO: 120607 - DNA, 989 bp, Homo Sapiens
ctttgtacaaaaaagttgggatggagcaggaatggatccaagtgatgctgccagtgtgatccagtttgggaagtcggccaagcgaacacctgagtctactcagattgggcagtacgggaatgggttaaaatcgggctcaatgcgcattgggaaggattttatcctgttcaccaagaaggaagacaccatgacgtgcctcttcctgtctcgcacgtttcatgaggaagaaggcattgatgaagtgatagtcccactgcccacctggaatgctcggacccgggaacctgtcacagacaatgtagagaaatttgccattgagacagaactcatctataagtactctccattccgcactgaggaggaagtgatgacccagtttatgaagattcctggggacagcggaacattggtgatcatcttcaatctcaaactcatggataatggagagccagaactagacataatctcaaatccaagagatatccagatggcagagacgtccccagagggcacgaagccagagcggcgctcgttccgtgcctatgccgctgtgctctatattgatccccggatgaggatcttcatccatgggcacaaggtgcagaccaagaggctctcctgctgcctgtacaagcccaggatgtacaagtacacgtcaagccgtttcaagacccgtgcggagcaggaggtgaagaaagcagagcacgtagcaaggattgctgaagagaagcgcgggaggcagagagcaaagctcggacattagaagtacgcctaggtggagacctcacgcgggactccagggtgatgttgcgacaggtccagaacagagccatcactctgcgcagagaagccgatgtcaagaagaggatcaaggaggccaagcagcgagcacttaaagaacctaggaactgaattttgttttggtgtcaacattgaacaccgggatctggatggcatgttcatctacaactgtagccgactgatcaaaa

SEQ ID NO: 120608 - DNA, 907 bp, Homo Sapiens
gagtggtaagtattgccagctaagggaaagaaagttggatatgttctcacccaaaaactccttcacctcttcaatttgtcaaggcttttgatgaccaggtcgtgggcttgggcttgtgtccaccacttctttccgtagtctatggtactgctggtaatcccggtcaaagctgctgtgattcccaactccatcccaggttccaagagtacaaggctgcctccctctgtgaagggtgccagacccatgccgacgagggtcaggatgccagaggaaatgctgagagagccagacaccacattggcgatggtggtgcctttgtggaccttctgaaccccatctgcaagggcacggagccttcttatgttatcctcaagcttacttttcaaccgaggaaactctttcagaaaccagtttctgtactgctggcctttatcgtgccagtttttgtctttcatgatcatttgtcttgcaaggttgtccagagctttacggagctcatctgcctcattcctgggcagttcagcagcagccacgaatccgttccaggcctcattatcagtcagcaggagtagcagattctgtgtgctcactttttccttgaaatacttaatggcatcctcaataaagatactgctctctgggtccatggtgccagcagcccagtcaccgaggggcttactttgaggatctccagtatctgtcccacttggaacgttttgttgcaccctcgctccagcttcctctgccctcactcccacaccaaggaaaagtgcactcatccagatgcagaggacagagactctcagcaaagcagctccctccatgtcgctgcagggcctcctccaaggaatcttcccctggcagagactgagcaagatccagctgttctgagctgtgtggatcccaa

SEQ ID NO: 120609 - DNA, 468 bp, Homo Sapiens
aatcagaagcgtgctgggagcttgggggtcctgggcgaggagggagccggacgcaaaatcctcaggtcctgggggaagatggactgtgggcaatgctgaaggtcagtgtgacgtgatgcagcctggctggaatgttccacaggcatctccagcttaatttggtcaaaacggaatgcctgatttccccttaaatactccctttcgaccacctcagtcatggcaccgtcattcaccagctgcggcggctctcagcaagtccttttggctcctctttcaagactcctagcgtggcccaacgttctccacctccacagccacgccatcctgcaccgcacagcttcctctcacctccccgctcgcctccaaattattctccctgaagcagccaggggcccctcctgcaacctcaatccaaacacgtcaggcccctgcctcctgcccttgcacgccaacttttttgtacaaagt

SEQ ID NO: 120610 - DNA, 885 bp, Homo Sapiens
ccataggaatataaggctgcatctctatacccatttgaatggagatttctccaattgcccatgtggcattgttgcagactgaaatgaattctggatttaggttggttcccaatattggcatgaaatcagctatacaaggcttaacatgctgaaagcaagcttttgtgaggtcacctaacagggcaaaagaactctgtcgaacttctggcattttatcctgcatgcactgatacattagtgtcaggatgttacttcgggctaccagctgttcaatgttgcctccaagtccttcagccaggccactcagtaaatcaagagccactatcataaaatctttatctggagcttcatattgatctggttgagcattgtttagcatggcttgtgcaagagtcttctgtactaggtttacacaacgctgatacacaggttcacagtacggaaggaatccagactgcagtgctgtggcaactgaagataggcactcaagtaaagggaagagatctttatcttcatcctttaacatgttccatttctggatcagtggaggcattagcatctgaatatattctggtttgtttaaatgatgtcctactgaatctgctaatgttcctatggcatcgtaaagaatgagcaggttcttatgctggtatttactaaatgcaaagaccagggtatcaagtatataagcaaggtaaggaacaagttctgtacaagcctcctcttctagggtagcaaaggcactgcaggcagcttcttgtactctcttgttgctatccaggatgcgctttagcaattctgtcattaatggcttcaggtacgtgtctggcggctggctgaccacccagtgtgcatagcggctaagccaacttttttgtacaaagt

SEQ ID NO: 120611 - DNA, 938 bp, Homo Sapiens
ttctttctccatcccttccgaggtgaagggtggggatggccactgtcgggctggttggcctccttccggttgaaaacttaatattgacccgttttgaggctgctaggtgatagcttatgcctgtggtgggagtggttcccagggctgggggctctgaaagtggccccaagacaggtttggagtgcctgtccctctcttcagcctgtccctctttaaggccaggtgtggcacacaccttcacggggtttgcagcagcagaagtggaaggagcagcacagtccaggcaagtgggaagaggcgtggggcagcactgtgaccgatgctatgtagaacccgcacctctgggtcatctgctgcaagtctcttctcctgtggattgtcatgggcctgaggactgtgagtgattttgccactgacagtcaccttcaacctcaagcagcggtcttcatgctggtggatgggtttggagatgtagtagtagctgtgtccttctttgaactccttgcccagggtgaaaggtgtgaagcgctggaacttctcagacagcttctccgggccatgcttggcactgggccggttgcactgccagcggacttggtccttggactggggctggcacagctggtactcctcatgctccaccaggtacagtatgtactgctccatggcagcgtctgccacagagtgatcttcatagtgcggacagatgatgtccacgtagtcattcagctgcacatgtatggtgtagtcctcattccggaacttgggatttgaactgttccagaagacggtgtggcgatcagcagcggccagactgcagcacagacccaagagaggggcccagaggaactccatagcgcggggcctggccaggccgagcggggacgcgggtctcctatgggtttgggttcccactggcccaacttttttgtacaaag

SEQ ID NO: 120612 - DNA, 892 bp, Homo Sapiens
ttgtgggagtaacattagctgcctggtctgagaagatactgggaattatatgctggtgactgactataatatactgaagggcccagtagttgcaactgttagtggagccccatgaaatgtctgtgacccctgatatccatcaggcaccgagtctggtccataattctctgtgggccaacgatgacgggatgctgacttactgctatttagtttcaactcctgcatttctttcttaatggcctctacttgttggcaaatcatattcagtaaagaattccgatcttctgtccatcgaggtggtgtttcgggagaatacttgtaacttttacttggtgatagtgaatatttggtaggagacggtgtagaatgttttatttctgaatctgcatttcgcaaagaaccatttttatagagaggacctccttcactatagtcttcgagttcctgcatgactgaattaagcatctgttttacagactccaggggcacaggcaatttcttgaccactgaaagatttgaatcaccgtcatctataatctttattaggtagtccctggtctttgtcagataatttctgcattcttcttgttcttcaggagaaagggcatcattttcaatgtcttctgccttcctgtgaaaaatcagtgcaagattccaataagaaacaacactttttatagattcaaaagcagtcacagcatcttctatatttccatttactgcatccaacatagcaaaagttatgtgtgcgtcttcttcatattcaacaatttctgatgcctgaatgtctacactatgaaaatgtttaaacagaggatcaataggttcaggaatactgttcttctttattatcttcaacaatggcaaaactttcttccaataatgaacccaa

SEQ ID NO: 120613 - DNA, 943 bp, Homo Sapiens
ttggggcaaaacctggaaagaaatcccctccttctacaagtaaaaatacttcttaggtcggtgtgatagcattatgggaaagtacttaatgtactttattcttaaggtttcattagcatattgctttcaaggtatttttttagtatcgtctacatccacatcccattaattcatctccaatcttaattcatactgcccttgccttttttccctttttggggtgttaaggtcatgcttgcccatcccactcttacagaacctcattctcattctccatattttttcaaagaccacaggaaagctgtttcactattcttatagtctctcagcactctgagacataatttatttgagccaggagatctgaattcacttgggtaccattagatgcattctttccccagttcattctcttctgactttaattcgttttcatcagtacttggtccactcactttgcaaaatatgaactggaaagctgagccttctctaagcagttaccccagcagcataatggttggctcagctcttccttgcccaagtgattgctctgaacctaattgtaaatgcctgtttgttgggaccctcttctgagggattaaaatccattgccttccgcaacacctcttaaaattcttttaacagtccaaagagaaatctctcactagaaaatggctttgaaaccagtatgggtcatattttattataatttaatgttacattgattagaaatgaagcattttcagggaattctatttatgttggtaataggtagatcaatggatggacaaagttctttaaaaatccttatggattattctcaaaaaagactcccagtgaaactatactgggtttgggggttaattttctcttctcatttgtgattatcacttcttgagagttttgcaactttcagaaagcatctttccttttggagtcatcc

SEQ ID NO: 120614 - DNA, 899 bp, Homo Sapiens
gggtggagtacacacttctcaatgagcagctgttccgagctgtacagctttttttgatgactcggaagccagtgctcagcgtcagggactggcgaagccagggaggaagggagagtggcggagctaaacagcccctggatcttgggccagagtcgtgagtccaggcgcagcacgagggtcagctggaaggtgggcaccaggctggggtcgagtgccagctggcccacgctgtggcagctcttgcctgctccacgcagacgtccagcagcgccccccgcaggccgcacggctcgctgtaggccaggcgcagtagttctttgcccacctggcttaccaactggctaggcatcagcaggcgcgcagggcgtcgagagcccagccgcgcctgggccaggctctcctgcagcagctgcatcaggttggcacacaagtgttcatcctcagggtcactgagcagctcgaagtcgggcaacgacaccccatccaggtaagccgtgtcttcctccggcccgaagccactgttgctgctgtccagggactcgcagtccgagctctccaggctcgtggagcggtcaaacccctcctcccgggtcgccgacccccaggctgagcgcggcggccgatctggggtgggagttcggggcaaggacgagggcgaagaggaggtggacgacgacgagaagcggtcccaaaggctaggcatggtgaggacagacgccagggcgtttgctgatgaactcagagtgccggagcgtagaagccgcagctagcgcggtcagcgagaactgctaagacaagtgcgtcctgccgcttgaatgggtgtgcgaacccgtgccaaccaccgagagccgcccagacccgtcccaggtccacgctcgcaccaacttttttgtacaaag

SEQ ID NO: 120615 - DNA, 728 bp, Homo Sapiens
ccttttaaagtcatctctataggaaggtgctgggcagggatcccagagaaagaaagggtccaagactccattaactgccctggatgaagggcactgctacagcagctagtaccagagactctcctatctcacggttgaggcagacccaggatagaatagagaataaaaggaatgcttataggaaacaattttgtatggaatgctagatggccaagcctcagcctttggtccagtgcaacccttgcctcgcttgtcaacagtgaaaaattagtttggttagaagaaccatctggaaacacaccagcttctgctaccttcatgctcattgttaaaaaaagattaaccagtgtgaacattctgatctgttaattccagggactgttttctttccaatggactgtttgttggtagaataacccccaaaagctcaaagctaaaatgcatcatcagtcctagtcggcagttccttaagaatggactggcggcgtggttgagctgatatggaaaagctgcaccttcctgcagaagatcaactgacctgctatcccaccccaaatttcagcctgaggtatatttcagtgaaggcaggtagctgtgcttctcagagcagagaagcagttttaagagcaaaaaggtagaggaaatctagaaaagaaccgtcttgatacagatttatcccatggtgtgaagggagggcaaagaacccagccaacttttttgtacaaagt

SEQ ID NO: 120616 - DNA, 592 bp, Homo Sapiens
ttggtctttctataaaaacagaatagagcagttacctaccagttaaaatatcttatatgaagaaaatagaataaagatccagtcatatatgtaaataagatgtactgattgtacgtaaatgaaaaatggaccctttaaaaattatttttacctgaagcttgtcataatttttttaaagcaaatatatatatggtgatggtacttttcaaagtgtgtattagtggtgatcacctcaaacataaacctctgttgtgaatcatttgtgtccttttcaactgtctttcagaggaaaggtaaaaaatcattaaacctgaaattcattgttaaaatcaaatatttgtcagcagtaactcaagctcatggttctcaagcagaaaaaggtttgggagactaaaaatggagtcaggttgtcatggagactgctaactccttggggtagacatgggccttgcctcagcaaaccagtgcaatttcccaatgtcttagtttcagaattcatgctgatttcattatggagtaaagttttaaattgtggctgctgctttttgtcttacattgaagggaaatatccttgtttgagcattctacttga

SEQ ID NO: 120617 - DNA, 682 bp, Homo Sapiens
gagcatgtcaaaaaatacagttctagtccttatacgagtagttccagccatttaaaagttatacagagtttggaaaaagcagtttatatacaagtcttaaaacacaacaatcatgaacaatgcacaccgttcaatgtagttattgctagttatatgcagcttttagttaccattgttcttctctgtaagggaaaggacagcatttggacattctgattgttgctgctgaagctgtggttttggaaaatcaatccaaaataagaataagctcactatgagtagaataaaacgtgtaagtttcaatcagtactacaagaaagcatggtttaaatttgagttccatacaattctacataactctattttgttactataacagaaatacagtgtatagttttgggcaagagtaaatgaattactggttttataattaagtgaaaagaaacagtttttggttgcaatgtagaaacaaagctggcatatctagcttacaaacattaaaaaatggaaaagatatttaatgtttaagcaaaagctgaacctaggttatttacctttagaaattaagagataaagttaagcattttgttcttttgaggattatcatgaagatttgctattctctattttcttttttaaaaagaagagccaacttttttgtacaaagttggcttttttaaag

SEQ ID NO: 120618 - DNA, 915 bp, Homo Sapiens
ttgggatcctgagctgaccgggtagccatggccttgcggctcctgaagctggcagcgacgtccgcgtccgcccgggtcgtggcggcgggcgcccagcgcgtgagaggaattcatagcagtgtgcagtgcaagctgcgctatggaatgtggcatttcctacttggggataaagcaagcaaaagactgacagaacgcagcagagtgataactgtagatggcaatatatgtactggaaaaggcaaacttgcaaaagaaatagcagagaaactaggcttcaagcactttcctgaagcggggattcattatccagacagtaccacaggagatgggaagcccctcgccaccgactataatggcaactgtagtttggagaaattttacgatgatccgagaagcaatgatggcaacagttaccgcctgcagtcctggttgtacagcagtcgcctgctgcagtactcagatgccttggagcacttgctgaccacaggacaaggtgttgtgttggagcgctccatcttcagtgactttgtgttcctggaggcgatgtacaaccagggattcatccgaaagcagtgtgtggaccactacaacgaggtgaagagcgtcaccatctgcgattacctgcccccccacctggtgatttacatcgatgtgcccgttccagaggtccagaggcggattcagaagaaaggagatccacatgaaatgaagatcacctctgcctatctacaggacattgagaatgcctataagaaaacctttctccctgagatgagtgaaaaatgtgaggttttacagtattctgcaagggaagctcaagattcaaaaagtggtagaggacattgaatacctgaagttcgataaagggcgtggctcaagcaagacatcgcactttataccacctgcgattactgg

SEQ ID NO: 120619 - DNA, 925 bp, Homo Sapiens
ttctagccccaaactgctggaaaggaaataaaaacttaatatgaaaactacttttcctttttataaataaagttttaagtgaaaaaacaaagccaacactcctcgttgcaacatggactaagctctaaaaggttgagtcaagaatctcttcagttgttccccaatgtaacaaagcacataagctttctctattcaggaagtctgatcatctccagtgttttgtcttaaaaactgctttccaaaatatgaagtagccatgctggttaaatgctttctgctgcgcaccttacacctgatgtaaccatacaggttggcaccttgtagcaccacacccatgataaccaccgccaaccactttactctgaaggagaagagtgcactaaaggcaaatatcacccacagtactggacaggcaataagtcccaaccaaaagattcttgattcagcctctgacacagttttattctcttgagaggactcctttctagattcaaacacccaatggctctttccatcttcatcaatgtgattccaccaacgtaggccaaccattagtctacctgtgacattcttcactgcccaaaagtcacacgacaacaacaagataattgtcaccatacaggtaataaagctgctgctgagcaactcacagagaagatagacgatgattgcactgactcgaaagaataagtggaaaaacgatgctactggatgtctgattttggcttttcttggtctattagtcgtctcctcttccgcatcaaacagtgaaacatcttcagtgtcatcattactatcctgctgcaacatggcggccctacgccagccctacttccgggagccacgtcagcgcagcagcgtacgggtccgggtcggaactgaggcgacccgtcaccaagggccagcccaacttttttgtacaaag

SEQ ID NO: 120620 - DNA, 931 bp, Homo Sapiens
actttgtacaaaaaagttggagatgttcatagtggcctctgaggatcttttgtatttctgtatggtcagtggtaacatcacttttgtcatttcttattgtgctgatttaaatctactctcttttgttcattagtagtcttgctaaaagtctatttaccttatttgtcctttcaaataaccaactttttgtttcaatgattctttgtatgaatttttgggtctcaattttattcagttctgctctatcacctctattttaaaagtaaaaacattcctgcttttattcctaagcatgacttattttaaaattccaataaaaatttaatttatcattgaatgtccaaatcttctgccttctctttaatatgaaatttggggaaagatacatttcttctgatttaacaacattcttcatacctaaagtcaaaagggaaaactttgctttgtatttttctgtgtcttcttttatagtgttttcacaatgtcgttggtggccaaattattgtgcttgaaattttgtgtttggttaacacaagcatacaaaagagggagtttaatgtttagtgtctgattattactattatttattaaaattttttgcctactttttgtcatgctggcagtatctccatctcaatttgcatatggggagccaagtttgaaaactaattccttcgaaaggaagaatgtttcaatattatgggaatccagtttatccatatttacaagcttaacttattctacttttactactccatctaatttgcatctttgatattcactgtggctgtagtcagaataattttctcttattaatgtgcaggcctcaattactggtaagcaacaggtattggttcaatcacaagtgttttagatccaaacagaagaccttaaggccaaagttttgtgctttgaccattcccatgagccc

SEQ ID NO: 120621 - DNA, 689 bp, Homo Sapiens
gttcctgcatgcgctgtcgccccgccacggtgctctccgcaggggtgaggcaggagggtgggtggaggcgccagcttgtcttcagctggaagggcggggcatggacagggacggtgggcaggtcaccagcgggacgcagggagcccggccactgtcacacggcggtgcgcgtgggtgtgccgggctggttcagccgcagggttttacacaaccagccggcaaaatccacttcttccacctcggaccgcttgatgaaggtgtggtttgtgagcatcttcaggtccgcccgctccgctgggttcttgatgaggcatttattgacaaactcctggaagtcgggggtgaacacaccgttgggcagcttaggaggtggctcgttcacaatatagtccaggagttcaaagatggccatggcaggccggctatccatcccgtgaccgctgacggggcgcccggggggcctcggccgaggcgagatgctgtgaggctctccttcttccccgtcgaccacgggccggccaaagatggcctccagctctttggcgtcgggcggggggatggggtaccttccgacggccagctccaccagggacaggcccatgctccagatgtccgactgcaccgagtaatgtgtgccctgcaaccgctccggagccatgtaggagcgcgtgccaactttgtacaaaaaa

SEQ ID NO: 120622 - DNA, 532 bp, Homo Sapiens
ttttgttttccaaagttacaagagaaaagtggcctacaactatctgaagaggtaggggcgggtgaacttccatgatacagagaggaaacgacatgaagatgaccagccaggtcctattccatccatacagcacagaaccacccaactgagctggcaactacagtggcagcctccgagctagagtgtctactgaattgtggctgcccctactccaagaagcctgtcttcacaatactttcctcacccaacgctgccccaaattagtggaatttgatgtcaaaagcagacttttttttcctgattttgccagagtgagtgaactgggaaaactgctctttggcttctcttttgtcccagagcctcctaaatcaatgctgcgaaatggtagggacaacactggagtgaagaaaccaagccaccccatggctgtcccaggttggctttagccacatcctgttcagtatcctcctcacttcatactagaatattagttaatttttcattataaaactctgccgggtgcggtggctca

SEQ ID NO: 120623 - DNA, 807 bp, Homo Sapiens
tttattcttattggacgaaatttgttaaagacagactcattacagtgttgagacagtagtgagtagcacagtatggagactgctcaggactttgaggtccttgttccctctatagaagtatcaagtgtttgtaaaaaggtttaagcacccatgtgacagaaagaagccatcatcctcttaatttctcttggttttacttaatatatagaagggcaaactagtgggcctctgagtgcaagatgaggacttcattagaataaagacattgcctcctggatttctaacccatagctccaagagcctcagtgtcagaacataggtaagggacttgatttactgagagaccctaccctacaacatcctgtggacattagagctctgtgctcctgtcactgagtatcactgtgagcttaaaatatgtcagctgctccatttctctttccttttgtgtattcagagctctgattttaaaacactgaaatctggaagattccagtagctgcactctgtctaaagcatatgaggaatgactgtagaatttgcatgtcctctatagcttttgttcacatgtatgcaggcagggataatgttattgattgttcaacctatttaccttgcccaggggttgttagtaatgcccaatatgaatcaagttggcacaagtgtgatcagatgatcaggtcttgtctctttacactgcaccaccaatgcttcagcactgcctccctttgccttaaggactgggagtgcgatgctgtgaatgggatggaaggggttattcacatgtgcccaacttttttgtacaaa

SEQ ID NO: 120624 - DNA, 931 bp, Homo Sapiens
cctccccagccttggtacctgctgtgccaagtgctctggtgactgtaggattggaccccttgcttctgtgcctcaaatttctcaggcaatgagattggggacaggaccatctcccagcccgtttcactctagaaactaccctctcaagcccaggatatgtggcagcccaggcatggactctgaagccaggccaccaggctcagaaccctagcactaacacacactagctgaagagccttgagcaatgccctaacctttctgtctgcaaagtgggaataatagcagcacctaatctatggggatattgtgaggaccaaaagactttatacatgtcaggtaccctctgcttcctggttctgaatcctcccatgccttaagatccttttcctcagtttttcttttagccctttcccccaccccagcagccacacaggccccaacctgtgcccctcacattcaaatactgccggttggagaagatccttccacagccagggaagtcacaaggcatcagctctcttttggcagctttcctaattctcttggggccaatttgtgcagtgtcctcatcccaggccggggttggagcagactgggcctgactcccagtgctacgggcagcaaagagggagcagagggcctcgagggagggccacatcccaggacgcccctgccctttctgtctcagccatcaggttacctggccagggcctcagtctgctgggccgcttgaggggtcctgctgagctgtggctgcaccctgacttctgcaggtggaggagctctggaactcaatgaggatgctgacaaggccggcacagcaagaggactggagagtgctgcaggggctggtggtgtctccccctctttaggtgtgcagtgtcctcatcccaggccggggttggagcagacccaacttttttgtacaaag

SEQ ID NO: 120625 - DNA, 607 bp, Homo Sapiens
tgtcccttatcttttcattcagcacatgctgtatgcagctaccccattcctcttaatgggtagatagtattccaattatggaactgttacagtttagtcatttccccatagatgaaaatttaagttaccagtttttcaccatgataaatagaggggcaatgaacacccctatgcataactcttcgtgtaattgtgactatgtttccataggaaaattttctggtggttaaaattctgagacacaatgcatgtcaatttaattttcacaaatattaacaaatcacctttcaaaatgtacatcaatatcttacactcataccaataatgtgtgagagtaactgtttatctcccacatctcttacactagttatatggaattcatttttaaatctttcaggatctacacagcattttgagatatccatataggttttcttggcaaaaaataaaagcttaatccttggtgaattgaatgttaaaacaatgcaaatccatatgtataactcagagggcttatcctaacaatgatgcattggtaacagataatgtatgtaaatgtgcttttcatattataaagtgctattcagatattattttcatgcatgga

SEQ ID NO: 120626 - DNA, 910 bp, Homo Sapiens
ttggcttaatttatgttataggtgaaaatcgtcaggtatcccaggacctaatgcaaaaattggaatcattgatccttaaatatatagatttgatcaatttggaggaggttggtaccatctgtttggggttctttaaatcaagtactaatctctctgaatttgtcatgcggaaaattggagacttggcttgtgctaacattcagcatctgagtagtcgctccttagtgaatattgttaaaatgttccgtttcactcacgtggatcacatcaatttcatgaagcagattggagagatagctcctcagcgaattccttccctgggagttcaaggtgtcatgcacctgactctttactgctcggccttacgcttcctgaatgaaggagtaatgaatgcagtggctgcgtctttgcctcctagagtggcacactgtcgaagtaaagatgttgccaagattctgtggtcatttggaactctgaattataagccacccaatgcagaagaattttactccagcctgataagtgagattcacagaaagatgcctgaattcaaccagtacccagaacacctgcccacctgcctgctgggcctggcatttttggagtactttccagtagagttaattgatttcgctctcagtccagggtttgtcaggttagctcaggagagaactaagtttgacctccttaaggaactatataccctcgatggtacagttggcattgagtgtccagattacagaggcaatcgtcttagtactcaccttcagcaagaggggtctgaattgctgtggtatttagcagagaaggatatgaattcaaagcctgaattcttagaaactgtctttttactggagaccatgctgggggggccccagtacgtcaagcaccatatgattttggcctcata

SEQ ID NO: 120627 - DNA, 922 bp, Homo Sapiens
actttgtacaaaaaagttggagcagtgtcactgcgtgggttggtttgtgtagagaggcgtgagcgagcccgttgtccggagtgcacctgctgcctgttctgtccctcccgggagcccccgccgctgtcgccgtcgagtcgccatggaagtgcagaaagaggcacagcgcatcatgaccctgtcggtgtggaagatgtatcactcccgcatgcagcgcggtggcctgcggctgcaccggagtctgcagctgtcgctggtcatgcgcagcgcccgggagctctacctctcggccaaggtggaggccctcgagcccgaggtgtcgttgccggccgccctcccctctgaccctcgcctgcacccgccccgagaagccgagtccacggccgagacagcgacccccgacggtgagcacccgtttccggagccaatggacacgcaggaggcgccgacagccgaggagacctccgcctgctgtgccccgcgccccgccaaagtcagccgcaaacgacgcagcagcagcctgagcgacggcggggacgctggactggtcccgagcaagaaagcccgtctggaagaaaaggaagaagaggagggagcgtcatccgaagtcgccgatcgcctgcagccccctccggcgcaagcggagggcgcctttcccaacctggcccgcgtcctgcagaggcgcttctccggcctcctgaactgcagccccgcggcccctccgactgcgccgcccgcgtgcgaggcaaagcccgcttgccgcccggcggacagcatgctcaacgtgctcgtgcgggccgtggtggccttctgaggacccgagcggcgctgccggagcccagagcgcgcgtcgaaccgtcgcccgagggcgcagacctgagcgaggcacccccttcatcctgggggaagcgcccgcgaaaac

SEQ ID NO: 120628 - DNA, 878 bp, Homo Sapiens
gaactccacctcatctccttgcctgtagctcaatgccatctgaacttctttcacatgggaaaagagcttcttgctatctccttacttcatagttaatgaagccaaactgatctttcacacaattccactgtggccctgcgcaggggtgtgatgttgtaagccatagttgtgcattttgggcccaggacacacaattggaacttgacgctctccccttttctgcaggcaatcccctttgttggccatcccaacgatgccaaatggatagacctcacctttcatatcgccctcctccacaatctcaatcattccttggtactcagtctgtgttggatcaacactcctcagggggcgaattactttgccagagtaaatggtgggatcagcttcctcagtaatgccattcactgagtgtgttttgttcactttttctgcactgactttgttgcctttgcctttggacaagctatactcgaccatgtcccccagttccaggctatcaacatcaccagagaactcactgtaatggaaaaagatttccttatcatgattggctgtttcaataaatccaaaattatccttcagagttgccacataacccaagagcctcttggagttagaattacgacctaaaagtcgcacacaagttgcaacctgctgtccaggcctctgtttgtcactaatactaaattcaaccttatctcctatttgaggagaagtagatccttccacatccttggcttgaaaagcaatagtcagtttcaccccacagtcatcataagcaataatgccatcctcagcctccttctctttgcctttatttgggctagtggttttaggattggaaaaagtggcttctccaacttttttgtacaaag

SEQ ID NO: 120629 - DNA, 831 bp, Homo Sapiens
taaagatttgatgatccagcttccccaagactgctttagaggaagttctaggacaccaccaagactggtgagctctagcttctctttatgtggcgagcaattaacaatatttaatgagaaaaatgaattttgataattatgcctagcagtagcatactgggtcacatgatattccaatcaactctatctatagtcttactgctgcagagagcatcttttgaaaaaggcagaaagaatcttgtctgttgaagatgtctggtggcgtctcctttcctacactggtttctttctaccaagcaaactgttggtacccaacccagagctgtctttgtgcattctcacctttctaaccacctcattctccccacaagttccctggggagttgctaagtcattttaattccatgacttccttcacctttatctagtacctgaagagtatgctgaatctgtggggatggtactttcctaattcttcaagaaaaacctaaagccatctttcagttaaatcatcttaacgtacttgaggatacacattctcactctcttatccataaacaacttcatttttcttccacttcaagcacgaaatctgattttaatccagcaccttgttggagattcctcggatttttaaagtagcatgccctgggcatatatttgatataaaataaacatcatgaatagtattagttttcatttaaaaatatatataaaggtgcattaattgccagttttaacttaatgataagttctctgtatgtatgaagtgttaagagattttcttaattgattatcataataaacactttaatccaaatttacaaatga

SEQ ID NO: 120630 - DNA, 145 bp, Homo Sapiens
gacagccaccgaactgtaaaccaattaaattgggagtagaactggaagagtgtgatttattaccttgtttatagcctgaatgtcttacaaaatgggtcccaactcaaactttacctttttaccatttagtgtcaccaactttttt

SEQ ID NO: 120631 - DNA, 936 bp, Homo Sapiens
tttcaaacagaacactaaagagaaaagttgaagctgcaatgtgtgttaaggcagagcccagcagatccgtgtccacccatgtgccaataagacaatgggcaaagctacaaatggcaagagaaaaatgggactattaatgcgtgtggaaaaggccttaatagttaagttacagctaagaatgtcatgtcttgggttagaattttcatttttagcaccgttaatgtattcacttaaatctatgttagcaccttgtctccaggcagaacaacaaaccatccaaacattttaaacattgggggaaacacgaaggggagggttaaagagagaatccggtactgtggaaggagtggatttagatcacaagatccttgtcgatatccttctgcttgatgccgaagcagccggcccactcatccagggcgatgtacttgtcattgtccaggtcacaggtctcgaaaaagcgggtggtgcaatgctccatggggatgaggggagcacgcagtggagccagctcggtgtgggagaggtacccgtcaatggggtgctggtccagctggccgaactgccagtgtacagggaagatgtacatgttatagttcttctcgaagtcccgggccagcagctccacggggtggtctcctgcctccaggcgcttctcattctcatggatcttcttcacccgcagcttctgcttctcagtcagaaggttgttgtcctcatccctctcatacagggtgaccaggacgttcttgagccagtcccgcatgcgcagggggaattcggtcagctcagagtccaggcaaggggggatgtatttgcaaggcccgatgtagtccaggtggagcttgtggcccttcttggtgccctccagggtgcactttgtggcaaagaagtggcaggaagagtcgaaggtcttgttgtcattgctgcacccaa

SEQ ID NO: 120632 - DNA, 799 bp, Homo Sapiens
gtggctcatcatagcccaaacaacccatattcgtggagttggttaatatttatcataagtgatgtaaaggtcataagttctggtttgcaaaatagcatcttcaccgccagcatcagtttggctttacaagcttctactattttccttgtatctagggtagcctcatctgtttccaacaatccactctcttcatattcttccatatctgcagcttctccttcatcttcatcttcttcctcttcacatagtgctgagcaatcttgaagccttatattgtccttattttccagtgtgatctctttaacggcttccgttattcctgtaatacctgtgttgtgatatgtatctacccatccgccatcaccatcatcttcttcaatgatagcttccaattcatctgaatattccatctgtttgcaccgcttatagcacggcacatttttggttaccaaaaattgtttgcctgttggtaggtatgccttcactttcaattcttcccctgtagcccattgccatgttggacagtggtgggctaggtgatctccagctgccacaaactcttctggggtaattacacctgtttccttaaactttgattccttgaggaccggggtcaggtactcagccacttccagtgcctttcccttcacagtattaatcacattctgcatcctggggccggagtagcggccggccccgcgacgggatggaaagtgcagccgtgtcaggggccagggagtcagaaaatgtcctcgctgccaccgactcgcatcagcacccggctggcagcacccgaggg

SEQ ID NO: 120633 - DNA, 929 bp, Homo Sapiens
aaatggagatgagccagggcaaacttatggaaaaccaggaatttaaccttaacttacctagttacttaagtacacatcaaaacccaggcagctaaatcaggagctcctaacgtagggcccaggaagcaaaagagtacagaaactacatacaaaagccaaagtttaggtaaacattgtgtactcatagctttcccaaccaaaactgggattggctggcaggttaaggggggatttgtaatgaaaaatagcaaaggaatggtaaccaggataactaggtcaccaacgagctaaagacacataatcaacaaaagggtatactaagtaatgaaaccaaggaaaagttctgccaaggcaccaaaacagtagatgaggaaaggacagaacctactcctagtcagtctgatagctaggtaaaattatcaaggcaacctttattttaggttatcaaacttagacaaagtaaagcctggtaagcctttctactccagagagcagaaatggcaagactcaaaaggaagcagtattacagtaagtcactatatggcatgaatcaaaggtgaagctttcagataaaatcacaagagatttccttgtgtgatacatcttcagagtattctggacattcttgaaaggacagtagaggattattctaaattacagctcaaaacactttagaagatagttttgtggtttacaacataatggagaaaatttggatgatcctttgatgctcagggaaaacatttataatgtaacacagaatagacaaattaaggtttgaggtttaacacagaaggaaaggctaactcatccagtaaaatgagttcaggtctctaggccccagacgactctagaaacgttcaaatgacttcaaagccattataaaacatggtggggtgacatgaaatccaacttttttgtacaaagtt

SEQ ID NO: 120634 - DNA, 549 bp, Homo Sapiens
  misc_feature (81)..(94): n is a, c, g, or t
ttttttcagaaggataaaatgtcattcaagaatggggggaggtggttagagggagtaggtattatccttttaaatgggggnnnnnnnnnnnnnngcaacaggttggcatcttaagaacacagacagtgggcccagaaatcaagctaagcctaagccttaggtaacatcatgccacttacatcatctcagagaaactagggcattattccactagaagagcaatcttgccacagtgtgaaaacgttgagtagtgatcttgctgccccagctaatggaccaagtggcctcaacttgacagcctctttaaaactcaatgtttgcctaatcaaagatcatctggctaaactgctcccccacttctgcttagctactttggaagcacaaaagttacccctttccatccttggcccttccctggttggtacatctagttatgagatagacgcgcaccacttaacaaatcactcccttttgaccgcaggttgtttctcttccatatttgacgaggctggctaggctagctcccgaatcccaacttttttgtacaaa

SEQ ID NO: 120635 - DNA, 912 bp, Homo Sapiens
ttggtatatatgctgtgtgccttatgaaatgctgggatctggaaaatccaaccaaccaacccaccggctcctcaccgtctccacctctgcctttgactgacacctcaatctgtcaatcggaaccgcctaccatgcgattggtcggatggcgtttcggggggcggtgcatgcagagaagccaacagagcagtaagcgcagcagccggagtgtggaagatgacaaggagggtcacctggtgtgccggatcggcgattggctccaagagcgatatgagattgtggggaacctgggtgaaggcacctttggcaaggtggtggagtgcttggaccatgccagagggaagtctcaggttgccctgaagatcatccgcaacgtgggcaagtaccgggaggctgcccggctagaaatcaacgtgctcaaaaaaatcaaggagaaggacaaagaaaacaagttcctgtgtgtcttgatgtctgactggttcaacttccacggtcacatgtgcatcgcctttgagctcctgggcaagaacacctttgagttcctgaaggagaataacttccagccttaccccctaccacatgtccggcacatggcctaccagctctgccacgcccttagatttctgcatgagaatcagctgacccatacagacttgaaaccagagaacatcctgtttgtgaattctgagtttgaaaccctctacaatgagcacaagagctgtgaggagaagtcagtgaagaacaccagcatccgagtggctgactttggcagtgccacatttgaccatgagcaccacaccaccattgtggccacccgtcactatcgcccgcctgagtgatccttgagctgggctgggcacagccctgtgacgtctggagcattggctgcattctctttgagtactaccgggg

SEQ ID NO: 120636 - DNA, 953 bp, Homo Sapiens
agcccttcatttctcttacaccattgacagccttcatttgcatttccactattagatattcagtcacaacagtttcagttagtttaaggagttcttcctttgacggtggtggcttttgctggtcttggcaggcttttcctggataagtggtggattagttttgagaccaagctgaggtgtctgtcccagaggtggtgtttgagtgcgtggtggttgtgcactaggaggaatcatagttatctggggctgaagctttggcacttgatttttattcattaggaacgactgagcaggcctcaggctaatctcatctgcattaagctgtcctttcttagaaaaccgaggtggcatatccttcgactgtccttgcagctgggataagagtccctgactctggttatggtagagctggcttagcccctggcttttcataaacttgcctcccatctctccaaactgcgattgtgtgggaggcatgatgtgtcccccatggccattgaagagttgatttgaacgatgacgtcccatggtgggtgaaaatctatcctggataactcctggaccagtaccaattccgctacctggcatttgtccaaacatatcagcaagtcctccaagtgggtccctatccattttcatcctgggtggcatgaacggtccctccagaaagaagtcacttctcatcccttgagccataggagcaggaataaacacccctagatcttttactgcatcttgacgaatttgattgatcgtctttggtccattgtcaagaaaagccttgcgaggaacccaatggtgttctcgcaactctacggtatcctgcagcaggaaacgaatccttgctggcaattccttacttaacatcaaggagcacattcgggcaaagtactgatccattaaggacttggctcgttcatggtctaatctaggccaacttttttgtacaaagt

SEQ ID NO: 120637 - DNA, 450 bp, Homo Sapiens
ctttgtacaaaaaagttggctccttctgagctcctggtcccctgctacacctattatcccagctgcctagattcagggaaagtgggacagcttgtaggggaggggctcctttccataaatccttgatgattgacaacacccatttttccttttgccgaccccaagagttttgggagttgtagttaatcatcaagagaatttggggcttccaagttgttcgggccaaggacctgagacctgaagggttgactttacccatttgggtgggagtgttgagcatctgtccccctttagatctctgaagccacaaataggatgcttgggaagactcctagctgtcctttttcctctccacacagtgctcaaggccagcttatagtcatatatatcacccagacataaaggaaaagacacattttttaggaaatgtttttaataaaagaaaattac

SEQ ID NO: 120638 - DNA, 386 bp, Homo Sapiens
aaaaagttggcagaaaagcccaaacctcatgcagctgtggcagagttacagttctgtggtttcatgttagttaccttatagttactgtgtaattagtgccacttaatgtatgttaccaaaaataaatatatctaccccagactagatgtagtattttttgtataattggatttcctaatactgtcatcctcaaagaaagtgtattggttttttaaaaaagaaagtgtatttggaaataaagtcagatggaaaattcattttttaaattcccgttttgtcactttttctgataaaagatggccatattaccccttttcggccccatgtatctcagtaccccatggagctgggctaagtaaatacgaattggtttcatgcctgaggca

SEQ ID NO: 120639 - DNA, 899 bp, Homo Sapiens
ttttccttcagataattcaattcccgagagaggaattagaacttccccaatgatatcatctcttgaaaacctgtcaaaactcaaaattgtgaagtgcaaggccaattcttggatttgggtgtagggtatcccatagaatgtaaaggtctcatcaaaagctggatccaaggtttttctcagcactctagttttcactttatgcttcttctctgggaggatcgtcattttgatatatgggtcagaggtcatcgactgctcatccatggctggcaagccacgggcttccttgatattgaccacaaatgcttttctctcgaagttgtattctaaggagaagaagagagttcccagcttctcttgtttctcttctgaagtaagggaagtgctggactttaaactctcaggggaaactgactctttttccccttctaaaaagagcttcggggttgcattctccagatcagaaggactgccaggtttgaggttggttttgggaaaattgccattgagatctctcttttcaagatccagatgcaatgaattctttggcacagctggcttattctttacttcatttttatcatctgctccaaacttctttttgctatttaggttttcagggtaaatatcaactcccttaagcacatgcacaaacttgtatggaggagtcttgttagacttggatgattttctctgacagcagatccatgcaaagagagagactgtgaagaccaggccaaatgcactgaagatccccaccactgtggggatttcatcaaattcttcccggctggtggtgatcggagccattttttactgcgtgttctgtccgaggtgctgaagggaaaactgcctggctggattcacttgcctggatctcaagcgccggctttcgccaa

SEQ ID NO: 120640 - DNA, 515 bp, Homo Sapiens
gggcaataaatgccctctctgaatgtttgaactgccaagaaaaggcatggagacagcgaactagaagaaagggcaagaaggaaatagccaccgtctacagatggcttagttaagtcatccacagcccaagggcggggctatgccttgtctggggaccctgtagagtcactgaccctggagcggctctcctgagaggtgctgcaggcaaagtgagactgacacctcactgaggaagggagacatattcttggagaactttccatctgcttgtattttccatacacatccccagccagaagttagtgtccgaagaccgaattttattttacagagcttgaaaactcacttcaatgaacaaagggattctccaggattccaaagttttgaagtcatcttagctttccacaggagggagagaacttaaaaaagcaacagtagcaggaattgatccacttcttaatgctttcctccctggcatgaccatcctgtcctttgtattatcctgcattttacgt

SEQ ID NO: 120641 - DNA, 568 bp, Homo Sapiens
agcagggagcaaaggggtgcacatccatgagtccagctggggcttcacttgctgcctgccatgatcttgaggtactgcagggcacggcgggcagcctcaccacgggctgcctccctggtggttgcagagccatgacacacagtggccggctgggtggacagttccaccaggcactggcagagtccactcaggctcagctcctcaatatccaggtagctgacgtgaaaggcctgctcctcagagagctcactgaggacacggcagcaggcagggcccagggcacccagggagcccagggagcaactgcggagggacaggatcttctctcctactgaatttcgtagagaatcccaggtgcaacctgggccccggtttcgaagaccatccaggcgggagcccacaccaatggagaagtggtcatcatcaggctccacctcattgccatcccgggcatccagaggcaccgtgtgcactcgaagcagcattttggccgccgcattccgctttgccaattttttggaagtgccactccttggtctcaatgaaacgcccaacttttttgtacaaa

SEQ ID NO: 120642 - DNA, 915 bp, Homo Sapiens
ccagggaagatctaactgctgccagtcctggggtcctggtactcagtccagttcgcactgtcattactgtaggcaactttgtaggatgccacaaactggacagagccaaagttacgggccccctgggtgatgatgccctgtcaccttcttcgaggagcccaggtccacctgcagccactgatcgttaccgtagctccccgcaacccaggcgttgaagttgccctgcttgtccagccgtgcataggaggggttccagctgaagagatgcaagccccaggtcttgtagctgctggaggccgtgatctgcttgtcagggatgctgttattcttcaggcccaggggattggcgcatccgttcagctcacagcccagtagctcaaagcgcagagtgcaggccgtgtggcagctcgtggggtacaatctcacgtactgagcctccacaggggtctcaaacaggttgacatgcaccgcgtttttgttccagttacccacaaactccttgtgttttttattaacatcatggatgaaatcgaattcgtgtccattaaggctgtaggccaccttgaaggccttcaggtactcatgactggccaagcggctggcaccctgcgtcaccacacctgttacccacatcctccgcagcaggttcacctggatccaggggttatcgtcattgctgctgggtgtccaggcattgaccatgcctgcgcggttcaggcgggccagctccgggacccaatgctgcaaacccaagaaggtcacacgcacagatgaggcggcgatctgtgagttggcaatgttcccattctccatgcccagtggctcgacacatttcgtctcacagtggttgcccgcgtagcccttaaggcacgtgcaggtgtacgaggggaagacatctcctccaacttttttgta

SEQ ID NO: 120643 - DNA, 882 bp, Homo Sapiens
gacaatgacttaagccccatcgtgagaatggttttttcctcttcaacacattttttaaaaatagacctctaagatgatgctacatgtttaaaagagtgccacagaaacccacccaggatcacaagaatgacaacaaaaggaaagtggctatttcttgtgtaagggatgacgactccccctcccatgggtcccatttctcccccagttgcaggtgttttaagggacagaaaggctgtggaaaggaccactggctgggagagttattgcacaacccggaagagtgagaaaaacgtgggcgggcaaggggtaggggagagggttgctgcgactaaaacaaggtaacactgaattaggagctcgaacagttctgcaacagtcagacatgtatgtgtttatgtgttagcacttggagactgggaagtaaaagtaaacacctttatcatataaactttgggctgaatgggaagcaaaatagaccaaaagaggttacggcaagtgggccttttaaaaaaaatctgggggtggggaaaataacggagaaggagtttgctatgtggggccagaggagagttttcgaagtgggggctggaagctctgggcttctcttaataggtatgcttgtggttgggccacctcacagacttccacagccacccagctgggccagaagagaactgacacaagggagaaaccaaaaacaaaacagaacacaccacagaccctaatcctgggcagcggggttagaaacaaatggggtgaaactgtcacaatccgtgtcccttttatatataactatactgaggtatggtgtccttggctgccgtcgagccctggcaactgggggctggccacggagtacaagccaacttttttgtacaaagt

SEQ ID NO: 120644 - DNA, 707 bp, Homo Sapiens
ttgtacaaaaaagttggtgaatccccagaccaagcgctcccgttgctttggcttcgtgacctactccaatgtggaggaggcggacgccgccatggccgcctcgccccatgccgtggacggcaacactgtggagctgaagcgggcggtgtcccgggaggattcggcgcggcccggtgcccacgccaaggttaagaagctctttgtcggaggccttaaaggagacgtggctgagggcgacctgatcgagcacttctcgcagtttggcaccgtggaaaaggccgagattattgccgacaagcagtccggcaagaagcgtggattcggcttcgtgtatttccagaatcacgacgcggcagacaaggccgcggtggtcaagttccatccgattcagggccatcgcgtggaggtgaagaaagcagtccccaaggaggatatctactccggtgggggtggaggcggctcccgatcctcccggggcggccgaggcggccgggggcgcggcggtggtcgagaccagaacggcctttccaagggcggcggcggcggttacaacagctacggtggttacggcggcggcggaggcggcggctacaatgcctacggaggcggcggcggcggttcgtcctacggtgggagcgactacggtaacggcttcggcggcttcggcagctacagccagcatcagtcctcctatgggcccatgaaga

SEQ ID NO: 120645 - DNA, 558 bp, Homo Sapiens
tgagacattcacgttttaaaattgggggaggacaatataattgcttttaaaatgcccttaatacaatatataacgtacaaaaatatctttatatttgaagttacaaaaaaaatcttgacagcaacaaacttaaatattgatagttacctctgtatgtacaacacgcattgcacttttcctctttaggttttggaaagttcaagtaatagtgaggcttgcgccctggtggggtgacacgccgtgagaaatcagtttgtgggcgagcacggctgtggctcagacccctgctccgggggtctcagcattcatttctcagtttctcctctccttaagcctggcaaacactcggattcttctgcaccccgccccctggggcacttgcacctgagcaaggctaaggaagcgaagcccccagaaggaggggcccttgcaaagccagagctcgccgccggacggtgcctcccggactcagggtctccgcagggctgtcagagcccggtccccacaccgctcgggaagtcttttgtgtcccgggaggcccaacttttttgtacaaag

SEQ ID NO: 120646 - DNA, 755 bp, Homo Sapiens
actttgtacaaaaaagttggcggccggggagggtcagttggaggcaggcgctcgctgaggcaaaaggaggcgctcggcccgcggcctgacagggacttagcccgcagagatcgaccccgcgcgcgtgaccccacacccacccactcatccatctatccactccctgcgccgcctcctcccaccctgagcagagccgccgaggatgataaacacccaggacagtagtattttgcctttgagtaactgtccccagctccagtgctgcaggcacattgttccagggcctctgtggtgctcctgatgcccctcacccactgtcgaagatccccggtgggcgagggggcggcagggatccttctctctcagctctaatatataagcttttaccaccatcaactggtcttagtgcctggacgagaagctcactgtgacccaggacctccctgtgaatgatggaaaacctcacatcgtccacttccagtatgaggtcaccgaggtgaaggtctcttcttgggatgcagtcctgtccagccagagcctgtttgtagaaatcccagatggattattagctgatgggagcaaagaaggattgttagcactgctagagtttgctgaagagaagatgaaagtgaactatgtcttcatctgcttcaggaagggccgagaagacagagctccactcctgaagaccttcagcttcttgggctttgagattgtacgtccaggccatccctgtgtcccctctcggccagatg

SEQ ID NO: 120647 - DNA, 881 bp, Homo Sapiens
ttgggaaggagaaaacctccctggctgatgacaacctgaaactggatgacatgctgagtgaactcagagacaaatgggataccatatgtggaaaatctgtggaaagacaaaacaaattggaggaagccctgttattttctggacaattcacagatgccctacaggctctcattgattggttatatagagttgaaccccagctggcagaagaccagcctgttcatggagacattgatttggtgatgaatctgatcgataatcacaaggccttccaaaaagagttggggaagaggaccagcagtgtgcaggccctgaagcgctcagcccgagaactcatagaaggcagtcgggatgactcctcctgggtcaaggtccagatgcaggaattaagcacacgctgggagaccgtgtgtgcactttctatatcaaagcaaacacggttagaagcagccctgcgtcaggcagaggaattccactcggtggtacatgccctcttggagtggctggctgaggcggagcaaaccctgcgtttccatggtgtcctcccagatgatgaggatgctctccggactctcattgatcagcataaagaattcatgaagaaactggaagaaaagagagctgaactaaataaagccaccactatgggcgacaccgttttggctatctgccaccccgactccatcactaccattaagcactggataacaatcatccgggcgaggtttgaggaggtgctggcctgggcaaagcaacatcagcagagattagcaagtgctctggctgggcttattgccaaacaggaattgttggaagctttgctggcttggttgcaatgggctgaaactacacttactgataagataaagaagtcatccccc

SEQ ID NO: 120648 - DNA, 769 bp, Homo Sapiens
gaaataagaaattgacccttgagcataaaacaagtcttggtggatccagatcatcatatacaagagatgaaatcctccagggtgtgggatggggtgagatttccttttaggtactaaggttcaccaagaggttgtcagacagggtttggctgggccagcagagacttgacaactccctctacctaaccagctgcccaactgtagaaactaccaacccaccgaccaacagggagagggaacaagcaccctcaagggggtcaagttctagaccccatgtaataaaaggtggtttcaaggccagatgtacattatttcattaaccctcacaatgcactctgtgaggtaggtgcaaatgccagcatttcacagatatgggccttgaagttagagaaaattcaacagtgagggacagcttccctggttagtacggtgaagtgggcccctacctagaatgtggctgattgtaaactaacccttaactgcaagaacatttcttacatctcccaaacatccctcacagtaaaaaccttaaaatctaagctggtatgtcctactccccatcctcctccccacaacaaaacaccagtgcaggccaacttgttcagtggagccccgggacaaagcaaatggaagtcctgggtgcttctgacgcacacctattgcaagcaagggttcaaagacccaaaacccaaaatggcaggggagggagagatgggggtgggaggctgtcagtggggaacaagaagtggagaatgtcagtctgagccaa

SEQ ID NO: 120649 - DNA, 384 bp, Homo Sapiens
ggtctaagccaccagcacctctcacttagattactgcaacagcctcttacgtgtctctgcttccatcgttaaccccctacagtctagtctcagcatagcatctagagtaatattgctaacagctgaaacacagcaacggcttttcatcatactccaagtaaatgccaaggtccttacaatggcctgcaaggccctccaaacctcccataccattgatgctgtctagacccataccaccactttcctcccttgctcactccagtctagccaccataccctcctttgttgttcctctatcatgcatgacaaacttctgtctatgagtctttgcatttgtttttccttccttctgaaatgttcttaccccagattgttccaggtttg

SEQ ID NO: 120650 - DNA, 940 bp, Homo Sapiens
ctttgtacaaaaaagttgggctccgaggtccccgcgccagagacgcagccgcgctcccaccacccacacccaccgcgccctcgttcgcctcttctccgggagccagtccgcgccaccgccgccgcccaggccatcgccaccctccgcagccatgtccaccaggtccgtgtcctcgtcctcctaccgcaggatgttcggcggcccgggcaccgcgagccggccgagctccagccggagctacgtgactacgtccacccgcacctacagcctgggcagcgcgctgcgccccagcaccagccgcagcctctacgcctcgtccccgggcggcgtgtatgccacgcgctcctctgccgtgcgcctgcggagcagcgtgcccggggtgcggctcctgcaggactcggtggacttctcgctggccgacgccatcaacaccgagttcaagaacacccgcaccaacgagaaggtggagctgcaggagctgaatgaccgcttcgccaactacatcgacaaggtgcgcttcctggagcagcagaataagatcctgctggccgagctcgagcagctcaagggccaaggcaagtcgcgcctgggggacctctacgaggaggagatgcgggagctgcgccggcaggtggaccagctaaccaacgacaaagcccgcgtcgaggtggagcgcgacaacctggccgaggacatcatgcgcctccgggagaaattgcaggaggagatgcttcagagagaggaagccgaaaacaccctgcaatctttcagacaggatgttgacaatgcgtctctggcacgtcttgaccttgaacgcaaagtggaatctttgcaagaagagattgcctttttgaagaaactccacgaagaggaaatccaggagctgcgagctcaggattcaggaacagcatgtccaaatcgatgtggatgtttccaagcc

SEQ ID NO: 120651 - DNA, 727 bp, Homo Sapiens
tcctcttcccatgtgtctccatcgataactgtaatcccgtaaattcgatacatgtgcctcaccaaaagataaacatatcgtgtggaataataaaaccacttcagtttcactgccaggacaaacactgtatttaatgtgagaatcaaggaagaagtaaacagtaaagtctctctgatgtgtaatggtagctctgtgattaagcctattacaggaaccaagagatccaaaataattaattgtgaatagatggaatgaatctggagtagtgtaacgtatccaattccaaatgttagctgtagaacgataagtgccatccacagcgagggaccttttcgaggaagcagctcaattccaaaagctgacgtgttgtaggcaccatagaagtcaatgtgcaaagaagcataataattcaccaacactgaagttgcagctaacagaaaggctgagctgtacgtgtaaaacttgaaaagtgatcgttgtgacaagatcagaacaatactggatgcaaatacaccaaagagccggaggaagatctggagcacgatgcagaaccggctttggctggaatccgggtaggagttgaagatggcgtcgatgatgtaaaggcagggcacccggagcgccacttcgagcgccgcccagacctgctgatgggccatccgcacctgctgctgcgggggccccacggccgccatgagccgctgccacaccagggctcggtgggccg

SEQ ID NO: 120652 - DNA, 413 bp, Homo Sapiens
ttgtacaaaaaagttgggtgaccgggtcctacaaaaggttcagctactgagttcacgttccagcccagctgtcgaagattgaaaactggatttaagccaatcacgttcttggatcctcagaactctttgctcttgtcggggtgggggtgggaactcacgtggggagcggtggctgagaaaatgtaaggattctggaatacatattccatgggactttccttccctctcctgcttcctcttttcctgctccctaacctttcgccgaatggggcagcaccactgacgtttctgggcggccagtgcggctgccaggttcctgtactactgccttgtacttttcattttggctcaccgtggattttctcatacgaagtttggtcagaatgaattgaatattgtaagtcagccactgg

SEQ ID NO: 120653 - DNA, 766 bp, Homo Sapiens
ttgggaacccggcggggggaggttggggacgggcctggcagttgtgaactcgaacctgccgctgtcgccgcggcggggcggggagcgagagtgggccgcggaggccggccttcgggctccatggacgggcgccgcgtccctgcacagcccgccgcagaggtaaggctggcctctctgcagtcagaggtctgagctctgccatggggataggggtgtctttattactgcagttttctctaacacctgggggctaccggagtgtgggccgaagcaggcgctgcagccgcggaagtatccccaggaacatccccaagaggagctggaaaaagcctcatccccagctctgcagtctccaggcagaggaagaaccgatgctggaacgtcgttgcaggggccccctggccatgggcctggcccagccccgactcctttctgggccctcccaggagtcaccccagaccctggggaaggagtcccgcgggctgaggcaacaaggcacgtcagtggcccagtctggtgcccaagccccaggcagggcccatcgctgtgcccactgtcgaaggcacttccctggctgggtggctctgtggcttcacacccgccggtgccaggcccggctgcccttgccctgccctgagtgtggccgtcgctttcgccatgcccccttcttagcactgcaccgccaggtccatgctgctgccaccccagacctgggctttgcctgccacctctgtgggcagagcttccgaggctgggtggcctggtt

SEQ ID NO: 120654 - DNA, 902 bp, Homo Sapiens
tcagcatgtagaaagagtacctgaaaatttcaattgcactccacaaataaaacacaaagaaaaccacagctttgttctgcatttcttccatggtgccaaagatgataaacaaaataaaatttcttccaagaagctggatcagagaaggcagcaccggtgacgtagtgactccaattgctgcattgatagtttccacaactgccagcatctggcagaaatacatcatgtcagccacagtatggaatgtgtcataaaaggactcttttcccaagatacagaatcgcacagtcaggttgacaaagatccaggagaatcccaagaattgcacaagattatacataaacaggtatcctttccttaagtttgtaagagtttcaggagagccttcgctttccagtcggagtttatttaggcgctcttcttccttagctctgagctccatttccgcatcagattcatccagccaacgatcaaagtcaggagccaaaaacagtggtcgcttttcctgctttgtgagtctctcccaccactgactcactttcttctgtactgtaatgtttacctgcctctgggtcagtttgtaaacaggctctggtttcacaaggtctaagaactccaggtgaaattcatagacattgtctcctttggcaccatgtccttgagctttgaaatgcagcacgttttcagtgatgctgatggcagggttctgtacgtcactcagctccacgcgcagatatagctcgcggtgtcgctgagcccagtagacatgcggcgtcaacacctgattctccatggccacactgcccagggcgcggggaggctaggctcgctgcgcctcgctgcctcaggtagtgctctgctggcgcgagcagaaagcaggccccaacttttttgtacaaagt

SEQ ID NO: 120655 - DNA, 903 bp, Homo Sapiens
ttggtcttgagactcgctaagcgtcccagccgcatccctcccgcagcgacggcggcccgggacccgcgggctgtgaaccatgaacacccgcaatagagtggtgaactccgggctcggcgcctcccctgcctcccgcccgacccgggatccccaggacccttctgggcggcaaggggagctgagccccgtggaagaccagagagagggtttggaggcagcccctaagggcccttcgcgggagagcgtcgtgcacgcgggccagaggcgcacaagtgcatacaccttgatagcaccaaatataaaccggagaaatgagatacaaagaattgcggagcaggagctggccaacctggagaagtggaaggagcagaacagagctaaaccggttcacctggtgcccagacggctaggtggaagccagtcagaaactgaagtcagacagaaacaacaactccagctgatgcaatctaaatacaagcaaaagctaaaaagagaagaatctgtaagaatcaagaaggaagctgaagaagctgaactccaaaaaatgaaggcaattcagagagagaagagcaataaactggaggagaaaaaaagacttcaagaaaaccttagaagagaagcatttagagagcatcagcaatacaaaaccgctgagttcttgagcaaactgaacacagaatcgccagacagaagtgcctgtcaaagtgctgtttgtggcccacaatcctcaacatgggccagaagctgggcttacagagattctctaaaggcagaagaaaacagaaaattgcaaaagatgaaggatgaacaacatcaaagagtgaattactggaactgaaacggcagcagcaagagcagaagagccaaatccaccgactgaacacaggagggtaataatgcttt

SEQ ID NO: 120656 - DNA, 306 bp, Homo Sapiens
ttataaagattgacactagagggagaagaaaataaaagcgtgtcaaaggatgctgcactacaattcctttaccaggattctctacttctggctcctttttaaagaaaccaaactgaaaaagtatagattatgcatcatcagtggtttatgcacaaatgataaatacagagctctattccacagatctatgagcaaagaaaagttctggaccctgcctcaaaagaccagtaagatatttgtgttttaagttaaaataaattcataaggcattaatgtactgcaattaagtgcacataaaggtttttt

SEQ ID NO: 120657 - DNA, 932 bp, Homo Sapiens
ttggtgaaccctggggctcaatccccctttcaccagatgccaccctccctgaaccccccaccactaccagctccctggcctccctgccccttgggagccccttcacactcttgtgcagggacttgggggcccctggagctcaggggtcaggctgctttgtgtgagatgtagttttcccatctcctgggaagggatctttcgaggttcccctctcagtcttcctccagggaatggcctccatgaggggcagggccagcttccatcccttctccagcccttggggcaactgagcaatatacttaacctgaatctctactcacagcccccaccagctctgaatgtctaacctgctcccctgattcgtaaacctaggggaaaccatctctctcacctaatgacccgccttgttctgaagctttctctaagcccttcccagttgcttcctagcacattccattctttgtggcccagggcctggaccagaccattgtgatacctgaccccgcccacctgggagtgtggctttgggtttcatccttccccagcgtgggtctctacgtccctgtttcccttgtatcaagacaccttcctcagcttccatgcctttggatcttccatgttcctccccatattcctggacttcggagatggcctctcccaagccaggtcaaggaggtttgggggagggttgcccctctgcccctctgttctgtggctgagcactttcccagtccagggcagggaaatattggccctatcttgacccccaaatccagtgagctccagattcttccaaggcaaaaaagtaagcagatcacacctctttctgcctctacatatggcctattctgggctagaccagatttgggggccaggagggaagaactccatatgggatggagaaggaatctactttctccctgttttttttc

SEQ ID NO: 120658 - DNA, 943 bp, Homo Sapiens
agttttcccccctctgggaaatttttcgccattcttatgtagaaacacccaggggggtgttgtgttggggaaaaattacactataattcttaaaactatcatgagaatgagattggcagcattaagagattatagctagaggaattttccactaaaatagacattataaagcttagcaatgagaagaaatacaagactcaagggtaaatcctacttttagaataagtatcaaatattcagaagtacaggataaattctgaaattcccaaataaccaacaactacttaactggcttccatccttttagtatctttcactgccccattctcttcaccctccaacactcccactcctcgtaacagctccttgctctgtgtagggtttatctctcttccttttatatctgcctgaaactgttctaggtggctcctgtagcagataggaactgcctggatctagtaagtttacagcttcattctgtatagtgttctgttgtgtaattgcatcttctcgtttccgctctttctgccctgcttcatcatcttcgtactcatctaagcactctgcggcagggatgttgaccacgccggtggagcgccgcttctcccgcagcttcctcttctcgatctgccccttgcctttcctggcactggggcccgagctcttgcccttctctgggacgccgtccggctcctcctcgtcacgctggggcggcggtgcagccgaggcagaggcggctgggggctcgtcctccgaccgccgcgggccgggggccgcccgcgtcagcatggcggagccgaccgcgcagttcacgcccccgggaccggggacggcaggtgcggccggcgcgccgcccgggaggttgttgttgagctcgttggcagcggcggccgccggggtgcccagagcccccgcggggggcttcccagcggcgtcgctccaa

SEQ ID NO: 120659 - DNA, 926 bp, Homo Sapiens
tgtacaaaaaagttggggaagagtccggttctgggacagctggagacagtggtggtgactgaaataactttaccaaaggaaagctattttgcgaactatcttctccagcggagatggccaatgtgctttgtaacagagccagactggtttcctatctcccaggattttgctctttagttaaaagggttgtcaatcccaacgccttttcgactgcaggatcatcaggttcggatgagtctcatgtggctgctgcacctccagatatatgctctcgaacagtgtggcctgatgaaactatgggaccctttggacctcaagatcagaggttccagcttcctgggaacataggttttgattgtcacctcaatgggactgcttcacagaagaaaagcctggttcataaaactttgcctgatgttctagcagaacctttatcaagtgaaagacatgagtttgtgatggcacaatatgtgaatgaatttcagggtaatgatgcacctgttgaacaagaaattaacagtgcagaaacttactttgaaagtgccagagtagagtgtgcaatacagacatgtccagaattgctgcgaaaagattttgaatcactgtttccagaagtagctaatggcaaactaatgattctgactgtaacacaaaaaactaagaatgatatgactgtttggagtgaagaagtagaaattgaaagagaagtgctcttaaaaaagttcatcaatggtgctaagaaatttgctatgctcttcgagctgagggttattgggctgactttattgacccatcatctggtttggcattttttggaccatatacaaacaacactctttttgaaactgatgaacgctaccgacattttaggattctctgttgatgaccttggatgctgtaaagtgattcgtcatagtctctggggt

SEQ ID NO: 120660 - DNA, 876 bp, Homo Sapiens
tcacatatctttcatatggttcagggtgttcaatctgaataactgctcttgtccatcaggaaaagttaacttacaccaactaagtaagaccttgatttacctgtctcttctcaataggagagctgaatttccaatttagggttagagtaatgccatctaaaaagatagcatgtactttgtcatcagagtaggcaagaaatcttcccacactgggtatgagtgactctttcaaaaccaaaggcagtatattgctatcatttatcccaggtaccattttccagcagcatatacgatagttatggcttaaagaaagtctcatcttcacacaatgttgaagaattctgtgaacacaaaaaatactacttaaacatttgcaaatgacattttccaattctagcaacccattttcactgccatacaacattttagatgatcagtaaatcattttcactgaaatgtgttgggaactctttttttctccagaaatccttaagcccctagaagggaaatactgttgcttccctttgtgctaatcttacctacttaagcctattcctttaatttttagcaatgaaatgattccatggacagaattttcaggaactccttttttaagaggtgatagattcacactgcctggaaagtttcacataggctaaaaatggtagggatgtgaatcaactatccctaggaaatcaaattacagaatatgcttcttcaaatctattttggaaattgcttgtacataaatttataaaaagaaacaacagtccacttgcattcttctgggtatcatagattgagagaattttaaaaacatatgaaccaaagaaccaatctatgctttatcattagtatattttcagaaatctccaa

SEQ ID NO: 120661 - DNA, 844 bp, Homo Sapiens
tcggatccgatcacataggacagtatgcaccttaagatcctgaagaaacggcacaaaatgttcaagtgatgtttagaaataacttgtgagggtgcgtcagggaaatcatgcagccatcaggacacaggctccgggacgtcgagcatcatcctctcctggctgaaaatgacaactatgactcttcatcgtcctcctcctccgaggctgacgtggctgaccgggtctggttcatccgtgacggctgcggcatgatctgtgctgtcatgacgtggcttctggtcgcctatgcagacttcgtggtgactttcgtcatgctgctgccttccaaagacttctggtactctgtggtcaacggggtcatctttaactgcttggccgtgcttgccctgtcatcccacctgagaaccatgctcaccgaccctgaaaaatccagtgactgccgaccatctgcctgcacagtgaaaactgggctggacccaacccttgtgggcatttgtggtgagggaaccgagtctgtgcaaagcctcctgcttggggcagtacccaaaggaaacgctacgaaagaatacatggagagcttgcagctgaagcctggggaagtcatctacaagtgccccaagtgctgctgtattaaacccgagcgcgcccaccactgcagtatttgcaaaagatgtattcggaaaatggatcatcactgcccgtgggtgaacaattgtgtaggagaaaagaatcaaagattttttgtgctcttcactatgtatatagctctgtcttcagtccatgctctgatcctttgtggatttcagttcatctcctggtgtccggagggcagtggactgaatgc

SEQ ID NO: 120662 - DNA, 965 bp, Homo Sapiens
gtaggcctgcattacgaggaccagttccaaagtcaaatacaggatcacatttcaagttgaaaattgtcgcttggcaggcataaaaccatatacagcacaaaactcagtagaactagaattccaaactacatcataaatggggccattttttggtaattgcactacagcactttctccatttgttgcaatgtagtgtagagtttgttctccatagtaggaagctcctgtcttgtcaacatctgtgctagctattaccaacacagcagtagcttttttattccacagcattgtaactttatctgccttaaagaaacttttattagctaaagctgcatgaggtccagcaaagttggggtactgatataatctaacaaatgaaggtgcacctttacttcctggaacatagacagccaccttgtatggttggggtccaggtgataatacaaaatcattaattttttgcaaatgcaatttatttgcaattgtgttaaaattgttgttttcaaagaagtgaacttcattgttaacattgcgggcacaaagagtttcatcttctgaccaggatggacaccaattttgcatttttttctggatgaaagatttcaaacatgtcccagttttcacatcataaagttgtaggttgggtatcccagctgtgccatctttagaagtagtgtaaggctgccacgttgccaggacagtatttttgggtgagaattcaaggcaaactgccttcaggaggtcgaaggagtgcagtagtcccttgttagtgacactgataatatttactttttctccattgccccaggcaaacaaggtcccatccttactaaagatacagactttgcaattcttcccagattcccttggaaacactgtgctttctgtaaaatgtggtggtccattcaccatgtacagtccttctgatcctcggactgtcaagagcggcgtggacggcgccccaa

SEQ ID NO: 120663 - DNA, 941 bp, Homo Sapiens
gagtatctccattagtggccacaacttcgaagacaccattgtcaatggtgagaagagacacatcgaaaggttccgccacccaggtcaaaacacagggatgttcttctccccctccctcttatccaggccataagcaatagcagctgccgtaggctcgttgatgatcctcataacatttaggccagcaatagttccagcgtctttggttgcttggcgttgggcatcattaaaataggctggtacagtaacaactgcatgggtaaccttctttcccaaataagcctcagcggtttctttcattttagtgagaaccatggcagaaatttcttcaggagcaaatgtctttgtttgcccacctccaatatcaacttgaatgtatggtttagttttcttttcaaccaccttgaacggcaagaacttgatgtcctgctgcacagacgggtcattccacgtgcggccgatgagccgcttggcgtcaaagaccgtgttctcggggttggaggtgagctggttcttggcggcatcgccaatcagacgttccccttcaggagtgaaggcgacataggacggcgtgatgcggttgccctgatcgttggcgatgatctccacgcggccgttcttgaacacgccgacgcaggagtaggtggtccccaggtcgatgccgaccaccgtgcccacgtcctccttcttgtcctcctcctcggcccgcgccgcgctgagcagcagcagcatcgcggccaccagggagagcttcatcttgccagccagttgggcagcagcaggcagtccagccacaggccgtagcacaggagcacagcgcaatttccgacttgcaggcggcaggggcccggggtcacaaggcgccacgaaccaggcgaagggcaggtctagaaatacaggccgcggcgcttccctctcacactcgcgaaacaccccaccaa

SEQ ID NO: 120664 - DNA, 855 bp, Homo Sapiens
ttggggacaagctcaaacaggtagggaggcgccagggacagggtgctgcctccgaggctcccagagcccagctgcgctcacccgcctttccgcagaggaccctggagcagaaccggtttggacgcctgagcgtccgttgccattacgaggcggctgagcagcggctggccgtggaggtgctgcacgccgcggacctgctccccctggatgccaacggcttaagtgacccctttgtgatcgtggagctgggcccaccgcatctctttccactggtccgcagccagaggacccaggtgaagacccggacgctgcaccctgtatacgacgaactcttctacttttccgtgcctgccgaggcgtgccgccgccgcgcggcctgtgtgttgttcaccgtcatggaccacgactggctgtccaccaacgacttcgctggggaggcggccctcggcctaggtggcgtcactggtgtcgcccggccccaggtgggcgggggtgcaagggctgggcagcctgtcaccctgcacctgtgccggcccagagcccagggtgagtgagcatctgggtggaggcaggggcagcgggcctgaccccggcccccacacacctgcccgcgctgcttgcagtgagatctgcgctgaggaggctggaaggccgcaccagcaaggaggcgcaggagttcgtgaagaaactcaaggagctggagaagtgcatggaggcggacccctgagtccatcagctgccagccccggccctggcccccaccccaagttccctgaagcatcctccagctcactgtggccagctttgtgcaaccagggcccacggcgcccctcctgtgctgtgacgtgtgtgtcg

SEQ ID NO: 120665 - DNA, 888 bp, Homo Sapiens
tcatcatccttgcgatacccactgccaaatgctcttctgccactgcctatccgggaatcatagcctctatcatagtctctgctgctcggtcatcatagcgatcccggccaccatatcgatccatatcccggcgtgggccatcccgatacccatcccgatacccatcccgataccggtctgaatcataacgatctcgatacttgtctccaaagctatcatcacctcttctaggtgggtagtcatcaaagctgtctgtagcaggacgagccctccagtctgtatctgttttgtcagaatcccgatttctatcacggccaaaagaacgatcatccctgtctttatcctgtgcttgatcagcaacgtccactcgaattctcctgttacctagagactcttcattgagactcagggcactgagcagggaatccaggtcctcaaattcagcataaccaaaacctttcaacctctctggattgctgggttcacgtggtaaacgcactgcactgatatttaatcctcgaaagaattccttaattgactcttctgtaacatcatagggtaggtttcctagaaaagcagtgtagggtggcgatttgggaagacggctccggtcgatattgggttcccgagcagcccgtggagcagtgggaaggatggaacggtcaattggaggcgccctatacacatcgtcatcgttactgtgccaagtggtcgaaacatctccttccaggtcatccgtttcatcagcccagctgactggtttggaaacataggtgcttcctccaccagtacccccatcctcagccagaaagtctgttagggagatagtcttccccttcttattcttcttttttgctgaggccgccatgttgggagagggaaagccaa

SEQ ID NO: 120666 - DNA, 903 bp, Homo Sapiens
ttgggcagggcttcttcacttcaaataatgccactcgagactttttgctccccttcctggaagagcccatggacacagaggctgatttacagttccgtccccgcacgggaaaagctgcgtcgacacccctcctgcctgaagtggaagcctatctccaactcctcgtggtcatcttcatgatgaacagcaagcgctacaaagaggcacagaagatctctgatgatctgatgcagaagatcagtactcagaaccgccgggccctagaccttgtagccgcaaagtgttactattatcacgcccgggtctatgagttcctggacaagctggatgtggtgcgcagcttcttgcatgctcggctccggacagctacgcttcggcatgacgcagacgggcaggccaccctgttgaacctcctgctgcggaattacctacactacagcttgtacgaccaggctgagaagctggtgtccaagtctgtgttcccagagcaggccaacaacaatgagtgggccaggtacctctactacacagggcgaatcaaagccatccagctggagtactcagaggcccggagaacgatgaccaacgcccttcgcaaggcccctcagcacacagctgtcggcttcaaacagacggtgcacaagcttctcatcgtggtggagctgttgctgggggagatccctgaccggctgcagttccgccagccctccctcaagcgctcactcatgccctatttccttctgactcaagctgtcagacaggaaacctagccaagttcaaccaggtcctggatcagtttggggagaagtttcaagcagatgggacctacaccctaattatcctggctgcggcacaacgtgattaagacagtgtaagcatgatcagcctctcctattcccgaat

SEQ ID NO: 120667 - DNA, 884 bp, Homo Sapiens
taatccaagaagcataatcactacaaaggaaagcagcaagatttgcgagtttttttacagtccccaggcgaccacagggaattctgccaatcatttctttctcaaatgttccagtgggtccagacgggctaaaggcacctttggtttttataggccctggttgaatcacattgaatcgcattccatatttaccccattcagctgcaagagacttgctcatggcttccacacctgctttggcagaagcacttggtactacaaaacctgaaccagtctcagcatagatagtagtaatagaaagaaatgctgctcctttctgtgctttaattagttgttttccaatttctagtgtcacgaaggctgtgccatttagaactatgtcagttatggttttccaagcattaggagaaagtctttcagtaggagaaataaaattccctgctgcattgtttatcacaatattaggatgtcctgcaactttgatcagttctgacacagtgttttgaaccatatcaggatccctcacatcacactgaattgcatgaaccttatttccagtttgagaagaaatttgttctgcggtagctttcaaaacatccatcttccggctggctatcacgcactgagcacctaggctggacagaagagttgtcattcctttaccaaggccagtacctcccccagtaatgaatgccacttttccttgaaaactattaggtggtagcatcgctttttgaagaggtgaaaagaatttagattgcaaagcttcagtgttttgatataatatttttgtcccataactgaaaaacctccgaggagcgaggccacagggcagccgggaccccagagtaaagaaaaccctggccggtagcttcatgttccaa

SEQ ID NO: 120668 - DNA, 910 bp, Homo Sapiens
tttctttgttcttgggtgtttagagctctgtttacaagtggagcagcccatgtcccaggaagtaggatgtgccactgctgcactccctgtggatgaggactcctgcgctcagcacaggttccctaggcaaccacttctcactggcccagacgtggctttcagagtcctcgcccaggaccctggccagcgtgaatggtgtaaccattccctaccccatcaccgcttcaccatggacttgctcaaatcacgcatcttgcaaaataaccagcgaagcaggctacatggagtacttggctcctgcctacctggagctcggcaaagcccggttccccaacacagctctgggcctgaaaggtggcttgccttcctgctaaaggcccgagggacttcgtgggctcattagaggtcatctggtttagctccatttccaagacagactgatttgctggaagccaccaagccagccaccaacactccccaaccccagtgccagcgttctctggccccgtgctgccccaccccatcaggagcccactgagcttccgcaaggttgagtgcagcccacagtgaatacctgctggttctgaacgttccattccttccttgtgaattactcctgatgtggagttgtgtgtgcagtgggagatggaagcaagcctgcagaaggtggtgctcacttcctcggggctaccgtggagctgagtgggagccgtagtttataaatgccctgtgctgcacccagatgctgcagctggaagcagcactcagggagcccatcctgacctgcccgggctcccagaagaggtcaggagccacaggacggtcaagcagccggacaatcacgagacactgcaaacgagctgctcctctgacacatgctagccaccaggtttggaaacctcccagccaa

SEQ ID NO: 120669 - DNA, 961 bp, Homo Sapiens
tcatagaaagaagagacaagaatttacatgatggttgtggtttcactgattattgggtaaaataaaggtagaagaaggaaaaacatatgggtgcttatgaaacatcttaaatgacgtctgaggtagataggaaagagtaaagggctgatatactttaaaaagataaacagatcaagcaagcggaggatacaaagagaacagagaataggagcatattagaaaaatttaagaaggcaagaattacagaatttgtaggaaaaacccttgaatgtgtgatatttttctagttacgttgaagattcaaatgttttactctttaaggagaaacctagaagttagataaaatatcttttaaaattaagcatttaaaatttaataccaaaataatcctgagaaatattgttatcctgaaagaaataagcttctaaaataatataatacaagaacttaattttgcctttcaaatatgatttatgtcaatattttagtatatctattcaagaacactatttagccctgaaacattttctgaaatttcttcgatgacttgcagtattacgtaacaaaaaattatgtttctaagtttaatatcttataaaggaattacttacagggacattaagtgcatactgtagtccttgaggaagtctttcatgtgtttccatctgctcttcatcatttttcactgtctcctcatggaccatgagttcatcatgtgatatcatatcctgttgtctcatttcactttcttgtaacacttcatctgcagcaaggatctcctggtgaggcatacttcgatcttgaagtactgaatcctgtagctctccagacacagtagactggccagacactccacccattacaaccattgtcctggaagactgcatttcgtctatgccgccacatttaagaaacaatccttccagtttgtcgtcaatgttcatgcttaagtataacccaa

SEQ ID NO: 120670 - DNA, 769 bp, Homo Sapiens
actttgtacaaaaaagttgggctcggaggaggccaaagtgcaacttccttcggtcgtcccgaatccgggttcatccgacaccagccgcctccaccatgccgccgaagttcgaccccaacgagatcaaagtcggtgcgtgctctggttgtggccggggctgcgggatggagcatccctcggccctgccgcgcgtgcaaagctttccccgtatggggctcttaaagccgctgcctcccagagaccttcccggtgttgcgccgccccggccaagcctcagcctttctgggccttagcttcttcacgtgtaggtggggagggaggactggaccacctgtggcggcttgggagcccgcacgccctaggtatacctgaggtgcaccggaggtgaagtcggtgccacttctgccctggcccccaagatcggccccctgggtctgtctccaaaaaaagttggtgatgacattgccaaggcaacgggtgactggaagggcctgaggattacagtgaaactgaccattcagaacagacaggcccagattgaggtggtgccttctgcctctgccctgatcatcaaagccctcaaggaaccaccaagagacagaaagaaacagaaaaacattaaacacagtgggaatatcacttttgatgagattgtcaacattgctcgacagatgcggcaccgatccttagccagagaactctctggaactattaaagagatcctggggactgcccagtcagtgggctgtaatgttgatggccgccatcc

SEQ ID NO: 120671 - DNA, 984 bp, Homo Sapiens
  misc_feature (134)..(228): n is a, c, g, or t
actttgtacaaaaaagttgggtcctgcagtcggggcgagctcccccctcagtctggggcagcgcagtggggagggcagggacctcagtaaaggggtggactggggcgctggttgcagagaggactgacaattannnnnnnnnnnnnnnnnnnnnnnnnnnnnnnnnnnnnnnnnnnnnnnnnnnnnnnnnnnnnnnnnnnnnnnnnnnnnnnnnnnnnnnnnnnnnnnacaaaaaagagttttcctgttaataattaggaagactaagcagccccagagataagacctcatgggatcattgttacttcttatggagtgataaagtgaccttcctcgaattgtatcaatccataaccaatcaagttgctgcaacctatgcactgggcttgaatgaaagctgtcatgattctgctaaagattctctgtctttccctgtgtgtgaaaccttaacgtctctactttggaacgccgatctcatttatttggagttggtgtttccaggtggctttcttcaagctttgtgttcacataaactcagtacttaatcttacattctaaattttattatttactgctgacgtcagtttctgtcggattgtaggcgcctgaccagagagggcacgcgtcgctatgttgtaaaactcacactcgtcaaaaagacatgggttagggttttccccctccctctggatgaagctaattagctgacacagatggtcacctccattaccaaatagagccaggatgaactatgtgtgaccaagagtgttgtcaagtcctcttccctgaggactgatagtgtttatcttgaaaacatgtactcaatgggttgtatagaacagtgaagtttccttgtctcttttcaacctcttagctgtttgcctcaatttcccatcacattctgggtttaaggcttacttattaatatgtggtttttatttcttttcactattatcatcgtgaaaatgatttctcattgggggg

SEQ ID NO: 120672 - DNA, 899 bp, Homo Sapiens
tttgtacaaaaaagttggtgacgggggtgtcggcacccacggtgaccgttttcatcagcagctccctcaacaccttccgctccgagaagcgatacagccgcagcctcaccatcgctgagttcaagtgtaaactggagttgctggtgggcagccctgcttcctgcatggaactggagctgtatggagttgacgacaagttctacagcaagctggatcaagaggatgcgctcctgggctcctaccctgtagatgacggctgccgcatccacgtcattgaccacagtggcgcccgccttggtgagtatgaggacgtgtcccgggtggagaagtacacgatctcacaagaagcctacgaccagaggcaagacacggtccgctctttcctgaagcgcagcaagctcggccggtacaacgaggaggagcgggctcagcaggaggccgaggccgcccagcgcctggccgaggagaaggcccaggccagctccatccccgtgggcagccgctgtgaggtgcgggcggcgggacaatcccctcgccggggcaccgtcatgtatgtaggtctcacagatttcaagcctggctactggattggtgtccgctatgatgagccactggggaaaaatgatggcagtgtgaatgggaaacgctacttcgaatgccaggccaagtatggcgcctttgtcaagccagcagtcgtgacggtgggggacttctcggaggaggactacgggttggacgagatatgacacctaagaattccctctgcttcatctcctagctcagccactgactgcccctcctgtgtgtgccatggcccttttctcctgacccattttaattttattcatttttcctttgcattgatttttgagactcatgcataaattctctagaaaccc

SEQ ID NO: 120673 - DNA, 271 bp, Homo Sapiens
gagaagcattgagctcttaggaacgtgacgtgcatccccagctacacttctgttaccacttcagcatcaccttcctccccacttcatcaagtcttttactccagacaggctgcagctggtgacatgaaagaccggtcaaggccagctaaggcatctgcttgaggcctcccgtgcctaggatggggcgcagcctgcagttggctgtcacagccttgtgtcagaaacaccctttaaaatttaatgtttccttcacgggtaccctttggcataa

SEQ ID NO: 120674 - DNA, 855 bp, Homo Sapiens
gcaccatgagggcgctcttgacccacaccagcccttgtcccccgtcagtcaatgtgacctgagtccgccattgaggccagtctggctgcccccaagtggtccctctgagtccccaactccctggccagcaaggagtgaagctccatgccccttggtccacgcctctagagtctgagcatatcctgcagcctcgatctcaggaggcaacgcatgcagcccccctgcactcagaaagggggcttctccagtcgtggtcttcttctctgtccacaagtttccagatggcccctccttggagcccctgcccaggcagggaacggccacatcctcgggcagagccaagagtcaccgtctttcgtgggcctgggaccaggcccagccaggacgctaggaggctgcctctgctgccatgggctggatcaacatggtggtggcctgcagcgggtagtagcggccccgccaggtcttccagaagattcccttcttaagcttctgccgctgctgtgggatggagcggaagtactggccgttgaggttggaatggctgcaggtgccaaaccaccagcctccagagaggctcttggcgcagttcttgtccctgcggaggtcgtgatcctggtcccaagtggagaagggtacggagaggccgctgggtgggacggtggtggcgcccagctggccggccacgggtgcagtgagctgcaggctataggccgtgtcctcgccacccaggtgcacggagaactgcagcaactcggcgttgccatcccagtcccgcagctgcacggccaggcggctgttgcggtcccccatgatgctatgcaccttctccagacccagccagaactcgcccaa

SEQ ID NO: 120675 - DNA, 935 bp, Homo Sapiens
aatcaagagcacacagaggagctgggctgcaaagaggaggctagaacagatcctcagagaaaggcagcgatgagtgtccacgtggccgcagaggaacagaggaggcacttccaatggccgtggactgagatatgctttgttgctctctgacactgctcccgctccatgggactggctgttatgtttttgggacaagtacccttttacttaagccaactcgagtgactctcttgtccttgcaaccaaatgtacccttgactgtaacattctcctttgagctaaactaaacaaattctgccaggagatccctcttgtaatctatttcaactgacagcgactacttttgtctgatttattacagctgtaagcccttccttctggaagggggaggggctgcgatctcttttaaagctagaccaattttacactggcaggggccgtgtgtgcggctctacattacagcgccctacaggatgcatctaaactagtttggtcagcttatccattccctgaaagcaaggaagccgccacatcagtaactccgttgctaaggcaactgcttactttccatatcaactgcaaactcgttgctatggagacacatatacaagaaaaattcctctttccatccagggaccagatggcagagaactcgcagaagccatgggttaaggggctttgctaagtaagatgtttactggagtacatttctctcctgatatcagagatgcggctgccccaagcacatttagaagttgcactcttggtacaaaagtaaaggtttgttctcttctgcctgcaaaactacagccagcaactagaggtaagttattgctgaaataattctgagagggtctccctctaaatgtaaacctcttttgttcttatttcccatgctgaatataccccaaaatgaatttcctagtcaaacccaa

SEQ ID NO: 120676 - DNA, 931 bp, Homo Sapiens
ttggggtgactcccagtctcctggtggctctggcctcggccctgctggatccacctcctagacccggggcttcaaggctcatggggtagtacccagcctgctccccgagtccagcgaccctgtgacaccggtctgcagggagttggggactaagggcttccagagagtggctggaagagactccaggcccctggggagactgtactgttcctgaacactggccttggccacactgggattcggagaggaaggaggagagccccatgcttcctgtctgcctcctccaccatccctgacctcagttgagctgcctctggccttgttgctgctgccacatcctaggtctaagagttgaacgcctctcctaggccactacaaactgacccctcagcagggctggctgccacagggctgccctgcctcataggtagccatggtgagggctatctgctgcaggggggtcttggggagagtggtgactccattgacccagcttttcattaaaggataacacactgcactgagtctgatgtgtgagcccggcctagcccctggctactaggaggacggcagctatgcccagcaggtaccagggggaggtggtatctatactcttggggagtctcatggttccccatcatatcccagactgcagggctggctgaggctctccttgacgcctgggcagggtctggtggggtcaaagcttccgtgaaggaagaaccccatctggggcagggcgggtgaccgagatagaggggtctacagtctcttcaagggggcctgctttatctgcagtttgcgtattctcacttctccactcatgttctatttatcttgaaaggactaggaaaggatgacataattacaaggcaactctagcagagggggtctcgagggccattttccatggtcctgttcctggacttaa

SEQ ID NO: 120677 - DNA, 862 bp, Homo Sapiens
ggggcgtgagggcacaaagctccttgcggtgtttctcatggtagatttgtgggggtgctgcctggggcagctccaatgattcagattgggccttgtctcctttccatggcacacaactcatgttttttgttttaggttccagagatggctataaacaccccactcttccctctagaggaagaatgtaagcttctcagtcttttccggattcctgaggtccaccttattctctggtgtccatgatttatgctttgtcactgggagaaaagattggaatcaaaaggaaaaaaataaaacccacctcttctctcttctcaatagaaaaataacttttggattacttttattttgctaccactgtcaaagtgcagaatttaaaaaaacacataaaatgtaagaccttgtttccgtttccccacccttccctcccacccccctccaaaatccccacgattttcttgctgtttccctctgcaaatgccaggcctcaaagcaggaggaccgaacacaatcggtcacatcgctccttttcttccatttcttttgaaccacgacgccaatgactcgggagacaaggcctgggtgacggataaatttagcgcacgagtcgagtagctagcgcgggccggcaggcgtgggaccgcgagccgcgcgggggcctcgggggcagccctccatcccctcgggtacggtggggcccgcagggcgcggctccctcggaaggcgcggattctagccctctggccgcggccctggacgccagcctgcccttctcccgggcgtgggcgttgtttcggggcggcagccaggccagcggctgcagtccgcggctttcagcacccctcccttctctgtgccccaa

SEQ ID NO: 120678 - DNA, 1556 bp, Homo Sapiens
ttggcagagttggtggctggacctcctgcgacttccgagttgcgatgctgtacttctctttgttttgggcggctcggcctctgcagagatgtgggcagctggtcaggatggccattcgggctcagcacagcaacgcagcccagactcagactggggaagcaaacaggggctggacaggccaggagagcctgtcggacagtgatcctgagatgtgggagttgctgcagagggagaaggacaggcagtgtcgtggcctggagctcattgcctcagagaacttctgcagccgagctgcgctggaggccctggggtcctgtctgaacaacaagtactcggagggttatcctggcaagagatactatgggggagcagaggtggtggatgaaattgagctgctgtgccagcgccgggccttggaagcctttgacctggatcctgcacagtggggagtcaatgtccagccctactccgggtccccagccaacctggccgtctacacagcccttctgcaacctcacgaccggatcatggggctggacctgcccgatgggggccatctcacccacggctacatgtctgacgtcaagcggatatcagccacgtccatcttcttcgagtctatgccctataagctcaaccccaaaactggcctcattgactacaaccagctggcactgactgctcgacttttccggccacggctcatcatagctggcaccagcgcctatgctcgcctcattgactacgcccgcatgagagaggtgtgtgatgaagtcaaagcacacctgctggcagacatggcccacatcagtggcctggtggctgccaaggtgattccctcgcctttcaagcacgcggacatcgtcaccaccactactcacaagactcttcgaggggccaggtcaggctccctgaggtcgggccttgcctttccctgccttcaggcctattcctggggcactgttggcctggacctgagaggaattcattcccacctgcagcccttaagactcctgcccagtctgtgagagttctccttctcttgcccatggtggccatgccctggcaggggatttgtggatgggattgaggggctgattccctctaccactggaatccagtgtaccaagcccacgtgagctgtgcccttggggcccaggtccgccagcttcctctgccttctctgtcccttgtccttcttttcagcttagactctgaccatccacctctcacacaggtcagggctcatcttctaccggaaaggggtgaaggctgtggaccccaagactggccgggagatcccttacacatttgaggaccgaatcaactttgccgtgttcccatccctgcaggggggcccccacaatcatgccattgctgcagtagctgtggccctaaagcagccctgcacccccatgttccgggagtactccctgcaggttctgaagaatgctcgggccatggcagatgccctgctagaagcggagcttactcactggtatcaagtggtactgacaaccacctggatgctagtggacctgcggcccagggcctgg

SEQ ID NO: 120679 - DNA, 906 bp, Homo Sapiens
ggttcagtctccatgtttacattccctttatttacaggactccgcttttatctttcttttgagctaaaaaagcaacctggctggaggtaattatactgagaaattctgtatcagttgatattttaaggtctgagaccttcctaactgctgcttcagaccttgacttatctactgcgttcgaggaaaataatcccaaacactggttttgtatttcatgatattctgttggcacacactctctttgtaccacttcaggccctatattaattttttcagtactacaaaccaaatccaacacagctgcacatttatggcccaactgaaacaaatttgtgttaaagttcttaccacatatatctggctgatgtttaggctgttcatctctaattttattttcactgagaagcttttgatacttttcttcttcggtgaaatgcggaactgtgcttttaaatccacatatttgcatattagagctagttatatcactcagtctagaggagtgaatcttctgggattctatattctgtgtttcagaaacagaacgtacaaagtcatctttcacatgaacatgtctattcatacagtttgctaagaaatgaccactaagatctggagaaccaatagattctgggactttatagttttcaagatttttgtgctgtttttcatccttcagatataaagaatgttgactgtataaaagctgaatttttttccaggggtcagcaacagacattaaagaagctgtgtcttctgatactgtgattttcagtggagcaattggagcaccccaaaaaatgtggacttgagatcctccactcatgatttcttaatcttttgaccatcaaggaaaattcaggattcaggtcagagtacatttttcactgagagccccgccgccaa

SEQ ID NO: 120680 - DNA, 916 bp, Homo Sapiens
ttggcccggagccagcggttctccaagcacccagcatcctgctagacgcgccgcgcaccgacggaggggacatgggcagagcaatggtggccaggctcgggctggggctgctgctgctggcactgctcctacccacgcagatttattccagtgaaacaacaactggaacttcaagtaactcctcccagagtacttccaactctgggttggccccaaatccaactaatgccaccaccaaggcggctggtggtgccctgcagtcaacagccagtctcttcgtggtctcactctctcttctgcatctctactcttaagagactcaggccaagaaacgtcttctaaatttccccatcttctaaacccaatccaaatggcgtctggaagtccaatgtggcaaggaaaaacaggtcttcatcgaatctactaattccacaccttttattgacacagaaaatgttgagaatcccaaatttgattgatttgaagaacatgtgagaggtttgactagatgatggatgccaatattaaatctgctggagtttcatgtacaagatgaaggagaggcaacatccaaaatagttaagacatgatttccttgaatgtggcttgagaaatatggacacttaatactaccttgaaaataagaatagaaataaaggatgggattgtggaatggagattcagttttcatttggttcattaattctataaggccataaaacaggtaatataaaaagcttccatgattctatttatatgtacatgagaaggaacttccaggtgttactgtaattcctcaacgtattgtttcgacagcactaatttaatgccgatatactctagatgaagttttacattgttgagctattgctgttctcttgggaactgaactcactttcctccttgaggctttgga

SEQ ID NO: 120681 - DNA, 911 bp, Homo Sapiens
gggtggggaataggtgctagtggtactactgggtagaggccagggatattagtaaatctctacagtgcaaaggacagctctgcagaacaaagaattacccagtccaaaatgtcaatggtgtcaaggttgagaaaccctggtctcaggtaacttgggccattctggggttctagaacatgtgtgaataagtccttgttttattctcagcctctatgagggaaatgaatgcccagagaccagagccccattctgcagctcctccctgtttaggctgtggaaaactggcctccaaactctgcagtgacaacacaagatggccgtgaagcaagcctggcaccagagggtctcgaggggatagagcacctggaagagaagcaagacggggctctgggaaggcttctttagtatgctttagaaagcttttataacaaagggagactgccatacagaatgaaggacaaaagacagactcagattagatgttgtgatgccaatctcacccaaaggtctaatctgggagagacaaagagaagcccactgggatgactggaccagtggttaagacagggaaaatatctgtcctggagaaagctttagaagaacaagacaagaagtaaacttttaaaaatccttagaaatgttgtaagagcaaggagtaaacctcaaggtcaatcatagaaacccagaaaactcaactgcaaaggcattctgagcaagaggatgcaggtggtgaagcaccaggggggcccagctgaccctgtgaggtcagcagactgggctgtccccgtctctgtgccaacagagttgtcctctagctgttcttcttgggtcccagtatttttgtgctttggaaaggaaatcccaagagccctcctggctgcactgaaaagtaccattcctgggtagaccaa

SEQ ID NO: 120682 - DNA, 850 bp, Homo Sapiens
ttggaacgaagagaagtacagtagtaagagtaacactgtagccgccaccggcaaggggtgcgcgctggggagcggacgctgcatcccctttctgctgcaggaacctctcatcagaccgcctgagggaagcggcgcccggagacccgccccggcccggtccacattctccccaggaagccggactctatggggcgggaccctgggggagcctgagccgagcccggagccagccccgaacccctgaacctccagccaggggcgccccgggagcagccagcccgtgggcgagccgcccgcccgccgagcagccatgagcgagacggtcatctgttccagccgggccactgtgatgctttatgatgatggcaacaagcgatggctccctgctggcacgggtccccaggccttcagccgcgtccagatctaccacaaccccacggccaattcctttcgcgtcgtgggccggaagatgcagcccgaccagcaggtggtcatcaactgtgccatcgtccggggtgtcaagtataaccaggccacccccaacttccatcagtggcgcgacgctcgccaggtctggggcctcaacttcggcagcaaggaggatgcggcccagtttgccgccggcatggccagtgccctagaggcgttggaaggaggtgggccccctccacccccagcacttcccacctggtcggtcccgaacggcccctccccggaggaggtggagcagcagaaaaggcagcagcccggcccgtcggagcacatagagcgccgggtctccaatgcagaggcccacctgctccccccgctgggggtccaccccaccaccaggacctcccctcctccaggt

SEQ ID NO: 120683 - DNA, 924 bp, Homo Sapiens
tcgcacaggagaggtctcttctgtgtgatcagaagtttcatccacaatgacctcaatgtcatcatctgttcgactggtagaggttcctttgctgcttctgcaagctctttctgcagccgggcttgccgcctcctggagtctttttcattctctgcattaagccgattggcttcctgggctttctcagccatccatctggtgaccagctcctggttctcttccgtagttttcctcagttttccctccaaggcagtaaaagtgatctgcagggcatcatattcatccttcagggtctggttggctctttcaaggtcacaaagcttagtgcgcaggtctaggcactccgtctccaggtcagagatagtctgcaaacattctgcaatttttgcttcattcatctgcatctccctgtccttccgctgcatttggttattcaggtcaatcaccagttgagctaactccccacgtttcttgtgtaattcagtcagttcctcttggtgcttaatcctcagttgggccatttcttgtagctgattgtcattccatgtgccatcatgtccgggacttatctcgtgcctgtttggtacgtcatgcttttcagcctgtagtttctgggccaacactgaatgaagatctgacttttccagcaatttgttatactgcaggatgatctcctcgaacgcctgtctctgcagccggtcccggcgcctcagttgctccgagatgtggcgcttccagcgggggaagtcagcggcgcggaggcccgacgacatgtcacttgctgccccggcacctcagcgccaccaatgcgagcgagggctgacggccgcagcctgcagcatgaagcaaccagcagaagcgggaatgccggcaatcccggagctcacctccacacactggcagtccccgagccaacttttttgt

SEQ ID NO: 120684 - DNA, 675 bp, Homo Sapiens
cagatcatagaacttttatttagatggaatcattgcgaattacatagaagctaccagcctaagccaaacccatgaggttcatgtgaacttacagttacacaaataagaaacaaatggtacatccaaaaccataaggaaatattctgatgcccagatgatgaagactggggtgaattaagtccacacatttatttcaagttgttaaagagtttgtgggccacgcaatggtccctcgcatgcaagaagtcaaagagctcctccgtgcaatcctcttctgtatgtgatcgagaggatacacgctcatcacagagctctagccgctcccgggcctttacacatttctccaactgctcgcattgctctctcactgttgttaggggatccgtgcagaaggccagctggcagagccacactgccgccagaaatggcagaatgcggtctcccattcaattctgatgctaagtagtagggaaaagtttcacattcctgccttccaaggttgccagtatgcactgaaagcctcagtcctatcactaattcctcctctccctcttcctcctcctcaggatctccggattcggtaagcatcttttgctcgtcctccagtcccatgtctggctacggttctagattcaacacgagcagcaacagcggcacctaacccagttcagccaa

SEQ ID NO: 120685 - DNA, 844 bp, Homo Sapiens
agaatagaggggagatgtgtacttaaaaatcatacacattaaaatttgataatttcaacaacaggaaagagatggtcaagaagtaagagaaaagtaaaatgcaagcttaaagtcttgttagacttgggcaggggatgttttaatactgattaattagaactaattgtatttttaaaaattaattttaaatatgtaaaggtaagcacaatatttaaaggtaactgcaaaattagtgacttacccaacacacatttataatctcatggtttctgcggatgaagaattcagacatggctgagctaggtcctctgcttcaagatctttgcatggccgcagtcaagatggtagccagggctggggtctcaaggctggagtcaaggtgatggccagggctgggcttcctctttgagtgaggaaggacatgctttccaagctcatgtggttgttgggatttggttccctccagctgatggattgagggccttagttggtagctgtccatctgctgaaggccaccttcagtttgtttccacgtgaacctcctcaacatggccacttccttcatcaaagcatgtaaaccaagaaggcagtggagagtctaacaagacagcagttacaaccttgtgcagtgtaatcatggaagtgacatcccgcggtctttgctggattctgatggttagaaggaagtcacaggttttcatccacactcaggagcagaggaactctcaagggtgtgagcaccaggagactgggatccctgggggctgtcttagagctactcactaccacactcattcttaataaggcctgtcagacaagggagacttggtcataccctgagtta

SEQ ID NO: 120686 - DNA, 970 bp, Homo Sapiens
ctttcaccctcccaccatgggggagagcactggggcgttaagggcttcttcagtagttgttccccaggcagctttgatataggtctcccgtctctgggctgctggttctcagcttctgcggttctggagtcagcctggtgggaactctctcctcttcgccaagtcgccacgtagtattttgccttccctaacttagtgacagctctcacccacttctagcttaggaatgccattgctcctgactcctctgtcaccatcctcatacttgtgggttatgtgttttaaatactcccctctgtggtttcagtggatttctgagcccagtgagatgcatgtgttcagtctgaccttttgacatagaagcccagggatacttttacagtcactacctattcaaaattaagagcagagggggaggttggagggaggtcagccgaggggccaagacctgcatggaggtgggagcctaggttgggggccactgatcagtcatgggtttggggaggggaagattggaggagggtggacaaactgagggacaacaggggcacaagcagacgtggaaaggaacttgatggagggaggcggctggtgggaagacaaggtagggtactgagcccagcctaaggggtcaggcgggctcagggcagaaacttcgctcaagaagcgtctgtcagaggcatagaaatgatttcacgtgactctctgggtatctacttgtttgacagatgcttttgctcctgactcccatgggctccccagaaaagtgctctttcaggcagggaagggttattgtctgcatttcacagctctgcagacttactgggggacaatggttcagggacctactgggattctggtggcccaagtcttgcaggctccaggggagctaggttctgtgtgtctccactccctgcaggaacctgtgaggtttcacaggtggaagagtctggccccaatatcaagccaa

SEQ ID NO: 120687 - DNA, 779 bp, Homo Sapiens
ccaacaagaagccataacttttatttatgatagaaacagtacaaattcaaaccaagctgcagttactcctttgagacaccaaaaaaagttgcttccatatggttacattgttaattccataatcgcatttacaatatcattactgttgttcttcagggctcggactgcctttgctctcgacacatttgcttgtgacatgaccaattctatgtccttaacttctacacctgtttcatcgacctcttcctcttcactctcctcttgtacagttggagtctgtgtgttttcttgaatgtttgagacagcttcaccttgaactttgaatttctcagcagctgctagttgtgcttgctgggataaatcttcgatcttggcttccccaaaaactatgtaagtatctgaagcagggctcttgtagacatctggttttgtgatgacaaagaggatattcttagatttccggatagtgactctagtaactcctgtaacctgccgaagacccagtttggacatagccttccgtgccttcttttcactccgactctgttttgctttactgactggttcttcatcgatttcagctgctgccgccagctgggcttgttgtgtggttgcctgggtggaatcctgttcttcaagctctggtactgattcatcactgtcagattctgttccagaccctgtctcagcctggggctgcggcaactcctgctctgtagcagggacggtttctgtggcttcgccgggcattttgtgcagggaacgcggaaccaagccaa

SEQ ID NO: 120688 - DNA, 905 bp, Homo Sapiens
gagaaatgcatgtggctgtgcatcagaagtacaacacggatctgtctgttgaaactcgtttctaaatgtcttctcttctgcattcgtttatactcttgttttatgtgtacagaatttgttctgtggtgaggcgggaggagacgtcgccgaagggggatggctccattcggagatacttctgcggcgaggcggccgcagcggagaaggaggcggcggtggccgcggccgccgacaacggggaggcagcggccgaggtgggcgccgacaatggcgcacatcgcctgcgcttcggggacgccgggctcaacagcgggtcgaaatccagagtccttttcagagtggctccgcacgccatggccgggggcagctgaggcgccgggctcgggtggggtcggggacgggtgacgaaagaagagggtgagggaaggggtgaagagcgggaactcgaggagagcctacccgacgggctcaggagccaagcgggtcgcggagcgccggctgtggaaaggagagccgctgccgccgctgcctccgcggcaggggcagtggccagggacggcccgggtgagagcgggaggggcggtggcgggcagaagcacacgccagtcgcgtcaggggggttcttccgcctcctcaggcgcggctcccccgagagaggctccggccgcccccgccgtccgctcgagctttgcgccgcgcctgaggcgcttctgtgctgagactagatcctttctgaagtcgaaaacagcaccgtggggtgtgaggctggaacgcggctcctaatacgcccgagtacggtcagtagcttgcgagcggcgatcgatgcagagagattgcgaggtagctgccgcagcaggaacccaagcgaacacgtccaaccgcttcccaacttttttgtacaaagt

SEQ ID NO: 120689 - DNA, 882 bp, Homo Sapiens
  misc_feature (260)..(268): n is a, c, g, or t
gaaaaggataaaaaaggaatgtaagtgactctaccacaaatacaggaaaagtttggataacctcagtacctaccactaccaacaacaagaccaaagagtctacccccactgtttatgatccctccctctcttctcaggactgccatctgactcaaaccagttcatggctatctgactacaaaacgaggctgaacttgatcacaatcaaggtgaaaatgaaaataacaatcaagaaaaacacttccctcattactcatgannnnnnnnnaatttaacatatatagtacatgtaaacaactggcataaaattcataaaaatacaatactcctatgcaatatcactttattcctgatacatactttcattttctcattaatatcactggcctattttaacactatattttttttgccaagcatttttagaggcttatctttttaaagaaatacagccccaactttgttttcgaaaatgttgtagcaatagctattttgatcgcttctttgcccatccttactttcctcatactaaagcaaaaatatttgtaaatgctaacaatatgcaaaacactgagctttaatactgttttgtacgcctatggaacctgctaccaatctgcattgccatcaaaggtgtggatgctccacagtgcttgggctgcgagctgtggccacggctgcatagcagggaccttcaggcctctgctccaaactggctcccctaatatatagccatattttgctgggggttacattcataaacactgctacaaaaggatccttctggaaaaagctaatttatattacttttaatggttcccagcaaatgaagcagttataatagtatttttaatgcttttttcctatacagaatttctccaa

SEQ ID NO: 120690 - DNA, 966 bp, Homo Sapiens
tagacatcgacacatgttgcgtaagccacagagaaactgggttcatcaatagcttctcaaagaccaggtcaataactcctttcagccgctcctctgtgtcaacagtaagtctgacacttgcttcatcagttgattgaacatctgtggtgtcaatttatttaagatacttcgaacttttctaaaaagctcctgggttttaatgttttcgggatcatcggcttggctgtctcgtttttggcttggcttccaggcattttctgcctttttcaggtgtacatcttcttttacagaaactgtgatgatctttctgggttctcttctttggccaggttgagatcttcgtgacccaacattcaacaaaggtacgcctcttccaccaggtgtctgccttccaaaatcagcaaaggctggtgtaaagtctggtcctcgaggcaaaattcgaggatccagagttcgcattggcaatttgggttggttgatcttgtcaagaaccacatcactgataggaggcaggccctctggtttttgtatacaggcaggcatgaactggaagtccagcagaaactccctgtcatactgcttcttaccttcagtatcagtaggcttccaggattctggtttaaatggaaatgtaaccccatcaccagaactatctgtggagcctgaattagcatctattccttcaccctcagaaacactctcagcaccattacgtactggctcagcttcttctccattttcttccacagctttcactttttttaggtcagaggggtctctttcaggatgaaacccctggctcattttatcttgttcagattcaagtactttgtcaatggaaagctcctcttcagctttaagctccaattctgcctctaacatctcttcagtggttcgggtccgatcttttggtttcttccatgtctttggtacagttatagctatttgagctgggacagggcccaa

SEQ ID NO: 120691 - DNA, 921 bp, Homo Sapiens
gctcactacatactgaagattagaaaaaaatctagtaatttcactaaactgcaattaggattggacccaatgcaaatgtgcacaacataaaatttcctatacattctatagatgtaggaagtttattaattatattattttgtaaatatatattatgtatttaatttgatttaatcacattacataggttgaatttgggggttgcttttaaagtgttgagagtttagtgtttatttttgtaatccaacaactttatccaaaaatgcagaaaatttttctggctggccaggaggataacatttcagtgttgataagtccattgactgtaacagcccaggaagcgtgctggccctttggcaagcttctagtgtctcaaggaagaactgcaggtacaatagaagagatgaccctctttgtgtagctgctttgccagttccagctgatgattgttcatcaacttttcgtttataaccactacgagtggctttcctttttccagagtctccaaacagcttcctgcacctgcgtgactaataacaagatctgctttctgaatgtcttctttcaaggaatccttgtacctgtaaacatccagagtaaacgactcagtactgaagggttcaggtaccaccgttcctctaccaatttgcaggataagtcggttgtaaccaaggctctcgattttctgtggtagagttgcgggggtttctttccgagcgcgacggtcaggcaaggctaacgcggctggcagtatggccggagatggcgggtggcgagccaagccgccgcctgctcgcctccctcactcacttgcagactgtcgggcgccgacacacacgcaatgaggtcgtcaaagctggtggtccctacggtaacaaacacgcacttcatggcgcgggttcctcaagccctgatcgccaa

SEQ ID NO: 120692 - DNA, 871 bp, Homo Sapiens
gggggcagaccgttcatcagcgggggtggaggccgcttcacccccagggggcccagcagggaggttgggtggagccgggggcttctccattttaaagtggaactggaggaagaactgcttggtctcccggttccagtgtgtccagaacttgccctccgccttgtcgatctctctgctcggcaccttgaaggcaatggtctcgtagggctcggcggccatgagcaggtactgccagcgccggtccggaggctcgatcctctgctcgtacgcagacatgaagcggtgacgtggcatgatgccctcggcgatctcagggtagtcaatctgcagggacacggccgggtggcagagccgcctcttgggtgcctttggccgccccccacgcccaagtccctgatctcacctggaagaggaggctctgctggcccatctccgagtctctctgcttggtcactttgtagcccgggcggccgatcttcacaaacttcttcacctccaccttgaccttctcaggcgcgggctgggcaggggcctccttggcctccttggctgctcgccgggccaggttggtctggtgcttcttcccctgcgtatgtgccaggtagctcccctcattgttgtgaagtgtcaggcagagtttgcattcataggagcccaggtggttcttcatgaagtacgggtccttgttgatgtcgatggtctccagggccagctgccggaggcgctccctgcggtcacggttgctctcggaggaggaggccacgcccccgctcccggtcttgcccccggggcgatgctggaagtccatggtgatggccttagggctttagcagactgggagacaccagagcccaaggccgcgttatcccaa

SEQ ID NO: 120693 - DNA, 964 bp, Homo Sapiens
tgtacaaaaagttggggctttctgttgagacattgtcaccaaaacaattttttgaaatgttcctgaaactaatttgggtttaaagattaaaagggttgttaccattcttatctgagtagttgggaggaggggactaccactttagttcatttggaaaatatagacatatttcttttgctttcttaaaacagcttaaaatgatgaacttttataattttaatttgaagattgaataaatattttttataaagattgttttgagtgctgatttgtttactttttgtagatttgctttatccatgatattcagtacaactctgtcatttctttgtaatatttaaaaaatattagtaaaggagtgaattaataaagtagtaatagtaaaatgaaaggaacttgactgtacagtttgtagccaggttaagcatttggtattgtttcatttacaatttgggactaagatggaaacactttttttataagtttttaattcatagtcactaaagagataaatgtttcttatatacatttgtatatttttatggtgttatttattccatggcttagcttccttcaaatcaaaatttggacacacactattaagagaagccattaaaattttactaaaattgtgcatgtaaattaattgtcagcattccatgtctcaagattttcttaatttagttcgctgtttaaattaattcatgtcctgtaaagttctgaccttgataacaaagctataaatatttaagtttgctaatatgcgtaagtattatcggtaagttacaagatggaagaagaataacagtagggcacagtcattctgtgaatccttttacttatcaaatttggtagctattctagggcttttgcagaaaaataagtgttcaatgtttgtagttcttcaaaagcatgttgcagtagccagccatactatgtgtattcccagtatcatgtacgcact

SEQ ID NO: 120694 - DNA, 945 bp, Homo Sapiens
tccccagtccccagcagccagtggcccgtggcagggccctcccggggtcacagcctgcgttgagctcagtccagggaagaacaaagcagagaggaacagaggggagccgtggcaccttacacgtagttgctggcagcagcagagcgggcagcagaatacttggcggagtaaggcttgtctgtgcggggtggacagttgcagcaaagcagccccccgccaaggagcagcaggccggaggcggcccagccgacgtagagcgaggcacccatctcccgcttctgcccggaggccaccagcggattgtagaagtcttggatgatgttgtgggccgtccaggacaccggcactatcaccataaggccggccaacaggaacaccacgcccgccacgatcatggtcttggccttggcgctttcatcctccaggcagttggtacacttgccccccaccacggacagcagcacgcccagagcagccacgatgatgctgatgatgacgagggcgcgggccgcctgcaggtcctgcggcagtgccagcagcgagtcgtacaccttgcactgcatctggccggtgctctgcaccacgcagttcatccataggccctcccagatggtctgcgaggtgacaatgttgctgccgatgaaggccgtcacgcgccacatgggcagcgcgcagcacagcatgacggccagccagcccaggacggccagcgcgatgcccattacctgtagccccatggaggccattgttcagcgtccgcgggagttgaggacctggaaggctgaggggatccggctgtgggggccgtaggattccaagcgctggggacggacttaacgttcgcagagtgcacctttgcaccgtgagtcaggagataaagccagtcctgatgcgcaagccagcaagtgtgagcagaccagttccttccagccgacagctgcccaa

SEQ ID NO: 120695 - DNA, 905 bp, Homo Sapiens
caaatgcttccccactgcatttcgattcatgctcagcactgatgctgcccatcctgggcaaaagttttatttaataaggcatacagcatggcttccatgatatgaaaatgtaacagtattggaaacagagatgagttctgaatggaaagtcctgtttttttccagaacatagaaatctgctttaggcatctttgaaatgatcgaggaaatctcttctaaatagactgatgatgagtatattcctctcattaaactccaacggtcactttgctgccagtccagcactgtcaacttacgatcaaggtgagcccaggcaattcttcgagtaccaaaaacgatagatatgatactattaactgccttaagtctttctctttctatgtctggtttgaggagctttctcaggaaccggttttccggtgactttcttttttcccgtccagtctttggacaaagtatggagttacaaacttgaactgtacttttatacttaaacaagggcacattcattaaactctctaaattctgaaatggcccaaagttttctctgtgctctacgatattgatggaccttcttccacgaagcaatcggaaagcttcaagttctttagtagatgctgtattcaacacatgcaagatggaagcctgctgttctgaagagaagagcttgtcaagtgcattttcgggctcctttgcattttcatcacaaaaagtaacattgggagtaattttcttaggtgtagtggattttttccgacagcagaaattatgtaaggcccagtacagggatgacctcgacggggtcagaaagcatctccacctctctcccgccgtgaagaggacagacccgctcatctccaagttgaatcagtaggtccagtccaacttttttgtacaaagttggc

SEQ ID NO: 120696 - DNA, 922 bp, Homo Sapiens
  misc_feature (564)..(579): n is a, c, g, or t
ttggctcttgagaaagatttaaaatgtgtctaatacactgatatgaagcagttcaactttttggatgaataaggaccagaaatcgtgagatgtggattttgaacccaactctacctttcattttcttaagaccaatcacagcttgtgcctcagatcatccacctgtgtgagtccatcactgtgaaattgactgtgtccatgtgatgatgccctttgtcccattatttggagcagaaaattcgtcatttggaagtagtacaactcattgctggaattgtgaaattattcaaggcgtgatctctgtcactttattttaatgtaggaaaccctatggggtttatgaaaaatacttggggatcattctctgaatggtctaaggaagcggtagccatgccatgcaatgatgtaggagttctcttttgtaaaaccataaactctgttactcaggaggtttctataatgccacatagaaagaggccaattgcatgagtaattattgcaattggatttcaggttccctttttgtgccttcatgccctacttcttaatgcctctctaaagccnnnnnnnnnnnnnnnngacaaagcctcttaataaatttaatggaactatacatagaacagcagctcttcctcaccctttgcatacctttaatatttttccttcttaaattggccacagcaggggtcattcacactctcactgtcttgcaggaatcacaagaagtcttcatatgtgaacgtgccattcagttggtagttaagagcattcaacttcaaatatatagaagatatttgttttagtgcaaatccatgatggagtgcctcccttttccttttttcactttttgaaaagatgttttgggtagtagtttatatctcaggtgctctttctacatagtaaaaatgagaaaatgtttaga

SEQ ID NO: 120697 - DNA, 846 bp, Homo Sapiens
ttttcccacagagcaggaagaattttttctctcaaatggaaagtttttgctcgttaaaaaggttatattaaatagccctaaagaaatatgttctgaaaataacaattgtatcatattccacttattattttccatatgaaaacatcaataaaataagtttaccagagtcaataagcctgttcaatgaacactgaaaaatacaaatttatccagagtgattacaaatgaaaatgtgtgctatttcaaaattacatgcacctctttaaaaatcagggcaattaatagagcgcttaaatcatattagctgagttcaaatttggcccctaaacaatacttaaaatttccttattcctttatactattttacaaaataataaattacttgattatcataattttcttttgctacttatttcaaactgtaaagtcaggactgcaaactgatgtaggaatcttatattattggtctacacctaattatttataaacattaatggacacaacaccgttccaatccactacaacaattttcttctattttacaagtaagaacttctaacctatcacaacaacaaatcatattttaaatttgggtttgaaaacatgtattagaggcacatttttaaaaacaagtacagtaggaaatcctgcttttcagtgagccagtgaatttctgtttatttgtatttatgaatatttggtttacttccttcttctgggtaagattagtatgcaattctcattcttctttagcaagtcaaaaacctacagaccttaactatatgaaaacttaatttggtattgttagatgaagacagttaagctagcaccaaaagaataacccaa

SEQ ID NO: 120698 - DNA, 930 bp, Homo Sapiens
tccccaccccacaataaaaatctgacccaggccccccatttctttcctcatcccctcttccaccacaccatcccggaacaagtgctccaggattccctgcccactggccattttggagtgtgtccattgggtagcaatgtggaaaccaccagggccttgtggagaaaatggagggggttgagggagtcccaggaggggcttatttgagggcctttgccacttgctcataggcgagctcgatctcctcatcatctggacaggtggaagcgaattcttcccgggcgtaggcattgctcaagtaccgatgcactccccggaaggcctcggggatggtgaatccccggtacttcttacacaccacctgtactatgtgtaactttggcaacaggttgcagtcagccagggtgagctcgttgccatccaaaaacttcctctgagagacaccttcatcttcagcactggtttcatccacttcttctgggaggggggatgttaagtaattgtctaaaaccttcagggctttcaggagtcccttctccagattgtcattgagtgctgggtttgaattcttgatgtaggcagaaaatttggcaaatatgtccagcccagctgtgttggactcagggttcagagctgccagcttggggtacctgggagggcacagcactgcctccagaaattcctcaatcttgttggtgtctgtgtgcacttcagtgccatacagcaggaatgggagctgcccccctgggcacagcttctgcactgtctcggtccgccttttggtgtcaacggtggtaacattgaaggtgactcccttgagccacagtaccatgaacagtctctgggagaatgggcagttcccaatcttggccccatcactgccagccttcacgaacaattcgacctgcgccaacttttttgtacaaagtt

SEQ ID NO: 120699 - DNA, 815 bp, Homo Sapiens
ttggcacctggcgtgcttgtgccccgaaggcttcacgggcctgtactgtgagagccagatggggcaggggacacggcccagccctacaccagtcacgccgaggccaccacggtccctgaccctgggcatcgagccggtgagccccacctccctgcgcgtggggctgcagcgctacctccaggggagctccgtgcagctcaggagcctccgtctcacctatcgcaacctatcgggccctgataagcggctggtgacgctgcgactgcctgcctcgctcgctgagtacacggtcacccagctgcggcccaacgccacttactccgtctgtgtcatgcctttggggcccgggcgggtgccggagggcgaggaggcctgcggggaggcccatacacccccagccgtccactccaaccacgccccagtcacccaggcccgcgagggcaacctgccgctcctcattgcgcccgccctggccgcggtgctcctggccgcgctggctgcggtgggggcagcctactgtgtgcggcgggggcgggccatggcagcagcggctcaggacaaagggcaggtggggccaggggctgggcccctggaactggagggagtgaaggtccccttggagccaggcccgaaagcaacagagggcggtggagaggccctgcccagcgggtctgagtgtgaggtgccactcatgggcttcccagggcctggcctcccgtcacccctccacgcaaagccctacatcttagccagaaagagacaagggcagctgagggcggggctctcagccagtgagatgggcagccccctcctgc

SEQ ID NO: 120700 - DNA, 888 bp, Homo Sapiens
atggacgggcttcactttctttgtcccgcaactgatttggggcctcggtgtgaggggagcgccaggacctttcttctcttctttccatcaggcagctccattgctccacttcagcttggtctggaacccggtccatgaggtagagcccgcctttctcttctgctctgggggcaccttgctttgttcctctgtgtggtgttgagctgccttctgttgctggtcttttgcaggctctggttgccccttctgaggctcaccagttgcaggcttggatctcattttttgcaagctgcgctggatccttaattccttcattttaagttttcttcgatcttctaaagagaactccactattggtctcttcagaggcccaaagatttctggattgttgttgatgaggcggagggctttcagggcatgctcgtgctcttggaactccgcaaaggcgtagcccagggactgacccttcatgttcccatgaactcctttgaggtctcgcatcactctacactccttgatgcgcacccctttctctccactagtagcactcagcagcagctttctgagctgtttgtcatctacagcctttgggagattgtgcaggcagagcctggttcgggagacaaagatattctggtccttgagtttctgatgcttcagcagctcaaaccgttctcttttggccatatcagcagcactcacaccctctgcagccttcgtcccagcacgaatcaagccttctcgggccagatagagattccgggtgccagtcggcttcttcaccttcgtcgtctgaagctttgcagcctcatcacgggtcaccgccaagtcaaccttgagctgccggccatccagtttaagcccaccagcctcattctctggagccaa

SEQ ID NO: 120701 - DNA, 757 bp, Homo Sapiens
cctgcccgggaacactggtggttggggtcttatgaaaagtcagtgatggcagagttgtgacaaagtgagggccagagaagggttctctttttagatgatgtgtaagcgtgatgaatatgtttagaatgtagatacagataacacattagcaaacaaagtaaataattaatgttttagttatctagacaattccagtgtttactggagttacactggattctatttcatttattaggaatttacttaacttcctaactttgcactggagaattatttatgaagcaactaatgaggcctggatagggatatcaatgctaaatcaactggccatgcttgaaccaaagggttctacctgggagcagtctacttttcaatacaaaccaacagctatgtgctgatgagccatagcagtaataaaagtggttctattctataaatggcatatgttgccttctacaacaaggcatgataatgtgccttttcatgccaggcaccttccctgataatggatcagtttccatcttagtttctacaaaattacctctaatcccctcagaccacattcatcagaggaaagccttcactgaaattagcttgctatagaaagtgttaatggctacaaaacattgtgaacgtacttaatggcactgaattctacacttaaaaaaggcagtaatcataaactgcaggttatatatatcttatcataataaaaatgctattatcaaggttttttataagagtgatatggtagagg

SEQ ID NO: 120702 - DNA, 584 bp, Homo Sapiens
tgagcaacagaatgagaccctgtctctcaaaaaatgtgggactgtctctggcagttgggtcacctaattgtgcctggccccaagaaggaggggtgggtacttgaggatggtaaagaacctccccaccaaaggtctctgtttcttaaattctgattacatgtgtccccaggcctctagggactgatcactggagcatgaggcctgatagatcctggtggtcacttgttgggcctgggggcagaccaggggtctttcccagtgcatgagaagagatgggtgaggtgggaccagagtgggcgacagtggctggacaccagctgcctgagccccgccttacctctttgagggtggatttcattgtgtctatcatgaacgacagggactccttgtcagagtaattctctcttggatcaaaatatccgtggactgctctggaaagtgaggagttgggggttgttggggttcatcttagaaccgcctcccagcggtgcccccatcctgccctgggttcaagcctctgaggagaaaccaaagcctgggctaccccaactcccacactgggtcccttgaccctgggtggattt

SEQ ID NO: 120703 - DNA, 897 bp, Homo Sapiens
ttggggccaggtacgggccgacgggcccgcggggccggcgccgccatggcggccgtgtttgatttggatttggagacggaggaaggcagcgagggcgagggcgagccagagctcagccccgcggacgcatgtccccttgccgagttgagggcagctggcctagagcctgtgggacactatgaagaggtggagctgactgagaccagcgtgaacgttggcccagagcgcatcgggccccactgctttgagctgctgcgtgtgctgggcaaggggggctatggcaaggtgttccaggtgcgaaaggtgcaaggcaccaacttgggcaaaatatatgccatgaaagtcctaagtaaggccaaaattgtgcgcaatgccaaggacacagcacacacacgggctgagcggaacattctagagtcagtgaagcacccctttattgtggaactggcctatgccttccagactggtggcaaactctacctcatccttgagtgcctcagtggtggcgagctcttcacgcatctggagcgagagggcatcttcctggaagatacggcctgcttctacctggctgagatcacgctggccctgggccatctccactcccagggcatcatctaccgggacctcaagcccgagaacatcatgctcagcagccagggccacatcaaactgaccgactttggactctgcaaggagtctatccatgagggcgccgtcactcacaccttctgcggcaccattgagtacatggcccctgagattctggtgcgcagtggccacaaccgggctgtggactggtggaagcctgggggccctgatgtacgacatgctcactggatcgccgcccttcaccgcagagaaccggaagaagaccatggataagatcatcagggg

SEQ ID NO: 120704 - DNA, 873 bp, Homo Sapiens
tttcacaactgtcttgagacgttggctgggcacgtcatggaatggcccatgtccctctgctccgtggacgtcgcggtcgggagtgcgcagccagaggcgggccagacgtgcgcctgggggtgaggggaggcgccccgggagggcctcacagggaagttgggctcccgcaccaccaggcagggcgggctcccgccgccgccgccgccaccaccgtccaggggccggtagacaaagtggaagtcgcgcttgggctcgctgcgcagcaggtagcccttgatgcagtgcggcagcgcgtcgtccgccagctggaagcagcgcccgtccaccagcacgaacagccggtgcgcctgcggccgctccaccgcgaacttctccgcgcactgcgcgcacagcgcctgggcctgggtgtccgcccgcgacgccagcgtccgcgcctgctgctcgggctccaggtacgacacgcagatgaagtcctgtacggaggagcgggaggcccgggccttgttgagagtacgccggcgctcccagcggtggatggagtcctgcacctccacactcagctgccgggtcaccgtgatcttgtcgtagctcttgatgtgctccagggccccgtaggtggtggtcagatagtaggaaccctcccccagctgcagggcggggtccatgagctccatcatgtactccacattgagaagcatctccgtgaggttgctgcgggccagcacatacatgagcacaggcaggaagtcatccgccccatagggcttccctgggttgccgagggccatggagtcgtagatgagtttgcaggtcttgagcaggatggagatcttcttctcaggtgagtaggccccaacttttttgtacaaagtt

SEQ ID NO: 120705 - DNA, 593 bp, Homo Sapiens
aataaatttaagaacagctctaccttctctccggtaatggtgttcaccatctcaaaaaactttttacaatgaagttctgtacagaaatagatttggaaatcatcagaattgtgaagcacataaagaaagcagcatctttcttcaaatttagaaatactcactcccctgacagaagaggcactaaaattccactcatgtatacctttcttgtcatcaggaagcacgtgccaaatagagattgtcttttcctcaacttcattgttgatagacaaataagaaggttgatagattttggttggttctaatattaatactggaaacctaaccacagtaacatctgtctttgtggcctcgaccaggaaatccatccaaaagtccacaagttcttgcttggccacaggctgttctgtggtcagtttcacaaaatgcttatatattaaaattgtctctacaatagacttgaggtaccatgctggtgtcttcagtttaaaaagcttttcagatgcttgaatgactctcatgtggtcattggctaggacgctggcccccagaaaaaatccaacttcccagtagctcgtggagtttttccccaa

SEQ ID NO: 120706 - DNA, 922 bp, Homo Sapiens
ttggtaattatattaattttcttggaaagatcctcttttcaaggtactggtaaattggtgagtatttttattagtaaagcatgaaatagtatggtaataaatgataagacatgtatttgtggaaagctgtagggtattcagtttaccctggctttcctttaagcagagggcatctttttctctcctacagtcacaaaatgtgttatcattaaaaaaaatcaaattaaagccaaaagtaggtacataaaaaccacacacatgcatgcacacaaacatcactgcagcccacagcagacccagccgttgttaccatgaagtgacaccactccaggcctctcttgtctgcaggctggcaggctgtcttctctccagttgccttcgtcttgcgcctgcctttgcattccttgcgacgggctttcttatttctgcggtttggattccagccaaggctgtttgtatctcactactgtttatgtgtttgtggttctgtgatggtgttgctttgatcctcagtttattttcttacccatgtttttcttgtttccttctcaggatgattttatcatctcatctttgaagtgttgttttccgaaattcatcgtattcctgaaatttcttcttagctgtcttagtgcagtttgtttcttggatttgtattctctggcatgctcttttcctctctctcatttttctgtagtatgcctgccctcctaccctgctatttctttacatctctctcatgcttaacatggatagctgtgtccagatcttctgtctgctcatccatgtgactcaagaggaggttctgggcagggggccttgccggactgcatgaaaggacatgagttttgctttctctgctctaatattttgcttaagccaagaatccttttcttagagatgttctatatgattcctgtca

SEQ ID NO: 120707 - DNA, 956 bp, Homo Sapiens
ttggagatctttcaggaaggtcctgggtggggggccctcctgctttcaaacccataccaagtgctttcctctgaagggaatgtgagggaggaagaaggggggagtttcagagacttctgaggttccccaagagggaagaggtcaaagtacctcctgagcggggagagctactgagttgaactgatttgctttgccatttgctttagcagcagccaggcccagtggcagcaattgtacgtgcatttccaggggtcagttgtccagttcatccctgagccttgagctcccagtcgcaggctgatgggaaccatcctgtagaggtccatctgcgttcagacccagacgatgccagagctatgactgggcctgcaggtgtggcgccgaggggagatcagccatggagcagccacaggaggaagcccctgaggtccgggaagaggaggagaaagaggaagtggcagaggcagaaggagccccagagctcaatgggggaccacagcatgcacttccttccagcagctacacagacctctcccggagctcctcgccaccctcactgctggaccaactgcagatgggctgtgacggggcctcatgcggcagcctcaacatggagtgccgggtgtgcggggacaaggcatcgggcttccactacggtgttcatgcatgtgaggggtgcaagggcttcttccgtcgtacgatccgcatgaagctggagtacgagaagtgtgagcgcagctgcaagattcagaaaagaaccgcaacaagtgccagtactgccgcttccagaagtgcctggcactgggcatgtcacacaacgctatccgttttggtcggatgccggagctgagaagaggaagctggtggcaggctgactgcaaatgagggagccagtacaacccacagtggccgacctgaagccttctccaagcacatctacaatgcctacctgaaaa

SEQ ID NO: 120708 - DNA, 897 bp, Homo Sapiens
ggttgatactctaaatgtgctttgagggcagacggtgttgttaacttcaaaaacagaagtatttccatgttatctgggtaatagttatcttgtttgtatttattaggtttccattagtgctctattataaaatatttaaaacacagatttacaataaaatcattatattattattagcaaagtgggaacaaataatgtgtagaaaattttgtgaggaacaaacataaaatttgattcatatggcctgtttgcaaaagtaggcttatttcagggggagtatgaaaataagcaaggcagactattatgagaaatagcctctaatgaagatctccatctctttagaataaccttgaaaagtaacaagaggaagtcatgaaatgccgcattatacagtagcaaaatctattttttaatacaaaggagaagaggaaaaaaaagaacacctctagtcccagtgatgaccactgatgactgtaagtcctagacacagagaccctaataatactactgcgattctgaaaagcattcctgacttgtttaacagtttggaaaagtgtccgaagtttaagtactaacgcactatgaaatggagatacacaggaaagactgaaaagtagaactatcacaatataaggaaattaaagatcacaagtagctactttcaagcaagtggtactttgagagtctatgagaaaaataaaatttaatatcacattattcaaaggcagtctgattaaaatcctgagagtccctgcctgaatcctctgctgggatgtaaagtcttctaaagcaggcctgcacagggctttacttctcagttctatggggacacaggataggttgccagagtgagtgagaagaggatgtaaaagacaatttaacctttcctccccccaa

SEQ ID NO: 120709 - DNA, 754 bp, Homo Sapiens
taagtgttcatagtttttctggacctcctcagggctcagcttggacacgttgagaatctgctgtgcctcctggaggctgaggccggagaggttggaagcggctgcagaccggtgtccagcgcgtcctcgggcatcagctgcggcccggctggctgtgtggacatgtgggtgatcgctcagtcctcagcagcccacacttcaccctgggccttccgagttggtggctcacccctgccaccagcacaggatgagagacacagggacaggtggctaggagctgcctcttctccaggagtggtttcctttttagggggtagaggctgcaaactcctgccgcaaggcccgtgcaaaggccctgcccaccacctgcacgcccatcacaatgatctgggccaggtacttggcctgtgggcaaagcaggcacccggttagcaggccactccctgtgggcccacagagatgggccctggaaacggctgccgaggggcaaggctcccggagacccgaggtcatgaagcacagagctgcagccccaggccaacccctccaaagcaccctgaatgaaagcttccatggtgggtggcttagttactcactggacaggcaggcaggcgggtgaacttgaccgagctcccagaggcagactggccccacctcatccttcaggaaaggcgtagaggagcaaggcaaagtggctgcaaccaccggcttcaggaagaaacactgtggtctgggagccccaaacttttttgta

SEQ ID NO: 120710 - DNA, 263 bp, Homo Sapiens
gagctgccagcagagtaagactgcacaaatggcagtaggctgaggcagcagagtggggcagccctggaaaggcagctggctcctgggcagggccaaccacagccagcccagttgagctaagcccctgcccctccggctctccttcatgaggtctgctgcctcatttaatctctcctctctccatcctgcccactacccctcgctcagcagggcaaggacataccgcccatcctgagaccctccctgcactcggaaacctggga

SEQ ID NO: 120711 - DNA, 595 bp, Homo Sapiens
tgtatgagcataggtggaggcataatttcctcgacatcccataaacacttcagtgttgagtagtgtccccccaactcaaagagatatgttggggtctaatttccatactcagagtgaggcttatttggagagagggtctgtacagagttaacagtgttaaaatgaggacttaggagtcaatatgactgatgtccctataaaaaggggacgtttgcacagagatatgtgcatatagaagggagattatgtgatgagacagtgagaagacagccatctacaagccaaggagagaggcctggaacagatccttccctcagagccctcagaaggaaccaaaacctgtcaatgccttgatttcaaacatggaggctccagaacagtaagacaatatatctgtgttgtttaagccatccagtttgtggttctttgttacgacagtcctagacaacttatacgattgttctaatattgaaagtgggatattaagtctccaactagtattgttgagttgtctctcttcatttctgtcagattttgcttcatgtattttggtgctgttattaggtacatacatgtttataattattatatcttc

SEQ ID NO: 120712 - DNA, 931 bp, Homo Sapiens
  misc_feature (206)..(222): n is a, c, g, or t
cagccacaaagactgggatttttaattctagttatggataagtagaccatttaaggccattttccctttttctgtttccctttcaagaaaagaaatatcggtatttttaaaaatatgatcatgtcagtttggtctaattttatatgtgttaaggagagcaataatagtcaaaagaataacaatataacgattaggtatttagtttnnnnnnnnnnnnnnnnngtagaggatggggcaatagatagcctgcctcttctctaaccaatttgttaactgtttaagaaattaacaataaagaatatggcatatggaggccagaatgttacttttatcatgaacaaagttgatttcggagaatgcagcttatctctactttgcaggcagatggccatcttaattctatatcccagaattaaacaggtctcccagccactcatagacatgtctcctgcagggaaggaaaaattatcgactgacaaacagtctgattaaatgcttgtcttttacacctgctatggtttgaatgtgtctcctccaaaacttaggtgttgctaatgtgacagtattaagaggtagggcctttaaaaggtgattaggccacaagggctcctgtcttgtgaatgggattagatgcccttataaaagggcttcaaagagggagtcatccctttttgtccttctgccttctgttatatgagcacacagcattcttcccccgctcctcaatacgcaacagtcaaactgccatcttggaagcaaaaagaccagaccttcaccagataactgaacctgccagtgccttcatcttggatttcctgacttccagacctgtgaggaaacaaattcctgttctttataaattacccagtctgtggtattctgttatagcagctcaaaacagactaacacaatgtccccaacttttttgtac

SEQ ID NO: 120713 - DNA, 190 bp, Homo Sapiens
ttgggtttttaaaacagaagaagtttgagtaatttaaattatgatgggaaggagctaaaagtgggggataggttaaagatacaggaaagtgggaggaagaactgacaagtgaggttccagagagggcaggagaagaggagattcccatagggggattaacactttcttttcttttttctttctaagacag

SEQ ID NO: 120714 - DNA, 884 bp, Homo Sapiens
tcccttgtagtcggtgacatccatctgagtgtggcagtactgcaccagctccaccaggatctccccatcacccttgcggcaggccaggtgcaggggtgtgcagccctcctcgttctccgcgcaattggcacagctgatgatacggctgtgatggaagcactcgcggatccctagctccacagccaggtgggccactgaccagctggggtggttacggatgaggtcggtcaggtgctgcaggacctcagtgtgcaggacctgaggggagctctcatagaagggtagcagctgggaagaatactgatggaaattcactagggcgtcagcctccaactccagctggaagagtctctacaagcgcagcagccagccagagtctagtgaaggcagtgcccagagagtgttggctcaacgggaccagcctgttgttccacagagagtgcgtcgattaacagttaactactgggcatgtgatcaggctggaaggaatgatggaaacccaggaattgcagtgttcaggtggctgttactggagaggatgggcagacgagcagcaccagtaacagcctcatggggctcaggacacagggactggagcccaggcgtcggaatccactctgtgagttcctggggttgaccaggacgcagtcccaggtgcggttgggagtgttctggaacagaatcagctgcccttcctcccgaactcggtcactcgaggtgtagtcggccacagccacctccttcacccggaatgggttagagaacaagttggtgacgccactgaaggtattgaccaggcggccaaagaactgcatcttctgcggggcaggtggggaggccccaccgtcttccccctctgtctcggcttactcagcacttcccaa

SEQ ID NO: 120715 - DNA, 394 bp, Homo Sapiens
atctctatcttcttgcagccttgctctggccagcagtcttgtaactctatctcttaacttaccttctgtcaacagaccattaaaagggttccatgattgctcttctccagccttcccagtgacatccaagtggacactggcaggagataaccagtttacctcaacaaagtcatgctggtggtatccccactagtgccaatcaattacagctgtcagtcattcattcttcctagtactggtcccagcaggggccaacttcctgatcatattgttggacacacagggctctgagttctggaataaaactttctccagaaatttccattcattatcttatgacaattaaaaagattctggagtttggggcatggtattcataacataatgctctgcc

SEQ ID NO: 120716 - DNA, 451 bp, Homo Sapiens
gccccctccctaccctggcacagcaggggtcctgggcttcccctcctcatccctgtctgcagaagggccacacaggcctctcccccggggggtggcagcccaaccagctctgggggacgtggtggctgcttcctggccagtttgggtgggaagtgaggacacgtcctggcgctaactgaagctgaagggggaatctaggtcggcagagtgcaattagccaagttggactcgggccaagacgccagctatagctgcctctaatgagggacaggccggctcctttcccgccggctacccggcttccctggctgcgcctgtctgcacagggggagctgcctactcacagtaggggtgccaagtgccccagggctgtgcggggctgcaactccctgccctaaggagcaccttgtccttggtaccagaaggttctttaaggtcttgttggggccaa

SEQ ID NO: 120717 - DNA, 891 bp, Homo Sapiens
gccaggagtggaggaggaagcagggcaccggaccacagagtggcaggggtgacgaggaacattcgtgagcacccaggtagaagccaggcacctctccccgttatgactttcagttcataactgtctgtggtttaacaggaccccaaggctcctgtctcccgcctgaatctcagtgtaaatgagcaggtattgtttggttctgacccttcctaattctttccccaaagccccctgaagcagtcatcttggccaggcggggtgtgggagggagctgcgggcggggcaggactcgctgcctggctggagctccccaggccagcaggtgtgcaggactgtgagccaggcctgtgccctggctgacgggctcatccctgacactgctggccattaattctgaaggcccagcgtgcagggctcagatcacaatgaagccaatactagcgtgtgacagctgcctggcatcattggtctgccctgtcgccagggggcagcggtattgctggctcacacagagctatggggtatgtcttatattccttagagaaaagaaatttaatgtaaaaagacccaaagtgatatctgtcaaaataagtaaccgctccaggttcacagatacgcacagcacgcaaggtggattctgacgcacagtagggactctcaggctgacgcccaacagggatgccggggccgaggccggtggtctggaggaagccccccagctggccacagcagtagcaccaactggctgatcgggctccaggggacaaaggccacctcctccctctgtgagaaactggccccaccgggctctggccccttctcccggaagctgcgaacggctttgtggggaatatacaagatgacgatgatcccaacttttttgtacaaagt

SEQ ID NO: 120718 - DNA, 908 bp, Homo Sapiens
  misc_feature (467)..(493): n is a, c, g, or t
aaaccaagctctaccaaaaacaccctttccccacacatggaaggacagaagggagggaaggacaagaggaaaaaaccgggaactctcaagtcacttatcagcaggggtaaatacgagctcaaattaaggcatttttgtggcttgtcctctggaatggcattctaccctcccagttgagcaccccaaacctcaaagcatgatgctctgactgccaagtgagttccttgttaccctcagcatctctttgaaaaccctgtgatagatggaatgtgagatctcagaaatggaagggagaaggtataaggagctaatatcctgcttcacttttcccgtcccatcctaaccttaaaagtaccggttgacgaaattccactccctggctactgtaacaagaggtagtttggggacttgtacccccagccatcctaaccaagtttcatgagctaaaatatttagcactatctacnnnnnnnnnnnnnnnnnnnnnnnnnnnaaagagggagaaaaaaatgcacacaaagcagtgaatagtaggctagactcattggggggtaattaccctagactcctaactttccaggctagttgaggaaactaaggaatgcctcccaatattccaaccctcaaagctcacactgcccccagaaaaacaaaacactcacccccaatccaatgaatcatctgcatagaaaaccagagccagcaggcctagggaaggagcggatgtttgtgccctcctctagcacatactagttcagtggtatgttctgccaggcagtgtggaggccctcagaggcctcactagggaataaaatcactgaggttctccttccacatctcgtttaattttcacaaatttgtgtgtggcaaaagtctcaaactttaccatcagcaccaacttttttgta

SEQ ID NO: 120719 - DNA, 320 bp, Homo Sapiens
taggtcttcagcatttgttctttaatagaattttcaatgccagcttgcaccattaagtcattgacattcttctgtaagtcctcaatgcgatttcccatttttctgaggtttaatgttgccgtcagagcttgaaaatgttcctgaagttcctgaaatagattttctgccgcgtcccgcagcgcgcgcccgccgggggcttcagggccccgcacgtccatgtggaccgctggccgggggcgtcagtggggggtcccgtgggccgcgcggacccggcgcgaggtggcgacagctaagctccgcgccaacttttttgtacaaag

SEQ ID NO: 120720 - DNA, 942 bp, Homo Sapiens
cagtcctccacattccctcttaatatggtatttgcactattacaataatgaaaattgaaacaaacaaaaagaactttagtcaaactcccctcctcttccagctttatgggaatagtttaaaattacatttctatttctaggacttcagtgctctttccatctgacttttaaaaactgattacagcaaatgaaacacagttgtctaagtgatatagtatacaaaaataacatcttgatttctgtgaaaatgcatttctctgcaattcttgaatagctccaaattatgctaactctgagcattgatgtttactctgggttttagatttagtctttgaaaataatgtgttctaaacctttgccatcaccatctatgtgtccaacatcaacactgtgatgaagttgttcctgtttaggcttttattccgatttctctcgaacagccattaacacgcatgtttatctttttgtttactcccactcaactgtatgttctatgtagggcctgatacagatgttacttgatgttatttaatagctactgaggtcagacaatccaagaccatcattatactaaaattaaagttatttatggaagttcatagacacttccagaattggttttacctcctacatgggaacatgttcaaggaacccaggacgggcttactggtctgactcaactcttcccattcatcaatccctattcaccagtggcacggaaagggggttctttaacaaagcattatacataacacctctaccaaactaaacataaactttttttgtagttaaatgcagaaagtcggtttttttccacccctttcctccttttacacggcaagtaaagctcactggcctgggagttgcctctatctgccaacctttggccagtgaagaggattcagagaaaataatacaaccatcaatcccaacttttttgta

SEQ ID NO: 120721 - DNA, 956 bp, Homo Sapiens
ttggcaccttacagatgtggaagatgtgaaatttgtcatcaattatgactaccctaactcctcagaggattatattcatcgaattggaagaactgctcgcagtaccaaaacaggcacagcatacactttctttacacctaataacataaagcaagtgagcgaccttatctctgtgcttcgtgaagctaatcaagcaattaatcccaagttgcttcagttggtcgaagacagaggttcaggtaaggatgactgataggaaatgttggtagttacgagtcacatcgttgtctacaaatccatttaaatggtattggagggtgagtaaaaccttgaatgtgaaaacttaagctgaaaaattgtaaaaacatttcacgcctaccatgaatagatctgtttctttctgtccacaatgatttgtgtcatagacataattgatcaatttgcaattgttttcttgacaggtcgttccaggggtagaggaggcatgaaggatgaccgtcgggacagatactctgcgggcaaaaggggtggatttaatacctttagagacagggaaaattatgacagaggttactctagcctgcttaaaagagattttggggcaaaaactcagaatggtgtttacagtgctgcaaattacaccaatgggagctttggaagtaattttgtgtctgctggtatacagaccagttttaggactggtaatccaacagggacttaccagaatggttatgatagcactcagcaatacggaagtaatgtccaaatatgcacaatggtatgaaccacaggcatatgcatatcctgctactgcagctgcacctatgattggttatccaatgccaacaggatattcccataagactttagaaatatatgtaaatgtctgtttttcataattgctctttatattgtgtgttatctgacagatagttatttaagaaacatgggaattg

SEQ ID NO: 120722 - DNA, 874 bp, Homo Sapiens
ggggcaggtctaaattcacagaagtcaagtcttagacagtgggtgacccagattgccatagaggtcaggcttgcggtgctgaacacaggcaggtgtcggcgcaactgtcgcagatagttgaggtctattcgggcaaggcagaggcctggcccctcagagcagcgggccaccactgttccccaggggtctaccaccatgctgtggccataacttgctctcttctcatggtggcgtccacactgtgctgctgccactacatagcactgggtttcgatagcacgggcccgcagcaacacctcccagtgggctgggcctgtaatggatccaaaagctgaaggataggtaagtatctctgctccagcttgagccaatgccagagagagttcagggaaccgcatgtcatagcagacagctagaccaatcttgcctgctggtgtgctgacaggtgactcaagactgggcccaggcatggtagagttgctttcacacataggcccctgccctggaatctctacgtcacacagatgtgtcttcctgtaagtggccactactgcccctttgctgttcagcagcacgtgacaattgtagattttctgagtctgctcccagtcttggccacgctcatggaaaccacccaaggacagccagagtccacattccctggcaagctgggtgtattcttccaaaagtttcccacccagtggttcagacaggtgtagcgtctctgcagggtcccgtgcaatgaagtcaaatgcctcaggcaggaaagccaggcaggcacccagtctggcagcctctcgaaccagctcagcacatgttttaaagttctgttgcttgtctggcgtcgatgttacctggcacccaacttttttgt

SEQ ID NO: 120723 - DNA, 508 bp, Homo Sapiens
cttctctcgcctcttcctcctaccaatggaccgtttttccagctgggccttgagccgagcaatctcttcctggaattctcgaaggagggcatccttggggtcctcattgacccttggtttgttcttaatgtttttggcacggttggcatatcgcagagtggtcagagtctcttctacgttgtaagaggcaggccccacgttggccaccatcacagtcttggcattgccaccaagggaatcttggaggagcctggtaagctttgagtcccgatatggaatgtgagtgcttttgccgtccactagagcagagatgacattacccaaagcggaaagggagaggttgatcttggtagcttcttttaatctctccccttgtgcgccggtcttggcttgccgttcgctgccagcaagatctacaaggttcaattttcctacacggatgtggttttcaccatcgaggcccacctcgctgcactcaatagtgataacgaaaattgcatgagaccaa

SEQ ID NO: 120724 - DNA, 947 bp, Homo Sapiens
ccattagatgagaattccagaatgctaagaaaattttcttgggtggattctataatttgtggtttgaataaaactttgaaacattccattagtattaaaattctcacaatgagaatatggttcatatttaacacattttaaattactagacagtctctccccaaaagaaattttaatgctttattctgcgtagggcttattcactgcctggtactaattcaggaataaattaacccttccaacaattaggatattgtctagaaactgcctcttgcacactgctggagaaatcacttacattctgcaaatcaggagtaaaagagaaatccacttcttcattataaaatgtttttctatacctaatagcttattaattattggtataaatcactatatttacctatataattacacattattctataatgcctctgaattaagcttcacagttatagattttgttaaatgttttatcattaagagttttctatacttgtgcctgcagccatgatctagggtccagaatgtctttgatggatttctgccttggagctggcactggcttggcttcaaaattggttttagtgtctgtgtgctcaccatcacttaatctatttctcctggcaggcagaagttttcgaggagcagccattggtttctgtaagtgatgcattagagttgatagtttggtatccaaagacgatgtctgagatacacttgtttttccccagttgtccttaaccaattgatctgtgttactctgtgattttaagctgaatggaagtttatcagaaggaggaaggggagcttgtctctttttccctttttcatcatgtaatggctcacttgcaggatacagtacctttttctggatgaccatttgatggttaccatcaaagagtgtggcccaaggaggtggtaaggattcttcacccaacttttttgta

SEQ ID NO: 120725 - DNA, 907 bp, Homo Sapiens
cagatgggaaaggccagagagggtcattaggccatcaccagaaatgaggatatggctggctttaatactcctgtgaatacagccattttggtgcagatagttcaaccctctcacggctccaaagagaatgtttcttattaaagtttcactcattcttcaggaaaataggtcctcaagagttgacttgctgaaccataggccataaatggagaaataacccaaagccagctgccaacagtgaaaactgtccaataagttgtaatattgggatgccggaaaaagtgggatagaatcacggctttctgtaaagctttcaggcgttcttcattgcagttttccagatttgtaatttttatagttaccagtgttcccgtgggagtatgccgtgcaagatggacagaagtcaagttgtcaaatcctcttcctatttctacttggagctcatagtgagaaacgttggtggaacatagtacttcactggctctagtggatggacgtgaccaggaaagggttggctcatcaaccaagtattgatggatactggtttcagactgtttttcaggtctgagtgattcaacttgtgttcttgaagtgcagaagcaatccaaaagagacattgaatcactttagttcacacagaaagtgacaaaaatccatctattccaaagaaggcttttgttttatcttcctttcaagatgcagatatatcctacctagcggcgaccacggccagcgactctcttcaggctgccagcggtgcggacaggggcgggcgccagagccctgctcgcggaggggcgaggcgagcgctctaggcccgctcccggcgcggggcgcgggagggcggcgaggccgcgaccggggccgtgggcttggaactctgcaccagccccccaacttttttgta

SEQ ID NO: 120726 - DNA, 427 bp, Homo Sapiens
caaaacaaaactgcttttaataaaactcaatctgtacagtttttaggcttctggcaacaaaaaatttgaattagaaactaaaaattcaaataggttttaaaaaaaagtctaagtccccttatttgcctaaggaggattaaaatctatttctcctaactcctaggcaaacttactccccagccaacacctctcacattcaacactttattaagatttaataatttgccccttagtctttaaaattagagcaactagctattttggagtttattctttgcttgtttcgcacagccattccatccaaaacaaggtcgaatgccatgtcaaatcctctagagatttaattacaaacgtaagctgtttaaattctctacagaaggaacatcaaccaccaagtattcccgagagtggcactagcatgaggggg

SEQ ID NO: 120727 - DNA, 909 bp, Homo Sapiens
tcttgccagaattattgtccgggactccagattctgagcctgggaaccatctgctgatgtctgtgcagttgcaccgtcaggttcagagatacctgggtcggtctctatgtcagcctgggaagtggccattttggcctgatttacattctgggtctgggtatcagctgttggggcttagtggtatcattccaagccttgaaaggggtcttaggcctgctgttggccaggtcattggcattgagagactgagagaaattgtaggtggcatttgggcccactttagtagtggcattctgggccttgaaggccatctcagacttgttagcagctaactcaccagtggttgctgcctgggaaaaatcataggcagcatttggaccctttggggtagcattttgggacttaaaggctgccttgggctgcgtgttgggcacatccttggcattatgagcctgagagaaatcatagacaccatttgggccttttgtggtggcattctggactttaaaggctgacttaggcctagcggcagctgctgaaacctgaatgtcagccatctcattggcagttgggggctgtgaactctggggactagcagctgcggtggcctggttagtaggtggagcctctgagatctggatggcctccatcaaggtctgcataagcaaggcgctgtcttctacggaggcctcagcctggaagccgaggaggcccgcaccacagtccattttctgagccatggctcctgtccctctggcaagagcggagcctgggggcttgcctcaggccccaaccccaaccccctcgctgcctcccttcttcacgactcagaggatcgggattgctgggctcggctctcagcagccgcactctctccttgtccaggagaaaatgccccaacttttttgt

SEQ ID NO: 120728 - DNA, 710 bp, Homo Sapiens
taaaaagctgaaaaggtacttggctttttgagggcggggcttgggaggcagggccctgcaggagaccatgttctctgtcctcaggcagatcccagctggcctctgtccccgggctgcaagctgacagcaggcccgggaggcggtgaggccctctgccctggccttgaggagaaggagtgcgtgtgtgaggcgggggtgcattggccctggagtagggccagggcccatcaccagcaccaggctgggagggatttaaaaccagggtcctatctctgagccaccccatggggaccctcgatcccatcctgttaaggctgcgggactcgagggtaggcagtgggccgggcccccgtcgggtcaggacggaggtgggggctgccccagaggaacattagtgtttctaagagcaccttagtgttgccccgcctcggccagctgggcgagaagttggggagcgggggaggaggctggcgccatggagtggggaagggagccgtcaccgttgggagtcagcgctagtgtaaacaggcatccccacccacccagataagcccccccacccaagtgtggggtcctgctcagggagtacctcaagggccggggcccaggtggcgccggcaggctcagacaccgccctggcagcaggggctccgtggaatgcaggagacccagcagggggtgccggccagtgtggacccaacttttttgta

SEQ ID NO: 120729 - DNA, 967 bp, Homo Sapiens
tcaacccaattcaaaagatcgtgaacaaatttcatattgatttcttcttctgttaaatttgatccagcaaagaagactttagaaggggttttcggatctgcatcaacttcaaagtttgcaatgaatttggctctactcgtgaactgaaatttggaactaatctgatgggaaaccaggtgtataagctggagtgacagatggagtcaggcgggaagtcatccctgatgacaggccagaagtcatactagaagaggttagggaaggtgttaaactctgggtcagccctgaggtcagactagggtgtaaggtctgtgcaaatcctgagtttaaactttgagtgattcctgatatcatgagctttgtctgttctgttgtcagtatgcgtcctttgctgtacacagaagaacattcgttccttaaggccataatttcgtcacgcagttttgcaaccctctgtaccaattgatctgcctggtagtattttccatcaataagaatctgtacatcaattacatgctggcgtaaaaggttctcacattcaagtatatacccagcaatttctgcttcattctgaaactgcactcctgattctaatcttttagaatcagactgaagagcatttccagcaagaatcagtttgtcttcacagatgacactgtccctctgaactctgttggcaatctgttgcaacatttctaacctgtgtccatcaaaggattcactgccgaagctaatgcaagagttgatcagtgttggaccacaatgaaccaagagaagattttcatttgaatcaagactggttcgagtgctggtagtgttactaaacacagaatcactgctacggtaactataactactactgtgcatttttattcctgaaacgatgttctttctttcacctttcaaagtagactaaaaggtaggaggtctggaaaaagctctacttcccaacttttttgtacaaagt

SEQ ID NO: 120730 - DNA, 877 bp, Homo Sapiens
ggggtcgatgatgcccccggtgcaggcttgcgcctccagcagccgctgccccgtgatgttatccaccaggttccggtgcatggcgtcggtgatggacactttctccagcgtctccgtgtccaggatgccagccacggggcccgtctcctcagtggggtccgaccaggaggccagctgggtcctggagacggcggggctgatggggtaggaggaggaggatcccaccgaggaggaacgggagcggaaaccaccggcgttgcccgagagcatgtcggcgaactcggtgatggagagcgtgccggcgcggtactggtccagtgccgagcggtcgatgaggttcttggcgatggcatcatcgatgtcgtactggcgcccggagcggcggtcgatgatcatggacttgaccacgccgtccgaggaggagatggtgatctcctcccactcgcactcctgctcggacagctccaggtacgtctggtggtcaatcaggcccttgcggtaggcctcgtacactgacatctccttgcccgtctcggggtccacgatgaccactcggcgcttgcgcacggaggacttggaggacgtcttccgctcccgcttcttctccttcagcggcaagagacacaggcccgtctgggggtcagtgatacaacgctccatcagctgcaggtaggtgaggttctcctccgtgttagggtcaaagaagcccttggtgtcgtccgaggggtcggtcaggatctcgttcatctcctcatcgaagaggccgcgcttgtaggccacctccacgggcagccggtggctctcctcagggtcgatgatgccgcccgtggcgatctgggcctccagcaggcggatgccatggtccttcaggatccaa

SEQ ID NO: 120731 - DNA, 830 bp, Homo Sapiens
ctttcttctccaacttggggcgctggactcccagggttttcatggcctgccagtagaggtcgtgcaggcggctggagccggtggagtgtgcccctgctgtaggctctgctgttgcccctgcagcacacccaggagcaccgtcaggtccaaggtcagcttctcatgtttgcaggtcctgaagagaacgttgagcagctccagggaggacagtgcctgctgatgctgcgccttggtctgcgcctcccccagcacgcgcaagttctagggaagggtggccaggctgaggcactccggagagctgctcaaagcctttctgtttcccagccggaagtaaagcccagaggcagggaccgtctcctgggacaaccccagttctcccgactctggactcaggctccaatcctcacttctttcccagagatcggtctcccggagaactgattctgagggggtggggaaagggcgccccccggctgttacctcggtgacctttgctaggacctggcccatcagctgcttccactcggggtcctcaaagcacgacctcacctcccgcatggacagggtcttctggagcagcaggcaggcctgtgggtgggcaaaggtgggtggcaggagccttggcacgttgggtgctcacggctcagggatgcatgagggctcgggggcccgctgggcactgctgtgggcagcgtgtgaggctgcctgctgctctgggctctgtgactacctgctcctgtgcctttgtgtgcaggtggggacaccaaggcctcccagctggatagaggtgggacctcaggttgggacaatccaacttttttgtacaaagt

SEQ ID NO: 120732 - DNA, 896 bp, Homo Sapiens
acaaaaaagttgggcttggtcactatggaggagataggcatcttggtggagaaggctcaggatgagatcccagcactgtccgtgtcccggccccagaccggcctgtccttcctgggccctgagcctgaggacctggaggacctgtacagccgctacaagaagctgcagcaagagctggagttcctggaggtgcaggaggaatacatcaaagatgagcaaaagaacctgaaaaaggaatttctccatgcccaggaggaggtgaagcgaatccaaagcatcccgctggtcatcggacaatttctggaggctgtggatcagaatacagccatcgtgggctctaccacaggctccaactattatgtgcgcatcctgagcaccatcgatcgggagctgctcaagcccaacgcctcagtggccctccacaagcacagcaatgcactggtggacgtgctgccccccgaagccgacagcagcatcatgatgctcacctcagaccagaagccagatgtgatgtacgcggacatcggaggcatggacatccagaagcaggaggtgcgggaggccgtggagctcccgctcacgcatttcgagctctacaagcagatcggcatcgatcccccccgaggcgtcctcatgtatggcccacctggctgtgggaagaccatgttggcaaaggcggtggcacatcacacaacagctgcattcatccgggtcgtgggctcggagtttgtacagaaagtatctgggtgagggcccccgcatggtccgggatgtgttccgcctgggccaaagagaatgcacctgccatcatcttcatagacgagattgatgccatcgccaccagagattcgatgctcagactggggccgacagggaggtcagaggatcctgctgga

SEQ ID NO: 120733 - DNA, 937 bp, Homo Sapiens
tacaaaaaagttggcttcgcagggcggcgactggcggcgcgatggacctgaccgggctcctgctggacgaagaaggcaccttctccctcgccggcttccaggacttcacgttcctcccaggacaccagaagctgagtgcccggatccgaaggaggctctactatggctgggactgggaagccgactgtagcctggaggagctctccagcccggtggcagacattgctgtcgaactgctccagaaggcagcccccagccctattcgccgactccagaagaaatacgtagctcatgtgtcccgggaggcatgcatctccccatgtgctatgatgctggctctggtgtacattgaacggctccggcaccgaaacccagactacttgcagcatgtgtcatcctctgacttgttcctgatctccatgatggtggccagtaagtacctctatgatgaaggggaggaggaggaggtcttcaacgacgaatggggagctgctgggggtgtggccgtgcccactctcaatgccttggagaggggcttcctgagtgccatggattggcatctctacactgaccctcgggagatctttgaggtgctgagctggttggagagctgtgtggctgagcagcagggacggtggcgaggctggtacacctacacagacctgtgtgtgctgctggagcagccgacctggcagttggccctgggctccctctgccagcggctggtaaagctgtcttgcctgttagctgtggcatatgtgagcagtgtggccctggctgtggcatcggtggccgtaatacatcagtctttggggctgtcctgcacccctacacctgggccgcctgaccttggactgacctcccgttgcctcctggagccctgcataccttctgtgccacaatgcctgccgtctccggctaatgtctccagctgcct

SEQ ID NO: 120734 - DNA, 840 bp, Homo Sapiens
  misc_feature (183)..(215): n is a, c, g, or t
ggggctggcagttccctgttctggttctgagctgaggctctcagctgtagctgggctgacgaggagggcaggccagcccctaccgacccgaggagccctgggtcagccgcgctcgcgctctggtggttcggtcccaagtccagaggaaccctgggctccagccacacgctgctcccacctctnnnnnnnnnnnnnnnnnnnnnnnnnnnnnnnnncccaggctctccctggggctcagctgccttcgcagtcatggccccagggcctgggtcttgcagccctgccgcctccagccccactcctgcaggggccaggatctcgctcctggcctctggacgcagcctgctggcagcaaagacgttgaaggtgttgtcccactcaggcagggctttcccaggggaggccaggggggtggggctggccctcgaggcactgggtttctgagtcgggtccttggcttctctcaagccaaaccagctactcttggccttttcctccccactggatgagtgatgtggggaggcccccaggatgggaccccccttttcccccagagagcttcggcgacccaactcgctccgacttaggccttggtggtggtggtggaagagacccatccggggcttgcgttcctccttccgggctccctccttctctgccacagcctcagaggaggccactatgggtgtggcaacctggactggcttgccctctggtagccgggccccctcctcctctccagggtggctggccccaggggccaggactttagcctgagcactcagctcctcctgtccaagcactgcctctgagctgctgttgctacgactgcctctccaa

SEQ ID NO: 120735 - DNA, 942 bp, Homo Sapiens
aggggtaaaactgttatatgctaagtcttcatttacttattctcattttatgttctgcctcaaaagtcattgtggttcaagatctcaatgaatgcccacacacaatggattcagaaaataatctaaggaaaatctgcttccacctatctaggaaagaccacaagtctaggagaaggcaggctaaatttcccttgtcaatggcaggtgagggtggtggagcaaatctgagtacaaaggtgggggtcagataaagaagatgtgaaaagtaagatcagtcgagggagtcaactttggtagtaaccctgaagaacaggaaaaaaggtccacgcctcttacttacatgggaactctaaaaaacctaaactcacaggagagagtagcatgttgtttaccagaggctggggagagggtggggggtcatgaatgaggaaaggggagatgctggtcgatgggtacaaagcttcagctgggaggagtaagttctgatattctactgcacagcatggtgactacagtgaagaataacgtaccgtttatttcaaaactgcgacaaaagattttaaatatactcaccacaaagaaatgatcaatattggaggtgataaatgtgccattagcctgatttaatcatttcacaatgtatgtatgtattgaaatactatgctgtacctccaaatatatacaattattatttttcaattaaacataaaataacacctaaaaaaagtactactcctgcttgatatggttccctgccccagctcctattctttcctctccaaacctctatctgcccagaggcagtgtctcagttaaactggggattaggtttctccacatcatccttctgcaaagcaatcaatcacaaggcatctcttccaatagttttaccacaagctgtgaagcactgttttgaaattaaagaagatccaacttttttgt

SEQ ID NO: 120736 - DNA, 869 bp, Homo Sapiens
  misc_feature (121)..(172): n is a, c, g, or t
tataggggcatcttcagcctggacacgcatgcatctcccctctcagaccctcagcacttcttccactcccatcaagagcccttcacggtccctctcacactctgccagtccccctagacannnnnnnnnnnnnnnnnnnnnnnnnnnnnnnnnnnnnnnnnnnnnnnnnnnnggttccaggctgagatgcgtccccacctgattaggcccaaatctgggctcctcgtcagcactggggcctggcctctgccccctccaggacagggtcagggatggggcctcactgttgtttggcctgggtacccccctccagtgggccaccctgcagcagagggcatgtactgggggcccgaagcagggtggctgtgaaagcagcaataatgagtaggttcccagctgcagccaagaccagtgtggccactgtgcctgccaggcccagggcaggttcctgtgtggccagccaggctctgcgtgatcccatatcagccagcactgcctccagctggaagtgggtgcccagcactgcacagatgtggaataactggtggctgtggcccagttcattctgtgctctgggaaggcatctgcccctgcctcttcccgggccgggccaggcgtgccctcaccgatgtaatcaaagcgtcctggtgccagcctttcaggcaggtgggaggcgaagaggaagccagtgagcagcgcgcagaagagatggtagccatggctggtgctcagggcctcctgcccacagccgtggcccctgccccagcacagcccgagccagactgtagaggctgagcgcgccgtagtcgaggaagtagcagatgtggcgcatgcggggcgacatggagctgaagccaacttttttgtac

SEQ ID NO: 120737 - DNA, 959 bp, Homo Sapiens
actttgtacaaaaaagttggatggcccccaaaaaagagcagtacccagaggggagagagaattctgaattgagaggactgtttctagagtaccacagccagcagggcacaggccactgaagtgtcttgtatgtctgaccctgtgcagtccctccaagtcctgattctcttgtgatgtattgtgaaggtgctgtgagtgacttggttcaggtgcgaatctgttaggttgttgagcagacagctcttcagcatcccccgtattacctctctgtgctgggcaacaaatcactacaggcctggtggcttcgaacagcagccatttatttcctagcttctgtggggcaggagtccaggcacagcgaactcaacctagggtctcataaaggctgcattcagggtgttggctagggctgggttctcatcaggagacttgactcagaggatccacatccaggctcttctagactggggacagaattccttttcttagggctgaagcattcttggcagctttacttcttcagagccagcagtagagacagagactcttataagataggtgctaaactcttctgtgatacagcccatcatcaccttttgtgaattccgctacttagaagcaagtcagagatctcacctgtgctcaaggtgggaggggattacaggagctgggggcctggggccactgtgaagtctgtctgtcacacttaccaagtgtggccaggagagatgcagaggacaccgtccatgcccttagagatgctgtctgtgggaggactctgcagatgagttggtccagtagaggcatgaagtaagtggggctgtcttttaccacagagcacatggtcatgaggcagagctggaggtgaatttgaatgttgttgtattcagacgtaaagtaattttgctgagaccagttgtcatgaggtatacttacttaccttacttacctaaagatta

SEQ ID NO: 120738 - DNA, 874 bp, Homo Sapiens
aatggcgaacaccaggacctcgtggatgccttcactctcctctccaatcaaatctggctgaagagcaactcaggggcccggaatcgggaaggaccaatctcaatggtgctgccatcaggcaggtagtactgagctttctctgtctctagcgtctcatccttttgggggtttatggataggtaacaggctctttcttttatggccttgacaatctcaaactcagaggatgagtggaagtcgtagccctccttacgcaggtagaggcgcaggaagcgagagacgtcccggcccgcgatgtcgatgcgcatgatggagtggggcatggcaaagccctcatagatgggcacagcatgggtgactccatccccagaatccagcaccacccctgtggtcctgcctgtagcgtaaaggctgagtacagcttgcatggagatgaaaagagcgggcacattgaaggtctcgaagaaaacttcggcagctcgttcccggttttttcgtgggtttaaaggcgcctcagtcaggagcacaggatgctcctctgagaaagtctgcagctggtccttagaatagacatattgccaaatgcgttccatgtcgttccaatccttgacgatgccatgctccatgggatagcggattgaaagcagccctcggtgctcctcagctttggggccaatgaagatgtcgccttcaagggctcctgccatgacacgaacgtgcttgggtcggcccacatagtttggaaagcagtatttggggatctgatcaccagcaaaaccagctttaatcacaccggatccgttgtcgatcacgacaggctggttggcgatcacatcgtaggactccatggcagaggaatctctccttctgccaa

SEQ ID NO: 120739 - DNA, 963 bp, Homo Sapiens
gggagcccggatgggatatctgacagtctgatcagccagccagccttgcgtcacactgctcaaatccatcttcataggcagcaaagagctgctctggagttgctatgactgccccaacgtccaaacaagctttctgagcagcctcaaaattcagtgtgtacttgctggttgccgccctgtagtgaaacacaaccccatccacagtcagtgacaccgtgtcttgtgtgtcttcaatcccgtacatgacgtcacagcggtaaagacccgcatcacttgccagcagcttgaccacagtgagggaggcatcgcccacagcctcgggatgtgtgggcacagacactctccctttgtagtcctgaccaatcttgatatttccattttgggccacaaggacagtagtctctttcaaatcttttccatttttgtccacttcaatcttagaccatttgatgcggagaaattcactggtgttgtaactgggtggcaaagtaggcatcgttgaaaaatgacaaggtaggctgacttttccagagagggagcccctcaccggtgggctttttcccactttgactttatgtagcgcatgggttactattaaggttgaacacatccataagatgctctttatatttatgaacatcttggccttggaaggcggcttattgcagtttggggggaaaattcactgcagcgctgcgcgactgggttcggcgttgcccaggcgggtcacataggaagcgtggtggcccggggaaggatgcggagggtgcgggacggtgctggaagatgcgggaggatgcggggctggccgaagatcttggtcccagctcctgtccacaacacctaatgttctcggctgttgcgtccgcacgcctggagttcttccccagaaaggctcggggcagctcgcctgcaagttcaaatgcgggttgtgacacccatcccaacttttttgtacaaagt

SEQ ID NO: 120740 - DNA, 903 bp, Homo Sapiens
gccaactttgtacaaaaaagttggcggctgccaggggagctggagccacctgcgaaggtgtcctcccatactggacccctacaggaagctccgtgtgcccagctggggcacagccccagctgatgccccagaggggccacccatcgcaagaggggctttgggctctgccctccctccccatggcgcatgggccaaagcctgagactgaaggactgttggacctcagcttcctgacagaggaggagcaggaggccattgctggcgtcctccaacgagatgcccgcctgcgccagctggaggaggggcgggtcagcaagctccgggcctcagtggcagaccctgggcagctgaagatcctgacaggggactggttccaggaagcacgctcccagcggcaccacaatgcccacttcggctctgaccttgtccgagcgtctatgcgcaggaagaagagcaccaggggagaccaggctccaggccacgacagggaggctgaggctgctgtgaaagagaaggaagaggggccagagcccaggctcaccattgatgaggcccctcaggagaggctcagggagactgaggcttcagatcctgaggaggcgtcccaggcccaggaagatcctggccaaggagaccaacaggtctgtgccgaggaggctgacccggagctggagcccgcgtcggggggagagcaggagccgcggccccagcaagcccaggtaggcgggagtggcccgtggctgctctcaacatccggagcggactccgggcggggagcgctcctgcccagggctgcgagccgcccgcgacccaaagcgctcggggcaagggtggggaaagaaagggcgcccccgtcacttgccccctctgcagacaaaggcgcgtccagatcctggagaatgg

SEQ ID NO: 120741 - DNA, 930 bp, Homo Sapiens
ggggcgcccttctttccccacccctgccccgagcgccttgggtcgcgggcggctcgcagccctgggcaggagcgctccccgcccggagtccgctccggatgttgagagcagccacgggccactcccgcctacctgggcttgctggggccgcggctcgtgctctccccccgacgcgggctccagctccgggtcagcctcctcggcacagacctgttggtctccttggccaggatcttcctgggcctgggacgcctcctcaggatctgaagcctttagggggacagaaggcgatgggaaatcaggtccctcagtctccctgagcctctcctgaggggcctcatcaatggtgagcctgggctctggcccctcttccttctctttcacagcagcctcagcctccctgtcgtggcctggagcctggtctcccctggtgctcttcttcctgcgcatagacgctcggacaaggtcagagccgaagtgggcattgtggtgccgctgggagcgtgcttcctggaaccagtcccctgtcaggatcttcagctgcccagggtctgccactgaggcccggagcttgctgacccgcccctcctccagctggcgcaggcgggcatctcgttggaggacgccagcaatggcctcctgctcctcctctgtcaggaagctgaggtccaacagtccttcagtctcaggctttggcccatgcgccatggggagggagggcagagcccaaagcccctcttgcgatgggtggcccctctggggcatcagctggggctgtgccccagctgggcacacggagcttcctgtaggggtccagtatgggaggacaccttcgcaggtggctccagctcccctggcagccgagtttcagggaccgggagaagagccgccaacttttttgtacaaagttggcattataaaaaagcattg

SEQ ID NO: 120742 - DNA, 853 bp, Homo Sapiens
ggggtcgaactcgccccacctcggccagcttctcgggggccacaatgagcagctcggcgatgggcgtggtcagcgcccacggtgttcctgtccacgcggtggtgctcgaaggcccgcgacatgctcttgagcttctggaaggtgcccaggatcttcttgtaccggcagaggaccccgtcggcgtccttcactcgctgcctctcccgggccttgggcttcccaaagcgcctccgactagcacctcccttctgcttctgccgcctcctctcactggcactgccttcttcggacgctccgctgagggaggaggctgctgactcagggtccgaggcctcgcccccagccccaccacggctgtccccctccatccgcctgggcccaggcttcatccggcagtggtcctctgcctccatccgagcagaagagatgaatttgtccagctggcaccgcaggaagtccctctcttcctccaggtcctcgatgcgcttctgcagccaggagttcctctccagagccatgtgcagctgggtcttgacgctgttcatcagagccagggcggaggacgcagcctccggaggctcctcgaagtttctccgagaggggctcagactgtaaaagatctgtgggtctaggtggggtgcctcatcgaagggaatggagatctcgaaggtctcatcgtccttcattgtccgcctccgactgctccggtcattcatggcgcggcttcctgcggaccccagcagccgagggcctcaggggcactggacagaaacggcagccacaaatggagagacgcagatggactggagggtccatcccgctcgcggaatccggctcggcctaacttttttgt

SEQ ID NO: 120743 - DNA, 841 bp, Homo Sapiens
  misc_feature (791)..(799): n is a, c, g, or t
ccattttcatactgcaaagttcctatgacctcctcccaaaggagctcaattctgtactttacctcttcatgacctccctggaatccaccccgcctccaaccacactgtaattagaatctgaattctgcaactaccttgatgttagtctctgtaggggagcagcctgcagcctcctatggactcccattaagacaggatattccttccgtctagggggtgctgattgcaacttttttgctaagatgaaaagctggagtcgaaatgagaagagaggagttgtggcaggtattttgttttgcaatggctccagactgctcttctgtttgataaagtggctgtaactatgtgggtgggaacagtgcagttttttctttattctcccacccacaaaaccaggaggaaattggaagggcctcaaataccagggaatgttttggctagctgaagacggggtaaggtgggaaggagatattgaggcaaacatcttgggagagggtgagaattacaaggccaaaatggatttccttaccaggcaggcatatctctgcctttgtcctggcatggcctctacctaggatgccccagggaaaggatagtttggtttgcacaggagcagcagtgatgaaaatcggaaatgatgagtgtggttggagatatttgtggcagggtttgtaggtctctttgagggggctcaactcacaaagtgcagatttttattaaaatataaatgcttgtgggaaaggacattttcctactgagcagtggcagtcccatatttcttctcagatttnnnnnnnnnggcctcagtctgaaaagtgaggagatggaggatttgagccaa

SEQ ID NO: 120744 - DNA, 916 bp, Homo Sapiens
gaaaagagatgtgcctacgcccactaactgggcgtatggcacaccatgtcactaaagagaagatcgtgaaggctcagcaaagacagatgcttacctcaacgagtataacagccaccagaggccatggccagcctacataggcattgtcttgagtgcacactagaactcagggacatcacaagtgagggtgtgtgggccagcatatggggaatgtgcagaggaaatctaggagagtgtcaggtatagttcattcacagcatagtgcccagtgaggttcagagcagttgcttgacctgtgccaagtaggtgccaatgtgcttgccagtggcagcatgttagtgtagttgtaagtttgttagtgtccccaaggcatggggatgcctttggctaaagctttgatgctaagagaactaggcaattctcatgaatcccatgggtcaacgggcctgtggctggaggagaggaagctatatcccccaacccggccccagtctgtgaactgtcccccagtattctgtaaagcctcccacatgcctcacctggctggcagcagcctcagctgcagggcctaggtctgggtggtgctcagagtgacctgccctggggggcctctccacaggagagttccgccggcggtagaagagtacataggcataacgcgtcacaacctggctatcgtctaccgttgtcactgtgctgtcatcaaacaagcgccagcccacgtcactgcgttgactgctacgatcattgggcaggcgtgcacaggcagtgtagtggccaccaatcatgcttccatagtggttgatgacagcatatagatcgtagctgggcagacactcctctttgtgaccaatgcagaacttggtcaggtccaggttcctaacagggaactccaccaagtcattgatctggccaa

SEQ ID NO: 120745 - DNA, 710 bp, Homo Sapiens
ggagaaaggaaggcaaaattctgcctcccggttcagagtcccccccaaccttcactgtttcccgttgccattgatggggaggttcacgtactcaggggaggccaggaaggccttgagcttgggccgggcactgaggcgccccacatatgctgagagcagggggaacgcatccaggcagccaggggctaggacctcatggatcagcagcaagtccagcaggttgtagtcagcgaaggagatctggtctcccacaatgaaggtcttgcctccctggttctgggacagcagggtctcaaaaggcttcagttgcccgggcagtgccttcacatagtcatccttgcccgcctcatagttggtgtagatgagggagatgtatttgcagcggaggtcctccacgccgtcattcaccatgtccaccagggctgcctcctgctggtccttcccatagagcccaagggtgcggcccaggtgacgcaggatggtattggactggtacagggtgaggtctccgtcctggaacttggggagctgcccgtataggcaggaggctttgagtgagccctcctgccacgtctccacggtcaccacctcctccttccagctctggccctgatctgccagcagcatgcgcagggccgcgcagcggcctcgaactgggaaatagaccacggtgtagggcggcgatggtggcgaagccaacttttttgtac

SEQ ID NO: 120746 - DNA, 959 bp, Homo Sapiens
actttgtacaaaaaagttggggaaggagcctcaggccaagaacatcagtgtggcctcctgcaatagcagccaggtggtggtggctgtaggcagggccctctactatctgcagatccatcctcaggagctccggcagatcagccacacagagatggaacatgaagtggcttgcttggacatcaccccattaggagacagcaatggactgtcccctctttgtgccattggcctctggacggacatctcggctcgtatcttgaagttgccctcttttgaactactgcacaaggagatgctgggtggagagatcattcctcgctccatcctgatgaccacctttgagagtagccattacctcctttgtgccttgggagatggagcgcttttctactttgggctcaacattgagacaggtctgttgagcgaccgtaagaaggtgactttgggcacccagcccaccgtattgaggacttttcgttctctttctaccaccaacgtctttgcttgttctgaccgccccactgtcatctatagcagcaaccacaaattggtcttctcaaatgtcaacctcaaggaagtgaactacatgtgtcccctcaattcagatggctatcctgacagcctggcgctggccaacaatagcaccctcaccattggcaccatcgatgagatccagaagctgcacattcgcacagttcccctctatgagtctccaaggaagatctgctaccaggaagtgtcccagtgtttcggggtcctctccagccgcattgaagtccaagacacgagtgggggcacgacagccttgaggcccagcgctagcacccaggctctgtccagcaatgtaagctccagcaagctgttctccagcagcactgctcctcatgagacctcctttggagaagaggtggaggtgcacaacctacttatcattgaccacacacctttggagtgcttca

SEQ ID NO: 120747 - DNA, 295 bp, Homo Sapiens
agcactgtgtctctatatttaaattgggttattaattgataccttatagttgggtcttgcttttattatgcaatctgtcaatctctgccttttatttggtggttttaggctatttatatttgatgtgattatcaacgcagttgagtttaaatatataatttgctcttcatttctatttgtctaatctgttctttgtttttttccctcttttcctgccttcttgtggagtaactgagcttttcaagtaaattcatcttatctccactcctgacatattacatattagccatacctc

SEQ ID NO: 120748 - DNA, 802 bp, Homo Sapiens
tgtacagcagaaattggacagggctcattcttatattaaaacaaaagatttccttatattacaaatttatttacatttgcatctgaagaggtaaaagtgtctaagtggctatttttacagtcctttctaataaaatgtacaaaaacaaacagaagtaccgagaatgccgttcgggggcctttatggcgacgtaagaacgggcttggacttggtctgtgaatccagaatccagaggtgcaggtagcactatggatcagggttagcctcggggggccaaaaacacggcttcagtttctccccaactctcacttagtgttaagagtggcagaggtgggtgtgggagcttcccaaagacctgctccatcttccccagaggtggaagagttggactgtgtgtggggtaagggcagaagggccaactggggagtgggctagtggcttgggagtggacgtgtgttggcagatcccagaggctacttgtgactctgggaagaggagtctaagttccatcattacctataaaccgccaaggttctgctgcagggcggataggtgggaggtcagcaggggtaaagacggtccccccaatgacacaatggtatttaaacgaaattagtggccagtaaattggcccaaaggttaggggaagatctcctttaatgcaaggaaagaagcaataatcagtcaaataaatagaagggccaggagcactggggagcctgagggcagggacagggctctccctcctccacaagctttggcagagaactgctgggttggaggcagagatgcccaacttttt

SEQ ID NO: 120749 - DNA, 932 bp, Homo Sapiens
ggggcaatcagcctcatctatttactttcatgaagaaacccaagtgaaccctgctgcggaccagaaaaccggagcaattctgcatttaatgtcacttactgtgacatcttaatttcccaattcaagggtttcaaaaactagtatttgttaatttcctgtatttcagatgtcaaagtttgcatctccaaatctatcactaccaaacactctttatctttcttcatctgggacaagggacacgactacctctgtgcctgagacacagtgtctcagccccactatctgggctcccagcacgcttcctctccaagaacacaattcagaagtccttgggccacggaagagagacctccttccccatggtcaaaagtggagtgcaggcccccggctgtggaaatcagtgctcggctccctgaggggcgatgccttaaatattccaccactgggcagcgtgcacccccttcccatgtgagcgccagctgaaacggaagtgagggcggcaggcgtttgttctgattagaaactccaccgacaccggaataaagtggatttcagctagtgctgagccctccccagggaaatggtatggggtgccggacaacagctcctaagtcctcaaacagccacgcagccagctttgtttctgcttcatttttagacaaaaactggggcactgtgagaggcagacacagtaggtaatggtaggggcagagccgcctgctgggtcccccgactcaacagggtaagcccggggtgaaggacatgctgcaggaagtgacttcggggcaatcagcctcatgtactttcacgaagaaacccaagtgaactctgctgcggaccagaaaaccagagcacttctgcacttaatgtcactttactgtgacatcctaatttcccaattcaagccaacttttttgtacaaagttggctat

SEQ ID NO: 120750 - DNA, 661 bp, Homo Sapiens
tttgtacaaaaaagttggatcaggggacattaaagattggggaagacacttgactgctagaatcagaggttggacactatacataaggacaggctcacatgggaggctggaggtgggtacccagctgctgtggaacgggtatggagaggtcataaacctagagtcagtgtcctgttggtcctagcccatttcagcaccctgccacttggagtggacccctcctactcttcttagcgcctaccctcatacctatctccctcctcccatctcctaggggactggcgccaaatggtctctccctgccaattttggtatcttctctggcctctccagtcctgcttactcctctatttttaaagtgccaaacaaatccccttcctctttctcaaagcacagtaatgtggcactgagccctacccagcacctcagtgaagggggcctgcttgctctttattttggtcccggatcctggggtggggcagaaatattttctgggctggggtaggaggaaggttgttgcagccatctactgctgctgtaccctaggaatatggggacatggacatggtgtcccatgcccacatgataaacactgagctgccaaaacatttttttaaatacacccaaagagccccaaaggggaagggcaatgcctaccccc

SEQ ID NO: 120751 - DNA, 332 bp, Homo Sapiens
ccaagacaaatttagtaccctcatctttatttgggaaggggagggggaatcctgggtcgcccaccctcaccctgctcctcccagctcagctaagctcgtccctcgtgcccccccttttgtgggcgatgggagaggaccaggtgggcgtggaggtgtctggaactagcagaggtggtgagtggggcaggtggaggtgggagcatacctgggacccggggtcgggggagactcggggtgcccaggacgggaaaggggcagctagcattgcgtgcatgcagtaccagggtgagagggctgtggccctgctggactgtcggttacccaactttttt

SEQ ID NO: 120752 - DNA, 778 bp, Homo Sapiens
ttggcagggagcagcgagcacgcgtttcccgcaacccgataccatcggacaggatttctccgcctcagcccaacggggagggctagttgcacatagtgatttagatgaaagagctattgaagctttaaaagaattcaatgaagacggtgcattggcagttcttcaacagtttaaagacagtgatctctctcatgttcagaacaaaagtgcctttttatgtggagtcatgaagacttacaggcagagagaaaaacaagggaccaaagtagcagattctagtaaaggaccagatgaggcaaaaattaaggcactcttggaaagaacaggctacacacttgatgtgaccactggacagaggaagtatggaggaccacctccagattccgtttattcaggtcagcagccttctgttggcactgagatatttgtgggaaagatcccaagagatctatttgaggatgaacttgttccattatttgagaaagctggacctatatgggatcttcgtctaatgatggatccactcactggtctcaatagaggttatgcgtttgtcactttttgtacaaaagaagcagctcaggaggctgttaaactgtataataatcatgaaattcgttctggaaaacatattggtgtctgcatctcagttgccaacaataggctttttgtgggctctattcctaagagtaaaaccaaggaacagattcttgaagaatttagcaaagtaacagagggtcttacagacgtcattttataccaccaaccggatgacaag

SEQ ID NO: 120753 - DNA, 912 bp, Homo Sapiens
ggcggacagcatctaattgtgtcaaccgatactgcaggctggcagcaacatggagggcagtgttgccattgtaagcctttgcattcacaaaagacaggcaactgggcagctccaaaaagaggcgaatgagttccagatttgcttcttcagctgccaaatgcagggctgtgcggccacttttgcgatccttcgcttccaccgctgctcccatttgaattaggcacttaatggtatcaaccagactcttattcttcagtaaaagctcctgaacttcaggtgaatgaggctgttgatttctctggagttcatggaccacagcattgtgggctatgactgcacagtgaaggggagtcaggccatcatagttagttgcctcaagatccacaaactgattacttcccactgctcccttctgaatcgcctgaagcacctgggagtggcccttctcagcacacacatgcagaggtgttcttccccagcagtctgtggtgttcacctgtgccccgatgttcaccagatcctgcacaatgagatgctgattggcagccactgccacctgaaaggcactctgtccattgtgctctttaatatccagcatgtgaagtgcattcatctttcttgcaagaacataggaaagtgcccttctcccttgggcaacagcaatatgaaggaacgtgtcaccatctgcatcctttgaaagaaactggtcttgggaaatatttgccaatttgctttcttcctgctccacctgccactgaaaaagtgatttccctaactgtgtggtgttcattggatttcccatgtttgagaatggcagtgaagtgtttgaagagtcagaggccatctcgtgccccaccatggcctcacaggcgctgctgggcatcatgctgaagctgtgcaagtgagcaccaa

SEQ ID NO: 120754 - DNA, 986 bp, Homo Sapiens
  misc_feature (218)..(227): n is a, c, g, or t
aaaagaaaagaaaaaccaaatagccctgacatcaaggaaatacacttgtcctaaaagttaggccttgggattatgaagaattggcctggtgtgcatacataagccatgacattcttctgaagagcagtcacatagcagagcgacatcacacaagatttaagactgtgaccataatgaagtagggggagaaaaccacgaaaaatacaccactctggtcnnnnnnnnnngtctgagcatagacagaaacaaggtaattgagcaactacaaaaatgaccaggtagtccttttacttctagctaatacaagtgactagtgattctttattaattacagccttaatttccttctgttcttcccaccttctagataatggtaatatgtaaaatcatagaattattcccacttcctgattggatttaacctacaacaaaataacattttcttacaccttgtgcacaattacctaacacaagcacaaatcctgtaagttcttcccaacaccctctgactaaaacatccccagttacacgtgtgtcctccctttctgcaacttggtgatcaacatgagttgtacaactacagatctgttcccactggtctctgatgatgggagggcattgacacttaggaatgctctaattccaattcttaaatgttcctctatttttatatggtagaaaccatttagttaaaaataacactaaagattttagctgataaaatttaaagcaaggttctttaacaaggatgtgtgtatttgaatagggtccctggttctagaattagtcaacactttggcatagggcttccttgagatattttactccctatttctttccacattaatattaaatattaagtagtcataaggaaaatcctctgtcttaacaagtttggaaatgagatatttatattacaacatggctttaccaactaaactttgtgttttgccctgctgtcactctgccaacttttttgtacaaag

SEQ ID NO: 120755 - DNA, 324 bp, Homo Sapiens
cagcctgcagcttcacaccgggaacatccactcgtgggctttgattccgtactggatctccttcagctccttctggaagcggaggatcagctcaggcccattttccatggtgggaatgtggaggttcctgtctttgtacaggattcggtgcactgggcagacctggcaagcggtgcccgagccaaagacttcccgcacgcggccctcctccagggcccgcagcaactgcttcatggtgatcgtgcgctccaccacccggaactcaccccaggtctgagccatgtcctagtagactctgtcccaacttttttgaacaaagttttt

SEQ ID NO: 120756 - DNA, 629 bp, Homo Sapiens
ttccatctccaggcggtcaatgaaggccgccgtctcagggcctggggctgtggtgggcggctgcagctgcacctaggtgttgaacagctccaggtccacgtcctccacctcatggccccggcagcccccggggtgcgtcaccaccgacacgcccaccacgttgccggccacatccacgtgcagggtcagctggtccgacaggtgcgactccaccagggagcacgcagggacaaaggaggagacatagccaccagcttccaggccatccagggccccgggtcgccttgggatccggacccggtacaggccattcagggctgccacatcccggagtcggccccgctcctcctcgctgagctgccgctgtgacagggacaaggtaccatcctgctggttccagagcagtgagccccgcttccggaagttggcactgtcatcgatctcaaatgagtgctccagcagcagccccaccgtgccacaggcctcgccctctcgaccttccgccccagcccctcgcgcaccagtcccggcccggcagccgctgccccgggctcgactgggcgctgctaccgccatcagcaagagcaggagcagccgggttgccccagcgctggctgccgccatcccaa

SEQ ID NO: 120757 - DNA, 819 bp, Homo Sapiens
gaggctgccctctgctggggttgtgcagtgggcactgaggaggcctgtgcctttggagactctggccagcggaagatctccttcttactcttgctggcggtgtgctggaccacgcatttgtactcgcctggcgccactgctggaggggggtggagagctggctgcttgtcatgtagtagctgtcccgtctttgtatctcagggaaggttctctggggctggctctgtgtccccatgtaccaggtgacagtcacggacgttgggtggtacccagttatcaagcatgccaggaccacagggctgttatcctttgggtgtctgcaccctgatatgatggggaacacatccggagccttggtgggtgctgaggagacggtgaccgtggtcccttggccccagacgtccagagcgtttccagagtcaccatagatcgcgcgggcccgcgcacagtaataaacagccgtgtctgcggcggtcacagaagtcacttccagggagaactgggccttggacgtgtccagggacatggtgattcgactcttgagggacgggttgtagtaggtggtccaaggaaaagagagagtcccaagccactccagcccctttcgggggggctggcggacccagccccagtggtcctgattattgatgatggagtcaccagagacagtgcaagtgagggacagggtctccgaaggcttcaccagtcctgggcccgactcctgtagttgcatctgggacaggacccatctgggagccgccaccagcaggaggaagaaccacaggtgcttcgtttttttgcacatgggatccatgccaa

SEQ ID NO: 120758 - DNA, 789 bp, Homo Sapiens
ttgggcactctgtgcatgcagcacggcccgctgatcacattccacctgaacctccctcacggaaatgctctggtccgctacagttcaaaagaagaggtagtgaaggcacaaaagtctctgcacatgtgtgtactggggaacactactattcttgctgagtttgccagtgaagaggagatcagtcgtttctttgcacaaagccagtctctgaccccttctcccggctggcagtctctcgggtccagccagagccggctgggctccctcgactgttcccactcattctccagccggaccgatctcaatcactggaatggtgctgggctgtcgggaactaactgtggagaccttcacggcacttcactctgggggaccccgcattattccacaagcctgtggggtcccccaagcagcagcgacccccgaggaattagcagcccatctcccattaacgcttttctttctgttgaccacctgggtgggggtggagagtccatgtaacagtgtagatgcagactcaccgaccgggacctcagacgcaagggaaaggagcactaagtggggctcgccgcctgcagccaggggccgcctgtgggaacagctattctctgcacattttccactttgttttccccaaaacatatcagtttgaatacttgaatcatgcaggccaatattataatgtgaaaaggtatctactctatttacactcccaaatagcgccatacatgctaaaccgtagagaatgagctcgcttgtgtctattcatcatgtttagcctttggattc

SEQ ID NO: 120759 - DNA, 436 bp, Homo Sapiens
tccttactgtctccgctactactactttgtacttcggttatttaatccttcaaaacactcgaagttaaagcattttcatcccatctcaattcgtaacccagggaaggtctgctcatactcatttcaggtgagcgacttgctccagtcccgccgtgcacggcagcggggctgaaaccagatgacaaagcgctgaccgtcggggttcacttccccgccccgcccctacccttggccaggtgcggctgcagcttcttcgcactgaggaggccggcgctggagatcacggcatccagcacggcggagtagcgctgcgtttcgcacaccagcgcgtacagctgcttcacgttctggaagttgctggagtacaccagccccttgatagagccctggcggctctccacgccggccagcacgcctgccaccgcagcgtacccaa

SEQ ID NO: 120760 - DNA, 912 bp, Homo Sapiens
gatttttcatatcttttaaataatgagtaagtgtagatatagtgtacatacaagttgacattctgattcattcaaaatagtcacatccctttgcttggttttggatgttccagagactaaaatttaataccattcataacatagtattttcagtaaaaagaattatagagcaatgaaaaatcagaagatggctcagagagccttataatctctaaatatacacacatttataacctgcatttattttctaaagaaacaaattttaagtaatgctaatttaaccaatggagaaaaaacttctatcaaaatatacaatttccattacagactagaaggctaatattaaaaaaatagttgtaagccaaaaagtttgcttatatggatgacaggtatcatctccttgaagcacaaagcatcaaataaggtcttataaaagatcaatctgtgaccttcttcatttttaagttcttgataaattcataaagcttgagtctcaatttccagaaatggaggagccaaataattcagaatctcaagtgcgatttatgctttaccatgtacctgtccaatgtttcccaaacaacatagttggtcttcacattcttgggccaggagaactccccgaagatcacttcgtctcccttcaccacaatctccttcttctggatgttgtactgtcgcaggacgctaagcacgtccgccatcttcccccccctcgcctccgccggctcggggcgccgccgctgccgccgcgcctgcctccttcttctcttgtcgcctcgccctcttcctcctcctccttcgccgccgcgacgaaccaacagcagcagcactaacagccgtcctcgcctacgacagcagcaggggcagtagccacccaggccgccgaggaccccgcgctgtaaggcccaa

SEQ ID NO: 120761 - DNA, 912 bp, Homo Sapiens
cagggaacacactggaagtaactctggatacatgaaaactttgcttgtggccaggatccaagccacttgcttggcaaacagggaaattcattggcagtcttcttgacagttttatgagggctgcagtcaatgctgacatgtgtgctgaagtcttcaatcagctgcatagctcccatcaagttacagggttgaacagggtctgaaacttggggttgtactgatggtgaagggcgatggagctttgagcaaaggttcccagctctttaagacatatcctggtgctactggcctccggattgagattggggttgcaggtggcaagaaggtggatttgtgtcaagagctgaacatgctgctgcatctgctgctggagtctcttcctttgtgctgggtccagaatcagggtctgatgaacttccttacactggggtttaaccttctctacctccttctgctgtttggctgaaggtttcttcatcttcagctgttcaaatagttccttcgctatctgatgttgttcatttagtaggttggccagtagttcctcaaaccgtagagcttgaggggtgttaaagttagcttgaggctcagccacacgctcctcctcttctgggccatcatcttccatgttggagaatcccatctcatcttggaaagtttcaaacagatcttccatcagctcatttgcttccttttcgtgtcggaggccgagagcgatgagagtacagggaagtgaggaagagggggtggccgccaggctcctccgcttccctgggtccaccgcggatccctcccgcttgtcaggaggcggccagcgggtaagccgacttcagcggcgcgagcccaagccttctccacctcctcttctctcctccccctccctccccgcccgcacggcccaacttttttgta

SEQ ID NO: 120762 - DNA, 537 bp, Homo Sapiens
aagtgaagacagggtttcgctatgttgccagactggtcttgaactcctggctcaagtgatcctcccgctcagcctttcaaaatgctgggtgaaagattctcccccggggccgaaagtttaagggaatgaataacttcctccctcctcaggcccagtcccaaggtgcaaggccacttgctccagcagcgtgcgtcagcaagatagcataagcaggaagagagctggctgggagacacataccctctgaagactgagagggaggccgtccaggtactacgcagcagtcacgtcagactgggacacttcctgtttacagagaactataaaacccctgccccgtcctcacttccggctgatgccattttaggcctcagcccgtctgcacccaggcgctcattaaaacctcttgttgctccacaccacctcgtgtgctgttggcgcgctctcagggttcgaagtgatacaagagcgttgcatctggtatcagtacccgccctactgtccacagcagcccctctgagctgttttgagtgttat

SEQ ID NO: 120763 - DNA, 985 bp, Homo Sapiens
gggctgggagcagtagggccacatgtaggaccactcagtcagatttatgtagctggggctcaaactgcctgtggcttgtagctgttgaggatctgataggctctgagcagatcgagcttgccgtggccttgctcaaacatgttgaccccggggagcctccgggctgacgcgatcagggctgcttcatactggcgggattcaccagctcacgcttctggactgtgctcactaacaaggtgacagcacctgcaaccactggagaagcaacactggtcctgagagggcccggcacccccctttcacgccagaaccccgcacgccagcaccataggtgacaatgtcaggtttcatgcgaccgtagcctcctggtagctcccaggtagtcattccccttgaagaaaagcgggcgatgttatcttcaaagtcaatgccgcctactccaatcacatccatttgatcagcagggttattcagagtgccataaagaggtccgtcattgccaatagcagaaaccatgattacattgttagctgttaattcccacaccttgtcaacaaacggatgatccatgaagtccgggccgccgatgctgaggtttaacacgtcgatcttctttaaaatggcatagttgaaggcgtccaaaaaccaagatgtgtaagatacctgattattggtaaagaccctgaaaatgtgaagttctgcatctggagcaaatccttggcactccctcatgctggctatcacacctgccacgaatgtgccatggcccaacccatcgtccagcgttcgctcgttggtccagttggttctctccttcacatttttgaagtggggatgcttctcgctcagcccagtgtcaaaaacagcaactcttacattagcacctgtatatcccatctgccagagcacatctgcctgcagtgtctgggcaacctggcgcgggatggctctcagcagccgtctgctcgaatccaacttttttgta

SEQ ID NO: 120764 - DNA, 926 bp, Homo Sapiens
gatgttttactgctcgcccagttgtctcttcctctcaatggtggtggctgcccatctgctggacccctcagttctaattgttagctcattcctcaaagagatggcttttaaaacctagcccaggcaaacccaaactcatcatcttgcccactgtgctagatcttttctgattgtttgcccaattcaaaatggattctccattctttggagatggacaccgatctataaggtaggccccaagcagccatttgacctgacttcctggtcacaggtgactggcacagggacagccacctgcctaagactcctgtttttaagtgagagaaacaagaactggataaagactcagtagtgaatggtactgctctgagagaaaggtgcatggattcctggtgctaggggcccttagagctgccccacttcccatcttcctggttaattcaactcttccatggatctctcatatatgctaggaaagttctagtacagtctgtctcttagctaagcttgctagagttggctcctacttagaaaacttttaagtagtgaatccactgacatttgtcatccaagaatctctctctctgtccgaaaccccacccattcccttccccagcgagggcttgaaatttgactctgatcgatctttctgtgcaacccacatccagaacattcaaaccttgtgcattttatctccaaaataatcctctcctccaagtcctctgctactgtcctggttccagtctctgtgatctcttttctgggcttgtccagcctctccaggctccagttatcattcggatcgtatcacttttctgcctaatatctgaggctaagtcttgtaactcttaccacagcattaaaaacccttctccatctggctcacaggtgcacagggctcatcatctgctatttccattccccaa

SEQ ID NO: 120765 - DNA, 648 bp, Homo Sapiens
tatatatttacaaacacactgttgtacatatatacatgttaacaaaatacagggcaatctaaaattagattcatctcagtacatgtttttaaacgttattttaaccaatacctttaaaaattatttcccataatctaaaataactccctgcctcacaaattaatacgatttccatttgtacttttcctcatgaggatttactttccctcattccttgacaacttccccaaacccgactccggttctgcctccatcgtcagctgagagctgggcctctttcctcctggtgggtctgcgctgtgtcgggagcgcccatctcagcagcggggcttcaggagtccagctccagctgctctcggttttcgctgagtcttaacataagctgctgttcatagtagaggctctttgcgtagtttatttcttgtgacaacttgacagcaaggacctcagatttcacatggacctaaggaggagaacaggatgggtcacctgtccccaggatggggaaatccaggaatcagatccacccaggtggcggctcccagcccagctgcatctcaggatgggatgtacacgtcaaagaaacagtgatggccagggctgctcctgcttcactcgcactcacaagtctggggtgggtccctgcaa

SEQ ID NO: 120766 - DNA, 914 bp, Homo Sapiens
gttccaggactccagttctctgctgagaatctctttgtcacctcatcatccataatggtctccattcctttccggcaaaagtagaaaatgtcagagagctcgaactctggagtgttgtccagagcttactactaccacttcgacgaatctctttgatctcttcttctagtgaagtgggatcctttgcaatgattccgttggtgtagggcttgtaaagctggtggttcttctccttggctcctcgctccattctcaaggtagcccacgcaaagatttttaacagacttttcatgtagagtttgcggataccaaaggagactccaaaaatggctggcactatgatgaaaacgagaaggagggtgaagaggacagtcagggagatgcccagaaggttgacaatcaggctatcaaaaggcagcaacaggaacatggtggaagatccaggccaggccagcacctgcctccctaagaacaaattgcagccttcagatggtccttcctgacagcaccagccagggaaaggaagcaagttcccgaagaacagcaaaccccattccaaagtccacacccttcaaccgcctgaatagaaggcctgggaacagaatgacagaaaaacacggccacaggaggcaactgcaaacgccaggtctctccagaatggatggactctaaagatgattgaagctagatgggtcttcagtaaaagcatccgagtccagatggagtttctgtgcaagtgagcagtgaggacgggggctctgctctgctgtcctgatgctgcttccagaggttttacatggttttcctgcccaagagcattcaacagataaatctgtcctgcagatctgtcactaccagaagtacgaagaagaattaaacttggtgccagaaaaaccaacttttttgtacaaagt

SEQ ID NO: 120767 - DNA, 738 bp, Homo Sapiens
tttctggcttggcccaaaggttctatcctggagagcccaggggctgtaggccgtaaacggtgatgcccttggagtggcagtactggatcagtttctctgcgtgaggtatgggtgacactcaacctggttagtcactggtttatatttcagtccaggtttgttcaagagcttctcgatctggaagtggctgaaattggagaccccaagggctttcaccagcccctcatccaccagctcctccatggcctcccaggcatccaagaacgttgcttttccaccgatggcattacctttatcatctttggggaaaaggtcatccccagacttgaatccctgtggccagtgaataagatagacgtccagatagctcagcttcaggtccttgagggtcttctcaaaggctttcctcacaaggggtctctcaaagaaagtgggccacaacttgctgacgatgaacaggtcctcccgcttcacagccttctcttggatcttctcttggatggcttcccccacttcatgttcattctgatagacataggcacagtcaatgtgccgatatcctgcatcaatggccaccttcactgcttctttcactttgccgagaggagacttccaagtgcccaggcccacaatgggcatcttggctttggtactgagctccacaaacgtggccatggttggtgcagaaatgattctgagtgagcaggtagaagtctcacgtcctgctttctgttgctg

SEQ ID NO: 120768 - DNA, 884 bp, Homo Sapiens
gcttcttgcgcctttccctcccctgttttcttcctttttctttttgcttgtatgcacaaggtaggacttacttcgtaagaaacaaaatgccagtattttcttaagccatgatgtgaaaccaatgaccctgtgaccacatggcacagaacactaaattttggtcccatggctgaaacttgagggtgactaaaagtaatgcctgtgaaacatgatatctatctgggatggccatttgatctctaaaaggaattttgtacactccacagaactcctatctatagtaaaattgattttcagttttaaatgtgggcaaaaaggcattttctccaagattttaaaactaattcttatttttaaatggtttaccaaaatttgtcagtacattttacgtgtagaagcattttaaaaatcatttctagcaagcacttgacatctagtcagctctctactcctttattttgttttatcaaaagattaagagctcctttctttgaataaaataatttctcataattaagcagtagaagatctatcttcacaaagtatgagggatgccagatgttgataaacttactctttctgaatctggacaaagtcgacttaacagatttttctgatgagcatgttttatgaatcctccattgtgctccattctatcacatgtgcatttttcatgttaaactgcaattacttaatctcttcccctatccttctaaattaattttctgaagttggagtgtagtcttttcccccttaggctatgcattaatcgaagctttcttttcaccatgactttataatgtctagtaaacaatatttctacttcccacatctttgcttttacacagtcacctttgcccttccttccaccaccgaagaaaaaa

SEQ ID NO: 120769 - DNA, 761 bp, Homo Sapiens
aaaggatttattctgtttttattccacactcatgatggttctgtaatcggaatacaagtgtaagaacaatctatcaaataatttgctgatagtcttaaataatgcagcacagcattactgttaatactcctctgttctagattaagcttaaaaactcaaacagcaatctccattatcaataaaaaaagttctgaattttaaaaaaaggacactatatcaagctgtttcataatttaaggattttccatttataaaaatgctttggaagcttgaggcttgaatctgtttctctactcatctgccccaccctctccccattacatgttagtatagggttctgcaagaatgctaggctttagacattaatttttttctttaatatagtactttaaaatctgagaaagaattcaagaaaaaaagattacatgtcatgtattttttcaaataaaaaaggaaaactaagtgaataaattttaggcatactaagtgtccctttgaggtagaatgctaaaaggacttttgatgaaatcacagcctaaaaacctctgcatcagaaaataacttctcataaattctctctaaaggtaactgtggagaatattaagtgtaacatattaacaagagccttccaagataatatacagtagacaagaatgttaatcctacaatgctgccttcttgtacattggcagcacatacttctcctataatagacatccacttatcaagtccattctcaaagtcccaacttttttgtacaa

SEQ ID NO: 120770 - DNA, 887 bp, Homo Sapiens
gatttggctttctggaggacgtcaatctggacctgcaggttcttgcactccccgattcagctcggttacctgggtctttctcctggtccaggtcccaccgcagggctttccgtggacttctccaggtccgggtcttctccagcttgaccacttcctccatgatgatcttctctgcaccgtgggaggccgcttctcgagctcctggatcctcaaggtcagctgccgcagctccctctccacggccagcttcttgctgcggtcctcctggaagctgagcaggccctcctgctcctccacgccggcccgcagctgctgcacctcaagctctagctggcgccgccggcccacctcctcatccaggctcccgctcagccggctgtgctcctcgcgcagcttcgggtccttctgggtgaccaccacctcctgcaccaccaccttctcctcgggcttcctcctctccagcagcaggcgcttgctctgcagctcgtacaccgcgtcctccgcggcccgcctcttctgggccgcctcccgcacctcctggcggagccgctctgcttctttctccagcaccgggtccttctcgtggcgcaccacctccttgctcaccgtcttggtctccaccttggcccgctcgcgcctccactcgtcgcgctcaccctgcaggcggatgagctgctcctgggagcgcccgtggctgttgacgagctcgttgagctgagccttcaggcggtcgatctcacgcagcacctcggggctcctctcatgcctcaccacctcctgggtcacctccttgtactccaccgtgggcttctgggcccgcaggacctccaggtcgggcagcagcttctccacctccttctccacaccgctcctcttgcccgccccaa

SEQ ID NO: 120771 - DNA, 910 bp, Homo Sapiens
  misc_feature (245)..(287): n is a, c, g, or t
agaggcggaggagagtctgagaactaaaggaaatgctcaccgactccctctgtgcacgctcacacatggggacgtgtctcctggagaacacactaaggagacggatgttaatgatgctgtgctgaactgttcttctctgccaggtgccgcagaaagttgtcctcactctggcctctatgatttaaaggctcactcttaaagagagctggaggtggcgggaggtgagggactggagggatgggaannnnnnnnnnnnnnnnnnnnnnnnnnnnnnnnnnnnnnnnnnngaaggggtgggggatgggccgagggggaagagtgcttacaggattcatattgattggaggggttggggttgtggctgtgttcaccacagaaggaactggggtggctggggaagttgtaagtgggatctggacagcaggtggcacattcacggggctggtcacccgaaagcacttctccttgtgggccttaagcatgttcgagaagcggaaccgctggccacacacatcacatggatagggcttctcgcctgtgtgagttctgcggtgtctcttcatgttggggcggctggtgaagcttttgccacagatttcacagataaagggtttctctccagtgtgtgttttcatgtgttcgtcgaagtactgcttcatgttgaaatccttgccacaccactggcacatgaactgtttgtgcccaatatgaatgctcatgtgggagcgtagctggtacttgtactgaaacctttcgtcacagttctcgcatctaaagggcttctctccagaatgctgcaaggagtgcaccttgagtgacatactgcgtttgaatgattttccacaggtttcgcatgtaaatggcatgtcttttgtgtgtgcaaccatgtgccaacttttttgtacaaagt

SEQ ID NO: 120772 - DNA, 863 bp, Homo Sapiens
gaacccgtgcgccattctgcaccggctcttcttgctctcctccagccggtcccgctggcgctgcagctcctcctgggcaacttgcagcttctcccgctctgcggcagctcctcggcttgctgctgggccacatgcaggctgtggaccaggttgctcttctccctggacttcagctggcaaaagtgcagggcggagagaatcagggcaagcgagcgtggagtcgtctgagcaggccggggaggggcctctgcggggcgaacggcctcggcccggcgaggagcgccgcggtggagacggggtccgctggcccgagagcccccgcaggctgcggtcggacgctgttggacgcaggctgccgctctcagcgtcagacaggacggcctgtgccaggtcccttaggctccgctgtagcccctctctgtcctctgtctccagggccgcctgctcctgtagccgcagggattccagggcctcaagcttctcggtgaggtccttgtcgacctgatccttctccagattctgcttctgtagacgcttcactgccaggcccagctctgtcactcttctgcagtgacgcctgcctcatgcagcacccaccagggaccctcctggcactgaggtcagccttgtccaggtcgctttgcatctgctgctgggacaggtccttctcgtggagcaccttgtcccgcagctgctcctccagctgggcctgcttctccagggctggctcgacccggctctctgccagccgcaggcctgtgctcattcccaggccggcctcctggacagctcccctcccagctgcagcgggtcccccgagcctcggccgccgcgacccggttcacaacatccgcccaacccaa

SEQ ID NO: 120773 - DNA, 845 bp, Homo Sapiens
tttaagtagctgagataatgcgcttcagcaaaatcaggattaaatttcaacaaattgtttaattcttctgcaaggaagctggagtgagggtttagtctcatcattctttagcaaagaagcctgttgagaaagaaaaaattctgcttgtttttgggacagaggcccactgcaagatacctcctcttctcttacagatacatcaagttcttctttttccatttttctttcaccctcatctctactggtcagttccatatcagcatcctccactgtctttttctcaccattctggaagtactgctgaagggcagtgtacagtttaaacacttggctgaaagaaagcttactgtaggccaagatcatgtgacgcagaaacaaacctactacacttgttttgtgaacctctggttcagttccagagaaagaatctgaaaggtcatcaaaaaactgttccatatccttcaactcgccttcagccatcagtttgattctgatctgcactgaatttgccagctgtggacaagactcttcaattaacttgtaaagttttgacagtgtaatatctgggccctgcagcaggggcaggagcagctggttgagcctccgccgctccatgaggctgacggcgccctcgcctgtgcggctcatctcgttcagcagcaccagcaccgcgatcttgtacggcgtcacccagtccttgatgccgaacacattggcgtgcacaaccccattggtcatcatgggattgaagtagaggctctcgtggacgctggccatggcggcccgagactaagtctcgggcccgcggcgcgctgccgccagttgtcaccacccaacttttttgt

SEQ ID NO: 120774 - DNA, 947 bp, Homo Sapiens
aattccctttaagaaatcgtgtgatccatttcccattagatttcataaacacacgtgaaacttcagacacaataggagggtggtggttttctttcggtttctgaggtcttctctctgaaacatcagagctgataatagttcggcctatacatgcatgctgccatagataattgggtggtacgtgcacctctgtttcaaaaacgcaagcagaaaataggtctggacaagggcaagctgcaactcaatttctgctgcaaccctagctcaggtaagttatgtttattccttcactttgctgatatagtcagtgagtctgttgatgccttcttcctgctgttctagggcatccaggacaatgcccatcggtgtcctcttcaaacctattccttccattttattctccagtttgttcttgaggttccgaagtctcaacgatgcatggataaacatcaacagcaaaggaaaagtaatgccaaacacaaagaccatgactcctccaaacatggagataaggaaatagctcgccaacatgaccaccataacgaacgtcgtggggtagcgcttcttcatccggcgaaggacgtctttattgtgggctgcccacacaaaccctgtgaacaccagcaccaccacgattcctcccaggatcatgttgaagggactcagaaaccccacaatggaaatcatcatggcagccaccaccaggtagttggtctggtaatagagcaggttgctcactacgcggttgttccatttggaaatgtccctgaagtccggccgggcaaagcgatcggaacccgggaagaaatcgtcccaggcgcggagtggggcgatattaacgtccatgttctcagctttgcgttcttcgcctccagaatctggcggcggcggcggcggcaaccgatcagctgagctgagttggagagttgacagcggctccgtcccaa

SEQ ID NO: 120775 - DNA, 635 bp, Homo Sapiens
tgaaggagccggcggggccagctcacagtgttccagctgttccatcagctcttgttccgtcaggccacctgcaggggcctagccgaggccgtccatggcggtggttaggtcccacatggccaagctgccgttggcctggccagtgagcaggtagcgccggggccgagagccgagccgccgggagccctcgcactccagcactgtgaaggctgtcgtgggtgagccgtccacggagcgcacggagcacacccgctgcccagtagatgagagacgcacgaagagctggctggcactgggcaccaccttctggatgaacacttgctggtcgtcccgctcaccgtaggggccaatgtcattgccagcactgcagccgccatgcccatctgccgactccagagccaggatcttaaaggaagcgagtggggtggagccgggctgggtggaaatcatgccgcggaagcgagtcacagaccatgtccgcacgtggttgttgtcggcacagactgagatgaggtgcttctccgacagcatgatcttggtgacagggctgcggtgcacagtgaaggtctggaagagctgaggccccgagcccacagtctccgggtgctgcacgatgaccaacttttttgtacaaa

SEQ ID NO: 120776 - DNA, 717 bp, Homo Sapiens
ggatggtcacaaacgtattcatgtgtcctgagacagccaacccagccatttagggtggtccttgcgtgtcctggggcgggcgacttcctgagggtgcagtgctggaaacagagactgcttcgagcctggccaccttccctcctgtgccggctgcttctaggagatgctgtgggacggtgcccggcttcgcggtgactaccatgccctaaggagcagagcctccaggatgcccccgggctgcgctggacgctaagaccccagcacctaatcacagtcagcagcttccctccactgacagtgatctgcatggtccattcctggcggcctgggggcctcgctacagttcaacctggctggcttcccgcttcctccccaggggagattagtgtcgtgtgtaaacttggacaagtcactgggtcctctctccagggagtgcctggagaaattcaacccccagctcagctgcagcccttcctgggtcagctctccacccagagaccccggagcttgcccgcagactgcccggcctgccccagctctgggaaagtgaactccagagtatgcagacatggagatgcgcatgctgatcctgggcatgagggctgggctgcactcgtccattctgtgcatactgccttgaatttttcatatccatcatagaaaaaagtgattaaaaataaaggatgagataaacttggccaacttttttgtacaaag

SEQ ID NO: 120777 - DNA, 925 bp, Homo Sapiens
ttatttacctaaggccttttttatttctcaaaagtggggggaaaaagggctggtttttagaaacagatgtggaattgaggaatgtcccagggagctaagttttaaggactaatcacaaacttgtttctccaacaacatcttgaatccattccttgcaccatcacacattttcatgcatcagaagtgtttctagagctccagaaccacgagtacctcatcacgtcctgagcgctcacatcccccagcaagccgcctgcaccaggcctttctctagaagtcctgagactgagtactctccagaggctggaggtttgtgcggagtttgtacatgtggttgagcgcttgtgtgaggaaagtcccgctggtgttgatctccatcaaggtcaagttatccagcttggcatgtgcctcctgctgtctcacaaagctgtcagcagacactcggagtttggctatacgagtgtcccacatatccttgaccagggtccggatttcgtctgccttcgggatgttgtctgaagcatgatttaacaggagcttcgtaagttccatgtagtaagggctgggcattggggtaaaagtttcttcctttcgttcatgatccctcatcttctccaacttttctacatccatccactctggagggagcaggcgacatttctgtctttgtttcaggttaatcgccagccacaggggcacttccacgggtaaaccagggttaaaaggccccaggtcccccccgatgaggtagatcttgtccagactgaagttggggataatggtaaccagctccttctcggcgaggaattcgacctcggcagcgtccatggcggcgcgagctgcaggccagagcctcacggtctcctcgggcccctcagcgtcccggaggagacgccgcggccgccgttttcccgccacggcccaa

SEQ ID NO: 120778 - DNA, 972 bp, Homo Sapiens
ttcagaaagaaaaaaagttgttggggctgagcacttaattttcttgagcaggaaggagttttcttccaaacttcaccatctggatactggtgtttctttacagattcctccttcatttctgttgagtagccgggatccttgggaggcatgtaggaagcccgctggatcatcacgggatacttgaaatgctcatgcaggtggtcaacatactcacacaccctattttcaaggcttgcagaaactgatatgtagtcaaatataatcaggtgctgcaccagttcacagaggccaactccaccagcatgggggcaaacaggaatttcaaactttttggccatcagcaatactgagaggttctcattgacactgcccagtctgcaactgtcaatctggaggaactgcagggccttcgcctgtaggagttgcttaaatatcactctattgtggcactgttctcctgtggcaatgccaattcctaatgggaccagtgccttggaaatggtggcgtgccccagaatgtcatcaggggaggttggctcctcaatccacaatggcttgaacttggccagcttggacatccactccaccgcctcaggcacatcccagcgctggttggcatccatcatcaaagtcttttccggtccaatcatgtctcggatgatttggcatcttcgcatgtcatcctggagatcagcacccacctttactttaaacctggtccagccatccttcagcgcctgggcacagagctgcttcaacgtgtcatctgagtaccccagccaggcgcacgatgtcgtgtaagcagggtatccttgtgccagcatttgcttctctctttcttttttaccaatttgacctttctgcagtatttctagggcatcctcctcagtcaggacatcagtgatgtacctgaaatctatgcaggataccagcgtcctgggatcctggcaacgccaacttttttgtacaaag

SEQ ID NO: 120779 - DNA, 906 bp, Homo Sapiens
tcccataacccagaagtcctgaccagggccggaagtaaagagcttttcctctcacctagcggactgcaagggctgggagaatcacagggcccagtaccgtcacgtcctatttcttcctggcaatctgatttggaattcgtgaatcattttctcaataaaaaaacagaagttataaatggtagttcatttccaccattaaactgtttcctttcaagttgcatcaatgactttgaagcacaaaccacctgaagtgtgtgtagagtcacacagagtgtttcttggctccaaagtctacaggcaatcaaaagggggaagctgtctttggttgacaaagccttgtgcagaccccagtgtgccaggtgtaggaaggggagcttggcaggcggctcctgcaggcacttaagcagtgaggcagcatgagcctgactgaacatggctgctgcttttctgaagtttaataatgatgatgtttctagcaccaagcattagctttgtaggcactcagagcaaagctgctgccgccacccagacgttctcctctgttaacagatgcccacccaagggcagcatgagaactgggcctgcagcccttgagggggatgggcagaggcttctgcctgaagatgaaagcaccaccacctttgccatcccattagctgagtgagcaaagctcagggaattggacaggtgtgactttgctactgaactccttcatctcctggcctaaggtctctagtctcttctggaagcttgtttgtgagttagatccagaagttctataaagctttgtagagggtggcctccacagctcttcttcctctttggtgtacctgaacaattgacttttttctggaaaggtgtcagaaacagaccagagtcaacaatcatttatgccaacttttttgt

SEQ ID NO: 120780 - DNA, 944 bp, Homo Sapiens
gttaaaaggttcctgacctcccactttcttgcagtgttctgaacacttacatataccagatacacgccaaaagtagaagaaaaaaagttaaagaaaaggcagcattaaatttaggcaaggcttcgaagagttgatcatctggcaacatggcaaaccggatgggttcattataaaacaggaagtgcagcattacaacatggggggaaagggcaaggacagggaaggggtcactagtgaagagcccatgttaagttgattttaaaaaagaaagcaagcaagcttcacacgatcttcttaatgctattacgtttgaaactgccagcgcttctttgcttctgcacttggcttgcggatccgtggcgagttcgtccactgttacagtggccagtggtaggggagagttcaacgttctccttgtcgattcctggggaatgctgggaagttgcaagtgaggtcatggaattagaaaggttaaggttggcagtgatactaagctggctctgcagtgcaggagggtaaggagatgtgggagtcaggagggattcttcactggtttcttcatcaattccaggcaggtacgtgtcaatcaaggcatcaagaaacttaacaataagctcagcatagtctggaatttgtgtttgctttgaaaacggtcctgcaaaccgccacaagccattaaaaccaaaactttgcaggtaagatgtttggtattgtggtggggattcttcatggtacaccacactctgcacaattccatggattggatttaacaaatttggatcttggcacaatgataacagggtgttgatcttagagtccaacaaattatgcacaacaggaaagactttgggaaacacaacactggcctctgctaagtattcataaagaattcgttgatcaaactcatctgtggtatattttacccaacttttttgtacaaagtt

SEQ ID NO: 120781 - DNA, 829 bp, Homo Sapiens
ctttgtacaaaaaagttggggagtcccaaacgacggtgcgggacggaagagggggtgaaggccagaggctcggggcttcaagaccgctgtctggagtccccctttccaggccatgtcggggcccacctggctgcccccgaagcagccggagcccgccagagcccctcaggggagggcgatcccccgcggcaccccggggccaccaccggcccacggagcagcactccagccccaccccagggtcaatttttgcccccttccatctgagcagtgttaccaggccccagggggaccggaggatcgggggccggcgtgggtggggtcccatggagtactccagcacacgcaggggctccctgcagacagggggggccttcgccctggaagcctggacgccgagatagacttgctgagcagcacgctggccgagctgaatgggggtcggggtcatgcgtcacggcgaccagaccgacaggcatatgagcccccgccacctcctgcctaccgcacgggctccctgaagccaaatccagcctcgccgctcccagcgtctccctatgggggccccactccagcctcttacactaccgccagcaccccggctggcccagccttccccgtgcaagtgaaggtggcacagccagtgaggggctgcggcccacccaggcggggagcctctcaggcctctgggcccctcccgggcccccactttcctctcccaggccgaggtgaaagtctggggggcctggctataggagccagagagagccagggccaggggccaaacaggaagctgctggggtctctggccctgcaagaaaaagaaaaa

SEQ ID NO: 120782 - DNA, 956 bp, Homo Sapiens
cataatttctatctatatggcgattagaagttggcttaaaagcaacagcagcttccccttggtccaggtgggatcctcttgtgtaaatgttgctactgaacgcatagccatcggctggatgatactctgatacactggaatgctctgtggataatctttttatttcctgtttgcgctgatgatctgctacatttgccacagattctgccagttgataaagatcttgttccattgtggctcccataaagttcagcattgggggctcccagccattgcggaatcgtggaacatatggtggaataaactgttcttttggccactctgctctggctttcatccaagttcctcccaatgacatccacagctgccgttcatcaccattgacagtataatttaagaaatcaattgtgtccttattcaataggggactaagtactgaactggctagttcaggacctcctgttgcctgcaccaccatatttaatggagtaaacaaaaagtgaaccaaatctgcagcactaggattctgaatatgagacttcagtttggccagaaggttaaatccgtgtttaaacttttggaaacagtcaagaaattcatcaggaggtggaggttttgcccgcagcgttaaaacaccctctcctggtcctttccttttacctttcttgtttttcttccttttagaaagctcagaaaatgcttctgctgctttttggagttttgtgataaaaaattcaatgtcatccaaaatgtggtttaagatttgcacatctctgtcaatgcgggctgccatcatctcaggtgtttcttcctgctcatgatactgccttggtttctcaaagtccccttggtcggctgcccatgcagaccaggctgccactcgacttctaacatccacctgggtgacggtcccagggggcgcaggggcaggagctctgggtgccaacttttttgta

SEQ ID NO: 120783 - DNA, 907 bp, Homo Sapiens
ggggtcaggactgctcccaggagaccactgcccttgggttggacataggacctggtcctgggagacccctaacctggggttagacagaggccctgggcctggcagagcccctgtcctagggtttagggtggggcctgggcctgggcctggccccaagaggccaccaggctttgggaaagaaactgcacctgtgccagtgggattcatccctcttggaaaagaagccatacttgggtcacgagcaccagccgggaaaggtgctggatttgaagccaatgagcctgatgaagctggaaaaggagatgggttccttggaaatggggtcagatttccaccaagagaaccggccgccataaggaagggatccgagttcacacccagtgggtggcctgtgttcagaacaggacccccctgtggtcccagggaaccgtcgagccgtcctcgaggtggcagcggagcacgagtccaaggagttggccgctctctagggaaaatccgaggttctttcatactttcttggggacgctggtgataatgggcttggggcgggttttgaaaaggatcttgtctttgatgagtgctgtcaccaggtaccgggtgccagtctcgcggccaagctcatcacagtcctgatccccaggagtgtgtttgacaaggactgcaaaaggtttctccaggtggatgattttcccatacaggatatgatgccccacgatcagcacagggattccctcagtggtgtaatgtaggtctcccaggaggtttccagctaatccagtgctgtagcgagcctcgatctccccctgtagctccatcagcacccattctgccaggcctccagccctcgcactgcaatggcggccgccgagcgcggcgccgcgcggccaacgggcgacaaccgaaccaa

SEQ ID NO: 120784 - DNA, 867 bp, Homo Sapiens
tttgtacaaaaaagttggctatacccagaagcctaagcgttcccagtggattctcggtgactgccccagaaaagaggggctgggtcatcaaccccctgggagagaagagccccttccctgtgtggatgatggttgccagcctgctgcccgccatcctggtcttcattctcatcttcatggagacacagatcaccacgctcatcatctccaagaaggagcgcatgctgcagaagggctccggcttccacctggacctgctgctcatcgtggccatgggcggcatctgtgccctctttggcctgccctggttggctgctgccactgtccgctctgtcactcacgccaacgcgctcactgtcatgagcaaggctgtggcacctggggacaagcccaagattcaggaagtcaaggagcagcgggtgacggggctgctggttgccctgcttgtgggcctctccatagttatcggggatctgctccggcagatccccctggccgtgctctttggaattttcctgtacatgggagtcacctcccttaacgggatccagttctatgagcggctgcatctgctgctcatgccgcccaaaacaccacccagatgtcacttacgtcaagaaggtccggaccctccgtatgcacctgttcacggccctgcagctgctctgcctggccctgctctgggccgtcatgtccacagctgcctccctggccttccccttcatcctcatcctcacagtgccgctccgcatggtgggtgctcacccgtatcttccaccgaccgagagataaaatgtctggatgctatcgaaggcgatccgggtgtttgatgagcgggagggtgtgggacgagtacatgaaatgccc

SEQ ID NO: 120785 - DNA, 795 bp, Homo Sapiens
aaaagcttgcagcatttgacttgccctctctcttcccttccccagtggcagtctgaagacagcagcctgcatctcagtctgggaacctactccttagtccctgcttccagaggaagaaatttgaaagaattgcgtttgcctgttttgagctgcgggttacctaaaggactgacacaagacattggtctttgctttccctaacttggaacagggcagagaggtgtctcttcagagggtattgctcaaaaaacttgtaaggcaaataatctgcagccacctggggcaaaagatttcagttgaagcaaacagacacaccaacagcctgagaggaaaagctgggagaaagtttcttttggaaatttgggcattcaacaatgtccacttatactaaggttaggaatttagaaagtcatgcatatatgcccagggcaggaagcatgctcagaaaagatctgaaaagaccctttagctgaactttcggctcagcacaagcaggaaatgaggctacagtagagttgtaaacagcagggctaagcaaccacagtgtcccccaacacagccattctgcaaagactgggagaaggtggttgtcctcctttctgtctactcttttttgggggatggtggagggaagctctaggtattcaaaaaagtctgtcaaaacactagtggtggctcagcctataatcccagtgactcaggtgggaggatcacttgagcaaaggagttcaaggctacagtgagttatgatgcccctgcactgtagcctgagtgacagagtgagaccccatctct

SEQ ID NO: 120786 - DNA, 763 bp, Homo Sapiens
ttggggagcacaggccgagttactctgattaccgccatgctccaagacccgcactgacagtccccacctcccgttctctgtcatcggttccctcaatggagtccacatgtttgggcagaatctggaggtgcagctgagctctgcgaggaccgagaacacgactgtggtgtggaaaagcttccatgacagcatcaccctcattgttctgtcatctgaggtgggcatctctgagctgaggctggagagactactccaaatggtgtttggagccatggtccttcttgtgggacttgaagaactgaccaatatccgcaacgtggagagactgaagaaggacttgagggccagttattgcctcatcgacagcttcctgggggactcggagctcatcggggacctgacccagtgtgtggactgcgtgattcctccagaggggtccctcttgcaggaagccctctccgggttcgctgaggccgcgggcacgaccttcgtcagtctggtggtgtccggccgggtggtggcagcaacagagggttggtggcggctggggacgcccgaggccgtgctgctcccctggctggtggggtccctgccgccgcagaccgctcgcgactacccggtgtacctgccgcacgggagccccacggtcccacaccggctcctgaccctgactctgctgccgagcctggagctgtgtctactctgcgggcccgagcccacccctcagccagttgtatccacagcttctggagcgctggtggca

SEQ ID NO: 120787 - DNA, 744 bp, Homo Sapiens
caagcctaactggtaggtcccccagaagtacccaagttgtctaggactggcagggggtagcttgttttgctgtagtgttgagggcaagagactgaccatccatgcagaaagctgggctagggttgctcgctgcctgccgtggctttcccacctcattaggagcccgcttctctcggtggggagatgctgcccccagagcatcacctggccaggtctgagggcagagcatggagtgggtccagactttgtttctctgctgccagccgtagaaaggtctgggctgtcagatctcccccaagccagacagcctcgctcagctccttggctggggccccttagggaacaggcctgcaagtgtgatgagccaggtgtgctcatccaggcagctacaggcgcagcctcttgatatcttcactgcggaagtctatccgcagggccagcacctggcgcacttcagcaggggtgaggcgccacgtcaatgggccggaattgggtccccagtaatcgaggatctcggtcacccgctccagattgaggatggtggccatctgggagagccgggcaaacttgtctcggatggtccaggtggtcaccgtggtaaggtaggcaatgagcgacctcagctccttgtcaaactgcagaccacccagccggttaaaggtggatttcagcaccactttctccaactcgacggcaacaaggctagtcatgaggccggttaggcccaacttttttgtacaaagt

SEQ ID NO: 120788 - DNA, 707 bp, Homo Sapiens
tggccacagatgagaggatctctgcagcagatagtacttgtgggtgcgagacctgtccagggcttgatttgaggagaggagcttgaggcccctgcctgctccctggtgctcaggagctgttcttgggcccctgttgtttcctccgctgccggcccagctggcggaagtgcagccgtttggggttgaggccaaaggcctgcagtctctggcggctgaactcgcatccaccaagcatcacagtggggcccagcagccgtgccttcttggccctcctccgcttctggggggctggcttcttgtggggtgatacaggggcttcctcttcctgtgctgggggactctccggccccatcaagctgccatcaagggctggcagctgcctctgtgggccggcttcatctctctgtggcttccctgtggcttccgcaggtgtctctgcctcttctcggcagagtgacttgaagacctgccgctttttccatgagttctgggccttctggctgtacgcccgcttgtcccgcagctcctcctgctctgacctgtacatgcaggtcttctttagggagcaccaccggttcagctccttatcgtcagcagcgaggatctcctcagtgctgaggccaaagtcacagggcaccactgtgcggtacttgaagcgacagggcaggttgtcgatgatgtcctcgccaacttttttgtacaaagtt

SEQ ID NO: 120789 - DNA, 916 bp, Homo Sapiens
cacacttgcagtccagggacaccaaggctgagttgggtctgaccttttctaggatctttctccatgctgctgtcctccaggaagtcatggcaaatttacatctccagcaggttgtagaccaacagccttgaaggacacaccagggtctctccccatggtgtctcctgtactctgctcctggggtcgagtcggctgctggggtttatcatctggaagattctctgcctcagcctcagcctcagggaacaacagcttaccctgcagggtatacagaagctggaggaaggtctgatacctctgcagcttgtcccgctcctgttctgcctgctgcttcaggtttccaagtttctgaaacaccctgtcaagctcctgctgagtccctgtcttacgctccctcacctctgcagaaacctccgccagatgctgcagatgcttctcctgttgtagctgccactggttctggactgctctgcgtttctccatggccatttgtttcttggcctggagctgctcaaaggcttcccggagttgtgtccgtttcctctgggcttcctccatctgagtcagggccttggtgaggccaattttgatggcctctacgtgctccctgtaggtggccttcagctctttccattgttccttagctgcaattgccttctgtcggctcgtgtcttcagaagccaaggggtcgagacccttagcagtgtcctcctgagccaggatgttctgcaggaaatccgctacctgaagctggctgcagagcagcttgtctttcttctgagagtccaccacaaactcaaccaggatcttggctggcagttctgcctcctcctgcaggcctacaggttccaagatgcctgccacctcagccaggacctctagggctgcagcttccgcctctgtctccgctgcccaa

SEQ ID NO: 120790 - DNA, 903 bp, Homo Sapiens
gacgctgacgccccagcccttgtgacatgccttcaagtgctgctctcatgacttcacattaccaatacattcaaaggaatagtccactcctccatcggtcatctcaatgagcacttcctggatgggtttactaaaatcctgagggttaatacattcagtggctccaaactctttggcccttgcaaatttatctttattgatgtccacaccaatgatccgggaagcaccagccactttacagcccatgataactgccaatccgactcctcccagaccaaagacggcacaaacagagccaggctccaacttggcagtgttcacagcagcaccataaccggttgaaatgccacaacctagaaggcagactttatccaaaggtgctaaaggatctattttagcaacagagatatcagccacaactgtgtattcagaaaatgtgctggttcccatgtaatgcaaaattgtctttcctttgcaagtaaatctgctggtaccatctggcattaatcctttcccttgagtgactcttatcttctggcaaaggttagttttaggatttagacaaaatttgcattctccacactgtgggatgtaaagtgggatgacagtgtcacccgccttcagcttagtaactccctcaccaacactttccacaattccagcaccttcatgtcccaagatcactggaaaacaaccctcaggatcagctccactcagggtataggcatcggtgtggcaaaccgcagtggcaatgatcttgattcgaacttcatgagcctttgggggtgccacctctatctcctctatggagagaggctttccagcctcccaagcaactgcagccttgcacttgataacctcgttcgccatgttcacggattctccaacttttttgtacaaagt

SEQ ID NO: 120791 - DNA, 562 bp, Homo Sapiens
gttgctagccgccattcacgtgagcgggtgttggatgtggacagtagtgccacgccgcccgccctacagcctgccacgaggcccacgcccacgatgtagcagagcgccgagcaagccggctgctgggaccaccacagctccacctgctttgccagcatgtccgggggcagcccccggccccgtgggggctgtgcctcctgttcatacatgggttggtcaggcaggggtcagggtaggaggtcaatgtcaggggtcagaggttgcagatcacagcctggagcacctgccacctgcttggcagctacaggcccagagtcccattcgtttcacagttcaggatatggtcaccctcacctttctgcctccggctctctcagtcgttggtcccatccaggctgggtgagggaggtgctgccacggaggaggatgggacgaacagccagagataaagcctcattcaggatcctactcacatggactcaggcgtcaccagcggttcctcgggaggaggagaagcctggatgtgccgatccgatccgagaaggcatggcggagcaggtgg

SEQ ID NO: 120792 - DNA, 928 bp, Homo Sapiens
aatttagatataaattatgttcagctctgagctggttataaatcatgtttagcatgaaacagttaaactgaagcttttttctccttataggttgccatcattttcttgatctctgcaatagctttccctggattcagacccttaggacaggtccttgtgcagttcatgatggtgtggcagcggtatagagagaatgggtcctgcagcttggccaggcgttcctctgtgaagtcatctctggagtcaatcatccagcgataggcctgcataagaactgcaggccccagatatttgtctccgttccaccagtagctggggcagctggtgctacagcaggcacagagaatgcactcgtagagcccgtccagtttctcacgctcttctatggactgcagatactgctgcttgccttcctgagattcatccttcttcttcaaataaggctcaatggatttgtactgtgcatagaagttgctcaaatcgggaacaagatcctttatcacatacatgtgtggaagagggtagatttttgagaccttattgaggttggtgtcaatccttcgggtgcaagctagagtgttgcctccattgatgttcattgcacaagagccacagatgccttctctgcatgatcttcggaaggtcaaagtagagtcaacttcattcttaatcttgattaaagcatccaataccatggggccacatttattaaggtcaacttcataagtctgcatatgaggtttgtctccagccttgtctgggtcccatcgatagatggcaaatttcttgatacggggagctgtggctgcagctgtctgggctcctcgggaggcctgcaggcaggctccgccaagggttgtggccggcaaccggcgcctcaaggagagtgcgaccaccgccgccatcccaacttttttgtacaaagttg

SEQ ID NO: 120793 - DNA, 931 bp, Homo Sapiens
tccactcccaagctttcagctgcttctctttctctgtgtgtccagagtgaatcttcattctccacctgggcagacagttcactcaccctctcctgggcttcctggaccagtgtgttgaggtgcattgctcggctttccaggctgacaaagtgtggactttctcgggcccctgtctcagaagaatccttgcaatgggcacattgttggtcatgatggcaatatccaggggtgtcaagccctcgctgttaggtgtgttgaggtcaagttcttctggtgtgtactgatacaggaggatctgcacagcatccatgtcctgctgttcgactgcctcaaacatggcttcattgccctggaaattcaccgaggtcttcctgagactcagccgatcagttcttgtcctaaaataggcctcatcgaaggaagagtggctccctttcagtttctcagagaggttcctgtacaggcgtttggctgcgttgggagatgagggagcactatgtttttttgactgacagagatgtaaattttgcatttgttgcgtcattttcacacgacaattccagtttatgctgttcgaggcagcagaggaacaagttgttggtaattgtccagtgctttcattcaataaatcacattggctttgctttctcctgtggctcagcctctgtgcaaagcaagcgaatctccttcctattattttgctgcaagtaaaatgcctgtctttaaagagtagcctcttggacgtgtcgcttcatttctcagatgagacaatagcacaggatgtaccgacctctcagggcagatcacctggggctcagaagcggcctgtcagtgctcccagccttcaggctgttccccagggctccagcttgaggctgcccagccagctctgtttagagacttttcaccatggttccccaacttttttgta

SEQ ID NO: 120794 - DNA, 889 bp, Homo Sapiens
actttgtacaaaaaagttgggcctgccctggccggggtcgcagtcggcagcagcgtgcagtccggcatctcccgcggatgcttttccatcccaagtgcctgcggagcgccgaggagaggagagagctgactggacgcttacgttattttcctccttcagaatccaagttcttgttgggctttaaagtagaaagtcagcattttccttgagctaaatacctaataaccaaaactgtgaggaaggttatcgggacagaggttccggataacctgtttcattttgggttttcttcctcttccccagactccagtcctcgttctagaggaaggagtaggacttccccgatccccgtagggcttcagctttttctgcctcaaaaccagccctaactggactactctggatgcattttgtggtgggccccctagaggggaagatgggcctttatctgctccgtggggtgcactggagtgaggggggtggccgggctgcctctcgcatctctgtcttcccctgcaggcgctgtgtgagctggccctgcccctcctcattacagtatgaagggagccgtgacacgcagcattttcctgccgttctctcggggactctcagggcagctcctgccactccgccagggccagcatgccagtccaggcagagcaggtggctggctgtctggccgtctcgccccgcccctccacaggaccctggaacagggcggtgcagggcgcaaccccgaggaggcaagtggaggagctgcgggttttcacagggccgcgtcgccacggctcctctgatccttaagggttggcgagcatctctgggaaatagctttttgcagaggagtggtgggaggaatagaggggggacagtctgtcacctccctccc

SEQ ID NO: 120795 - DNA, 869 bp, Homo Sapiens
ttccacaagttgctgcccgctcatctggctttgcagccggctttgagccgcgggtttcactgaggccatccctctccacaatgcgtcttacagcctcagtctctgggatgacagcagtccacacctcatggaccaggttctgccagccggcttcaagcaacacagcggcatcaatcacacacacacgctttcctgtggggagaccccagtcaccgccagcagtgccgacgttctcccaggcagaacacagtcccagggtgaacagacagtcccacgttgggcagggaagctcccaggggaagaaacagcttaactgtccccttagctgttgccatcctccctcccactcaccctcagccacagcccgatccatctcctctcgggccagctttgcgataattggccacataatgtccgtgagtatcttcagctgcttctggggaggggaacagagggcagaggttaccttctctagaagaggcagccagcccgagcaaggtggtgttgggaacagatcaatggaaatggcattctgggccagaccagagaggtccactggaccctgacccctgggtctagtagcggcttaggagcccttaggaagttattgtttaccttattcccaaacacccggctgcctaggaccttcctgttgatgatgccatctttatggagaatatctggacaacacagacagacaactgagcacagaggcctggctagctcctcactccaggccactttcagccttccccagttattacctgttccaaaggcctccaccacaggctggtaggcagggccacctggggcataggcccgatgacccaggtggtcactgtcaatgacccaacttttttgtacaaagt

SEQ ID NO: 120796 - DNA, 1068 bp, Homo Sapiens
  misc_feature (465)..(894): n is a, c, g, or t
  misc_feature (918)..(918): n is a, c, g, or t
  misc_feature (939)..(939): n is a, c, g, or t
tttttaagttcagttctcccttatggctgcctttcaaacaagtaccttttatctgatgcctgtatcttccctttgttaaggtgtaacttgatgttgggtcaaggtttttgtgacaacaggcagactccacacagagaggatatgatgagaatatggccatcacctgaaaagttttcttatcttctgtgcttttggtccctggaaacaaatccgcctatgtatgaagctagttgatttccagttgcactatttccagttgcctctgaagttcacaggcaatacattgtctagtcctttgcgaatttctctgatttgtgggcacagttatgaagtttccccacatgtgaagacaggtacaaaatagcagagccaagcagacagtgggtctattcttcattagctcagtgacttgtgcacactcgtcttagcacttacgtttcaaaagctcctcgtgccgaattcttnnnnnnnnnnnnnnnnnnnnnnnnnnnnnnnnnnnnnnnnnnnnnnnnnnnnnnnnnnnnnnnnnnnnnnnnnnnnnnnnnnnnnnnnnnnnnnnnnnnnnnnnnnnnnnnnnnnnnnnnnnnnnnnnnnnnnnnnnnnnnnnnnnnnnnnnnnnnnnnnnnnnnnnnnnnnnnnnnnnnnnnnnnnnnnnnnnnnnnnnnnnnnnnnnnnnnnnnnnnnnnnnnnnnnnnnnnnnnnnnnnnnnnnnnnnnnnnnnnnnnnnnnnnnnnnnnnnnnnnnnnnnnnnnnnnnnnnnnnnnnnnnnnnnnnnnnnnnnnnnnnnnnnnnnnnnnnnnnnnnnnnnnnnnnnnnnnnnnnnnnnnnnnnnnnnnnnnnnnnnnnnnnnnnnnnnnnnnnnnnnnnnnnnnnnnnnnnnnnnnnnnnnnnnnnggcgcgtgctggcgttttccatangtccgcccctgacgagcacanaaatcgacctcaatcagaggtgcgaaccgacagatataagaacaagcgtcccctggagtcctcctcgctcctgttcgactgcgctacggaactgtcgctctccttcggactgggcttccaatcaccgtg

SEQ ID NO: 120797 - DNA, 698 bp, Homo Sapiens
ggactgatgcctgtatcttccctttgttaaggtgtaacttgatgtagggtcaaggtttttgtgacaacaggcacactccacacagagaggatatgatgagaatatggccatcacctgaaaagttttcttatcttctgtgcttttggtccctggaaacaaatccgcctatgtatgaagctagttgatttccagttgcactatttccagttgcctctgaagttcacaggcaatacattgtctagtcctttgcgaatttctctgatttgtgggcacagttatgaagtttccccacatgtgaagacaggtacaaaatagcagagccaagcagacagtgggtctattcttcattagctcagtgacttgtccacactcgtcttagcacttacgtttcaaaagcttgtcacaaacccttggagtcattcccagataatagaactggaaatgataaatcccctaatgccaagggtctagtgtgttcttagtggttatactgggaagtgtgtggagatttaggtgctgctctgctgctctggatggctgaaggctcctgggccatcttcatgtgctgcttgaagagctcctattttgtactcctggctagaatgctgtggaacaaatacaaagtgaaaaaagttctctgtagatttctgaagtgcatattcattgatgccaagaaaaaaacaaaagttgcctttttg

SEQ ID NO: 120798 - DNA, 1334 bp, Homo Sapiens
  misc_feature (82)..(121): n is a, c, g, or t
cttgtttcccagctgaggattattgggcgtaaatgcaaccaatataaaacataaggttatgaaatacacagtcacgatgtgnnnnnnnnnnnnnnnnnnnnnnnnnnnnnnnnnnnnnnnnttctgcgggagggagggagaggaagggggagccccgaaaccgcctaggaacgctcagcccctgggctcgtgcagggcgggagagccgggcctcagcgcatccggtagtcggtggagcaggacagctcgcacagctggcccttgaagtccaggtcgatggtgaagtccaggtcccggttgttcttggcgttgggccgcatgccgatggtgccgaagatctcctcgcccgtcttcacggtcaggtagtcctccatgtagaacaccgtctgcttccagtgcgtgtacggggactcggggctggtggagaagccggtcctcttgtggcagcgtgtgaactcgatgttgaagtaggccaccagggcgtgcacgtagtcattccgcttcacttgcaggcagaacggggaggtgaaggtcaggtcttccaccttgacggtatagatgtccacctcctttatgaggcaggcgttggtgaccagctgtttggggtccacgacatccactaggggctccttaatggccacatctttgatgcaagacatgtcgaagccatacacgttctcccaccagtggatcttgtagtctttgtactgccggtcctcgatggccgtcacatacagcgtggcccggtctgggaagatgaggccatcgggcgccagccacttgtcccgggcatagagcacggtgttgagcatggactcgtagaagaggcagtagcccatccactcgctgatgatgatgtccaccttctccactgggagctccacctcctccaccttccccttgatgatggtcaccacgtggtctaacttgttggctttgacgatcttcaccgcataatcagagatactggaacactcgatcccgatgaccttgcgggccccggccttggcagcaaacatgcagaggatgccggtgcccgagccgacgtccagcaccaccttgtccttgaagaggtgccggttatgaaacatggagttgcggtaagtgagggtgcgcacctcgtccttcagcatctcctcgtggatgccaaagtgtgcgtaggagtcaaagtagtaatctttggatgtcatgtcctcagcgttgggcttctcactgctttccgcctggccacaggacacctccatgatgcagttcgcggcctcggctgccgccatcttcacccgcacctactcctcctccggcctcgtgccgaattcgccacccaggcctcgctc

SEQ ID NO: 120799 - DNA, 533 bp, Homo Sapiens
accagctgaggatttattggcgtaaatgcaaccatataaaaacataagttatgaaaaacacagtcacgatgtggcctccccatccccccagcccaggcccctaaaacccccttctgcgggagggagggagaggaagggggagccccgaaaccgcctaggaacgctcagcccctgggctcgtgcagggcgggagagccgggcctcagcgcatccggtagtcggtggagcaggacagctcgcacagctggcccttgaagtccaggtcgatggtgaagtccaggtcccggttgttcttggcgttgggccgcatgccgatggtgccgaagatctcctcgcccgtcttcacggtcaggtagtcctccatgtagaacaccgtctgcttccagtgcgtgtacggggactcggggctggtggagaagccggtcctcttgtggcagcgtgtgaactcgatgttgaagtaggccaccagggcgtgcacgtagtcattccgcttcacttgcaggcagaacggggaggtgaaggtcaggtcttcc

SEQ ID NO: 120800 - DNA, 1007 bp, Homo Sapiens
  misc_feature (812)..(812): n is a, c, g, or t
  misc_feature (827)..(827): n is a, c, g, or t
  misc_feature (952)..(952): n is a, c, g, or t
gcgtctttcatagagtttatttgaaaagatgctgaatttattcccaagtataattttaaaaagctgtttaggacccaaacatatttaaacatctcttacacatacagaatttcagtttacaaatattccagaaggcattttcttaagcagtgaaccatgcagaatactgttgctaaacatcgtttctgccttcctcgtgttctcttggtagtttttactgtttggcttgatcctgctgaggaatgtgcttaccactggaagccagacgcagattcggcaagtgtttcttgcctcttacaaggcaccgcgtgtaacgtcctgaccagctgttggtcgtttgtggcagaggggtatggctgcttttcgcctgcatcttgcgtgctttaggcagatcagtctggagtgcaggggaggatgaagacaggtggacttgggctcatctttcatcagttaagtagccaattatctaacttgtatttctggaaactgaaaaggaaagtttctagaaaccgtaagaacaatttaagttgggatttagaatagctgacacatttttagatgggactgaaatgagtaagaaaggttctccaagatgtatgattttaagtccttactccataaatcttcattaaacacatctcagttttggcctgactcactggggtgtcaagcagctactcaccctgcctcaactacgtaagctgcaccttggcaggaaagggctcacaggttacagatagagcttgatgagctcatcgctgactgctgagggtgtcagcacgcccaagtctggtaacagcaaagtgattaanggaggggcagtgtantcgaccaacgatgctctccttgaggtctggtcagtctgcgcgaccttgagagtgtctgctatacttaaactatctgggacgcctggctggttagtggaaagagcggacaacttgaacttctgcancacataaaggttggtctgtgcttgggaaacagcatctggtggtcatcctgtatat

SEQ ID NO: 120801 - DNA, 2044 bp, Homo Sapiens
  misc_feature (127)..(127): n is a, c, g, or t
  misc_feature (355)..(355): n is a, c, g, or t
  misc_feature (491)..(491): n is a, c, g, or t
  misc_feature (1942)..(1976): n is a, c, g, or t
cgacgtgtaggcgtgataaaccgatgtggtgtaacagcgaattgtgtgattatggcgtaataagaagcgtggagttgtggtaataacggtggtgtgtgaggtaggacgtccggcgttatagaagtcnttacaaatgttccaatcagtaccttgagcgcggttgatgtactattacgggagtcgttcgcatcgcttgtcgcgggcgattgtatgtcggtaaacagtaacgggctcatgtgctacagggtgtgatgactatcaagtacgaagcgcgattagcactgattcggcgcgtgcaggtagagtggagttgggatgtcccggtcgtcatgttttgccacgtgcagagcgacgncgtgggccggcgacggtatctatctacatgaacgatcagcgactatagacgtgtatgcgttaatgccgtacgaggggcgtagcatcggaatatgctggtgagcgtgcggttgctatgtagttggcgggtaacgggnagttaagcgtgtacgagtgtggggattgtggtagcgatcgaacgcgcctcattacacttcgagttcgttcgcgctacggttaggaggcggcgtgtaggatgagaatcgacgagtggcgttatggtattagcatcagtcggtggcgtgcaacgggcttagcggggacgaagaggtgcgagggcgcggtgtgggaacgtgttcgctggtcggagttcattttgagtggaccagaggggtggtcggggcggggggcgtgaggctggggaggatgggtgggtaggttgggtaaggttatgttggtgtgatgcggtagagagtgagacggatggcagggggggagcggtaaggggagggtatgagagggaggaaatgtgaggtgaagggggcgacggggtgatgcgtgagggggtcgtggggagcgtgggcgcgttgttcttgatttagaaggtggttgtcggtggtacagcttataacacaacttttattagaaaagttatacataacatagcatcaactattttcaagaacaatattaaacccgataagcaacaaaaaccagactaacaaaatgtgtaacaagaaactaatgacctttctaaaatcaaacattcaattatctacaatgtctttttacaaacggggaaaactccttggtttacaggcacatcatattgaatgtaaagctgcaatagcaattttatacaattaccactctgaagaaactgaatcattaaaacagtaattacgagttcacaaatttaaaacatttcacataattttaaattattgggtatacactgaagtctgagtttcaaaagtgagtgttttttcccacaaaagtttcaacacttaagctagaactttcagtgttaactttgccctaaaaagttaagacattctgataatcataacagtcacatgatttctgatgctatctggtctgttaataataaagtctttatttggatgtatttttcttcaattaaattacaggaaactggatataggatttcgttgcaacgctattaaagttccaaaccaggagtgtgcagcactggaaaaggagatcagtactaaaacttacaataaatatcagagaagccgttagtttttacagcatcgtctgcttaaaagctaagttgaccaggtgcataatttcccatcagtctgtccttgtagtaggcagggcaatttctgttttcatgatcggaatactcaaatatatccaacatctttttaaaactttgatttatagctcctagaaagttatgttttttaatagtcactctactctaatcaggcctagctttgctcattttggagcctcactaaaataacagatttcagtatagccaagttcatcagaaagactcaaatggaatgatttacaaatagaacaccccggccgtaatggccgaattcccgggcatatgtccggtaccgtcgactgnnnnnnnnnnnnnnnnnnnnnnnnnnnnnnnnnnncgccgcttccttgctcactgactcgctgcgctcgtcgttcgctcaacggagccccatatagtcagtga

SEQ ID NO: 120802 - DNA, 1099 bp, Homo Sapiens
cttgtgatggtcctcttctacgtcgcgtccaggcctatgctcgcttccactttggctcctccattgtggttggcccggattttccagtgcgagtcccagttttgtcatgtaatgagcttcggatggggctgtagtttacccggtatgggtaccccgtttgaacccaggtcagtcctatctttcttgtatgctgataggcgatgcaggtcataagcacgattttccgcgtgacacctctgctccttgatggcaacttaccacctgttttcgggatctctagaggtcgaccattgtttgtttccagataccatccctaaggatgcagtggtttgaccggtcagattgccgagtgtttactgtatggaatagatacgtcgctttgttgtcgttgttgtggtttccttcgtcaaagacttacaccatagttttaaattaaactgtcaggcattttctcagacaggttttccttttcaatgcagtaatgaagaactaagataaaaatcatgacttttgactgccactcaacattattacatgcaccaatattgcacacatctgttctgaactgttaaaatcatcttctgagtccttggggtgctgttttctccatcagaacacaaacacaacccatctaatcagtttccctcaaagatgaaattgacaaatttaatgtactggaaaaaaatgaagaaggaaaaaggcaaagactttgtacagacaaaaatctaagttttctcaaagggttctgtgtcccctacacatgggggcaatttgtaagcactagtgaatcaaacactagctataatgcttctagctccttatataatatggaaccttggtccaggtgttgcgatgatgtcactgtacggttcttcctgtgtcagctcaatagcttgctgctttttaagaaccaagaagctgtagaactttgcggcagcttgttttctgttcgtatttcgacataactcaagcaaactgatagattcagctccagttttagcaagagcacgctgaagaccatgaagcatctgctgagtccttttgttccctgttctttcttgctgatcttgctgggcctctgatgcggtaccgtcgactg

SEQ ID NO: 120803 - DNA, 1502 bp, Homo Sapiens
ttcgtttggctgatccctaggagtgctccccgggaccagatcggattcggcaggtttctgcttctacaagcccgcgctgtacttcctgaccacctttgtccatttgtgcagagggttgcttcttttcgcctgcattctcgccttgctttaggccagatcattctggagtgtcaggggagcaatgtagaacagtggacttgggctcatcgtttcatcagttaagtagccatttatctaacttgtatttctggaaaactgaaaaaggaaagtttctagaaaccgtaagaacaaatttaagtttggatttagaatagctgacacatttttagatgggactgaaatgagtaagaaaggttctccaagatgtatgattttaagtccttacgtccattaaatcgttcattaaacacatctcagttttggcctgactcactggggtgtcaagcagctactcaccctgcctcaactacgtaagctgcaccttggcaggaaagggctcacaggttacagatagagcttgatgagctcatcgctgactgctgagggtgtcagcacgcccaggtctgtaaacagcagagtgattaaggaaggggcagtgtagtcgacccacggatgctcctctttgaggtcttgtccagtctgcgcgaccttgagagtgtctgccttatacttaaacttatctgggacgtcttgctggtttagtggaaagagccggacaaacttgaaactttctgcaaccacatagaaaggtttgttctgtgctttggcacacacagccatctggttggttccaatcttgttaataattcctccgttttcaacaactccttcagcaccaactatgacaagatctgctttctccatgatgtagccgacagcagcatctagcaccacagtgacagggacgttgaggtggcagagggctttggccattttcttacctgacaaatcaggctgtgactctgtgacgtatacactaaatcgcttcttggccgccacggctgcttccaggactctcaggaccactctggagtaggcgtgagtcaatattgtcgctccatctttgatgaaagtatggcacagatctgcaattttgtttcttgacagtgatattctcctgagaaaaagttctccccgctcaatcatgatctttttacatttggagtaatcggagtattccagggaggcaagactgatgaagcggaggaagagctccccgccagaggacactgccacagaggagtccacaccacacagggtttctatggcactggtgagattcgccctcagaccctggattgtctcccctttatctctcttcaagaactccagcaacgtccggatggcagccactgctgaggccatgtcaggatcttctttcatctgagacttaaagtattcaattaactccttgtcgtccatggcgtcctcctgctgcggagccccaggggacccgagccgcccgcgctgtctcgaacgggtccgccggccgcgccgcctgc

SEQ ID NO: 120804 - DNA, 760 bp, Homo Sapiens
  misc_feature (640)..(674): n is a, c, g, or t
  misc_feature (678)..(720): n is a, c, g, or t
cccacaaaagtttcaacacttaagctagaactttcagtgttaactttgccctaaaaagttaagacattctgataatcataacagtcacatgatttctgatgctatctggtctgttaataataaagtctttatttggatgtatttttcttcaattaaattacaggaaactggatataggatttcgttgcaacgctattaaagttccaaaccaggagtgtgcagcactggaaaaggagatcagtactaaaacttacaataaatatcagagaagccgttagtttttacagcatcgtctgcttaaaagctaagttgaccaggtgcataatttcccatcagtctgtccttgtagtaggcagggcaatttctgttttcatgatcggaatactcaaatatatccaaacatctttttaaaactttgatttatagctcctagaaagttatgttttttaatagtcactctactctaatcaggcctagctttgctcattttggagcctcactaaaataacagatttcagtatagccaagttcatcagaaagactcaaatggaatgatttacaaaatagaacactttaaaccaggtcagtccccggccgtaatggccgaattcccgggcatatgtccggtaccgtcgactgnnnnnnnnnnnnnnnnnnnnnnnnnnnnnnnnnnncggnnnnnnnnnnnnnnnnnnnnnnnnnnnnnnnnnnnnnnnnnnnacaaagagcgctagcgccctatagtgagtctatacatctt

SEQ ID NO: 120805 - DNA, 887 bp, Homo Sapiens
  misc_feature (827)..(836): n is a, c, g, or t
ccaaacccccccttttttaaaaggcctttaaggaaaaccttttttccaaaggggggtttaaactttttgccccccttaaaaaaaaggtttaaaagggcccatttctggaataattccataaaccaggtccaccaatgattttcggaaggctattctgggtctggtaattaataaagttcttttatttgggatgtatttttcttcaattaaattacaggaaactggatataggatttcgttgcaacgctattaaagttccaaaccaggagtgtgcagcactggaaaaggagatcagtactaaaacttacaataaatatcagagaagccgttagtttttacagcatcgtctgcttaaaagctaagttgaccaggtgcataatttcccatcagtctgtccttgtagtaggcagggcaatttctgttttcatgatcggaatactcaaatatatccaaacatctttttaaaactttgatttatagctcctagaaagttatgttttttaatagtcactctactctaatcaggcctagctttgctcattttggagcctcactaaaataacagatttcagtatagccaagttcatcagaaagactcaaatggaatgatttaccaaatagaacactttaaaccaggtcagtcctatctttttgtagctgaaggctatcagtcataacacaatttcgcgtacacctctgctcattatggaattacacttaaaacgaatctcaagagggtgaccattgttgtttcagataccatccctaaggagagtggttaacaggaagattgccagtgttactgatggaaagaagtgtttgtttgnnnnnnnnnnccccggccgtaatggccgaattcccgggcatatgtccggtaccgtcgactg

SEQ ID NO: 120806 - DNA, 1701 bp, Homo Sapiens
  misc_feature (230)..(230): n is a, c, g, or t
  misc_feature (247)..(247): n is a, c, g, or t
  misc_feature (344)..(344): n is a, c, g, or t
  misc_feature (351)..(351): n is a, c, g, or t
  misc_feature (698)..(757): n is a, c, g, or t
  misc_feature (935)..(935): n is a, c, g, or t
caggcccagggttttcccctttttcaattgccggtaaagggaagaacttaaggaataaaaaatccacggccttttgggatgccccctccaacccttattttcatgccccccaataattgccacacatctcgtttttgaaactggtaaaaatccatccttcggagtcccctgggggtgctggttttctctccttcagaacccccaaaccccccaccccattttaatccagnttccctcaaaggatganaattgacaaaatttaaatgtactggaaaaaaaatgaagagaggaaaaaaggccaaagacttttgtaccagaccaaaaattctaaggttttctcaaangggttcntgtgtcccctaccaacaatgggggcaatttgtaagcactagtgaatcaaaccactagcctataatgcttctagctccttatataatatggaaccttggtcccaggtgttgcgatgatgtcactgtacggttcttcctgtgtcagctcaatagcttgctgctttttaagaaccaagaagctgtagaactttgcggcagcttgttttctgttcgtatttcgacataactcaagcaaactgatagattcagctccagttttagcaagagcacgctgaagaccatgaagcatctgctgagtccttttgttccatcttctttcttcctgatcttgatcgccccctgatgcannnnnnnnnnnnnnnnnnnnnnnnnnnnnnnnnnnnnnnnnnnnnnnnnnnnnnnnnnnnggcagaagttctaactctggtattagctgacagatatttggaggttcttctgggggaagctctacaggtggtatttccatctgctctacctgctgaggaggcatcacaggctctgggtcaattggtccagcttttcgcttaactccctgaggtggtggtggaggcatagctgactcanctatgtttgttctgctggcctccatcactgactcctggaggcggcttggctcttcaataatgggctcatcgataacatcacgctgctgatgctgctgttgctggtcctctctaggaacctctggattttcaaattctttgaggaattcatccaaattatctgccttctccttcctttccttccatttttctaaggtcttctggtacaagcggtgtaagacagcgtgtaaagagcttcagtagtctgttattccacaaaggctgagcaggtaaagaaaacagtttttctactcctcctgtctctttccacatcatcaatttcttggtgggcggtgccagatccaaagtagtaacaatatctgaataatcactaagttgggctctaattgtcttgctatccaactctttgacactgtcaacaattagcttcctcttcctcttggcttttgtttctttaacagttatatcaataggctccaatgcaaatgcttcttcctcatttggaacaagtgttgtttgatcagtcatggttggcattggttcaacgggatccactgaatcaggactatcaggcccacccattgatacattatcatcctcatccatatcgtcatgtgcaggctgctctggcaacatcacccctgcctcagagagggcagggggatcatcaaagataccgccatcattattactaataagtttgtcatctaatattccaccatcatttccttctccaaaattatcatccttatattgatcttcatacc

SEQ ID NO: 120807 - DNA, 1093 bp, Homo Sapiens
  misc_feature (58)..(66): n is a, c, g, or t
ccaagataagaagcttgaatgaagtttcatccgttgacttgccggaggggtttccagnnnnnnnnnagggttcgtttaacccagcggaggtggttttaggaaaggggccaggtgtagttcgaccccacgggatggttccttctttgaggtcttgttccagtttggcgcgacccttgaagagtgtctgcctttatacttaaaacttattctggggacgtcttgctgggtttagtggaaagagcccggacaaacttgaaactttctgcaaccacatagaaaggtttgttctgtgctttggcacacacagccatctggttggttccaatcttgttaataattcctccgttttcaacaactctttcagcaccaactatgacaagatctgctttctccatgatgtagccgacagcagcatctagcaccacagtgacagggacgttgaggtggcagagggctttggccattttcttacctgacaaatcaggctgtgactctgtgacgtatacactaaatcgcttcttggccgccacggctgcttccaggactctcaggaccactctggagtaggcgtgagtcaatattgtcgctccatctttgatgaaagtatggcacagatctgcaattttgtttcttgacagtgatattctcctgagaaaaagttctccccgctcaatcatgatctttttacatttggagtaatcggagtattccagggaggcaagactgatgaagcggaggaagagctccccgccagaggacactgccacagaggagtccacaccacacagggtttctatggcactggtgagattcgccctcagaccctggattgtctcccctttatctctcttcaagaactccagcaacgtccggatggcagccactgctgaggccatgtcaggatcttctttcatctgagacttaaagtattcaattaactccttgtcgtccatggcgtcctcctgctgcggagccccaggggacccgagccgcccgcgctgtctcgaacgggtccgccggccgcgccgcctgcgagccagtctgacagcgcgctgcacacctccgcaccatcccgggaattccggaccggtcc

SEQ ID NO: 120808 - DNA, 334 bp, Homo Sapiens
gtcactaagttaaaagcgaagtgagagtattaacgtttttgttctcctccggccccctgttacaatgaaggggcaaaagtatttgctcttagtctattcctcccttaacttctgtgactaatttttatttcctttctagatttgcccaattaatactagggtgcagtgtatcctggagaggtagggtgtgtgggggaggaatcccttgggggagatattaggagtgctctgttgtttacaaactcaggtacccgcagggcctagcaagagacttaaatgactgataagaaccgtgagaaacatgttgcttccaggcttgatttcgatttttcgc

SEQ ID NO: 120809 - DNA, 1853 bp, Homo Sapiens
atgtatatactgcttttattattggaatatgtttgttagttgaatgaaaacaaacagtagctaaaaaggtttcaaatgatagaaaaacatatctgggtaagttatgacacaactttttgtgtattcagacgacagaaatctgtatttttgcaccaattgcaaatgcaaagttaacaatgaacttggggaactgaaaggtcaaagggagtctcaaacatattcactattttaaaatttaagacaaagaagcttagaaaaaaaaccccaacatatacaccattataacagtctttttttaatgacttccaattttaacttttttctaaagcactaagacccttattgtagattatgtatcatctcctctttggctatgagatgcgtagttttgttaaccagagacattaatgagttcagtttctgagaccagtcatttaataaattatttggatccttgggtctctggaagttgataattcctgctaatctgtctactttagcaaagatggtcttgttaactactagatttgagagaaaggcttcggactcatcaacagatagatccagaagctgtgccatccttttcattgttatccgagtataatacttggccattattctaatattatgttcaacaactctgttcttcaagtctttccaccttttttcaccttcctctgtagaaccaaaaacatccgttgcaggactctcaagggaaccttttcttaattccattccatagtcctcaacaagtgtggaccaacgcatcaactccattgtggtaaaaagctttaaaagatccttgtatttgggaatttcttctaacttcttgtcaccacttattcggtgaaccaaatctgactgttcattgtcaaaaggagccaggataacatagagtacacacactcttcagagcctgctgccatttttcactttctgcctgtatacagggagtatcatatattgctctgtagtgcttacaaatagacaaataggatccctcatgttgatccagctgaatcattaaattatagtacttcaactttaatttctctgtattttcttcctggaaaaatttggtgttaattttcttgctgatgatttgtgttcgaatgtaatccttcacagctaggcagagcctcatttgctccaaaataaattccactcgctctttcttttccattgacccgtaggtttccacctgtaactcctgtaaaatggaggctgcctctttcacatcaccattttgttcttttatagttgctaatgttttagtcagtcgcgcacgctcaatttcaacataaatcttgccttcggtaaccattcgtagagtatcaattaatcgaagtttgataggaaggtctgtgatttcctcaacataagtacagcactgttgaaccattttggcaacagcttgttttaactgactccgccttttggacaaaagcataatattttcattaagtaaatcccattctttagcctcatagcacatcttcactactgcaactaagatacgggatgtcgataccatatcggaagcagtacgagtctgcttttccagagagagaagggtttcaatgacttcttgaagtcttccttccttggctagcttcgcacactcgggtaggcgctgatccaccgtggcgctgtagtccacctccatcttgacgatgcgcccgtcagcccgctccgagccgccgtccgccatggtccccgcctgagcgtcccttgctgtccccctgcttcggccaccactcgtcaccccggacgcgtgggtcgacgatatcccgggattccggagcggtaccagcctgcttttttgtaccactgttcatagttccaattgcctg

SEQ ID NO: 120810 - DNA, 1556 bp, Homo Sapiens
  misc_feature (861)..(890): n is a, c, g, or t
  misc_feature (1217)..(1234): n is a, c, g, or t
tttattttcaccacggtcaattttattgcttaggaaccagaccggtcacttccaaaggcccctcagaacgaccaacagctgaaacccgcggggcggactccgtgttgaaccgcggacagcggcaaccacagcagcgacacggacctgtgcttccaccaagaacagattccgcagcggacagcagtcacttgcagtggtagtatttatcccacacaaacacccagctaatgccttcacccggtccaggaactctgtagtgttctaaagtaaaatcaataaaacatacatttgtgtttcatcaacagactctctaatcaccttctaatgctgtacttactgctataggagaaaaatatttgcaacaaggttatgacatgggttgtctgtagcggagcaatgaggaaatgtacagttttgtttctctttaatatttttatatacagcccatgttaaaagcagtttctattggaagcaaactaggctatttctatttctcccatgatattattgttgtaacgtaggatacttggcaccataaaacagtaacaaaagacagacaaacggtttacaaaattcttaaaaggtacacccaggctagctataaacttcacattcagttcttaatattacacagaagaacggcatgggagtaacggcccgctggtgcagacgtgctgtggggccgattttacccacgatggcgaggccatgtgtgttttttacgaatttgtgtgttgatggacacacagctgagctcctagactccaatgccgcctgctgatgggactctcctgtgcgttcatactggaaagtatatttagcataagttttggtaagatttataagttatttttaaaaagnnnnnnnnnnnnnnnnnnnnnnnnnnnnnnaaaatggaaagcagctgcagtgtgattcaaaaaccatgtgacacggcgcagagtcagtgccgcggaaggagcatcggcagagacagacccccttgccatgctcagggccacgctgccggccggcagagggagtgcccgtctcggcttccccagcccctggacacacctccacctggcagagggggtccctggacaacagtggggggtctctgtgctgaagaagcccctccacctggcaatcattaaaaactggaaactgtgaagtttacggtacagaccctctttgctgtctattagagttttgacaacaggactgtgacttatttnnnnnnnnnnnnnnnnnnccaatatttctacttaatgtcacatagacagacgagacagtgaggtatgtgaggctgctccggaatggtccggaggctgaagcgaagtgtggggctggccgtctagcaggtggcgcttgggcgggttctcgatgcagctttcaagagtgcgtattcggtccacggctacagggaggctcacgaagtgtcctctcgtggcgctggcatctcttcccaccacgtcactgcacgacacaacacttgtgcacatgggcatgaggtttacctgccccgggcatgattcggaaggccaggaacacgggcttgtggtctcccatgcaga

SEQ ID NO: 120811 - DNA, 457 bp, Homo Sapiens
  misc_feature (104)..(133): n is a, c, g, or t
ctagactccaatgccgcctgctgatgggactctcctgtgcgttcatactggaaagtatatttagcataagttttggtaagatttataaattatttttaaaaagnnnnnnnnnnnnnnnnnnnnnnnnnnnnnnaaaatggaaagtagctgcagtgtgattcaaaaaccatgtgacacggcgcagagtcagtgccgcggaaggagcatcggcagagacagacccccttgccatgctcagggccacgactgccggccggcagagggagtgcccgtctcggcttccccagcccctggacacacctccacctggcagagggggtccctggacacagtggggggtctctgtgctgaagaagcccctccactggcaatcattaaaaactgaaaactgtgaagtctacggtacagaccctctttgctgtctattagagttttgacaacaggactgtgacttatt

SEQ ID NO: 120812 - DNA, 925 bp, Homo Sapiens
  misc_feature (120)..(146): n is a, c, g, or t
  misc_feature (295)..(296): n is a, c, g, or t
cactttcacagagagatttatcgagaatgctaacagcacaggatacagtacttcccaacaaaaggtgcaaacgcgtcacttaaaaaggcatgctgagtattctttgctttcacatgtatnnnnnnnnnnnnnnnnnnnnnnnnnnnctgcgtgctgcccatcttttccaatagtaaaagaaccttatgaaaaaatcacttgatttttacaacaaaagacacaaacggacatttttatgtaaatttataaggcaaactctttatataataaataggttacagggattcagtggggnnggggtgtttttgaaacgtatacaggtacattcagacaggtttactgaaatggtacaaatttccttaataaattgccttttgtttttaaatatatcagtgctttcagtcatttggctatacacaaagaaccttttttctgaacactacaaaaaagcaatcaataatttttgtttttaaaacgacctacttattttctaaagtaattgtcccaaaacacaaaaactgaaggtgaatacgatacagggcttttagagacatctccagctaagtgtgtcccggcctctccctgtgccccaagtgcacctctcccaacctcagacaggtttccaggctggagccagctcccttctgcacagggtggcctgtgttactggcaatgctgtccatagctctcggcctctgggctggcacaggggagcatgacttcaactcaggagggggcagacaccctgcctagctcttccagatgctgcacccggcatgcaatggtcactacagtcagcactctccgcctctcagaggagggaggggctgtcaggtgttttgggacgccaaaaccatgcctaatgagggtaatggcttttctaaggagatgttttcgccatggaatgggaaggggttttctcaca

SEQ ID NO: 120813 - DNA, 1042 bp, Homo Sapiens
  misc_feature (459)..(471): n is a, c, g, or t
  misc_feature (773)..(854): n is a, c, g, or t
  misc_feature (895)..(895): n is a, c, g, or t
  misc_feature (982)..(982): n is a, c, g, or t
ttttcttcaattgatgcaactcagtaatttttattgcaactggaagacaatacatcacagaaactttatggtaggtctggggaaaagtgttatttacaataaatgatgaaatagtttgtctttggcaatatgattacatacgaagaatgcaaaatgcaggtatggatgccttccaagcaacaccaagtccctagagttcggctgatcgcgcctgcctccacactgtttctttaggtttacatgaacataacagaacatcacgttctttctcctttatggttctccctttctattcatgatattggcagtttcatacagaaaatacagaaaaaaaattggcttttgaaaaattattactctcgtaaattaatttggccgtgtaggtctattggccagccaaggtcagacgaccctaagcatcaatagtaaacctcttggtcttctgattgctttatcacnnnnnnnnnnnnnctgtaaaacaaaacaaaactcagaaatgttacagaatcagagtattaaaaaatgtacaagtgtatatgcttcccagacacacatggatacatttttcctccacattttcaccatggcagtattaagtagtgagtgtgaatgacacagcatgaaactggttactgaatcagctatgagctcagatggcctcaacatacatactcaagaaatgttgcatgtttaaataactgagagtgtgctaaatctcatctaaataaaataaaatagcctaagctgctgcccctcttgccgatctcttggtnnnnnnnnnnnnnnnnnnnnnnnnnnnnnnnnnnnnnnnnnnnnnnnnnnnnnnnnnnnnnnnnnnnnnnnnnnnnnnnnnngcccacaactcatatattatactagttgttattataagggncagtctggggttcctatgactgatgtactcaattattgcgtgcgttactgccggttctcagttggaacttgcttgcatgtgattatnatcttcatctccgggaaggggttggtatggggtcttcctttctcttaaaactttggttgt

SEQ ID NO: 120814 - DNA, 238 bp, Homo Sapiens
gcttttcttcaattgatgcaactcagtaatttttattgcaactggaagacaatacatcacagaaactttatggtaggtctggggaaaagtgttatttacaataaatgatgaaatagtttgtctttggcaatatgattacatacgaagaatgcaaaatgcaggtatggatgccttccaagcaacaccaagtcccttctgtcgtcttctcgcagccgtatagtagtagtaggcggcaata

SEQ ID NO: 120815 - DNA, 964 bp, Homo Sapiens
  misc_feature (254)..(262): n is a, c, g, or t
gtctatcaaaaaattggggagatttttatttaatagtgagtcagcaaggcattttttgttgtttaaaaaaaatctcatttccttacagaaacagtttttagtttttaatgaacttgtaaacaaaaaagctcccatttcaaaataaaaacaaaatcccagatcatatagatgtttacagtgattacatttatctaagcaacatacatacatgttcagttgtaagatgttaactaaatttctgtgacaaatatgcnnnnnnnnnaataccaagaacattatagagttaatgcagagtcctaaggataatctagtagtcactaagtttttcttaagtcttcactttagatgctgttatttctagcacaattaagcaggcagagtctttcatatgctcaaacactggaatctttggttgctaccatatcagctggcttgcagacaagaagccaaccattttaagaatgttttaagtgaacaacttgcaaaccccagggatggaaaaaccctaagaatgcacaattgtgagcatttaacaaccatcacaactgtggctgaagactgttcatgccgttcttctgaaatgagatctcaaagcagtatagttcaaaacaaaaggttttaacaaaaaattggcatatgcacaatttctccaccaatttttgtgtgtcaaccatttagttaacttttccacttgaaaaaatgcaatagaaaaccggacaccatgtttcactatctcagttaatattcacaattacagaggctacaactcaggatacagcatcaccaatgctgcccagagtcagtttatactgaaattaagttctttacaccaagtaaatggttgtccacaaccactggctagtgtacatatgaactaaaatttctagatttggggagaaacaaatgctgctccgatcatctgctctgcttcttctgttcctcaattcatgcttagaaacctggt

SEQ ID NO: 120816 - DNA, 788 bp, Homo Sapiens
  misc_feature (685)..(719): n is a, c, g, or t
aaagtaacaaatacacttttaattgatttcagatacaaactactcaaggaaagtcagtaatcgttttagcccctaatctgttagagccgtatggtgagcagccttgagtagctggtttaactggttattttcccgaattcccaccatccacggtattagaaaaaaacaaggcattgtctcagtttaggataaacacatggcacagtaaccaaatccagtctctcatatcccgtattttttctttagctcttctactttgttgatgtaagctttcatggcatcttccttggaagtccctttcagctcattccaggcatcccacttggccttgcccgtgaagtccaacatcccgggccgttctgtatttatgtcgcccacagttgcttgtttgtagtggccatagatgaacagcatctcctcatccgatggcttggtcttaaggtgcctaacctcctctgcagctttctcaaactcagcctctgtcccagtgcccggattggcagaggcaggcgggaggagccagaggtcgccccacatagctcggtctcagacaagggtctacactgagacatcctggccgacttgcaagaactccagggagacagcggaggaggcgaggaccaggaagcgatcccccggccgtaatggccgaattcccgggcatatgtccggtaccgtcgactgnnnnnnnnnnnnnnnnnnnnnnnnnnnnnnnnnnncggccgcttcctcgctcactactcgctgcgctcgtcgttcgctctagagctacccctatatgattatcc

SEQ ID NO: 120817 - DNA, 909 bp, Homo Sapiens
  misc_feature (82)..(92): n is a, c, g, or t
  misc_feature (254)..(254): n is a, c, g, or t
  misc_feature (279)..(279): n is a, c, g, or t
cgcctctcaggaccccgccccacgtggagttgtgtttgggaggcgggctccagggtcctcccccgggcgcggttgttgtaannnnnnnnnnntgtccccaaccccgttattcctgggcccccggggtttttccttggggaaacccagcttatgcccccatgtttccctttccctatcgggggcccgcgggcccccaaaaggaaaggttttttgaaaaatttttttaagggccaagggcggcccgacaagggaantggtgtggggagggaattgggggtntgggagttaatttaaagtaacaaatacacttttaattgatttcagataaaaactactcaaggaaagtcagtaatcgttttagcccctaatctgttagagccgtatggtgagcagccttgagtagctggtttaactggttattttcccgaattcccaccatccacggtattagaaaaaaacaaggcattgtctcagtttaggataaacacatggcacagtaaccaaatccagtctctcatatcccgtattttttctttagctcttctactttgttgatgtaagctttcatggcatcttccttggaagtccctttcagctcattccaggcatcccacttggccttgcccgtgaagtccaacatcccgggccgttctgtatttatgtcgcccacagttgcttgtttgtagtggccatagatgaacagcatctcctcatccgatggcttggtcttaaggtgcctaacctcctctgcagctttctcaaactcagcctgagacatcctggccgacttgcaagaactccagggagacagcggaggaggcgaggaccaggaagcgatcgcccagattgcactggcaagcgcctttagaggcgcggtccactcgccccaaccctgctcgggcgagcccc

SEQ ID NO: 120818 - DNA, 772 bp, Homo Sapiens
ggctttaaatgtgtgtttttattgtcactataggtgttttattttcaaaagcaaaaattagaaaagttggagcattttaactcaagccattataagtaaaagattgccggtatcaagaaaaagttttcctctcctagtaaacttcaattagtcaatgagaattgtataacaacttgtattttccttgactgtctaaatgcaaaacatagttttagaagtctacataaggataaagatttttaaagaaaatatcatattttaagtttcattacacatgtcctttattagaagctactttaaatcctttttcaaacatgaattgattttaattaaaataaaattttactggaacacagtcatgtgcattcatttctgtgtcatcgagtgctgctcttaccctacaacggcagagttgagtatgcagttatgatggcgaccatcagacccgcaaaccctaatgtagttaccatctggcccttcagagaaagtctgctgttcccagctgtatagcattcccctcccaccttctatcccatcagcccaacctaactcacttgtcattttgtgttctcgatggtttatttcaaaagtgaatgatataacctttacctagctcaggttagcctttttcaaagaacaaaacaaaatttagttgcttccttactggtgcagtgttttttgtcagtgatcctcagggggaaaaaaaggtgtcccaatcctagttttgctagggcaaggtgaaccctttcaagtttgtataattagttttttt

SEQ ID NO: 120819 - DNA, 684 bp, Homo Sapiens
  misc_feature (408)..(441): n is a, c, g, or t
  misc_feature (634)..(634): n is a, c, g, or t
aatatttgaaaaatgtaacttttattctgaacatgtagtatttatctttattagcaatttttttcataatataagcatgcctcaatcatccaaaagctatctacctatctatataaattgatatacatgctactgaattgacttcttaatagaatcatatggtaagtgttataatgactaatcaacctacttctgataattttggtgtaaacaaaaatgatatttaatttttattaaatcaagtttacctatcaaattcccttttagaaaaacactgcaagtttagtcttaccaagattgcaagtaaattttaaaattatggtgctgtaaataaaaaggttttaagttgaaatgtgtactgagattagccatatcacaaaagtcctatcatgggtaatgaaaagtctnnnnnnnnnnnnnnnnnnnnnnnnnnnnnnnnnngacatgtggcccaagataagaaggtcttattttttaaatgccaaagaacagtattcaacaaaattcgatttaattttatatctaacaaaaacatagaaactgggtagtcatattcaagtcaattggtcacattgtatggaatacaaaaataaatgagaaaaaaaccagttctacaaaaatgctttgttattantatactgaaccacattaaataaaaatcatttttgacaaactgcttgctat

SEQ ID NO: 120820 - DNA, 1460 bp, Homo Sapiens
  misc_feature (229)..(229): n is a, c, g, or t
  misc_feature (375)..(395): n is a, c, g, or t
  misc_feature (949)..(1308): n is a, c, g, or t
  misc_feature (1347)..(1381): n is a, c, g, or t
gatatttaatttttattaaaatcaagtttacctatcaaaaatccccttttagaaaaaacactgcaaagtttagtcttaccaagattgtcaagtaaattttaaaattatggtgctgtaaataaaaagggtttaaagttgaaatgtgtactgagattagccatatcacaaaagtcctatcatgggtaatgaaaagtcttattttaaatatatttttgtttcctttttcttntgacatgtggcccaagataagaaggtcttattttttaaatgccaaagaacagtattcaacaaaattcgatttaattttatatctaacaaaaacatagaaactggctagtcatattcaagtcaattggtcacattgtatggaatacnnnnnnnnnnnnnnnnnnnnnccagttctacaaaaatgctttgttattataatactgaaccacattaaataaaaattcatttttgaaaaaactgcttgctataagaaaatgaaagttagcaggataaatcatatgcaaaacatttagaacaaatgtatgaacacattgtggttatcaccattacaaatgtatacaacaccttacaaaaatcttaaataaaaatgtaaaaatatttactggcagtgaatatggcccaggctaattataccaacgggtaggtgatactgggaaactacaagatcaattacaataatcaccttttaagatgatactaaaacaaatgttacatcctccttagaattaaccagggttaataatacatgacaagggttataaagcaactccatgttaagtaggaattcggtctctcaaatattcaagtatagcagctgttcctttcattaatatggctgctcgaggaactcggaatggatttccatccagtagtaatgttctaaacaaagagagaaattgagaatgtaaacattttccattaacaaggtttttcatctaannnnnnnnnnnnnnnnnnnnnnnnnnnnnnnnnnnnnnnnnnnnnnnnnnnnnnnnnnnnnnnnnnnnnnnnnnnnnnnnnnnnnnnnnnnnnnnnnnnnnnnnnnnnnnnnnnnnnnnnnnnnnnnnnnnnnnnnnnnnnnnnnnnnnnnnnnnnnnnnnnnnnnnnnnnnnnnnnnnnnnnnnnnnnnnnnnnnnnnnnnnnnnnnnnnnnnnnnnnnnnnnnnnnnnnnnnnnnnnnnnnnnnnnnnnnnnnnnnnnnnnnnnnnnnnnnnnnnnnnnnnnnnnnnnnnnnnnnnnnnnnnnnnnnnnnnnnnnnnnnnnnnnnnnnnnnnnnnnnnnnnnnnnnnnnnnnnnnnnnggccgaattcccgggcatatgtccggtaccgtcgactgnnnnnnnnnnnnnnnnnnnnnnnnnnnnnnnnnnncgccgccttcctcgctcactacttcgctgcgctcgtcgttcgctcgacgagctagcccctatagtgatctatcagtctt

SEQ ID NO: 120821 - DNA, 459 bp, Homo Sapiens
ggcacgaggggaggaagttggagttttgtttcctctgttcaaagctgcctgtccctaccccatggtgctaggaagaggagtggggttgtgtcagaccctggaggccccaaccctgtcctcccgagctccttttccatgctgtgcgcccaggctaccccagctatcagcagtaccactgaggaagccactgccaccatgggagctacttctcggttccctccccgatggtctacctcgaagggagggctggctcccagttagccctgggaccctccagagagggtttctactctgctccctagtcccagggtgggggtggggcaccccagctgccctgacagatgggtcccctttttctctttcagggcaccccagccccacactcacatgtacgaagttctcaccccagctcctttgtgtggcaccctgatgagtatttaaagcccgttttgaaatgcc

SEQ ID NO: 120822 - DNA, 1067 bp, Homo Sapiens
  misc_feature (259)..(282): n is a, c, g, or t
tagccttaaggggaggcttttcttcacagaaggggggccgggagcccctggttctttggagccaccagggggccttgggaaacaaggccaagagttgggttccaaaagttttttcccagcccaagggcttttgcctggccagccaggaagcagggcccagtgagaaccggtgagacccaggctcagaggggcccgggtggggtggttatagaccaggtgctccgtgtcctcggtagtggagacaggggagctggcaggnnnnnnnnnnnnnnnnnnnnnnnntccggggaagtcctttctctggttcttgaagaagcagtaacccaagatggctaccaccacccacaaatgcagatgaccaggaacactgcgacagccatctccacagagcctgtgctgggaatggggatttcccgcctcaggccaaacacatccttcttggagatgccgcgacaagactcgaggcactgctgctcttcctcaaagttgttcttgttgccataacaaccaccataggtaaagcgggcgcagtgttcgctgaaggggttgtagtaccagcgcgggatgctctccttgcagagtcctgtgtctggcaggtccacgcagtgccctttgtcactggggaaatggatgcgctggagctcgtcaaagccactcgtgtatttttcacaggcagcctcgtcggaggcgtcggggcagttgggggtgtcgtcacactccaggaaactgtcgatgcagcagccattgctgcagcggaactgggtgggctgacaggtgccagagcacactggatggcgcctttccatggaggggccttgcacaccccgacaggctagaatgcactcttcttcccgaaggtagttgttcttgttgcccaagcagcctccataaacgaaactcttgcagatctgctccgtggggtcatagtaccagcgtgggaaagagccccggcagcgacccaccttgttggatgcgaggcagtagtcttctgtctgcttggtggacgtcacagtcactgtgctgtcctcgtgccgaattcacacacccagcctcgtacctagccgtaa

SEQ ID NO: 120823 - DNA, 847 bp, Homo Sapiens
gtttggcatttcaaaacgggctttaaatactcatcagggtgccacacaaaggagctggggtgagaacttcgtacatgtgagtgtggggctggggtgccctgagagagaaaaaggggacccatctgtcagggcagctggggtgccccacccccaccctgggactagggagcagagtagaaaccctctctggagggtcccagggctaactgggagccagccctcccttcgaggtagaccatcggggagggaaccgagaagtagctcccatggtggcagtggcttcctcagtggtactgctgatagctggggtagcctggggccggggtgccatccttagggggcagctggctggggtcctccaggaatgggggcgcatttcggaactgctgggctgtgtagcgagtgaggaggatgccaacgccctcaatgagggccaacaggatgccccccatcattgctgagcccaccatggccagtgggccactgcgggcagccagcacagccccggtcaatgctccactggtgatagagttccagggatcctccttgccccgaagccgcaccaggccacagtcaatggtggagaacaggcccccccacactgcgaagctacctccaatctggggggctcggatcctcacagcattggcactacctctcaaccggtgccgaattccaacaggggcattgcggaaacccttgatggcctggaagactccgccaccgatgacacccatagtgaaggctccaccgcaatcatccacaattcgccatgggcagggctcccgagcgtactcctccatggcgctgccctcgtccgagttgaccgagctactgccgtatatgg

SEQ ID NO: 120824 - DNA, 853 bp, Homo Sapiens
ccggggggtcccgcaccaccaaagagggagccctggggtgtacagaaactcttccgttcccagggaaaagtttgtgggggttggggggtggccctgtgagagggagaaaaaagggggacccccatcttttcaagggccagctggggatctaggggacccagaagtaggaaacctctcctctgggagggttccccaggggctaatctgggggcccagcccttccctttggagggtaggaccatcgggggaggggaacccgaggaagtaagctccccatggtgggcagtgggttccctcaagtggtactgtgtgatagctgggggtagcctgggggccggggtgccatccttagggggcagctggctggggtcctccaggaatgggggcgcatttcggaactgctgggctgtgtagcgagtgaggaggatgccaacgccctcaatgagggccaacaggatgccccccatcattgctgagcccaccatggccagtgggccactgcgggcagccagcacagccccggtcaatgctccactggtgatagagttccagggatcctccttgccccgaagccgcaccaggccacagtcaatggtggagaacaggcccccccacactgcgaagctacctccaatctggggggctcggatcctcacagcattggcactacctctcaaccggtgccgaattccaacaggggcattgcggaaacccttgatggcctggaagactccgccaccgatgacacccatagtgaaggctccaccgcaatcatccacaattcgccatgggcagggctcccgagcgtactcctccatggcgctggcgtctggccgcgcagtcaggccacccc

SEQ ID NO: 120825 - DNA, 2886 bp, Homo Sapiens
  misc_feature (1286)..(1309): n is a, c, g, or t
tttttttggcaccgggaggtagcttgaacaaatgcaggggtgtgggttggagtggcgtgtctctactaaaggctcctgggaaggagctcagagcctggttgggggtgctgcactccagcgcagaagccagggcttctgttgggagggagacagctagtcacctgggccctaacatggaggtaggagccaaggtgcctgtgcacccctaaccccaacctccaaatgagcagaattgtggagagctcaaccactcaacaggcttgtggagaggctcacaccaggaagaaatgctacacagcagcactgcagcctccccacactcgtggctcccgtggcccgctcactcctcccctctggtggtcaaacatggcactgctctccaaagtcatgggccaggccagtttcgagagagagacgatgggaaaacctgctcaacagggtggctgaagcctgaaccatctgaacaggacggtcccatcaccccccatcaacctagtccctctcctggcccacagaacagagccagaaactccacaaaccacttttattacccagtgggtgggctgggctgtgatgttggagaaccttgggggtgggggctgcggaatgcagctgagcctctcctggctctgtctgctggtctaggccagggtggggctgatcaagggcagagagctcaatcttgggggaagaggaagagaggacagagaggccaaacaggcctcttcccctcctcttcacccatgccacagcattaaataaacaaaaagcaactctttacagcacaaactacacagggaagtccttcctcccagccctgggcgcacagcatggaagaggagctcgggaggacagggttggggcctccagggtctgacaccaccccactcctcttcctagcaccatggggtagggacaggcagctttgaacagaggaaacaaaactccaacttcctccaaactcctatgcaggcaggtccatctagtctggtacttctggcccaagggttttctgctccttccaaacctttgagctttctcaggacgtgagcttagctgagacttctccaagaggggctggagccctggtctctgaggcacagtgggcctgggaaacaggcaagagtctggttccaaagtttttcccagcccaggcctctgccttggcaagcaggaagcagggccaggtgagagccggtgagacccaggctcagaggggccgggtggtgtggttatagaccaggtgctccgtgtcctcggtagtggagacagtggagctggcaggnnnnnnnnnnnnnnnnnnnnnnnntccgtggaagtcctttctctggttcttgaagaagcagtaacccaagatggctaccaccaccacaatgcagatgaccaggaacactgcgacagccatctccacagagcctgtgctgggaatggggatttcccgcctcaggccaaacacatccttcttggagatgccgcgacaagactcgaggcactgctgctcttcctcaaagttgttcttgttgccataacaaccaccataggtaaagcgggcgcagtgttcgctgaaggggttgtagtaccagcgcgggatgctctccttgcagagtcctgtgtctggcaggtccacgcagtgccctttgtcactggggaaatggatgcgctggagctcgtcaaagccactcgtgtatttttcacaggcagcctcgtcggaggcgtcggggcggttgggggtgtcgtcacactccaggaaactgtcgatgcagcagccattgctgcagcggaactgggtgggctgacaggtgccagagcacactggatggcgcctttccatggaggggccctgggggaaagtcgcctgagccccagagctgcctctcaaaggcccaccttgcacaccccgacaggctagaatgcactcttcttcccgaaggtagttgttcttgttgcccaagcagcctccataaacgaaactcttgcagatctgctccgtggggtcatagtaccagcgtgggaaagagccccggcagcgacccaccttgttggatgcgaggcagtagtcttctgtctgcttggtggacagcacagtgactgtgacgttggccgtgtcctctgggtggtctgagctagtcactgtcagctggaacaggtaggtgccttccttgagtccccacagttccacctggtttgggtctttcctctctaccctgacatccgtgtcaccccgcagtaggcgccaatctgtgttttccacatccttcagcaccaggggttcctggggttgtaccttcaagtctatgcctgcccaggccttggggatcccagaccctccaaagccctgggtccgcagctggcggtaggagcggtacacttccctcgtgaggtagttgatgaagccctccctgggcgcgaacttgcacacgaagttctgctcgtagaggcagttgatgaggaagcaggcggcgatggcgtcctccccgcggtcgggctgcagctccactagcgccaagttgcagttctgggtggtgcagcaggcgcgcacgcagtcccagccccggcgcacggtgggggactccaggaaggtagctccgttgctgaccgaggcgttggtgtccagcacgaagccaggcaccccggcggtaaagctgttcaggcagtcggctcccgcgggcagcccagggggcgcgggcggtggcccggcctgggtgccctggaggccgagcgtgcacagaagccacaaggcgacggcagggatgccggccggggcgaggcgggcgcgggccatcgtcctcgcaggggccatcgccttcctccccaggggggtcaccttcagagcgcgggcctctgggttccgagggtgctggatcccgggaattccggaccggtcca

SEQ ID NO: 120826 - DNA, 1347 bp, Homo Sapiens
  misc_feature (741)..(786): n is a, c, g, or t
  misc_feature (1268)..(1302): n is a, c, g, or t
tttatgtggaaattaagaggattttattgacttttctatgttctttgagaaaatcattcacatgtaaaagtttgacatttgatatgagatttattcacactttacacatacattcttgattgtggggcagacaattgttcatttcaacaggactttcacatggtaacagtcacaaaattggcatactatattaaaaaatgaaatcaaacagctagacaaaaagtatgcagctttatgccaatttaaatctcaacatgcaccacccctcacccatgatctcagaattatctgctgtgagcttattaaaatattagccagagagtgtctgaggtcacaaatgatcgtttacaaaataaaacctcttttcctagagctacttgttttgttatagaaaaataccacaaataaaaattagtgctattcaaggtgttcatttcaaaatcacatatgatacacaagtttcaagccattgtttttgtgtctcacattgaaacatcacaatacatgatgtgaaactgatttactgattaaatgtaccttgcccagcttggaaaacccattgtctactatgtggactgcttacaaatgagagtgagttaaaacattttcagttattgggtacacttgtaatttgttcctcctcagaaactactcagaaaaactgcttgagaaacatgacaaaatttgtatttcttcctgatacaagaaatttgtctaaaaatctgtgattataaaacagannnnnnnnnnnnnnnnnnnnnnnnnnnnnnnnnnnnnnnnnnnnnngtggttggaatcttattttcaagatgattcagaattcaacgtggaccccttctggagggtggggagaagtggctaagtgttataaggtatactggacaacacggggtgtttcaaagaggacgacaaggcactgtcacaatcagtccaactgtaattctttcctttcttgtgattatgtaaattttaaagaaaagaggtttctcacaagctatatacagcagcttaaaacctcagtgtttctttttcacttgatacacaattaaaattaatttacgacaaatacttgtcacagaaatgtatgtaggcacatagaaactctacagctttactggaggggcgaggtcttcagtgggatcatgattctggattccatttcctgtaataagtggaactgtgtaatataccaattcctcccagccatgtttgtgcccccggccgtaatggccgaattcccgggcatatgtccggtaccgttcgactgnnnnnnnnnnnnnnnnnnnnnnnnnnnnnnnnnnncggccgcttcctcgctcaaaactcgggcgctcgtcgtttcctggc

SEQ ID NO: 120827 - DNA, 1141 bp, Homo Sapiens
gggtttcaaaggacgaaaaggcactgtcccatcaagcccaccggtaatttgttcgttgctgggattaagtgagatgttaaggaaaagaggtttctcaacaagctaatacagcgcttaaaacctcagggtttcttgttgcaacgtggaacgaccgattaagaagttaaattacggacaaataactgtcacagaaatgtatgtaggcacatagaactctacagctttactggaggggcgaggtcttcaagtgggatcatgattctggattccatttcctgaataagtggaactgtgtaatataccaattcctcccagccatgtttgtgccatgctgcattccgtatgtcttccctggtctgaagatccctgtaagcccaaagatggtgcaccatgtacagctgcccaatctgagagaagaatcctccgacggcttcgttaccatcctgtctgaagcggattgcacgagcccagtaattgccccattcaatcatggttcctggtcggagttggtaagacctgagttcatatatattaggtccggatcttggcacaggctcattccagaaactgaactccaacaggagctgattcttcctggagagaagcatgtcacttcttgccttacgaaattccaaaaattccttattttctctgagtttattcatgacttctgtgagggctggatagcctccttcatacctccagaggtggacagcttggtcctgctcgccataccacgtgttccaagtccccaccaaagtacaagggtagtgtttatcttcgtgaatctttggcaacacctcttgacaaattttgttgtatgcttctaggcattccggtttaacattgtgaaactgtaatttgtatagattgcttgtttcctttttggctaggagattggagtgggcatcttttcttggatcaactttccggacaaataaggattttagccagctgtcttctcgagatctgttgctggaagatgtccatgtccggagcctgggcaggaggctgcagggggccgcccgctgcaggaggccgccggcccaggccgctccgcgggcgcgcagcactcgcgccgccatcttgctcggcgcctcgtgccgaattcaacacccagcctcgtacctagcactaagtt

SEQ ID NO: 120828 - DNA, 310 bp, Homo Sapiens
  misc_feature (38)..(38): n is a, c, g, or t
  misc_feature (41)..(53): n is a, c, g, or t
  misc_feature (225)..(226): n is a, c, g, or t
  misc_feature (241)..(241): n is a, c, g, or t
  misc_feature (249)..(249): n is a, c, g, or t
atttttcagggccttccatgcctgccactttgtccgtntcnnnnnnnnnnnnnaaagtaatattttttagaaatacatgtaaaataccaagaaataatgtctgcgcctctgccacctctctctcatctcttatttcataaagctggctctttatgttgctttacatgccttaatatatgttttatggagattatacatattatagatctatatatgtaatatatnngtttggatgtctgancttttccnacagttcctgcccaggcctgtttttctctcccttattttccacatcattcctagcatatca

SEQ ID NO: 120829 - DNA, 1191 bp, Homo Sapiens
  misc_feature (1146)..(1146): n is a, c, g, or t
attgaacagttttattctgttttagaataaaaactttgctttaatattgtaaggggtactgcaggtatgccatgctgccagttattgctggggcacaaaacgccccagtcagtgattcggagggctgggaaaacgcataaactcataatttcagagcaagtagaactagtatttacagttttctttcttgaaattggcccgggacatctccaacagtctacacatgtattgccatggtacttgctctgatgctctgaatgcctcggaactgtgttcaatatcatgatttgtgggtcctctaaaaggttttgttgttaacatgcaagcaaacagcactgaacaatattgtctaaactatggctgccaagtactggatcttcataatgaaaccaaattacaaaacactgccttgtagagctatacaaaagatataaaatgaaaataaaaaatgtcaaccagccttaaatattccaattctcctacagtgcagtttctatatctttatcactactgaatgttttaaggagaaagttaggagaccaatcaaaatattagataaaaatatttaaatctttggatccttttattccatggccttcataaaaacacaaaagtggccagatttttcccactagagcttaaaatatcaaaaagattcactagtaatttataattagcaatgaactctatactgagtcatctgtgggtcatcataggcccaaggaccagtgttgccgtgtgttacaggctaccaaaataatttctagcactctgaatcctcttgaaatatgatggaatgagtcaaggtatcatgactaaattccaggcataataggaaaaacaggttcattgatgcctagttttaaagtcctacaaaaggggggaagatcacttatttgaaaatacagctaagtacattctcatctgtgattatttacatttgtatactgaaaatatcgattatctggacagatcctgtgatatgccatttgctacaaaatgaagttcttacaatgagcatgaataattaatcctttttagataatgaaataatgtatcaaatcttcatttatgttccaaacattaaaaaacaaaatcaaaaatgttaagcctggaaaactaagaaaaaaagacccacccataagntgctgctcagcacatcaacttctgcaaggacacagtatgtttgct

SEQ ID NO: 120830 - DNA, 1230 bp, Homo Sapiens
  misc_feature (80)..(114): n is a, c, g, or t
aagagtgtaagatcactataggcgctactcttcacacgaacgacgagcgcagcgaagttattgagcgaggaagcggccgnnnnnnnnnnnnnnnnnnnnnnnnnnnnnnnnnnncagtcgacggtaccggacatatgcccgggaattcggccattacggccgggaggatcatactgttggtttggagttggaagggtactactctgtgattcaggtgtgttgtacccatatttataattaggctttattatcttcctaaatcaaggaaaggaaatcatccccagaccatttatgctgagctttggaatactattttaaactggattgtacttaaataatgaagctctgcatagaggaactagtcagaagtggggaaaacactgtctaatttttatcagtctggtataaagtattgatctaagagaactctccctgtgccccttggtctttattctcaattaagaaaaacagtcacatgtcacgacaaaccaatcaatctttatgagatattcctgtatccataccccagcttgtttgcaatttataaacctccccttcaaaactaaggagttgcagaaaaaaatggatttcacagagccttgtgtccctaaagttctgtcccagtcagcagtctttatagtccaaacagattataaaaaatgttttccatttgaactttacagtttgcaaaagtgcttttatacattttctaatttcagaaacaggataatataatttgttaagtgggtttcagtttgcataatagggattaaggtgtaaggtaatagaaattttcagcatctcttgaagaatcttgctacagccaaatggcatctcactttttaaagacgtttgcaattattagttgattcacagtacagaacaaggtataaaggaaaaaaccctgctaggtagtgttataattgctagattaaaaatagactagaacaggttcattttaagatttacttggaagagcaaagaaggaaaaattatatttttaaagaaagagaatattcaggctttatttctggtatgaagtttatattttttaaaaaaatcctatattatcacaccagagattttagattcttttctggttagaaacattgctggtagttggattatatttttattgtattcatttatcttagggggaacattgtaaagaaacaaaaaggtccagatgaatgtatgctagaaataaaagttgaaagattcttaaaaaaa

SEQ ID NO: 120831 - DNA, 590 bp, Homo Sapiens
  misc_feature (376)..(376): n is a, c, g, or t
aatctgtatatatattttttcttgccttgttgcactaattaggacatccagtaggatggtgaataagagtggcaaaaaaagaaccttgtcttgttcccaatatagaagaaaagcatatcatttctcaccataaaatagcgtgaagtcctattttttagatgttccagattaagttgaggatgttttttattcctagttttctaagactttttctcataaatagatgttggagatgttggagtttgtcaaatgctttctctgcatcaattgacagaatcataaaatagttctttagccagttaataaatgtcagatcagtctgggtatgcctaaaataaattgcacttactgtgatgtattactatttttatatatnttttggattcacttaggctaatattttattggaaaatttttccatctatattcataaaatatattgagctgtaggtttcatttcttgtagtgtatttccccggttttgatattaagataatgcctgcctccttgaatgagttacgaggtatacctcttacttctattttctaaaagtgattatagagaactgacattatttcttccttaaatgc

SEQ ID NO: 120832 - DNA, 1849 bp, Homo Sapiens
  misc_feature (244)..(246): n is a, c, g, or t
  misc_feature (250)..(250): n is a, c, g, or t
  misc_feature (252)..(252): n is a, c, g, or t
  misc_feature (254)..(255): n is a, c, g, or t
  misc_feature (257)..(260): n is a, c, g, or t
  misc_feature (262)..(262): n is a, c, g, or t
  misc_feature (264)..(264): n is a, c, g, or t
tgggtccccagttaaaggaccctccaggaacctccctttcgggatttgtttcaaaaacgcttcggtggcccgcccggggcgtttttttattgggggaggaattcccaggcccttagtcatgacccaggggtctccttgggaaaacaggctatggcccagtttccctttacctaatggggcccgccgcgccaaaaggaatggtttagaaaagctttttggaggggccgaggcggcccgacagggnnntttntntnngnnnntntntttttgtttgtgaaagagcacgctttattgggaagcagactgctgcacagtgaccaacaggccacccaatgggcacttacacatcgtactccaaaagacacaggatgttttgctaataaaaatcagtgggaacagggattcctctgggcaactcccccaacctcatccctttcagggattgagaaatctcccaaccattttcctgatgacagccatggttcattagagatacagcccctcaggggtgccttcctgtttcttataaagaacattttctttagattttttgaagtcttcatttgttactttcattctacgttctcttaaggccatcagaccagcttctgtacagattgccttgatgtcagcaccagagaggtcatctttagccatgatcaggtcgtccagggttacatcatcagccagcgtcatcctgcttgtgtgaatctgaaagatgcgcttcttcgtcttttcatcaggcagggggaactcaatcttcctgtcaatgcggcctggtctgataagtgctggatccaaagtttctattcggtttgtggccatgataactttcacatctcccctagaatcaaatccatccaactggttcagcagttccaacattgttcgctgaatttctctctcaccaccagaattggagtcatatctttttgtcccaatggcgtcaatttcatcaataaacacgatggacggtgcatgttcttcagcaactcggaacaattcccgtacgagtttgggcccatcacctaggtacttctgaataagttcagagccaaccactctcaagaaagtggctgaggtttggtttgctactgctttggctaacaaggttttacctgtgccaggtggaccatagagaatgacccccttaggaggctttatacccatctcttcataatattcaggatgggtgagaggaagctccacagattccttaatttcctgaatttggttgtccaaccccccaatatctgcataggtctcctggggggccttttctaccttcatcactgtgaccaggggatccgtgtcatccatcagcacccctatcacggcatgcaccttgtggttgagcaggaccgagcagccaggttccagcagatccttgtctacaaatgaaagaatgctgacgtagtgttctgagcccacagatgtagacacgatggcatgattgtcatcaatgatctcttccaaggttcctactgacatcggggtccccctcagatcatccacttttgatctttcctcctcttgcttttcttctaatggtttcatttgttcctgatttctaatgaattcttcctccatgagaagatagtctttaattctctctaacttcagtaattttaaccggcactgagtgtgaggtgtcaccagtggcagtttgctggcagcatctggtccctttgttttcttcttctttttccccactctagttggtacaggaggttcatatttctttttcttgtccttgtcatccttcttgccacctccaggaccatgaccaccactctgactttgcctcgtgccgaattcaccacccagcctcgtacctagccggattatt

SEQ ID NO: 120833 - DNA, 1144 bp, Homo Sapiens
  misc_feature (195)..(203): n is a, c, g, or t
  misc_feature (224)..(224): n is a, c, g, or t
catctgttatgtttcgtacacactttcacagtgttagtcctgatataccctccttgtaaaaacccttttttctacgcggtctcttttcataaccctctatatgcacccacatttctcctggccaccaatattctacccttccctacatcatccctccaggttcaaacgtcaaaccttttcgccgaaatctccgtnnnnnnnnnaactggatcaattctgttgcnccagccccattcccaaaacccgtgcggccaattttcacaatctggaccgattcccctacggatttggcccatcacttaagtacttctgcataagttcagagccaccccctctccagaaatgcttgagtttgttttgctactgctttggctaacaaggttttacctgtgcccaggtggaccatagagaatgacccccttaggaggctttatacccatctcttcataatattcaggatggttgagaggaagctccacagattccttaattttcctgaatttggttgtccaaccccccaatatctgcataggtctcctggggggccttttctaccttcatcactgtgaccaggggatccgtgtcatccatcagcacccctatcacggcatgcaccttgtggttgagcaggaccgagcagccaggttccagcagatccttgtctacaaatgaaagaatgctgacgtagtgttctgagcccacagatgtagacacgatggcatgattgtcatcaataatctcttccaaggttcctactgacatcggggtccccctcagatcatccacttttgatctttcctcctcttgcttttcttctaatggtttcatttgttcctgatttctaatgaattcttcctccatgagaagatagtctttaattctctctaacttcagtaattttaaccggcactgagtgtgaggtgtcaccagtggcagtttgctggcagcatctggtccctttgttttcttcttctttttccccactctagttggtacaggaggttcatatttctttttcttgtccttgtcatccttcttgccacctccaggaccatgaccaccactctgactttgacccatcttgccctcgtgccgaattcgccacccaggcctcgctaccttaggaccgttatagttactgccg

SEQ ID NO: 120834 - DNA, 1003 bp, Homo Sapiens
aggaaatttggggagttcaattttccttttttggttccccaaaggggcgtccaattttccatccaataaaaccacgatgggccggtgcaatgttcttcagcaactcgggaccaattcccgtacgagtttggcccatcacctaggtacttctgaataagttcagagccaaccactctcaagaaagtggctgaggtttggtttgctactgctttggctaacaaggttttacctgtgccaggtggaccatagagaatgacccccttaggaggctttatacccatctcttcataatattcaggatgggtgagaggaagctccacagattccttaatttcctgaatttggttgtccaaccccccaatatctgcataggtctcctggggggccttttctaccttcatcactgtgaccaggggatccgtgtcatccatcagcacccctatcacggcatgcaccttgtggttgagcaggaccgagcagccaggttccagcagatccttgtctacaaatgaaagaatgctgacgtagtgttctgagcccacagatgtagacacgatggcatgattgtcatcaataatctcttccaaggttcctactgacatcggggtccccctcagatcatccacttttgatctttcctcctcttgcttttcttctaatggtttcatttgttcctgatttctaatgaattcttcctccatgagaagatagtctttaattctctctaacttcagtaattttaaccggcactgagtgtgaggtgtcaccagtggcagtttgctggcagcatctggtccctttgttttcttcttctttttccccactctagttggtacaggaggttcatatttctttttcttgtccttgtcatccttcttgccacctccaggaccatgaccaccactctgactttgacccatcttgccttggccacttgagctgccgcctcgtgccgaattcgccacccaggcctcgctaccttataaccgtatagtactgccgt

SEQ ID NO: 120835 - DNA, 799 bp, Homo Sapiens
  misc_feature (37)..(37): n is a, c, g, or t
  misc_feature (183)..(184): n is a, c, g, or t
aaggtggctgaggttttggttttgctacttgcttttnggctaaacaaggtttttaccctgtgcccagggtggacccatagagaattgacccccttaggagggctttatacccatctctttcataatattcaggatgggtgagaggaagctccacagattccttaatttcctgatttgggtgtnnccacccccccaaatatctgcataggtctcctggggggccttttctaccttcatcactgtgaccaggggatccgtgtcatccatcagcacccctatcacggcatgcaccttgtggttgagcaggaccgagcagccaggttccagcagatccttgtctacaaatgaaagaatgctgacgtagtgttctgagcccacagatgtagacacgatggcatgattgtcatcaataatctcttccaaggttcctactgacatcggggtccccctcagatcatccacttttgatctttcctcctcttgcttttcttctaatggtttcatttgttcctgatttctaatgaattcttcctccatgagaagatagtctttaattctctctaacttcagtaattttaaccggcactgagtgtgaggtgtcaccagtggcagtttgctggcagcatctggtccctttgttttcttcttctttttccccactctagttggtacaggaggttcatatttctttttcttgtccttgtcatccttcttgccacctccaggaccatgaccaccactctgactttgacccatcttgccttggccacttgagctgccgctgccggaagttcctccc

SEQ ID NO: 120836 - DNA, 1023 bp, Homo Sapiens
ggagttgcgtgcgcatctcccgtcccaggcgaccgctggtcgcgtcactgtgtcgtgtttcccccccgaggggtaatcgtggccagggcgcattcgtcaaacagatggcgggcaatttcacaactcggacaatccgtacgtgtgggccatcactaggaacttctaatagttcccgaccaaccctctcaagaaagtgcctgagttttggtttgctaactgcctttggctaaacagggttttacctgtgcccaggtggaccatagaagaatgacccccttaggagcctttatacccatctccttcataatattcaggatgggtgagaggaagctccacagattccttcatttcctgaatttggttgtccaccccgctatatttgcataggtctcctggggggccttttctaccttcatcactgtgaccaggggatccgtgtcatccatcagcacccctatccacggcatgcaccttgtggttgagcaggaccgatcagccaggttccagcagatccttgtctacaaatgaaagaatgctgacgtagtgttctgagtccacagatgtagacacgatggcatgattgtcatcaatgatctcttccaaggttcctactgacatcggggtccccctcagatcatccacttttgatctttcctcctcttgcttttcttctaatggtttcatttgttcctgatttctaatgaattcttcctccatgagaagatagtctttaattctctctaacttcagtaattttaaccggcactgagtgtgaggtgtcaccagtggcagtttgctggcagcatctggtccctttgttttcttcttctttttccccactctagttggtacaggaggttcatatttctttttcttgtccttgtcatccttcttgccacctccaggaccagtgaccaccactctgactttgaccggacgcgtggttcgacgatatcccgggattccggacccgtaccagcctgcttttttgatacaactttttctatagtgtcacctatagcc

SEQ ID NO: 120837 - DNA, 543 bp, Homo Sapiens
tctttttcatccaaaataggtaaaaccttgttagccaaagcagtagcaaaccaaacctcagccactttcttgagagtggttggctctgaacttattcagaagtacctaggtgatgggcccaaactcgtacgggaattgttccgagttgctgaagaacatgcaccgtccatcgtgtttattgatgaaattgacgccattgggacaaaaaggtagactttctcatacttattttgccttgtttagtagggaacaccgcatagctcttctcttgagaatgggcaatctcagggggctctccctatggccacagttcttgctgtgcgtggccttccatgcatgctttaggctctgctctcccaggagccagctaacaactgcccagtaactgtgaacgtctggagagactggtcagttatgaataaccatgtcttgagcacccgccctgatccaggaccatctggactctagggacacagttgtgagcacaagtctctgccctggaggagctcacaggttgtagggatcagataccaaacatggaaa

SEQ ID NO: 120838 - DNA, 1741 bp, Homo Sapiens
  misc_feature (1625)..(1659): n is a, c, g, or t
caaaatcaaactgctttactatactttattgatataaatacagcaaatctcaataagcaccagctaccattttaccactacacaagagaaacaaagtcaaaagaattatatattaatgcaaagagtaaacacagaatgctttcacttccactatagtcctctataacaaaacatcctacatactttgtacaatttgcttataattggttaaatatttgatatgaagcaaggttgatttttaatcaaacttctatttctcagtggaaaatgctctcttcatcagaggtggttgagttttcccgacatcaaacatcatttccaaaggtgggttattgagagaacaccaatcaggtatacggcccgtctgattataatattcctttgaaacagaacggctcccaagtatatcttgtaatgctccaaaaatagcccctcccaaccaggccacacaattagcttttgcaggtggagtatgaattcgaaatgtcttagtgccaagtgcttttttatattttggtttttctaccaaataccttatttctgcaagcaatctgtggagaaatcctggcaacatagaagtgccacctatgactaccaaattctctgctagttgcttcctggtgtctatcggacactgtataagggaatccaatattaaagtggcaactgattgctcttcattatcttgttcaaaaagaatttccacaactgaatctctgattgatccaaggatatgtaaaatcttctctccatctaatggatagtcaacatttgggggtggggagggacgctcattattcccatcaatattaaattttgctgcttggatttttagtcctcgcttcagatcacttacaaagcaagtacgcgctttaatgtcctctaagacaccttccggaactgaacccatcactgagggaaggctctgttctttagcaacacttgtgtcaacagtacattgttccaatagttgagtttccaactctttgtgaagagcttttcctcctaggggtagtgctccccaacaatttagaactgggattccttcatatatgggtaacaccaggctttccctatatccacaatctaggaccatggcagaattaattccaagcgtcagaagagccattagatgacttggagcaagcaagacagatggaacctcaaaatatttgaaaagaacacgagtgagtgtctctctgaagtgagaaggacataataccgattcgataatcacaactcggcggtctctgggattcaccaatagatgcctgaaatatagtatgtggatgaattcctttaggtaggaatataattcttctgtattgatattatactgaacaactctgacaggcttaggcatcccagctctttttatcacactaggaattatacatcttggaccagtttctccagcaaatccacacttggtaaaggcctctcccaggtcgatcacgaccgccgtcttctccccgccgctccccaggccctcgtagagcggcatggtagtaaggcagactgagagaagagggtcgcagtctccgcggccaacaagtctcggcgctcgcggggcccccggccgtaatggccgaattcccgggcatatgtccggtaccgtcgactgnnnnnnnnnnnnnnnnnnnnnnnnnnnnnnnnnnncgccgcttcctcgctcactacttcgctgcgctcgtcgttcggctctaagacgctagcccctatagtgatctatcagttctgg

SEQ ID NO: 120839 - DNA, 734 bp, Homo Sapiens
gctgtgggacaacagtgaatgtgtttatgccagcgtgtgctgatgatactgaggggctttaggttggcaaatagcactgttttcttagctgcaagaattcattgcacaatgtttttcatcatttttgttaatgtcatctttttttggtccttgctacgaaaaggaatgcgattctgtggtcattcgcactgggttgcattgattccccctctgatggccaatgtggagtggacaaagtgtccggaactcacatcggtgatcgtcccctcgtcttaagacccagcccgctctgtgtgagcctctggggctccctcgctcagtgagcacagttccccgggggttcatgccagagctccggctgaagcaagaagtcctccagctgcgtcgtttgccgcctgtggacgagtgcgccccagtttctgccctggcagctcctggccacaccttctcagagctcacctgtgcacttctaaattgaattggcccacggtgtccaaccaagaaggagcatctgcactccgagaaagatgtgttctgtaactgccccagtgtgaccccgcagtggctctcggtgctagatatgcatgactaagattgatgctgggcaaaatgtagatgatctttcattatgttgtgggcagcgtctttctctgcctttgctatatgcagtcagcagtaagccttttgctaaaagagttttgtttgacttctgagacccaaggctgattgttgtt

SEQ ID NO: 120840 - DNA, 1318 bp, Homo Sapiens
ggtgctgaaagtaacaggaagaatataaatgttgtcgttgtgaatagactttcatggaataaggttaggttggggctttcggtggcctggcttcctggcatcactcgtgcatcagagttctggacttcaaggaggaattggccagccaaggttctccatggggtggtcaaccacgcgaaataggcgtgggatgaccaggctcttctggaagcccagggccttcaacctctctatagcttctttctcctgcggcgtcacctggatgtagttcatctgcggggcctcctctcctatggcgcccacctcgccctccacatctgagatgtccgccagctccccagggggctcgttcagcatctggatgaactgctcctggtgccgctgatttgctgtaaaagctgagggttctcctggcccagctgctggagcagggcgggcagcagcgcagggttctgctgaatcacctgccgcatgttctggaactggggctggtcccgcaggaactccagggggttctctcctgctgcttccgtggccggctgctccgatacctggctctcctggacagaaccgtgttccggctcggggctcccaggaattcccgtgagcagatactccacggctcggtgggggttgttgtagctggctctcagggcggccacgacccgctctcgctcatagcccatggacatgatctccgtcagcatcgtctcatactcagagcccgtcactagcgtggaggccgcgtcttcctctcgcccgctgctacctgaagagggaacagagcctgacacagactctggggacgtcgtgggggcggattcctctgatgggctcttgtcctctctggcggcaggtgggggatgggacatgcctgaggtgggggcaggcgggaaggatgtagaggactctggggcagctgtgggtgaggcctctgggggtgctgaggtaccctggccggctttggtcttggtcaccatgacgaccacaaagttcttctcatcgatgcgatagtccctgatagggacatcgtcactcaagatcttgccggcatagatgagtttctgtccagccacggggaaggcatcacgacccttctcagcttctatcttctcctttagcaccttcaccgtctcgtcaggctccatgcggatcttgaaggtctgctgctgcagcgttttgagcgtgatggtgacggccatggcggggcccgagcgacgcggcggccccgggatcctcacacaacatgcaactcacgccgccgccatcttcctcgtgccgaattcagccacccagcctcgtacctaccgtatagttt

SEQ ID NO: 120841 - DNA, 1828 bp, Homo Sapiens
  misc_feature (31)..(31): n is a, c, g, or t
  misc_feature (500)..(526): n is a, c, g, or t
gacaggattttttggttgggttggtggtggnatgtaggttttaaaactttattcacttcaaaacctttatcagagacacggttctgttctggggtgggggtggccttgacaatgagctgatgttagcccttctccaggctggaggccaaggccagactggggagggggccttgggcctttcaggacttgccctagatggaaagatttgggccactccaatggaggatcaaagttggggctccagcttcccctcatcctagaagaggatggggggcggtcctcaggggtttttcggaggatggagaggcaagcagccgcctttccgtctggctgcagagagctgggacagaggccaagaggggcccatctgtcgcctcccagtcctgccagcttctctgagcaggctgggctggggaggaggacggggggacagctgtctggcccgggagatgggaacaggggccactttaggaggacaggaagctggactgtttgcttgnnnnnnnnnnnnnnnnnnnnnnnnnnnccatttcttaaataaacatgaatatatatatattttttcttttataaaactttcatggaataagggtagggtgggggcttcggtggcctggcttcctggcatcactcgtcatcaaagttctgactcaggaggaagttggcagccaagttctcatttttttcacacgcgaaataggcctggatgaccaggctctctgggaagcccagggccttcaacctctctatagcttctttctcctgcggcgtcacctggatgtagttcatctgcggggcctcctctcctatggcgcccacctccccctccacatctgagatgtccgccagctccccagggggctcgttcagcatctggatgaactgctcctggtgccggctgatttgctgtaaaagctgagggttctcctggcccagctgctggagcagggcgggcagcagcgcagggttctgctgaatcacctgccgcatgttctggaactggggctggtcccgcaggaactccagggggttctctcctgcttccgtggccggctgctccgatacctggctctcctggacagaaccgtgttccggctcggggctcccaggaattcccgtgagcagatactccacggctcggtgggggttgttgtagctggctctcaaggcggccacgacccgctctcgctcatagcccatggacatgatctccgtcagcatcgtctcatactcagagcccgtcactagcgtggaggccgcgtcttcctctcgcccgctgctacctgaagagggaacagagcctgacacagactctggggacgtcgtgggggcggattcctctgatgggctcttgtcctctctggcggcaggtgggggatgggacatgcctgaggtgggggcaggcgggaaggatgtagaggactctggggcagctgtgggtgaggcctctgggggtgctgaggtaccctggccggctttggtcttggtcaccatgacgaccacaaagttcttctcatcgatgcgatagtccctgatagggacatcgtcactcaagatcttgccggcatagatgagtttctgtccagccacggggaaggcatcacgacccttctcagcttctatcttctcctttagcaccttcaccgtctcgtcaggctccatgcggatcttgaaggtctgctgctgcagcgttttgagcgtgatggtgacggccatggcggggcccgagcgacgcggcggccccgggatcctcacacaacatgcaactcaccctcgtgccgaattcgccacccaggcctcgctaccttaggaccgttatagttactgc

SEQ ID NO: 120842 - DNA, 517 bp, Homo Sapiens
tttaagggtttatggcaagtaaatatttattaaagaagatctaacattcataagaacagcaaaagtgagtcacatttgaaccaagaccactcctttcctcccccaactccaaactcagcgagatcaaaactccattcgacgggtacagccaagaatacagggctccctctctctggagctccaaggcagagggctgtcttctcaggaaggacaatctgtcaggaattctcatcttgcctccagtgtgcatatttagatgaatgatgttcaattgccagctccctcataaaggccatcctcagagtttctctcggtatggctgaagtcacaacttcccaagcaggcatgaagggctcctcccatgactccagctgggttatttcatgggtcttggaagacgcaagtcccagagaggccagaagtgtaaagttctccagcatcacattgcggtagaggagcctttgagcgtcatcaagcaatctccattcctcctgggagaagtagacagccacatcct

SEQ ID NO: 120843 - DNA, 1000 bp, Homo Sapiens
  misc_feature (45)..(45): n is a, c, g, or t
  misc_feature (78)..(78): n is a, c, g, or t
aggctctctccagtgtgactctctggtgtcaatgaggtgagcatnacggctaaagacttttccacagtaactacaccngtaaggcctttctccaagtgtgaactatttggtgtataaaaaggtgggacatatctctaatactttcccacattcactgcattcatacgtcttttgcgcagcatgtagtctctggtgctgaacgagtaaatatctctgaccaaaggctttcccacattcactgcatgtgtaatgcctttttccagcatgaaaggcctccctacttttggagctcctatgtgacttctctcctgtgtgagtcacctggtgcttgagaacacctgagctgatcaggagggccttcccaacctccctgctttgcaaggacttctctgataggtgaactttgcaactcctcaaaactgggaccctgccctgttgtctttttaagggtttctctccacagtgctgcttctggtgttgctgaatgtttgaactgagcagtcctacagaagcaatctgctcaggagcctcctcagcctcggctccatgccaacaacctctcggtatggctgaagtcacaacttcccaagcaggcatgaagggctcctcccatgactccagctgggttatttcatgggtcttggaagacgcaagtcccagagaggccagaagtgtaaagttctccagcatcacattgcggtagaggagcctctgagcgtcatcaagcaatctccattcctcctgggagaagtagacagccacatcctcaaaggtcacatagccctgctgagcggggtccctcagcgtggccgccgccatcggagcctgtggcggtgagacaacgaccgaggaaagggcccgggccaccctgggcgccgccaccgagcctcagacccgcctctgagctgcgagaacacagcgcgtccccaccgcgctttccggagctggtcgccgcagcgcctcgtgccgatgaagccacccatgcctcgctacctagcgc

SEQ ID NO: 120844 - DNA, 490 bp, Homo Sapiens
aaccaagaccactcctttcctcccccaactccaaactcagcgagatcaaaactccattcgacgggtacagccaagaatacagggctccctctctctggagctccaaggcagagggctgtcttctcaggaaggacaatctgtcaggaattctcatcttgcctccagtgtgcatatttagatgaatgatgttcaattgccagctccctcataaaggccatcctcagagtttctctcggtatggctgaagtcacaacttcccaagcaggcatgaagggctcctcccatgactccagctgggttatttcatgggtcttggaagacgcaagtcccagagaggccagaagtgtaaagttctccagcatcacattgcggtagaggagcctctgagcgtcatcaagcaatctccattcctcctgggagaagtagacagccacatcctcaaaggtcacatagccctgctgagcggggtccctcatgggcggccgcaagc

SEQ ID NO: 120845 - DNA, 464 bp, Homo Sapiens
gaagggaagcgtcatccatacaagatgaatttagcctctgaaccccaggaggtcctgcacataggaagcgcccacaaccgaagtgccatgccctttaccgcctcgcctgcctccagcactactgccagggtcatcacaaaccagtacaacaacccagctggcctctactcttctgaaaatatctccaacttcaacaatgccctggagtcaaagactgctgccagcggggtgggaggcgaacagcagacccttagaccatgcttcagcctccaagcagccttgtcatcgacaaagaatcttgaagtttacaaggtgtttcagggagaaacagggagtttgaattgagcccccgaaacagttccacgtcttttctttggttttttgcagggaattcctgggggtttttgaaggagaaagggggtttccccaacaaggccttcagggttttcaggagttttttaaag

SEQ ID NO: 120846 - DNA, 1479 bp, Homo Sapiens
ttttgctttgtagtctatacatttattgagtaaaaacaaaatcagtgtcagacacgttatatttgattgggttcaaatttggctgatgtccaaatgcagcagagaagaacggtggggcgaagggacacagtgttgctgacaaggtgacactgaacaaaacagttttcctttaattgtaaaagcgggcatcgcacagctggtgtgagtcaattaaccaaggcagggaggggactcaatgttttacaagcagagggaaaaccaaagtaagcagagaactttcaagagaggagagggccagaacactgagagaaaaagctgcagcagaggcctgctggagaacagtggtcagatctgctggctcacttggggaacacagtgaccacttcataaccctcaggtggtgtgactcgctcccgggcatgcttctcacagtagatttgatcctccacaaagaaatggcccttctgtttcaggttggtgccacagtcagtgcacacataacactcagggtggcggtgacggtcccgcagcttcacaaacacaccaacaatcccagtgccacatttgtcacacataggcaacttctgagcatttccaatcgacgcagccactttagtgacaggagctttaacacttctgaatcctgagggcttgttgggatcccctttttcttcagactccaggatttcctgcaaaaccaagaaagacgtggactgtttcgggggctcattcaactcctgtttctcctgaagcatcttgtaaacttcagattctttgtcgatgacaaggctgcttggaggctgagcatggtctaagggtctgctgttcgcctccaccccgctggcagcagtctttgactccagggcattgttgaagttggagatattttcagaagagtagaggccagctgggttgttgtactggtttgtgatgaccctggcagtagtgctggaggcaggcgaggcggtaaagggcatggcacttcggttgtgggcgcttcctatgtgcaggacctcctggggttcagaggctaaattcatcttgtatggatgacgcttcccttcctccgtcaccagaggagaccagactttatgttcagatctggctacagtgagagtcaagttgtctgtgcagcctttgattctgttctgagcttccaagtgtgtcatattgctagtattttccccatcaatggctgtgattacatctccaatacataaattagctagagccgccttgcttccaggagtgacccgggaaatggcgagaggctgctcgaagtccttgccgcccacgaggcggaagccccacggccccgggccctggaggtctatctgctgggtggtcatggcgcggctgtggcgggcgacgacccgcggggacagacgggcaggacgcgcggaacagcttgcagggcacccccggcggctgtcggagaaagagcggcgcggcgcgggcccggggagcctggggctgccc

SEQ ID NO: 120847 - DNA, 725 bp, Homo Sapiens
ccacctttgtaagtttattgtatatttattgtaaatgtgttgcatattgtattagtctgcccaggactgccataacaaaatacttcagattgggtggtttaaacaacagaaacttgtcttttcacagttctgttttctggaagtcccagatcaaggtgctggtccgtgtgatttctggggagggctctccttggcttgccgatggcctccttctctggtgcaggcacggggggagagcaggcgagccccttgcgtctcttctcagaaagacgaatcctgttggatgagggccccaccctcaggaccgatgtaaccttaatgacttctgtagaggccccatctccaaatacagacatgctgcagttaggtcttcagcatttgttctttaatagaattttcaatgccagcttgcaccattaagtcattgacattcttctgtaagtcctcaatgcgatttcccatttcttctgaggtttaatgttgccgtcagagcttgaaaatgttcctgaagttcctgaaatagattttctgccgcgtcccgcagcgcgcgcccgccgggggcttcagggccccgcacgtccatgtggaccgctggccgggggcgtcagtggggggtcccgtgggccgcgcggacccggcgcgaggtggcgacagctaagctccgcgcccacgcgtccgcggacgcgtgggtcgacgatatcccgggaattccggaccggtaccac

SEQ ID NO: 120848 - DNA, 762 bp, Homo Sapiens
aagtttattgtatatttattgtaaatgtgttgcatattgtattagtctgcccaggactgccataacaaaatacttcagattgggtggtttaaacaacagaaacttgtcttttcacagttctgttttctggaagtcccagatcaaggtgctggtccgtgtgatttctggggagggctctccttggcttgccgatggcctccttctctggtgcaggcacggggggagagcaggcgagccccttgcgtctcttctcagaaagacgaatcctgttggatgagggccccaccctcaggaccgatgtaaccttaatgacttctgtagaggccccatctccaaatacagacatgctgcagttaggtcttcagctatttagggagacataaacgttcaggccgtaactcctatcaggtgtattaagtatgttcacccctgattttaataacgttctcactggtgctttgtggctgcagtacagttgaaatcataatgatttggactctgtatttcaagtttatctcattatgtacctgctgtctaccttgccctgacttaagtgctttgcaagcaattttcttaaatccttacaactccttaccaggtagatattcggcagagaagaaaactaaagcttagatttccccaggttacagccagcaacagaggataagaatttgaaacctaggcctgcatggctgccaagccttgcctcgtctgtggcactgtggtgctttaatcaagttggatatactagtggctctctgg

SEQ ID NO: 120849 - DNA, 727 bp, Homo Sapiens
  misc_feature (67)..(180): n is a, c, g, or t
  misc_feature (231)..(339): n is a, c, g, or t
gggtggccatattggtataagtttgccccgggacttgccataaccaaaatacttccagatggggtgnnnnnnnnnnnnnnnnnnnnnnnnnnnnnnnnnnnnnnnnnnnnnnnnnnnnnnnnnnnnnnnnnnnnnnnnnnnnnnnnnnnnnnnnnnnnnnnnnnnnnnnnnnnnnnnnnnctccttctctggtgcaggcacggagggaagagcaggcgagccccttgcgtnnnnnnnnnnnnnnnnnnnnnnnnnnnnnnnnnnnnnnnnnnnnnnnnnnnnnnnnnnnnnnnnnnnnnnnnnnnnnnnnnnnnnnnnnnnnnnnnnnnnnnnnnnnnntaggtcttcagcatttgttctttaatagaattttcaatgccagcttgcaccattaagtccttgacattcttctgtaagtcctcaatgcgatttcccatttcttccattctgaggtttaatgttgccgtcagagcttgaaaatgttcctgaagttcctgaaatagattttctgccgcgtcccgcagcgcgcgcccgccgggggcttcagggccccgcacgtccatgtggaccgctggccgggggcgtcagtggggggtcccgtgggccgcgcggacccggcgcgaggtggcgacagctaagctccgccgacgcgtgggtcgacgatatcccgggaattccgaccgtaccagcctgcttttttaacaactggtttatagtcctaaggcct

SEQ ID NO: 120850 - DNA, 1042 bp, Homo Sapiens
  misc_feature (541)..(541): n is a, c, g, or t
  misc_feature (550)..(926): n is a, c, g, or t
aaggctaatttatttattacatggatcctgaccttgagttaagtattcagaacaaaaataaaatgtcccagcctggatagagtgacaatactttctctccatttctatctcaagctattaaagattacctgcggcagcattcttttgttggaacttggttaaatacatgttcattcctttcttaaagtccttatccccaatgtagtcatgcagcattcggatgacagatgcacctttgctatatgatatagcatcaaatatctcatcaacctcagatggatggcccacactgacttcaataggatggctgttatctaaggcgtcaagctcgtgggcacgggtgtaatcagcagaaacaaactgagtccaaatatcatactctgggaagcagtggtctacacacagatattcaatccaggatgcaaaaccttcatttaaccaaagatgagtccaccattccatagtaacaagatttccaaaccattgatgggcaagttcatgtcccacaaccagagcaacccactggcggcctcgtgccganatcttgggnnnnnnnnnnnnnnnnnnnnnnnnnnnnnnnnnnnnnnnnnnnnnnnnnnnnnnnnnnnnnnnnnnnnnnnnnnnnnnnnnnnnnnnnnnnnnnnnnnnnnnnnnnnnnnnnnnnnnnnnnnnnnnnnnnnnnnnnnnnnnnnnnnnnnnnnnnnnnnnnnnnnnnnnnnnnnnnnnnnnnnnnnnnnnnnnnnnnnnnnnnnnnnnnnnnnnnnnnnnnnnnnnnnnnnnnnnnnnnnnnnnnnnnnnnnnnnnnnnnnnnnnnnnnnnnnnnnnnnnnnnnnnnnnnnnnnnnnnnnnnnnnnnnnnnnnnnnnnnnnnnnnnnnnnnnnnnnnnnnnnnnnnnnnnnnnnnnnnnnnnnnnnnnnnnnnnnnnncgcagggaagacatgtgagcaaaaggcaacaaagggcaagaacgttaaaagcggggtgctgggtttttcataaggccggccccctgagaggacaaaaatcgagctaagcaaggggg

SEQ ID NO: 120851 - DNA, 511 bp, Homo Sapiens
ttcaaataaggctaatttatttattacatggatcctgaccttgagttaagtattcagaacaaaaataaaatgtcccagcctggatagagtgacaatactttctctccatttctatctcaagctattaaagattacctgcggcaggattcttttgttggagcttggttaaatacatgttcattcctttcttaaagtccttatcccccatgtagtcatgcagcattcggatgacagatgcacctttgctatatgatatagcatcaaatatctcatccacctcagatggatggcccaccctgacctggcagacaagtgtgattcagggttatgacaggagggaggtggcctgttatattcaataggatgggctgttatctaaaggcgtcaagctcctggcacgggggtgtaatcagcagaaacaaacctgagtccaaatatcatactctggggaagcccaggggtctacacaccagattttccaatcccggatgcaaaaaccttcatttaccca

SEQ ID NO: 120852 - DNA, 2694 bp, Homo Sapiens
  misc_feature (1543)..(1588): n is a, c, g, or t
  misc_feature (1851)..(1863): n is a, c, g, or t
  misc_feature (1974)..(2002): n is a, c, g, or t
  misc_feature (2517)..(2532): n is a, c, g, or t
ggcacgaggagaggatctctgggaaagtttagaaaatgctagtggtaaacctatagcagctgtgatgaatacctggaccaaacaaatgggatttcccctcatttatgtggaagctgaacaggtagaagatgacagattattgaggttgtcccaaaagaagttctgtgctggtgggtcatatgttggtgaagattgtccccagtggatggtccctatcacaatctctactagtgaagaccccaaccaggccaaactaaaaattctaatggacaagccagagatgaatgtggttttgaaaaatgtcaaaccagaccaatgggtgaagttaaacttaggaacagttgggttttatcggacccagtacagctctgccatgctggaaagtttattaccaggcattcgtgacctttctctgccccctgtggatcgacttggattacagaatgacctcttctccttggctcgagctggaatcattagcactgtagaggttctaaaagtcatggaggcttttgtgaatgagcccaattatactgtatggagcgacctgagctgtaacctggggattctctcaactctcttgtcccacacagacttctatgaggaaatccaggagtttgtgaaagatgtcttttcacctataggggagagactgggctgggaccccaaacctggagaaggtcatctcgatgcactcctgaggggcttggttctgggaaaactaggaaaagcaggacataaggcaacgttagaagaagcccgtcgtcggtttaaggaccacgtggaaggaaaacagattctctccgctgatctgaggagtcctgtctatctgactgttttgaagcatggtgatggcactactttagatattatgttaaaacttcataaacaagcagatatgcaagaagagaaaaaccgaatcgaaagagtccttggcgctactcttttgcctgacctgattcaaaaagtcctcacgtttgcactttcagaagaggtacgtccacaggacactgtatcggtaattggtggagtagctggaggcagcaagcatggtaggaaagctgcttggaaattcataaaggacaactgggaagaactttataaccgataccagggaggattcttaatatccagactaataaagctatcagttgagggatttgcagttgataaaatggctggagaggttaaggctttcttcgagagtcacccagctccttcagctgagcgtaccatccagcagtgttgtgaaaatattctgctgaatgctgcctggctaaagcgagatgctgagagcatccaccagtacctccttcagcggaaggcctcaccacccacagtgtgaatcctgaggtgccgccattggcggttctgctgcttcgctgcagggataaggtggagctaccgaacagctgattcatatgccaagaatttggagtcttctttcaaaccagtgggggttggacaatgaatgtagttaactggttcctgctcacactccagaattaaattctattgaaaaaggaaaatcagcaattcagcnnnnnnnnnnnnnnnnnnnnnnnnnnnnnnnnnnnnnnnnnnnnnnagagcataacgaaactgtgaaactttctgaagccttgtcagtggttaaaagtatttaacactctactgttaatgacagatgttctgtttttataacctaccaaaaggaaactagaggcttcttggtgaagagcatttttgtgaagtgggttctgcaaggagcctataaagccaagggtggtgtccatttctgggaatggttaaacacaaaaggctgatagctggtatcacatagttggagtcagtgcataattccaagtggcnnnnnnnnnnnnnggcacggggactgatcaggaagatatattcctgcataactcaatctgaaccaaggattgtagtttagttttcctccttgccttcccttctgtgtgaccgaccccttgcccnnnnnnnnnnnnnnnnnnnnnnnnnnnnncctaccctgttctgtttttttcctccctttagttccaccccccaacccccattccctggtgtccttcttagagatgaagaaataataaggaaacatctttcatagccacattaaataagagaaactgatatacattatttttttctttctaaagatgacttataagaaccctgaaatttatataggtgagacaatagaaataaaaagatcttcagccaggcctttctgaaggagttattctgctaaaaatggtcttagttgtctgaaaagccagctcttgaacctcttcacaacagtatcaacactggcttctcccggttcattttatgcgtgcgagaagtcagtggtaactgctgcagggcttaatacattagtggtaactggtttaaaaaacaaagactgtaagcctgtgtgtgccactgtttgcttcaacagtatatcctactaataagcctcacctatttaatccaatgagttttaaatctaaatctcattcccttcttctttccctaccnnnnnnnnnnnnnnnncttaaaaaaatattttgtgttattaacagaaattcatatttggtgtggcttaacggtatttcagaaggtcatcagattgtgagactgcttccttgaaacatttttgtgctattgttttaaacacacaattaaaaaacagttggcgttaataaaaatgtcaat

SEQ ID NO: 120853 - DNA, 1420 bp, Homo Sapiens
  misc_feature (1301)..(1301): n is a, c, g, or t
tgctgggtctctcccccgcccccatgctccccggtcgctctcctccggcggtcggcgcggctcggttggatagtggttgggagctgcagccgctccctcgtcgcctgtctgctcttcctcggcctcctgctcctcccctcctccttctcgtcttcaggccgctcctctctcgcgcgctccacagcctgggcctcgccgcgatgcctgggaaagaggcccttcgagcttggtgcctgccgatgtctcccccatcaactgcagcctttgcctcaagcccgacttgcttggacttcaccttcgaggtgcaagctggaggccgccgccgaggtgaggcaggcgactaatcagattgtgatgaattgtgctgatatatgatattattacagcttcatatgcaccagaaggcagatgaagcaaatacatgctacaggatttaactatcagaatgaagattgaaaaagtcaccttgtctttccctagtactctgcaaacaggtacgggaaccttaaagatagattttgttggacgagctgaatgacaacaatgaacaggtttctatagaagtaagtatactaaccccttctggagaggtgcgctatggctgctgtaacacagtttgaggctactgatgcccgaagggcttttccttgctgggatgagcctgctatcaaagcaacttttgatatctcattggttgttcctaaagacagagtagctttatcaaacatgaatgtaattgaccggaaaccataccctgatgatgaaaatttagtggaagtgaagtttgcccgcacacctgttatgtctacatatctggtggcatttgttgtgggtgaatatgactttgtagaaacaaggtcaaaagatggtgtgtgtgtccgtgtttacactcctgttggcaaagcagagcaaggaaaatttgcgttagaggttgctgctaaaaccttgcctttttataaggactacttcaatgttccttatcctctacctaaaattgatctcattgctattgcagactttgcagctggtgccatggagaactggggccttgttacttatagggagactgcattgcttattgatccaaaaaattcctgttcttcatcccgccagtgggttgctctggttgtgggacatgaactcgcccatcaatggtttggaaatcttgttactatggaatggtggactcatctttggttaaatgaaggttttgcatcctggattgaatatctgtgtgtagaccactgcttcccagagtatgatatttggactcagtttgtttctgctgaatacacccgggncccaggagcttgacgccctagaataacagccatcctaattggaagtcaggtgtggggccactcccttcctgaggttgaatgaagatattttggaatgcctaatatcccttaataagccc

SEQ ID NO: 120854 - DNA, 1794 bp, Homo Sapiens
  misc_feature (1717)..(1751): n is a, c, g, or t
gaaataattgaagaattcagttaaatatttattgaacaaatgcagagtaaatgaactaagggctgttataaccttaagttacaacaaacaacttcaaatattcagagggctgtcacacagagaatgaaagacttgctcagtatttctccaaagggcagaacttgagccaagcgataaatataagcaaccaatgggctgcaggatagttgtacaaagtgtatcatgtatcttcatagcttctttgcccatataatgcattccacacttaagtttctccttctaaaaggcgacagcacaagttaatatgtctcataaatgtcttaaataagttgcattttcatggcaagccctccactgccagcaatggatatactcacactattggaaaaaatctaaagttaacaaactggtttagtatggaaatggtctatttgttcctcagctatgtttctgtatcttacattagtggctctcaggaggtggggggtgaaaagagagcatgttctccaaagagggtgaatcataatccccagtgattcagatactgtgcctggggacaatctttcttcaagtccaaatgaatcattataattatcaaccaatggtacatataagagtacggcatgtgctgggacagagaaaagacagttgacaaacactattctacatgaaacaggaaatcttattttatgagtcactagaaaactaactgtaatactgacaggctccatccagattattaaaatcctacaaaatgagacctgtttcaacaactattcagcataacgtttatggacaaaatgtatatagtatatcttatattctatatgtattttatcacatagtaaggaatgctgaggtgcttaagccatccaataaattgaaaatacaaactttacatttctacgtttgtcagtatacaggattctgaagatgaatcttgaactcagagtgataaatcagttttcaaggaaagccacataatccgtcagtctggctaactgctgttcattgggtattgggggaactggagcaggctctgataagggaataaacttgttaaaggaaacatccagggcccctgcaactggctttctgggcagaaccattcttgtggtggaatcagcttgccatccttgttctaatatgcctttcacagcctcttctacaggaagtccaacaaaggctgcaaaatcatcggcgatgattgaagtatacgcttgagagaccagggcaaaggcgcgtctccttgttgcatctctaagtgcttccataattggctggaccgtctcagaccactggtgagcgttgatggttgtatagatcccagggaaatctctctgccagattctttgtcctactgaccaaattcccccaagttcagaatttgcagattttatagcaggtggtattcttttccaaagatatcttgcattattcatgtcattatggagcaaatataaagctagaagctgaccatacactgggggtgtagcaattcctccaggggcctcgagctcctggttctcgcactgatccagcaactttttgaaactaaaggcgctttccgccatcaccgccactggcatcttcgcggccggcctcgccgctgcaccgtccggacagccaaaccccagactgtccctcaggcgtcgcgcccgcgatccccggccgtaatggccgaattcccgggcatatgtccggtaccgtcgactgnnnnnnnnnnnnnnnnnnnnnnnnnnnnnnnnnnncgccgcttcctcgctcaatgagctcgctgcgctcgtccagcta

SEQ ID NO: 120855 - DNA, 1343 bp, Homo Sapiens
  misc_feature (53)..(63): n is a, c, g, or t
  misc_feature (845)..(861): n is a, c, g, or t
  misc_feature (903)..(1292): n is a, c, g, or t
gttttctttcgtgttttatttatatatttttggcagcaaaattgtgtttattnnnnnnnnnnncctggactatgaacacacttcaatgctttgaagaactccaagccaaataaaaagaccaatcaatattaaaagcagtataactggttactttcttaaaaatacataaaaagaatcaaatgcaacagtgtaggaagacaatcacacccatgtcagaagtcacaacttcttccaaataaagaatatgacccatctgccatattgaatcaatatttatttcaggacatgccatgtcaaaataaaacaaagagtcaacccttgcctttaacaattatattgtattataaaagcactttacaactccatcccatctttaagtataagttactggtatgtgggctaatgattatctgtaagcatttctctattcagatccataatccaagtgctctctgaatattacaaggtgacaataagtgggaagtggaggaggaagaggaaagagaggggactaaggttctcccagtttaaggttttgttccaatgaggggatgaggaagtatgaagatatttttgttgtcttttcatctttatactgtgttaagtaatgcttacaacataaattcagcaggcttttcctgagctgtaactcagaagttttcgtcctgcaaacaatgtatttacaaatgtgtttattagcttacacagcaatctcacaataactagtaaagattaaaagggcacactcctagtatatttgtttgcagtgttttaagggaaatacatattgccatggtgaagctctaaatagattcaacgaaacatctgaagattgaaagttgttnnnnnnnnnnnnnnnnngcctacagccgcggccgctccaaccctcgtgccgaattcttnnnnnnnnnnnnnnnnnnnnnnnnnnnnnnnnnnnnnnnnnnnnnnnnnnnnnnnnnnnnnnnnnnnnnnnnnnnnnnnnnnnnnnnnnnnnnnnnnnnnnnnnnnnnnnnnnnnnnnnnnnnnnnnnnnnnnnnnnnnnnnnnnnnnnnnnnnnnnnnnnnnnnnnnnnnnnnnnnnnnnnnnnnnnnnnnnnnnnnnnnnnnnnnnnnnnnnnnnnnnnnnnnnnnnnnnnnnnnnnnnnnnnnnnnnnnnnnnnnnnnnnnnnnnnnnnnnnnnnnnnnnnnnnnnnnnnnnnnnnnnnnnnnnnnnnnnnnnnnnnnnnnnnnnnnnnnnnnnnnnnnnnnnnnnnnnnnnnnnnnnnnnnnnnnnnnnnnnnnnnnnnnnnnnnncagtgagcaaaaggcagcaaaagccagaacgttaaatgctgcgtgctgggt

SEQ ID NO: 120856 - DNA, 260 bp, Homo Sapiens
gatatttttgttgtcttttcatctttatactgtgttaagtaatgcttacaacataaattcagcaggcttttcctgagctgtaactcagaagttttcgtcctgcaaacaatgtatttaccaatgtgtttattagcttacacagcatctcacataactagtaaagattaaaagggcacactcctagtatatttgtttgcagtgttttaagggaaatacatagtgccatgtgaagctctaatagttcacgacctctgtcccct

SEQ ID NO: 120857 - DNA, 542 bp, Homo Sapiens
atagcaccacagctcttagaattctgtaagtagcttgaggcctcctcctctactgtacatgttctggctttcccaaaattgtaagtttggtttttcctatgaacaagactgtaattgatttttctctccctgaggaaaaaagttcggaataaatgagacatggatatgaaactacttagcacaatgcctggtacatattaggccctccagccaaatgtggctaccgtgtcattatttcatggtgagactcaaggcaaaacaagattcttaatttatgctccgtaaatgcttagaggcttgggcaatacggtctgtcctgaaaaacaggactctgtgtctcattgcctctagaatccttaggtagcagtttctgttcactgtcttttcttttttaaaaatatctgctggacacaattacggccattacatgatgcaggtgattctacctattttttaaaaagaacaaaatttcttttatattgtgacagtacattttaataaaggaaaattattttcttccccctactccccctccttttttt

SEQ ID NO: 120858 - DNA, 852 bp, Homo Sapiens
tttcaagtttaatttttaatttattagaacccagtaaatgatgattttaaaagcagagtttccatcaaattaacacttaattcagggcaaaaatacatttaaaaaacctaaatcttaaggcagaagtaaaacattataaaaacagtatgtctaatacagactgtaaaatgtcagatttttaagagattcacatagtattttatagcactaaaatattaatacagtcagaaatattatcaattggtccaagatttctgtttataaaatgtctagactgctaattgaagaaatgttgctgtataagtaatagctacaatacaaccaaccaagtgattgtttttatgacaaaagaactaaggcaggtaattgcatggtttccatttgtaaagcttttgcagtattaaaatataaagcattactaggggtattttttgattcatctccctaccctaatgcccccgaaatgtacatcacttccctttaactctattttaaaattctgtgaaaccaccatacctattcattgtaggcctgaccctataaaggcatgaattgtttaatttgatatggtagaaaaacaattttagtaaactactacatcttttcctagtcattgagcaatttcaaacagaagtcttaagaatttttgcacctcagcaagtgaacaacctgtttctttaccactataagtttgaattttgcctagaatgtgttagtacacaggggaaaacacatttcatgtttatgtgcaattaacagtagcccttctgaaaaacagggttaacaatcttaaatttccccttgtgatcaaaaccttttgtttttagggggcaggataagatttaaaagtgc

SEQ ID NO: 120859 - DNA, 895 bp, Homo Sapiens
  misc_feature (464)..(473): n is a, c, g, or t
  misc_feature (764)..(798): n is a, c, g, or t
  misc_feature (802)..(840): n is a, c, g, or t
gatttgagtattttatttataaatgtacatttactataaaagctgttgcattttagacaacttgttgtttttattttttactgtttctcagaggcattttagaataaatactttaaatgaaagttagtataaccgatatagaacactggcccacccagagcagtaacatcttttggacggactcacatatgaggtggatcatttcagtttgttaaatcttacactgtgtatagataactataatatgtattgcattaatcacactacatagaaaggaaatgtcatggaagttcgctagtgaaaaacaaaaagttacccattatttttattaaagagtagggactagcttttggagtatgagaaaaaaaatcagatatacttcctcaggaacaataaatcactcacttgcctcacctgttttttaaacaaacacatttacattatagctcaatggagcagagcannnnnnnnnncctgggatctcaaagattatttgaaaagaaatagatcatactcattatgctgcattggaaaacacaagatctagtctgcctaagctgccatgtaacagactccaaatgaaatataaatcaaatataaatagaaacagttggcaattagaatttagaaaatgttggagattattctgtgctggtgactagtgttcattatgggaaagcacattttgcagttggagaatggggctttattttcccggccgtaatggccgaattcccgggcatatgtccggtaccgtcgactgnnnnnnnnnnnnnnnnnnnnnnnnnnnnnnnnnnncggnnnnnnnnnnnnnnnnnnnnnnnnnnnnnnnnnnnnnnnacttaggcgagctaatggccggcctcccccatttgttatgttaggggttcgtgaa

SEQ ID NO: 120860 - DNA, 966 bp, Homo Sapiens
tttggggccggattttttcctgtaaaacagcaaacacctccatgagaagtcttggaaacttggaagtgacttcatctctcttcaatgtactgcatccataatttatcgccatgtgcaacagctttgcgttttctaaggcacaatttttaatgaaatgatgtgtagatttcaatctaataacagctcatccaaatgacaaatatggtcgaaatccctccagtggctgaggaaatttctgcacctatatggaacccacatgcaaagaacccatctagcatgtaataaataatcgctagccatactcaataagacacggaaaaattattgcttacataacagaaaaacatctacttgacccccttttatgactacatcaatctattaggagtgtatccatagtctacattcacaaaatgtcatcttgacttatttgccattgatttaaggcagaataaatagtccccctttccccagtcttaacaacaaaaaacctaaaaccagcctggagatctacattgtgatgctttttaataacttgactcctttcttggccagctgaaactcgtcgcacagggcagaaaataaaccagctctccacaagagttcctctctaaacttctccatgggcaaggtccggagttcttgatagcaaaaaaagtgatggagaatggaggagagtaggtattcattgaagtgggcagggcataatctgtgctgtaggttcttgctgatcacagaccaggggctgaccacatcatataccacatagattctattaagatggacttaacgcttttctttggacacctgtgcttcaggcccttaaggagaacttgccagcaagggtgagcagtgctcacacctaatgatgaacttatctcggtgcctcatcttccatatacctcatgttaagtctcttattgaagactcctaatctagtgcctcgagggttctcatgcatcagct

SEQ ID NO: 120861 - DNA, 1459 bp, Homo Sapiens
  misc_feature (986)..(1041): n is a, c, g, or t
cttctataaaccttccttaaacaactgttttatattttaatttttcaaagcctttaaataaatccttgaatgaatcttatatatcccatttagaccctggccccccccagtccattacaatctttttggacgcactcaacatatgaggttggatcatttccactttgtagaatctaaccacctgtgtattgaataactataatatggtattgcattgaatcacactacatagaaaggaaatgttcatggaagttcgctagtgaaaaacctaaagttacccattatttttattaaagagtaggactagcttttggagtatgagaaaaaaatcagatatacttcctcaggaacacataaatcactcacttgcctcacctgtttttttaaacaaaacacatttacaattatagctcaatggaacagagcatttttttcctgggatctcaaagattatttgaaaagaaatagatcatactcattatgctgcattggaaaaaacacagatctagtctgcctaagctgccatgtaacagactccaaatgaaatataaatcaaatataaatagaaacagttggcaattagaatttagaaaatgttggagattattctgtgctggtgactagtgttcattatgggaaagcacattttgcagttggagaatggggctttatttttcttgactcgattctagcttcaatacatgtacaatgagcctcactaagaaatatgtataaatgggtttgtgaaaccagaagggaatgtgcaatattcatgtaatccttacataacggatggagttgcacatgtaaaaagtattctataaaaatcggttatgaatgaccatattgtacatgtttgtgcattactagtggtactctgctaatatcatgcaaagtgtaaacatccacattatccaaatatttaataaaacatgcaggtggataatccaaatattggacttgatctgtacatgtttcagaaccannnnnnnnnnnnnnnnnnnnnnnnnnnnnnnnnnnnnnnnnnnnnnnnnnnnnnnntgtaaaacagcaaacacctccatgagaagtcttggaaacttggaagtgacttcatctctcttcaatgtactgcatccataatttatcgccatgtgcaacagctttgcgttttctaaggcacaatttttaatgaaatgatgtgtagatttcaatctaataacagctcatccaaatgacaaatatggtcgaaatccctccagtggctgaggaaatttctgcacctatatggaacccacatgcaaagaacccatctagcatgtaataaataatcgctagccatactcaataagacacggaaaaattattgcttacataacagaaaaacatctacttgacccccttttatgactacatcaatctattaggagcccggccgtaatggccgaattcccgggcatatgtccggtaccgtcgactg

SEQ ID NO: 120862 - DNA, 1861 bp, Homo Sapiens
  misc_feature (68)..(68): n is a, c, g, or t
  misc_feature (88)..(88): n is a, c, g, or t
  misc_feature (94)..(98): n is a, c, g, or t
ccccccccgcccaaaagaaaaggtttaggaaaggctttttcgaggggcccgaggcgccccaccagggntttgtgtattaggggttttnttgggnnnnnggaagagcctttttagtagctaaatatggcaccatgtgttccaagggcaatataaattacagtatgcaaaacatactgactggctgaggtaaaacgcactgctcctgcctcacgtcaccatgaggggaaacacacatatgcttttaaaaacatctggcttataaaaaaacatcccctagaaaggcctccagagaggggctgtgaggctcaccctctgccgcgctcaggaggacccgccggctcagccctggcccctccactgcagccatgggtggcgcctccccctactgcctgcccagggctctgtccaggttgctcttgatggtgtcgaggaagtccgtggtgttcaggaagtgctcgttcagcttcacattgctgaggccgtgaatgcagcccgccaggtccttggtcatggctccactctccaccgtctccacgcacaccttctccagcatctgggcaaacctgatgaggtcttggttcccatccagcttcccccggtgctccaggccacgtgtccaggcaaagatgctggcgatggggttggtgctggtgggccggcccttctggtgctcccgatagtggcgggtgacggtcccatgagcggcctcagcctcaatcgtcttcccatcagggcagaccaggacggacgtcatcaggccaagggagccaaagccctgggccaggatgtctgactgcacatctccgtcatagttcttgcaggcccacacaaagccacccgaagacttgaggacctgagccaccatgtcatcaatgagccggtgctcataccagatcttattcttgtcgaagtcggtcttatagtgcttgtcaaagatctcctggaagatgtccttgaaacgcccatcgtaggctttcagtatggtgttcttggtgctcatgtacagcggccatttcttctggatggcatactggaagcagctgtgcgcaaaacctgagatggactcgtcggtgttgtacatgcccatgcccacgccgcctgcggggaagttgtacacttcccactccttgacaccactgccatcttttggggtgaagaccattttgaaagtgccggcccggtctgccacaaagtctgtggccttgtactggtcgccatgggcgtgcctgccaatggtgatgggcttggtccagccagggactaggcgtgggatgtttttgcagatgatgggctcccggaagacagtcccccccaggatgttccggatagttccattgggacttttccacatcttcttcagcttgaactcttccacacgggcctcatcaggggtgatggtggcacacttgacagccacactgtacttctgggtggccagtgcagagtcaatggtgacctggtcatcagtctggtcacggtttgggagcccgaggtcaaaatactttagctggatgtccacgtggggcaggatgagcttctccttgatgaactgccagataatacgggtcatctcatcaccatccatctccaccacgggcttcgccaccttgatccttttgtcggcatagtggcgccgcggctgctcttgcgaggtgggggctgtcagggccgccggcgcccaggccggccgcgagcctgaggctctgcagagcgagcgcacgacccgcaggtagccggccatcccaagctggagagcgaacgagcagggcgggagaggtccgagcgcgcgccgctcctcccggctgcctggccgccctcgtgccgaattcaccacccggcctcgtacctgctctatggtgta

SEQ ID NO: 120863 - DNA, 1312 bp, Homo Sapiens
  misc_feature (68)..(100): n is a, c, g, or t
  misc_feature (109)..(363): n is a, c, g, or t
atatgtagctttagagcaccttttatttttcctttttacatggggctaaaaaacttgcatagagcaannnnnnnnnnnnnnnnnnnnnnnnnnnnnnnnngagacagannnnnnnnnnnnnnnnnnnnnnnnnnnnnnnnnnnnnnnnnnnnnnnnnnnnnnnnnnnnnnnnnnnnnnnnnnnnnnnnnnnnnnnnnnnnnnnnnnnnnnnnnnnnnnnnnnnnnnnnnnnnnnnnnnnnnnnnnnnnnnnnnnnnnnnnnnnnnnnnnnnnnnnnnnnnnnnnnnnnnnnnnnnnnnnnnnnnnnnnnnnnnnnnnnnnnnnnnnnnnnnnnnnnnnnnnnnnnnnnnnnnnnnnnnnnnnntgcgccactgtgcccggccgagaacaatttgtcacaagcttacttttctagttttgccaatgcatggtgaaagtgaacccaagcctgggaactgcaggcctagacaatgcagggcccttgttcacacacacccaagcccctccaaactcaggcagccttggaaaggagaagtgtgaggcaggtgtgggtaggacctctttttagtacctagaaaaaggctaagaaagtggcctggagatgtttagaaggttaaaaccaacgaagaaaaaaatcaatgacaacctatcaggaactgattgactctcagaatggagaactggacacagaaactggatcatgctagaaaattccagggaacccacaggcctgtgccctgagtgtccgagaactccgcagtgggcccctgtggaatgcgggctcccagggctgcctggtcccttccctgccgtggcagccccttcctgaggtgctctggtctgccccaggggaacctgccagctctagcagggcctctgcctcagggtcccactacctcctcccctcagggacaaacacagcagacaattttgtgaagagctttttagtagctaaatatggcaccatgtgttccaagggcaatataaattacagtatgcaaaacatactgactggctgaggtaaaacgcactgctcctgcctcacgtcaccatgaggggaaacacacatatgcttttaaaaacatctggcttataaaaaaacatcccctagaaaggcctccagagaggggctgtgaggctcaccctctgccgcgctcaggaggacccgccggctcagcctggcccctccactgcagccatgggtggcgcctccccctactgcctgcccatggtgatgggcttggtccagccagggactaggcgtggatgttttgcctcgtgccgattcaacacccagcctcgctaccttagcc

SEQ ID NO: 120864 - DNA, 1176 bp, Homo Sapiens
  misc_feature (419)..(477): n is a, c, g, or t
ggccatagggaacattttggttatttaaattgttcataatgtcccatatttcacctgttcagtgtatactgtactttgcaatcatctttccttttttcacattggtaaaaataagtggcatccataggatcatgatttttaatttgttgcctctgaagatttcactccatcaagatctgccaatcttcaatattctggctaaatcttggtatgtggtttttaaacagtcactccgtttcaaagtctgtctttccttatagaatgtggaaattatttctccataccttgtgattttgacctgagtgctaagagaatcactctccttacctagttatctacaaatgttcattccagaaatgtttagttactgaattgaatgaagacatctcagtacactcttttaggtcatagtagttgcnnnnnnnnnnnnnnnnnnnnnnnnnnnnnnnnnnnnnnnnnnnnnnnnnnnnnnnnnnnctaatgttaggagatatagtcctagatatttccatgggccagtgtgatgacttttttttaaatgaggttcagtaccataatgtttatttactggaagataatgcatttataagcattttaaaattctgtaaagtgggttagaaatatttataattttacaggcaggacagcatttgacttttatttaaaaggcggcactacttatgtaaatctgagctgtgggatatttcttgctttaagagagagacagaatctctcactgaaactcatggtcatgattttgtataatatagttcatactgtgtctgtgagtttcttcaattacaaatgggcatttagtatagttatattgactataacatgtaagtaaatagctttctactgaccctaagttatcaaggtggaaaaaaaacatgcaattcagtaattgaaaatgtggtgaaaagctgcagctgtcatcatcaaaacaactcataacatactttaaaatgttcaggtagcagtgagcattgttcatatgagaatggcggctgggtgatctctttgctgaattaatgagttcttaacatgtggacccaactgcctgtgtgagatctgtgtcttaaaacttactggaatggaaatctatgaattattgcaaattgtaatgctggaaacaaaaaataaatccttggttaaagggtttgtaatgatgaaaaa

SEQ ID NO: 120865 - DNA, 685 bp, Homo Sapiens
  misc_feature (615)..(615): n is a, c, g, or t
  misc_feature (668)..(668): n is a, c, g, or t
actttgtctaatatccttttatttctctgcacccctctacaactcctcccccaaaagccccaaatcagactatgttaatttaactgattactgtaaagccacagctagatcccaaatctgacaaatattccaattcatgagacacctatagcatgttatctatatttgtacactttatttaaaaacaaataatacacttagagccaccaacgatggatatcttaattagcttatccataccctgaatttacataagaaacttcttgcaccacaaaaattagcatttggattaatttacattaattgatgtacctaaaatttaaaatacctgaagatcaaacaatctggcccagggctcaccagctggaggactgggtgtggagagaaagggttatttaggaatctgaattgatgacaccctgtggtcagctctagtcaactgaacttgagaaaacataaagtaaccagcagatttcaatattaaaaagaagtggttcctcctaaaaaaggtattagatcatagagttgggattagggtaggggatacctattaatctgggctggaaaaaaagtgtgtggagaaggggagttgtattgttttctcacaagaggcanacttcagccaaacaatgaagagatagtagggagggagatgtgtggtagaccanagactttctgattgctg

SEQ ID NO: 120866 - DNA, 788 bp, Homo Sapiens
  misc_feature (187)..(206): n is a, c, g, or t
attttttttaagtgtttatgttatattatctacaaagtaaaagtttttcccttaacttaaaagttgaaccactgtagacagtgatcacctcatcaaacttgatttataaataataatccgtcagtttgacggtaagaatttactgaaactttgtcaagtttagtaaaagggcgttccaagtcttgannnnnnnnnnnnnnnnnnnnagcagtaatagcagcaagaatcactcttgttacttcttttgctagctgatgtgttcatgactttcaagggttattaaaaaataaataacttccagtttcggcaagcagagctggggtacctgcgggactctgaaacagcatatggaattatggaatagcccccaagttcctaaatgcctctactcggtccaagtatcttccactgcaagtgaactgttagcattcctattggatgttacaagaaatcaacatatatattttaaaaacaaaataaatgaaattctagttttctgtgcttccagttggtagaagcagtagaagggaggagggaatttggcctttcggttcctccagggcagccttacaactgctgttggtggtgggcttgtactgaggtacgtgggccatgtggggtgggttggtatacgccggctgaacgtgagaaggatggatcgtaaagacagtctgttgtgctgcttggaaaactattctgtggcgactgcgtgttggaggcaggtgtcatggagggtggagttggcgcaagccccgcgtggtaaatggctgactgctgctgtggactgg

SEQ ID NO: 120867 - DNA, 1375 bp, Homo Sapiens
agctgttaccccttctagtgaggctaaagattccaggcttcaagatcagaggcagaactctcctgcagggaataaagaaaatattaaacccaatgaaacatcacctagcttctcaaaagctgaaaacaaaggtatatcaccagttgtttctgaacatagaaaacagattgatgatttaaagaaatttaagaatgattttaggttacagccaagttctacttctgaatctatggatcaactactaaacaaaaatagagagggagaaaaatcaagagatttgatcaaagacaaaattgaaccaagtgctaaggattctttcattgaaaatagcagcagcaactgtaccagtggcagcagcaagccgaatagccccagcatttccccttcaatacttagtaacacggagcacaagaggggacctgaggtcacttcccaaggggttcagacttccagcccagcatgtaaacaagagaaagacgataaggaagagaagaaagacgcagctgagcaagttaggaaatcaacattgaatcccaatgcaaaggagttcaacccacgttccttctctcagccaaagccttctactaccccaacttcacctcggcctcaagcacaacctagcccatctatggtgggtcatcaacagccaactccagtttatactcagcctgtttgttttgcaccaaatatgatgtatccagtcccagtgagcccaggcgtgcaacctttatacccaatacctatgacgcccatgccagtgaatcaagccaagacatatagagcaggtaaagtaccaaatatgccccaacagcggcaagaccagcatcatcagagtgccatgatgcacccagcgtcagcagcgggcccaccgattgcagccaccccaccagcttactccacgcaatatgttgcctacagtcctcagcagttcccaaatcagccccttgttcagcatgtgccacattatcagtctcagcatcctcatgtctatagtcctgtaatacagggtaatgctagaatgatggcaccaccaacacacgcccagcctggtttagtatcttcttcagcaactcagtacggggctcatgagcagacgcatgcgatgtatgcatgtcccaaattaccatacaacaagggagacaagcccttctttctactttgccatttccacgggctcccttgctcagcagtatgcgcaccctaacgctaccctgcacccacatactccacaccctcggccttcagctacccccactggacagcagcaaagccaacatggtggaagtcatcctgcacccagtcctgttcagcaccatcagcaccaggccgccaggctctccatctggccagtcacagcagcagtcagcatttacag

SEQ ID NO: 120868 - DNA, 369 bp, Homo Sapiens
tttcggttcctccagggcagccttacaactgctgttggtggtgggcttgtactgaagggtgcgtcatataggggaaatgcgctgttgtcgagactggaatgggctgtagtgcactttgagcgagggcggcctggggaccgccgggtggctgtgtcgtcattagcatcattggcgcatgggcagttggatgagaaggaaccattcctgactgtacatgagcctgaaggtacgtgggccatgttgggggtgggttgttatccgccggctgaccgtgagaaggatggattcgtaaagaccgtctgttgtgctgctgggaaactattctgtggcgactgcgtgttggaggcaggtgtcatggagggtggagtt

SEQ ID NO: 120869 - DNA, 925 bp, Homo Sapiens
acacacagactcggctcccggaagcctcaggccctgatgctgaactgatcgtcacagtccctcctgtgcacactcctggacgggtcttgctagttctcaaatgcggggcttgaagcactggccctgcctgccattccacctgtgcgagcagaatgctttggggtgccccggcggcccctgcacacacacgcctcacctgaagggtgcgtcatataggggaaatgcgctgttgtcgagactggaatgggctgtagtgcactttgagcgagggcggcctggggaccgccgggtggctgtgtcgtcattagcatcattggcgcatgggcagttggatgagaaggaaccattcctgactgtacatgagcctgaggtacgtgggccatgtggggtgggttggtatacgccggctgaacgtgagaaggatggatcgtaaagacagtctgttgtgctgctgggaaactattctgtggcgactgcgtgttggaggcaggtgtcatggagggtggagttggcgctatccccgcgtggtaaatggctgactgctgctgtggactggccagatggagagcctgggcggcctggtgctgatggtgctgaacaggactgggtgcaggatgacttccaccatgttggctttgctgctgtccagtgggggtagctgaaggctgagggtgtggagtatgtgggtgcagggtagcgttagggtgcgcatactgctgagcaagggagcccgtggaaacatacctcagcaattccaattctaggtatttaactttacctgctctatatgtcttggcttgattcactggcatgggcgtcataggtattgggtataaaggttgcacgcctgggctcactgggactggatacatcatatttggtgcaaaacaaacaggctgagtataaactggagttggcggccgca

SEQ ID NO: 120870 - DNA, 1222 bp, Homo Sapiens
  misc_feature (1109)..(1126): n is a, c, g, or t
aattgggaagggaagtataaggaagagctcagagggagtttcatacctggaattgttggacttaattgacacttgcaaatacttttagtataaaggtttaattctatttaaaaagaagatccattaaatcaagctcttaactcatgggactatttgcaacacttctttgtaaatatcattttgtttgttaggttattggcaaaacagtttcaaggttcacttccctcccttgaaccaggtccaggtcattttgctttggggtagattaaagtcagaactctaaaagttgagcaactttggttttttttgaattgatttagcactaacccaccattgcatcttaaggacggcatgacgtgataatgatggacttgtgtgaggttttgatttttcaattaaactttttgttatcacaggtaattaattgtcagcggtcttgagtctggttatggaaccctgtagtaacaagagctggaaattggctaattgacaatgcaactgccttaaacatctcaagtagagaacatttacattagtgagatgtacttgaatttcagaacttaacaaattttaattactttttattgaaaactgcactgaacgctaaatgtccacctttacaataaacaaatacagtaacggtaactcacactaaaacaaaacatacttctgatagccattatttttctgtttgggacaattttaaagtttttcttttgtcacaaaaacaggaatgtacctatacaaaggctcaaaataggccatctttttaaacaaaaaggcaatgattcacaaaagactatgaatagaacatgtaactagttgatacaaatctaataggatttgttaaaatcagtcacatctaatacatctgaagtgttcttgtataaaatatcacgtgaagaagactttatcaatgtctaaaaaagtgggtttgttcatagacaatctgacaagttaccataaaaagtgtttcctgagacataaggaaatgcaacattattcttcttgaacccttttagctcaagactttccactcaataaaatagcagaggatctgaaactgagaaaatatatttgagtacaaacagcttgtgaaacttaatacnnnnnnnnnnnnnnnnnngcatcatcagcggcttttactgaacttacaaccaacttgccgctcaatatgcagctcagatgtgagagacgcgtctctgtacaggagccggtactg

SEQ ID NO: 120871 - DNA, 1676 bp, Homo Sapiens
  misc_feature (1559)..(1593): n is a, c, g, or t
catagaaaaattgtatttacaactccattcaaaagcagtttttaaaagcaaacacaatgtaacactgaaggtgaaaaatctaagctcacccaaagctgccaggtctaataaattactgacagaatactgtatcaaaaataaggcaataaccgaaaatataccattaaagatttctccatccccacaactagatagaatgaatctatctaggagcaaatgacatgctttattcagtttcaccatgtctgaaatctttaaggacagaagtgataaaatgttatcttcattcttcattagacttgaacacttgaaggaaaataatttctaaagcacaaagaggtaaagaagtataatctttcaaaaagatattcagtgttcaaaattcaagaatgcaatatcaatacacaatgggcattaggtgaatatacacaatacgatgagagcaaattaatttatttagtactttttccattccatatcatcaggaggattgatttcaactttccttttacctacatcagaccagttggtactcaaaactgtaccacccgactccataaaggatttgttcatggcacgtttcacttcatcagaaccatctgaatagatctgctgaaataatctgtttaaagctgcatctccctccaacttttcattcttttcttcttctttgatctcaccaaccaatttatcccaatttcttgtataaggagatgatgatggatataggttctttacatctgctacgaattgttttggcgtaggcacatctccttgcccctctagcttttcccatctcacagcctctggctttttcagtttaatttcaatctttgttgaaagtactttaaacgtgctctgttctggtattataggatgaagaagttccagtttcaaattgtaatcctctccagaaggaagtttaaccaaagcagacaactctttttctgaaaattccacatttacatcattcttctgaacattcttgatcataagtgtaatgactacttgagattctgtttgataccagtcatacttgatttttgactgatgagtccacacctcagattctgagccattctgagcttcttgacaccttttaatccagacactgaaattagcatctgcactatctaatttttgtccttctgtaaaagtttctagggcagcagcatagtttttttcatggtattcacatattccttttctcagcatagcagtggaattatttggattgagttctagagacttctttgcatcagcaacagcaacacagtaattcccaagaagaatgtgacaataagctctttgacaataatactgtgcatcatctggtttctgttccaaagccttagtcagctcctctaacgccgcctgggggtcctcgtcgattagggcatccgagaagctctggaaaaacctctgggatgttgcagttcctgctgcagccgccgccatccctcgtagtcgctgttgctgccgccggagctgctactatcacggttacccccggccgtaatggccgaattcccgggcatatgtccggtaccgtcgactgnnnnnnnnnnnnnnnnnnnnnnnnnnnnnnnnnnncgccgcttcctcgctcactgacttcgctgcgctcgtcgttcggctgtaaccgagctagcgccctatatgatcgatacattctt

SEQ ID NO: 120872 - DNA, 751 bp, Homo Sapiens
  misc_feature (212)..(221): n is a, c, g, or t
tttcctttcataagtaaccattcctcatgcatgtattagacctttaactgttaagaatctaacatagtatttaaaaagttaattttgaggtagcactaaattcaaattactttacaatttgccataaatactgcgttttgcttgacattaacagcagcaattccacatttcaagaaattaagcagtattagtaatactgcaggtatcagaannnnnnnnnnaaatcttcaattacatgtgggcagatgaaaacaactactaatagaaatttaagggaaagatatccaattaagggaaatgtgtcctaaaggaaaaagtgaataaaaattgagaaaacaattaaagaaatggaaagaaaagaccactttacggattataaaagttatatttattcacgatgctacatttattgcattcccttagaaaaatggagaactgtttatgtacccaatctgcacatataaaattttatacaaattatgtgtagcacataaaggcctctggtacagctaaaatcctgacactataatttgggtattcctgctttagggtctccagtttatcaggtctgtccatagaaaacagaaactggaattatagtcagtcttgctaacacttagaaactactttaaaatacaataaaattttcatttaccctaaaagtccaaatgggaggggatatattttgttaccaatttcaatgtaacagtatgacaaattcacacctcattttggctgggctttcaaaatt

SEQ ID NO: 120873 - DNA, 829 bp, Homo Sapiens
caggcaagggcctttcaccccaggcccctttaattcccctttctgttggcctgcccctgaggcctggagggggaccagatccaattagctttgtcccttcccaaactgtgggagccagggcctagactttttttggccaggccagaagagttcctcctcgggcccggggttcgagcctgggtcccacattcctcaagtttttctggctctggggcttttgtggccctggcatccagcgtgctctgggcatgagtgaggtgcttcacagcatcaagcacaaggactccaggcagcaccagccacagggcattcatgaagacaaagtaaacccagaagtagagagggtggcccagctctccgtgctggaatccgtcgcggtgctctgtcagggaagtagagcacatccccatagatctggcccacagagaccacaagctgtagaatgaagcggaggggatgctggcggagaaaggcgatcaccacccacaggctgagtggtccccacaggcaagctgtgatggtttccatgcacactgtgaagttgtcacccaggatgtatcggctgtctcccttggcatactctttccagagttgagataagaaggcttggtctccaagcaggtcttcgtagtagagaacgaaccagccctcgatcaccaggtgaatgaacccacacactgcaaaccagcacagggacagtcgccgccaagtccccaatgggacaaccgcagcacgaccaaggcgcgcgacggcagcggcctcccacgctggctccgggctctctttaggctgggtctcgcgctctgtcacatccctagttcgggctcat

SEQ ID NO: 120874 - DNA, 1088 bp, Homo Sapiens
  misc_feature (997)..(1014): n is a, c, g, or t
ttttagagtcaagatcttttatttcctgattttaaaaatcgtcaccatcatagacctcctggcttctcttgtatctgtgttctaatggctcccagcagtgccttcacacagcccctttattccccttcttgtgcctgcccatgagcctgagtgtgacagatcaattagctttgtccctccaaactgtgggagcaggactagactcttctggcaggcagagagctcctcctcggccagtgttcgagcctggtccaccactcctcagttcttcttgctcttggcttttgtggccttggcatccagcgtgctctgggcatgagtgaggtgcttcacagcatcaagcacaaggactccaggcagcaccagccacagggcattcatgaagacaaagtaaaaccagaagtagagagggtggcccagctctccgtgctggaatccgtcgcggtgctctgtcaggaagtagagcacatccccatagatctggcccacagagaccacaagctgtagaatgaagcggaggggatgctggcggagaaaggcgatcaccacccacaggctgagtggtccccacaggcaagctgtgatggtttccatgcacactgtgaagttgtcacccaggatgtatcggctgtctcccttggcatactctttccagagttgagataagaaggcttggtctccaagcaggtcttcgtagtagagaacgaaccagccctcgatcaccaggtgaatgaacccacacactgcaaaccagcacagggacagtcgccgccaagtccccaatgggacaaccgcagcacgacctgacaacagccatgtggtcacgactaagacccctgtgacagagaagaggccagccagtatatgccaggtggggcggtcattaggtacaaagttgtccagtcttaggtgctgaggccagtatgggtgcaaggggcccgcgttggtagtcatgtctttgtgggctgatggctgcgtgtgtataggcaggaagttnnnnnnnnnnnnnnnnnnggaacagaaaaaccaaggcgcgcgacggcagcggcctcccacgctggctccgggctctctttaggctgggtctc

SEQ ID NO: 120875 - DNA, 969 bp, Homo Sapiens
  misc_feature (826)..(844): n is a, c, g, or t
tttggggagccaggactagactcttctggcagggcagaagagctcctcctcggccccagtgttcgagcctggttccacccctcccttcaggtttttctttgctcttggcttttgtggccttggcatccagcggtgctctgggcatgagtgaggtgcttcacagcatcaaggcacaaggactccaggcagcaccagccacagggcattcatgaagacaaagtaaaaccagaagtagagagggtggcccagctctccgtgctggaatccgtcgcggtgctctgtcaggaagtagagcacatccccatagatctggcccacagagaccacaagctgtagaatgaagcggaggggatgctggcggagaaaggcgatcaccacccacaggctgagtggtccccacaggcaagctgtgatggtttccatgcacactgtgaagttgtcacccaggatgtatcggctgtctcccttggcatactctttccagagttgagataagaaggcttggtctccaagcaggtcttcgtagtagagaacgaaccagccctcgatcaccaggtgaatgaacccacacactgcaaaccagcacagggacagtcgccgccaagtccccaatgggacaaccgcagcacgacctgacaacagccatgtggtcacgactaagacccctgtgacagagaagaggccagccagtatatgccaggtggggcggtcattaggtacaaagttgtccagtcttaggtgctgaggccagtatgggtgcaaggggcccgcgttggtagtcatgtctttgtgggctgatggctgcgtgtgtataggcaggaagttnnnnnnnnnnnnnnnnnnnggaacagaaaaaccaaggcgcgcgacggcagcggcctcccacgctggctccgggctctctttaggctgggtctcgcgctctgtcacatccctagttcgggctcatcccctagtgggttctcttgc

SEQ ID NO: 120876 - DNA, 1015 bp, Homo Sapiens
  misc_feature (1003)..(1003): n is a, c, g, or t
cacaagtccacacttggccagtttattaaaggcagggagcttcggcagggtccaaaagggagaagttgggagatgccccctcctcagctccctccttccccaacaactcttctacagcccagcccccagggcccagaggcagggctggcgtcaggcagactgtactgcataaatacgtggaggccacagcccgaatcagcagcgtcagggggcagggaaactgggtttgggatgagaagtgggtggctctgggggcacgtcccccagtgcttgtccagagcccagggacccacagagccagagaggggaccagtgggccagcttggggtctggctacggccagccctgcccagcgaggctggcaggtggctctggttttgggggagaagtggggtggggtgtggccatgccacggcccacggggacagggtggggtcaggtgctgttgccctgctcctgttcaaagagtagcatggccagctgggttcgggagccgaggccctcaagcacgctctggaggcagcggtggtacaggtcctcactgagcctcgcgctgcacgtctgggcccggtagcgctgcagcagcgccggctccaccgcccgcagcacatgcagactggagaagtggaggaacagctcgtacacatccaggctctccagcagctcctcttcttgttctgaggctgccgccaggcgcccacgggctgccacgtagtcggagttgtagaagcaggcctcgctggctgcctggcgatcaaagcggccagtgtcacggcccagctctgggggcccaggcccttgtggtggggccacagctgggtggaaggctctggaaatgcatgggaaagaaggcctgccagccggagatggcatgcatgcggcagcggttcaggaagtcaggcgtgagcaccgtgtcttgcccgcgccagcaggaacagtgtgtcccagcggttgcctcatggatctacttctgcaagaagcacccgcagaacatggttgttcncatgcggaactt

SEQ ID NO: 120877 - DNA, 2815 bp, Homo Sapiens
  misc_feature (516)..(516): n is a, c, g, or t
tttgtcccagagcccccagggacccccccagaagcccggagaagggggaaccagttgggcccaggcttgggggttctgggttagggcccagcccctgcccccagcgaagcttggcaggtggcttctggtttggggggagaattggggtggggtgtggccatgccaccggccccacggggaccagggggggtcaggtgctgttgccctgctcctgttcaaagagtagcatggccagctgggttcgggagccgaggccctcaagcacgctctggaggcagcggtggtacaggtcctcactgagcctcgcgctgcacgtctgggcccggtagcgctgcagcagcgccggctccaccgcccgcagcacatgcagactggagaagtggaggaacagctcgtacacatccaggctctccagcagctcctcttcttgttctgaggctgccgccaggcgcccacgggctgccacgtagtcggagttgtagaagcaggcctcgctggctgcctggcgatcaaagncggccagtgtcacggcccagctctgggggcccaggcccttgtggtggggccacagctgggtggaaggcttggaaatgcatgggaaagaaggcctgccagccggagatggcatgcatgcggcagcggttcaggaagtcaggcgtgagcaccgtgtctggcccggccagcaggaacagtgtgtccagcgggtgcttcttggagagtagatccatgaggcgtagtggtgagggtgcggctgtctgcacactgagccatggcacccgggcaccggggaaacgccgctccagctctgccacatgggccttgacaggtgcgaagacatctgcatgggccacgcgctgggcctggcgcggctcatacagtagcagcagggtcagggctgccgcagcatcaccaggctccagtgctgcagtggcaaaggcctccaagaagccaggggccaggtcacgctcagccgcagctagaggcagcagcacagtgagacgtgaggcctcagtgacatagggcacaggcaagatctccacgcggctcagcggccggagcagctgcactcggcgagtgaggggccggcggcctccctggggggtcagtgcctccagctgcaagtccagcgtgtattccataccccgggccggatcaaagcgtcggtagccattcaccagctgctgcttctggagccgcaaggccgggtggtagcggcggttcagctcctctagagctgtccccagaacatcggccacatcagcccggtcagccccacgcagtgggcagcggggtgagccatcggcgcaggagaaagcatgctgctccgtgaagtagtcccagcgcagcacctcaaagcgggaggccgggcgggatggtgctggaatacccacgggccaagcagctgcccggtccccatcaacggccagatggctggtattctggatctcccactgtaactcctggatctcctggtacgtgcgttccagttcagctcgggcgaaagctttgtgcagctggtacatgtgcacagggtcacgcacagggtgggctgtcagggcacttcggaaatgagggtccccctcctgcactggctccccagggctcagctccagatggctatagtgcaccccctcgtggtcaccagtgcagcccaccccggtggcatcgagaatgcagcgacccagccactcgtcagggcgcgcactgacgatgtcgttgcggcagccttccaggtgggggcgcagttgttgcagcagcatgcgcgacagcagcaccccaaagcctccgtggcagtagcggccgggggtgggctctccgccgatgaagtcctggggccggcccaggtacaggtgggcggcggaggccaggctgaggtggccagttaggcgtgccaggccgtgcgcctcggtgtaggtggtgtcaggcaccaggaagaaccagtcaaagtcgtcgccgtgctgctccagcaggtggcgcagcgccaggtgcaggtgtccaatgggtcgctcctcgcccagcgtcaccactgccatgccaggtggggcccggcggccccgtgcgcccgtcaggaacaccacacgctccagccggtgccccagcgtgcggttcacggccacgcccagcgtgggcagcgtggtctgagaggtcagcaccgccaccagcagcctctgcctgatgcccagctccgtgctgatgtagcgggtcctgacggcctttttggcggcctggccgggctgtgcagggtggtagggcaagacgcgcggctcccaattctccccggcgccttcgccggccccgggcttctcgcgctccgctccgggctgcaccgagttgggccggcgcgccgcgttggtgttgccgcgcggcggcagctcagagtctccaggttggggcgggcctgggccgcacggctcctccacccaggtgacgctgagcaggctcagggtgaagcccagggagatgcccacggccacgggccctgcgggccgcagcaccgacagcagcagcgatgcccgcatggcgcccggaccgcgggtccccggccccggcgaacccccagagcagccagaggagtctccgagggggcgggaccggggagggggcggatccggagggctcgggccccgcgggcgggcccgctccctccccgcagagcagagccagcggcccgagccgaatccccggagccgcgcctcgattcccctccagcagctgctctgggctgcgcagggttcttgcgctcggcactggagcctcagccgcggccgcagctgtccgcctcgtgccgaattcggcgcgccgtgacttcatactt

SEQ ID NO: 120878 - DNA, 1051 bp, Homo Sapiens
  misc_feature (642)..(642): n is a, c, g, or t
  misc_feature (701)..(724): n is a, c, g, or t
  misc_feature (750)..(750): n is a, c, g, or t
  misc_feature (825)..(881): n is a, c, g, or t
  misc_feature (907)..(907): n is a, c, g, or t
  misc_feature (984)..(984): n is a, c, g, or t
  misc_feature (994)..(994): n is a, c, g, or t
gaaagctcagctcccagtatggagagcatcatttttcagtgaagagtccgtgataagctgtgaaattcagatgagaattcaaacattttcagacattcagcgagtcagagcaacccaagaactaaactcattatatgcattttctcaagaaaaccctcccaggagtttcctgggcctacagaaatggtgtgccaaccatcttcaacaatgcagagcaactttttgtttatgattcttgtcctttcttgctaccatcttgcacagtgtcagaatcatccttagaaacagtaatagaggccaatctcccagaacatccttcacaaatttcttcattcttagaaattatcttttgcttcagatgaatgttctcttctgtcaggatctgtatggtgtgcttatacttttcttcagtttcagcaaacttggtttgaagcattttctccagatttcccactatagctttctctttctggagttccaactgggtatagtagaggtttgtgttcagtgactctaggataagggcttgtgcatgcaattcttcctgcatgacctctttggtttttctcagctcttctaattgcaaggtgtcactttgatgttgtttcaagagctcctccttctcttgaatgaagttctcanagacagcactgcaggattcatttattttcttatcttcttctcctgactccatttcgaannnnnnnnnnnnnnnnnnnnnnnngctgtagcaggatattttctcgctcngacttctcatccttcttccatttcgccttctgttttgacacttccctcgtgccgaattcctggcctcgagggccnnnnnnnnnnnnnnnnnnnnnnnnnnnnnnnnnnnnnnnnnnnnnnnnnnnnnnnnncatggtatcgctcacaatccacacanatacgagccggagcataagtgtaagctggggtggctatgaggagctactcacataatgcgtgcgctcatgccgcttncagtcggaanctgtcgtgcagctgcatatgatcggcacgccggggaagcggtgcgtatggcgtctcc

SEQ ID NO: 120879 - DNA, 1036 bp, Homo Sapiens
ccctgggtacttcttttctctttattccctttcatagcttctgccgggatccaggcagagagagcactaatgggggaaagggagcgagcgcttcccgctttccccagcgtgggccctcggagttgggtgtgggggcagcagggccagaggaaaggcacaggtggcgatttgccccagccctcccccctaagatgcagaccctcagaacacgtcgcggaaggtgagctccctgctccgagaggcagactcgggtgtaacgcaaagacggtttctttcatcaataaggtccccactgcctcacagcccctaaggccacccgctggttctggcattctagacgggggtgcccttggcccttcctttgtcttcctgttttgcagggtaatcccagggttccatgcgtatcctctgcacattcagcatgggctcctcggtgcttgtgtctccatttttctgtcgttctgcgataatcatggcccggaggagaggcgggtacggcacggaggccaggctgtcttccggcgccggcgtgaacgcggtgaaggcctcctcctcgtgcttgggcaccagccgccagtcatggtacatgacgtgttcgatctcccgcgcctcgctctcagtcttccctttgaaggtcaggatgccccaggccttcccgtggtccaagttctgcgccgtgtagtcgggccgcacccgcgtgaggcgccagtagcacggctcgtcgtgctgccacagccaggacttgcgcgtgaccaggcggcccaggccgaagagcgggaggcggccgagcagctgcaagaggcggctctcgcggcgcacgtcggcccaggcccggaccggcagccggcgtccagagaacggccgcgtcaaggtctcgtagtccaccgcgtagagctgggagtcgcgcggcctgttcagttgctcccgcagggcgcgcacgcggcgggccagctccgcgatcagccgcggacgcaccttcttccgcgccatggccctcgtgccgaattcaccaccccaggcctcgtaccctagccta

SEQ ID NO: 120880 - DNA, 847 bp, Homo Sapiens
tttaagtctttttatcaagaaaaagaggaattacactgagaaaacataacgtgggcctccagcaactctcacagcatagagcttgctgcctgagtggtgcttaaaggaaaaaactgacacaaatccaatttagtaaaagataccattttttctaataaattatatttatttacaaaaggtctaattttatataactatgaggttcttttacatcagaataatatataaacagaggtgaaaatctggtaattacaaacacagaaaatagaaaccttgttcccttatttattactcacctttcagaacaagtccttggctcagttgtagaggtggggaagaccaacacctaccgaagtttgcaggcaggagcccccaaaaatgtttataaataacacatttagataccctaaggaacagcagtgaagaatagcatcaaggaatggcttagtttgaatctgatctaattcaccagccactcactgtttcattgtccacgactaggggcagggaggattagccagtatgaatgtcaactttacaagtagggtaattaccatcaaattaacaattaccaatcactagcactgagatggctttgaactagatcctactgagaatcacaaaagcagttttgatagtcttaagctattatagctaagtgtcttaaaatggagggttagggagaatgtgtgggtaattagagcaaaatcatctctcactttccacctcacctttaagacagctccaaaaaactgagtgcctgacatgtcaccatatttcaggcctattccaaaatagccccaaatgatgagttttcaactttaaattgtatgttctcaccagtttg

SEQ ID NO: 120881 - DNA, 961 bp, Homo Sapiens
gtgtctaacttgtctcatagccctcaccgccccattccatcctgttgtctttcctggaattttttctttcttccactcacagctgaaggtgttttctgacttaattcctgacactatgcttcccctcttctatgtcctgttcttaaggaatcatgccctgaagtcctgctgccgcatatgcagatgctgctcggggtcttcagtctcacctctccgttgacaatgcctgcccctactgcaggactgcttcaattggctgtcctatttacacttacgtgtcatgttaaaataatcatttctctattaatttctccatatacatttccttctgacatttccaattattgtttcccttcagtgcccccaggcttgccagcttggagtgcaaatacctagattccctgagcacccccaaggtatgactgtctcttcagtggagattttacagttgtatttgaagaaaagatgctgtgtagtgctgatggattcttccacttagtcccatgacagattgttctagttacgcgtatccacctgttggctgtggaacagtaaatctacccatcttaagggggaaattatcctgcaggctctctggtctaccggtttggagcccactctggggctgtgatgtgctagttctgggcctgcacacacctcactcggtcttcgtcatgactgatgataggcccgcagtcaatgactaaagatggggctgccttcctggaaaaacggttgtctgtgtgtataggaaacaatgaaagaacacgcttttcctgttggcggccaccaaggagtgcccacttccatcaacatctggagacaaacactgtgccctgaaagctccgattgccaaaccagagacaaaggagaagccacccgctcctttctaatacttcatcagatccagaaggtagtctcagctgggcatggggctcacgcctgtaatcccaacagtttg

SEQ ID NO: 120882 - DNA, 907 bp, Homo Sapiens
  misc_feature (129)..(144): n is a, c, g, or t
  misc_feature (151)..(171): n is a, c, g, or t
  misc_feature (173)..(192): n is a, c, g, or t
  misc_feature (194)..(247): n is a, c, g, or t
tttggggggagtccccacccccttattttctggcccgggttttccttcggggaccccctttagcccccgtttccttttccttttgggggcgccgccgcccccacaagaaggttttaagaaaattttttnnnnnnnnnnnnnnnnccccaannnnnnnnnnnnnnnnnnnnnannnnnnnnnnnnnnnnnnnntnnnnnnnnnnnnnnnnnnnnnnnnnnnnnnnnnnnnnnnnnnnnnnnnnnnnnntttatacaaaaggatttattaaaaaaccagtaagacactactacatcatgacactgtcacactgggcttttaacacaagacttgctctacaatactgggggaaagggcataaaacacaaattgattctgaagcatagcaattaagaaataaaacaatgaaagcaaatttcttttaatgagaactcagaattaaacttcagagggacccaacgtcatacttccattcagggacttgatacaaaaaatttagtttgaactgctattagcaggtggcaggagccaccttcaaatgaatcttcaaattggaaaatactgcttcaccacctgttggggataagttgcaaatggaataatttagtatggtttgtagctattttgatgaccacctcgcctggataccttcccataaccactctgctggtcaccacctcttccacgagctcttcctgcaaatcctcctctagatccccactgttgctgttgctgatattgttccttcgacatggctacttttatttcacatttactaagaccaacattgtggtatttcttttccattatcttcttcactggttcttcttccttaaaggtaataaagcagaacccacgcctcttattggtcttgttgtccatggggagctctatggattccacctcacc

SEQ ID NO: 120883 - DNA, 684 bp, Homo Sapiens
  misc_feature (118)..(128): n is a, c, g, or t
aacaagtgaacagttttattaagaattaaatgagggtatggaatgtgatacagtacaagtaagacactgaagatgggtataatagtactacttgcacaaaaagttaaatttcacttcnnnnnnnnnnntcacaagacaaaagaaaaagcaattccatcattataaagtaagctatttcatgcaacgtactaatactccccctccccccaaaaccccaacttcccaacaaacaaaaagctatctgaaaatgctgccatgctaacatatgaaccacggtatattcattcatggaaaaacacactcattaagcaatggattagataaaataacacagtttgcagtattgtaaactcatagaccacaatgatttcacatgaaaagcaattccagattcactcatagggtgagtaatatgggctacatagttgagagataatgtaaatataaaccccattaattctctcattatcttctaattataaaacctggaagcttagataatctgaaaaattcatataaaatttggcatactccacttgtgttccacgaaatgactttcggatatttgtaattattagagagctgtataaaaagcacttcaagatcaggatttgacttcttaaataatgatcataatttacatcacagaaacaactccagaaatgcatttactctgattaactc

SEQ ID NO: 120884 - DNA, 603 bp, Homo Sapiens
ggggttcttgtagttgaaatacaacgatggtttttcatatcattggtcgtggttgtagtccgtgcgaaaataatgatgtatgctttgtttctgttgagtgtgggtttagtaatggggtttgtggggttttcttctaagccttcttctctcttcctccagcagggggcgctgcttcttggtcaggacttcgatgaagccttcgcccaccatagaacccacctcactctcctccccgggggtggacccgcaattttcaatgatggcacttccatagttcaggtcaaactgtttcatggcctctccctgttcacctgccctcggagcagccaacttggcctccttctctgcctttttactggaggcttcgggaaggtcagcactggcatgggctgcccgctccagggcatagggggagtggccactcccactgctgcagccactaagacctccaggcaaggcctcgtctggggatctgacacgcatgtccatagccaaggtgtcactcgacttcgggtgcgggagcgggtagcccttgctctgcagtgccatgtagccctctgggctcccacagggggtgagtcgatgggggtcacttttctttct

SEQ ID NO: 120885 - DNA, 135 bp, Homo Sapiens
cgaatatcttgttcattgttaaggttgtggatgatcaaccaaccacacctagcattcctgcacatctgtacccacgccttcttcaaagccatactatttatgtgctccgggtccatcatccacaaccctcgtgcc

SEQ ID NO: 120886 - DNA, 1146 bp, Homo Sapiens
  misc_feature (146)..(146): n is a, c, g, or t
gcgcgcttttaaccccctgttttccacttatctctatagggggtcccgcgggccccccaaatggaacagttttggagaaagctttttggagggcgcgggggccggcccgcccgagtctccgcggcagattttcatgtttcctttcngagaataccggcccgtcacccctttgagttccttttgtgtaagtccccccccagcctttaaaaattctttttggaactagccggcgtttcttttataaattaccggtttttaagtcccttttattttatggaaggcataaccccttaattatctgtgcaaaggggtacttttgcccatttatccagagttgttctaaaaagcgcaattcataataagcaaaaactgggcatttgggaaaatattcatataaatcttaatgcctacataaggaagtattattaacacacgcaacaatccagattgacattaagtcattcacaatttggacagggaggacacattatggcaaaaattagattttgctaaaaacatatcaaacttctctgcaatcataatcatgtcatcaatttcggcaagcctgtcttccaaacttatgcttttaataactcgaatccatgacaatttttcctattctgatgataaaagagccaatacatttttatacaaaaggatttattaaaaaaccagtaagacactactacatcatgacactgtcacactgggcttttaacacaagacttgctctacaatactgggggaaagggcataaaacacaaattgattctgaagcatagcaattaagaaataaaacaatgaaagcaaatttcttttaatgagaactcagaattaaacttcagagggacccaacgtcatacttccattcagggacttgatacaaaaaatttagtttgaactgctattagcaggtggcaggagccaccttcaaatgaatcttcaaattggaaaatactgcttcaccacctggagacaaagaagaaaaaatagaagtcactctgggcaggctacaacacttaacaaaaatttacataaaactgagttatccctatgttccactatatgtaaatactgtataacattaaatgtgtgatatgttttataaattaaagctgaacagtagagtccatgagccctcgtgcc

SEQ ID NO: 120887 - DNA, 670 bp, Homo Sapiens
ttcacggtatatatttctttaatcctccctcgacacttgaattcatctatgaagtccaccacagctctaaaaatctctctgaactagccgcatttctattataattaacagattttaagtcctttttatttaatggaagcataaaacattaactatctgtgcaaaggggtacttttgcacatttatccagatttgttctaaaaagcacaatacatattaagcaaaaactgggcatttgggaaaatattcatataaatcttaatggctacataaggaagtattattaaaacaaccaacaaacaaattgacattaagtcattcccaatttggacagggaggacacattatggcaaaaattagattttgctaaaaacatttcaaacttcactgcaattttaatcatgtcctcaatttcggcaagcctgtcttccaaacttatgcttttaataacttgaatccatgacaatttttcctattctgatgataaaagagccaatacatttttatacaaaaggatttattaaaaaaaccagtaagacactactacatcatgacactgtcacactgggcttttaacacaagacttcaacccctgacccccatgcctcaggatactcctcaatagccatcgctgtagtatatccaaagacaaccatcattccccctaaat

SEQ ID NO: 120888 - DNA, 1033 bp, Homo Sapiens
  misc_feature (823)..(823): n is a, c, g, or t
  misc_feature (849)..(849): n is a, c, g, or t
  misc_feature (894)..(894): n is a, c, g, or t
  misc_feature (898)..(898): n is a, c, g, or t
ggtgttcttgtagttgaaatacaacgatggtttttcatatcattggtcgtggttgtagtccgtgcgagaataatgatgtatgctttgtttctgttgagtgtgggtttagtaatggggttttcatttaaagtttacagacacccagagggtccacggatgggcttcagagtccaccaatctcattaagtgtattacaaactgtatgtgtgcccattttttaaagaattgttcctggctttccacaaactttcaagaaataagttatctccaaaaagttaagaaccactggaatacatagcaggtactcaaagaaaaaagctacctttcgctccttgttctcacaaattctccctttttacttaaagatgacacaccaaggcttcacaataaatgtgcattgtatctcaccattttcttggcttgggtaagtagtaacatatgcaagcttatgccccaattctctagcgatagtctaggccctcaaacactgcttcatttctctcttcaccgagaggagtacacggtatatactcgagaacaatcatccacctagctgcacaaagcaccatatcggctaggaaaaccaaataggaaccacagcctcagggctggaccatagacaccggataccccaacgctacagggtgaggagaatgtgttcccccacactactgggcacaccaggagtctgaacccccctacccttttcctccctctctctctggaactgctggtaaaggcaggtcttctgggctctggctaaggctggagagaaccgttacccgagccgggggttgcagcgcgacgaagttcactccgctgntctgggaatggtggcagactcagcanagacgggtcccactctccaccacagaccagagtggtctcaccggnctgngaactcgtgcgattctggctcgagggcaatcctatatgagtcgataagtcgtatctgtcaagtgttctgtgtgatgtatcgtcaattcaacacaacagcggagataatgtagctgggtgcagatgacatcaatat

SEQ ID NO: 120889 - DNA, 2284 bp, Homo Sapiens
ttatgctttgtttctgttgagtgtgggtttagtaatggggtttgtggggttttcttctaagccttctcctatttatgggggtttagtattgattgttagcggtgtggtcgggtgtgttattattctgaattttgggggaggttatatgggtttaatagtttttttaatttatttagggggaatgatggttgtctttggatatactacagcgatggctattgaggagtatcctgaggcatgggggtcaggggttgaggtcttggtgagtgttttagtggggttagcgatggaggtaggattggtgctgtgggtgaaagagtatgatggggtggtggttgtggtaaactttaatagtgtaggaagctgaataatttatgaaggagaggggtcagggttgattcgggaggatcctattggtgcgggggctttgtatgattatgggcgttgattagtagtagttactggttgaacattgtttgttggtgtatatattgtaattgagattgctcgggggaataggttatgtgattaggagtagggttaggatgagtgggaagaagaaagagaggaagtaaagtttaattatgcctttttgggttgaggtgatgatggaggtggagatttggtgctgtgaaattgttttaggtaatagcttttctagtcaggttaggtctaggaggagtaggggcaggttttggctcgtaagaaggcctagataggggattgtgcggtgtatgatgctagggtagaatccgagtatgttggagaaataaaatgtgcatagtggggattttattttaagtttgttggttaggtagttgaggtctagggctgttagaagtcctaggaaagtgacagcgagggctgtgagttttaggtagagggggattgttgtttggaagggggatgcgggggaaatgttgttagtaatgagaaatcctgcgaataggcttccggctgtcaggcgtttaatggggtttagtagggtggggttattttcgttaatgttagtaagggtggggaagcgaggttgacctgttagggtgagaagaattattcgagtgctataggcgcttgtcagggaggtagcgatgagagtaatagatagggctcaggcgtttgtgtatgatatgtttgcggtttcgatgatgtggtctttggagtagaaacctgtgaggaaaggtattcctgctaatgctaggctgccaatggtgagggaggttgaagtgagaggtatggttttgagtagtcctcctatttttcgaatatcttgttcattgttaaggttgtggatgatggacccggagcacataaatagtatggctttgaagaaggcgtgggtacagatgtgcaggaatgctaggtgtggttggttgatgccgattgtaactattatgagtcctagttgacttgaagtggagaaggctacgatttttttgatgtcattttgtgtaagggcgcagactgctgcgaacagagtggtgatagcgcctaagcatagtgttagagtttggattagtgggctattttctgctagggggtggaagcggatgagtaagaagattcctgctacaactatagtgcttgagtggagtagggctgagactggggtggggccttctatggctgaggggagtcaggggtggagacctaattgggctgatttgcctgctgctgctaggaggaggcctagtagtggggtgaggcttggattagcgtttagaagggctatttgttgtgggtctcatgagttggagtgtaggataaatcatgctaaggcgaggatgaaaccgatatcgccgatacggttgtataggattgcttgaatggctgctgtgttggcatctgctcgggcgtatcatcaactgatgagcaagaaggatataattcctacgccctctcagccgatgaacagttggaataggttgttagcggtaactaagattagtatggtaattaggaagatgagtagatatttgaagaactgattaatgtttgggtctgagtttatatatcacagtgagaattctatgattgaccatgtaacgaacaatgccacagggatgaatattatggagaagtagtctagtttgaagcttagggagagctgggttgtttgggttgtggctcagtgtcagttcgagataataacttcttggtctaggcacatgaatattgttgtggggaagagactgataataaaggtggatgcgacaatggattttacataatgggggtatgagttttttttgttagggttaacgagggcggtaaggatcggcag

SEQ ID NO: 120890 - DNA, 528 bp, Homo Sapiens
  misc_feature (85)..(98): n is a, c, g, or t
ttttcctcagaataagatgagagtaactagaattactatagtaaggggaccagaagaatggaagacctgggccaggaaaacttannnnnnnnnnnnnngcttatataattttggtatatatccaatagtatcattaccggagaataagtgagccagagctagcaatcaataggatcttgatttttccatgtccccacagtcatacgaaatctgctattgttttttaaatcatagtattaaattgacatattttaaactcataacattcataaagcttttgtcaagaaataaagcttcaagttaatgttatttctggagttatgagtatatactcaagatctttttaaattcattattcacatagtcttattaacatgtcttgtatgcctagtttcctccaaaacaaaacctaacattactaaacagcacactaaacagaaacaaagcatacatcattattctcgcacgggctacaaccacgaccaatgatatgaaaaaccatcggtgtatttcaactataagaacacc

SEQ ID NO: 120891 - DNA, 2172 bp, Homo Sapiens
  misc_feature (39)..(39): n is a, c, g, or t
  misc_feature (43)..(51): n is a, c, g, or t
  misc_feature (134)..(146): n is a, c, g, or t
  misc_feature (357)..(367): n is a, c, g, or t
  misc_feature (429)..(429): n is a, c, g, or t
  misc_feature (1780)..(1822): n is a, c, g, or t
gggttggggacccctgggggggattgcgctccctagagnagannnnnnnnngggggagaagagagctccgcgagaaaaaagcgcgtcgcggagacctcccctcgggggggttttggttttttagggacggtttnnnnnnnnnnnnnacgggggcggtgttcacaggtgggtgggaaagccacaaagcgttaggtcgcggagccgggtgttttcttgtgggggcccgggcctccgccccgaaatcgctttacacaagggtgggggcgggggcggagaggagaaagggccaaaaaaaggttttgtggtgggggagagggcccagacagaaggttgccttacgaggggtgtaagatggannnnnnnnnnntggaagagcgagttctcgccttttgcgatgtggaagaggggttataatgttggggggggtgnggtatacaaaaggatttattaaaaaaccagtaagacactactacatcatgacactgtcacactgggcttttaacacaagacttgctctacaatactgggggaaagggcataaaacacaaattgattctgaagcatagcaattaagaaataaaacaatgaaagcaaatttcttttaatgagaactcagaattaaacttcagagggacccaacgtcatacttccattcagggacttgatacaaaaaatttagtttgaactgctattagcaggtggcaggagccaccttcaaatgaatcttcaaattggaaaatactgcttcaccacctgttggggataagttgcaaatggaataatttagtatggtttgtagctattttgatgaccacctcgcctggataccttcccataaccactctgctggttgctataatcaccatatccatagtagttgttgtaaccagtgtagtcatatcctccataaccaccgtaaccttggctgttatatccatagttgccatagccttgattccaatagttactatatccctggttccagttttgactggggccaccacctcttccacgagctcttcctgcaaatcctcctctagatccccactgttgctgttgctgatattgttccttcgacatggctacttttatttcacatttactaagaccaacattgtggtatttcttttccattatcttcttcactggttcttcttccttaaaggtaataaagcagaacccacgcctcttattggtcttgttgtccatggggagctctatggattccacctcaccaaaaccaccaaagtactcccttattttctcttcaggtgtatctggagaaaggccaccaacaaaattttttttaaccggctcttttgttttcatggctttggcccttttaggatcaatcaccttcccattcaatttatgttctttttgatccatgaccttatctacactctccgattctttaaatagcacaaagccaaaaccccttgatcgccctgtgataggatctaacttcagagtgcagtctacaacttcaccaaatttggaaaagtagtccttcagatctttctttgtagtgtcccagctaaggcctcctataaacattttccattcttcccgctgtgccgtcgctgcttcagagtgtcgtggggaggagtttgaatggccttcatcctcctcgttcttactggcgtcaatcttcgccccctccgactcggcgctgcccccttcggtgcctccagacgcggttccgcccccggtcccggctccgcttcccgccgccgccgctgccccctgtgtcgccgccaccatggctccctcctgctcnnnnnnnnnnnnnnnnnnnnnnnnnnnnnnnnnnnnnnnnnnnccgtccccgccgaactgctcctccgacatagtgctagtgtctccgccgctgccgccgagactacacccgccgctgccgcgaaccgaaactagcagcaaagtaatccccgccgctgccgcgcgcccgctctacctcgcgaagcacacaagacagggaaggcgcgcgcgtggctgcaaaggctcctgcgcctctccctggcctgcccccttcgcctcccactctcgcgcggcgcacactcccgctctctcccgctgcactaaaaaagaataagcaccagcggcggccgctctcgcctcctcctcgcttaatggcctcgtgccgaattcgacccaggcctcgtacctagcctt

SEQ ID NO: 120892 - DNA, 784 bp, Homo Sapiens
  misc_feature (53)..(61): n is a, c, g, or t
aggggcccaaggcgcgacccaccaattttggcgaagaatggggcggggtaacnnnnnnnnnccaaaaacggattttttaaaaaaaacccattaagcccactaatttctttcatgacacggccaccccggggtttttaacaccaagacttggttttacaatacgggggaaaaggggcataaaacacaaattgattttgaagcatagcaattaagaaataaaacaatgaaagcaaatttttttaatgagaactcagaattaaacttcagagggacccaacgtcatacttccattcagggacttgatacaaaaaatttagtttgaactgctattagcaggtggcaggagccaccttcaaatgaatcttcaaattggaaaatactgcttcaccacctgttggggataagttgcaaatggaataatttagtatggtttgtagctattttgatgaccacctcgcctggataccttcccataaccactctgctggttgctataatcaccatatccatagtagttgttgtaaccagtgtagtcatatcctccataaccaccgtaaccttggctgttatatccatagttgccatagccttgattccaatagttactatatccctggttccagttttgactggggccaccacctcttccacgagctcttcctgcaaatcctcctctagatccccactgttgctgttgctgatattgttccttcgacatggctacttttatttcacatttactaagaccaacattgtggtatttcttttccattatcttcttccc

SEQ ID NO: 120893 - DNA, 989 bp, Homo Sapiens
  misc_feature (602)..(667): n is a, c, g, or t
  misc_feature (761)..(761): n is a, c, g, or t
gatttttcaaaattaacttttttattaatttaaaaatccagaaatacagtgactacataaataagtaccataattaggtacatgtcctgtgagaacagtgaaagggtaatactgttatgttactcttacttgtttacatgagttaactagaaaatggctacaactgctaaatgatgcttatggtctttgttgttccaagtgtttatgatacaaataaatacacaagaagaaccacatccattcttctctactaactacaggcagcttggcctctttaccctatgtcctattctctacacaacaccaaacactggagggtttctactttgacttaacacagctccccagctcctgcttcccacagcattttgcaaaggtgtgtcccagcacctggaggcaggagtatatctagggaaactctctgcgtgttctcttaaggctaagctttcagagaacacctgggtgggaaggctttgggatgaatcatccagaaggagaaacacctctttgccttaggatctagttactagtctccacattatggaatcactgccacctctgggacggagggagcagccgcataacaccttcccccctttacnnnnnnnnnnnnnnnnnnnnnnnnnnnnnnnnnnnnnnnnnnnnnnnnnnnnnnnnnnnnnnnnnntgactgtctaatactgaaaggtacatattcatacacgtaactgttctatgctgcagaagtgctactacgccacgtgccgaactctgagctcganggcaatctccccagattgaggcgtattatgtcgtacgctgtcatactgtatctgtgtgacatagtatcgctcacattcagagagactagagcggagcaaacatgtaatcgtgtgtgctatgacgactcatcacatactggttggcccatgccatacatcagaactgcaggagtgtatatatcgcatcgcgcgaagcgtgctatggcgtctcgtccgtacgacataccg

SEQ ID NO: 120894 - DNA, 930 bp, Homo Sapiens
  misc_feature (97)..(167): n is a, c, g, or t
cagcatgataaaataattccacttatgtagaaatatggaactctaggactagctggaaacctcggaaatcatttaggcctaatgttctcattttgannnnnnnnnnnnnnnnnnnnnnnnnnnnnnnnnnnnnnnnnnnnnnnnnnnnnnnnnnnnnnnnnnnnnnnaaaccaatttttcctaaaactaaaattctatcaatgatatttcaactggctatcaactaaaagtctaggcttttctctaatgctccacgctattgtgacatgaaagagtgataagcacactacagtaaatcgtacttgtggaattcaggcctggaaggggctttggcaaataactaagccagccctctctttgtaaaaaggaggaaaagtatctgaagtgacttacccaaggcttgttagcagagatgtctggattaaaatccagatattgacaaattcacccccaaatcccatctctagtttcatggcccacccactaaatcatgtgctccttttaaatctcctttatgcgctgaggttttagttatacaaaaaccccttccagtcaaacagaaaaaattaattcaaatatggaaagaaaaatcaaactttcagtattttcgtgactatcttgagtagttcattttccaacctcttagacagctgacagacaccactaacctgatcacctatttcagagcttcaaagatccttaatttccccaaagacttcctgagcaaaaggactacatgtgggaaatcaatgaaaacaggaatgagaagagaaagttaaaaattggttgcttttgttcctgtcattggggacttttggtcttctaaacattccttgagttcctccacatgagtttttaatatcaatctagcaaaaattaaaacaaaccggacgcgtggtcgacgatatcccgggaattccggaccggtcc

SEQ ID NO: 120895 - DNA, 1536 bp, Homo Sapiens
  misc_feature (306)..(316): n is a, c, g, or t
  misc_feature (427)..(442): n is a, c, g, or t
  misc_feature (485)..(541): n is a, c, g, or t
  misc_feature (1310)..(1311): n is a, c, g, or t
  misc_feature (1390)..(1390): n is a, c, g, or t
  misc_feature (1429)..(1429): n is a, c, g, or t
  misc_feature (1453)..(1454): n is a, c, g, or t
  misc_feature (1523)..(1523): n is a, c, g, or t
cccccccgcgttttccccccgtggggggaatatattttatcccccagaggggccaagggtggtggaaaccccggcgaggaaattagggttatcccaagaccggtttggggaagggggtttccctgtgggggcggaaaaggtttatgtgatttcccacccattttttccataaaatttcacggggcggggggttaaatttaaatataagggtctcgttgggttccccgtttaaagaatccccataatagccccccaggaaccccttttggattttttctaaaaccccttggtttccccgccgggggnnnnnnnnnnnggtgggaattccaaccctattttttgcccgggttttcttgggaaaaggtttgtccccttctcttttccttttggggccccgcgcccaaagaaaggttttaaaaaatttttnnnnnnnnnnnnnnnncgcaaaagttttttcttaaccttatggggtcgtgtcggttcgnnnnnnnnnnnnnnnnnnnnnnnnnnnnnnnnnnnnnnnnnnnnnnnnnnnnnnnnnccctgttataaagcgattttattaaattgatttggacatactgtaggtcaaataatattttctgaagataacaattatggactttaaagctcgacataaaattagtagcttcaaaagggttagtcatattccccagcaacagcatgataaaataattcaactatgtagaaatatagaactctaggactagctggaaactcggaaatcatttagcctaatgttctcattttgagagaaaactagactcaaagattaagcgatttgcccaagctcacatacctaatagtaataaagctagaaatcaaaccaatttttcctaaaactaaaattctatcaatgatatttcaactggctatcaactaaaagtctaggcttttctctaatgctccacgctattgtgacatgaaagagtgataagacactacagtaaatcgtacttgtggaattcaggcctggaaggggctttggcaaataactaagccagccctctctttgtaaaaaggaggaaaagtatctgaagtgacttaccaaaggcttgttagcagagatgtctggattaaaatccagatattgacaaattcacccccaaatcccatctctagtttcatggcccacccactaaatcatgtgctccttttaaatctcctttatgcgctgaggttttagttatacaaaaaccccttccagtcaaacagaaaaaattattcaaatatggaaagaaaatcaactttcagtattttcgtgactatcttgagtagtcattttcaannctctagacagctgaagacacactaactgatcactatttcagagcttcaagattcttatttccccaagacttctgagcanaggataatgtgggaatcatgaaacagatgagaagaattnaaattggtgctttgtcctgcatgnngatttgtctctaaatcctgagtctcaatgattttatacatctacaaattaacacaaaaggctcgaatcngaatgcactcgat

SEQ ID NO: 120896 - DNA, 436 bp, Homo Sapiens
acacaaataagtggttttatttatgttgatttgtacaccaaatttgtaagatgtatggacttaaaaccaagattatcgttgatttaaacacatgaaaagcaaaaaccgtagtccaggcaacaggaatttatagtagcagcataattagaccaccaatctgagctcattctgtacatactataacctttctgcagtaaaaatctaatggtttttgtcgtttcattttgtttttccttactactattcatattattgtataatatatcctatcagatgggaagttattgctaattacatgaacatacattcttcctttggagtcaaaagaactgccaaagatgttattggcaaagcaaagagtctccaaaaacttggtgagttttgagaagtccatttgttactttaaacacctatttttaaaataacttatgcaatt

SEQ ID NO: 120897 - DNA, 750 bp, Homo Sapiens
  misc_feature (705)..(705): n is a, c, g, or t
aattttaagaatgaaaatgtttacagtattttcagttttattataaaaatgcacacacaacaaagattgtcatttcttggctctacttgcattcagcacttgttcttgagcagctttctttgcttttaccatctcgacaagttccttgtatcgtttcatgcagtccttctttgtcctgccaggcaccgcttctgctattttttcccatctttcaggtgtatttactgggtatgttttcaaagcttgttccaaaagcttctgttcttctgttgtccaaggggtgaagtctgtatatggaccttcaaatcgttctgaaggcgttgcgttgtctgcttgaggtaccactccatgttcttttttgaacttatcaaatgcctttttatttatgtcatctttttgatgagggtcaagtttttggagactctttgctttgccaataacatctttggcagttcttttgactccagaggaagaatgtatgttcatgtaattagcaataacttcccatcttgaatttgttccagcagggaacagattcacagctttaattagtaattgtagatcatcttctgaccaatttttacttccatttccacctccaccagttgatttctctgtgttcttagatgcttgtcgcatacgagcctcagcttcctctttctcttttctgatttgctcatttatttcttctatctgtttttccanagcagctttcctacttcttttgtgcatgatgtgagtgtttcattc

SEQ ID NO: 120898 - DNA, 1053 bp, Homo Sapiens
  misc_feature (734)..(734): n is a, c, g, or t
  misc_feature (835)..(835): n is a, c, g, or t
  misc_feature (956)..(956): n is a, c, g, or t
ttttttgcctcttttacttttaactttatttggcaaagcagcactgcataaactgttcaagaactaggacacagcttacacagcatgttaagttcatatacattatcagcagcaaattagaaacagaaaaccacactaaactacaagtctcctataattttgagagagagagaagggaagaactaagtcagttatgtccaatctgaacagctgagtgtttacaggacatcacctgccatcttatggtttaatatttacaaatgcctagttttaaggtaacaaagcagctgattgtatctacaacatgctattctatgacaccacatcaaaagctttaaaaagaaagctcatctctattttcttagtagcatctaacagatatccaaataccaagaatcttaacttgtgaatggtggtgttatccaatgcacaaaagcaatctgataaattaatatcagaacagaattaagcgtccaagaaaagaaaaaccactcctcaaaatcaattcacaaactaagttttccattttacagaaccctttcttttaatatttccaagtaaaatatgggcatgttaaagtaatattacacaaatttatactttgcatccttcctctaccaatttggctctgtgcctctttgaagaatcagaaaccctaaaaaaacacacattttcatgctgaaaataacagtgtaacaaagtccaaaacaagctgtgatggtgttggttttcanaaagctttgaggactgagatgagcaatccactgttattttatactggtcaagctgatgttgcttttacattcatccctggacactgctttccttatctgtnaaggcacgtatacaccccatcagagctcattttgatgctgcatcctgtagctgtctactgctcacatttggtccggctgcaggacacagcatatcatcttctccgggcttactgattatancgctggggacacagggctgactccaatgatggacatagggctctcaaaatccatatccaccccaaaaacttactccttgaacaaggttggtttctcc

SEQ ID NO: 120899 - DNA, 1017 bp, Homo Sapiens
tttacatttttcacatttttaatgtaatgaatttctgacgttataatggaggagcataaaggtgacaaccaaaaacagctcttgtagtctaatgtcttaaaatccacaccctttcaccttgcatgtgtggaagaagaaagagcagaagataaaatcacttccacctggaccactgcttttctttatctgttaaaggcacgtatatcacccccatcagaggcttcattttgatgctgccatcttgtagcttgtcatactgctccaacatttggtttccgcctgcaggaccaacaggcaatatcaatcttcctccgggctttaactgatctattagcgcctggggtacaacaggggctgcagctcccacatgaatggcatcataaggggcttcttcagcatatcccattcttccatcccccacaacaagctgtactctccctgaagacagaagtgttggatcgtccttcctgacattatttattgagtcatctactagctctttaatgtgatcaattcctatgacttttccagtacatccaaccatacgtgcaaaacatgcagtaaggattccacttccagatcctacatcaagagctttagctccttcatgcaactgatcaaatagaagttctagcgcatatgcatgcatgtgtggagcactgattgttgcttggaaacctattgattgtggagaatccatgtatgggttacattttgcatagtgggagcggtctgtagccagcatcacttcaaatactttatctgtcttgatgattccatttttgcggagattgtggattagctccgagtggctggcgccgccggatttccaggccatcgctaagcacactcggagcaggtacagaaccaccttcagcgcgacgacggtgcccagcagttttcccaagagtgagaccacctcccacaccgtcaccgccccgctcgcgtccccgctgtagctgccgctgttactgccgtcgccgcctcgtgccgaattcgccacccaggcctcgctcc

SEQ ID NO: 120900 - DNA, 902 bp, Homo Sapiens
ttcttaaaccttgggaaatgggtgggtgttatcccaatgcaccaaaaagcaaatttgaataaaattaatatcaagaacaagaattaaagcgtccaagaaaaagaaaaaccactcctcaaaatcaattcacaaactaagttttccattttacagaaccctttcttttaatatttccaagtaaaatatgggcatgttaaagtaatattacacaaatttatactttgcatccttcctctaccaatttggctctgtgcctctttgaagaatcagaaaccctaaaaaaacacacattttcatgctgaaaataacagtgtaacaaagtccaaaacaagctgtgatggtgttggttttcaaaaagctttgaggactgagatgagcaatccactgtaattttatactggtcaagctgatgttgcttttacaattcatcccttgcatgtgtggaagaagaaagagcagaagataaaatcacttccacctggaccactgcttttctttatctgttaaaggcacgtatatcacccccatcagaggcttcattttgatgctgccatcttgtagcttgtcatactgctccaacatttggtttccgcctgcaggaccaacaggcaatatcaatcttcctcaggggctttaactgatctattagcgcctgtggtacaacaggggctgcagctcccacattgaatggcatcataaggggcttcttcagcatatcccattcttccatcccgcacaacaagctgtactctcgctgaagacagaagtgttggatcgtccttcctgacattatttattgagtcatctactagctctttaatgtgatcaattcctatgacttttcccagtacatccaaccatacgtgcaaaacatgcagtaaggattccacttccagatccta

SEQ ID NO: 120901 - DNA, 844 bp, Homo Sapiens
ccaagattctgacttctggctacatttcacctgcagttacctgggctatcggccgtgatacattttttaattcatttgttttccaccattatatttttatacttttcagttagatatacttctgcataaagagtatatatacagtgtaggataaaggcatatcgtacatggcaatgctgttaaacatggtaagactgaggttctgcaggattaaagtcagattaagggtacagaaagcacaccttgatactgaggccatttagagcaatttgtttaatgagtggttcagccatcaccaccagtggccacctgttcaataaaattgcctagcaccacagtggagagtcatctacaccccaaggtgagctgtaagactggccaattctttgaagacctttttttctgttgggagaatggaaagcagaaagggaagccaggctctttaatgttccaagtcagctgtgcctcacacaaggctctctttttagctactaagtaacatactcaagactttgtatctgtgcagcattttatggaaatcactggtgacctataggatattactaaattatttcaatagctttatttttttcctacttggattctaggtggacattacagagttgaattcctcactaccccctcccgctgtcatttgttttattggaaaacttcatgttaactagagtgtacaaaaagtctgtttcctgctgagccaatagtgatttgtttgcatatcacctaatgtgaaaagtgctcatctgtgaactctatagcaaattatattttagaaaatactttgtgaggccgggcatggtggcagagcgagactccgtctcaaaaa

SEQ ID NO: 120902 - DNA, 1344 bp, Homo Sapiens
tttcagtctttatcatttattatttttatttggacaacatatatacatatgtacaaaatacctactgtcagaatcctcttttataatttcatttgatttacaaaaacgggacagcaaaataacttaggtcactaatactgtacaaaaataaaactgattaaacagttgtaaagatcagtatcttacagtgttacagatcatctgatgtgaaagaacatctcaatctatccgagtgatgagtactgtgctaaatctatctgcaaactgacaaactaatcagtttctgtaattgtaactaccaaatagaattctcaagagaagcatgatgtggagctaaaccttaaagccagggcatcattccacaatggtgaagggctttcttcttccctaaccaaagagaggagatatcttaactctaaaactattaaattttccagaatatgacaactacttacagtattagataaaacaacttttctttctttttaaacacctgcaatagtctttcaaaaattcagtttggttaaaaaagtaaacaaaaattactatcctgcatttggattttcataagttaaatccatggtctttttaatataaaaagtaattgtttcatagttttagtgttcaatgaactctagtagtcctatttgaaccatatcttgatatagtaaatctaattagaatgctggttcctgttttgtgacattttaaaacaggatttaatcacaaagaataaaaaggcttgagtttatacgttacattactataacatataagagaatatcaaatgtgtgtttgtcaacaacttgaaaaggcaagtaacaacttttttgggaagtaaattgtgcatttttttaaaacaagttgctgcatttatatccatctaagtgcttgacaaaagccacatttagatttactcctgaaactataaagattgtctttcactgactttgctttgctttctttcgtttctttctgtgagggaaagatgactttttacaagttagcaagttgctaggcaaccccaaactcctcactcactaaaaggcagtgtgcagagtatcataagcagaaccattccatgagctcagtgagaaataggcagcctaacctatttcgtatggaagaacagatgtccttaaaacttattttggacacagaaattaaaatttggtttaaaataagtgtttcaaaaatctgaaacagaggtagaaagtgttctttatttttcctgacatgttttctcgtgagaaaacactttcctttttatcccatggactgctcccagtccctaatgttaaaagcagttctctttatagaactactaatacaactacgttggtt

SEQ ID NO: 120903 - DNA, 1239 bp, Homo Sapiens
tttttctgagataatctattaaattacaatttataaagaaatgtttataaatttgtatgaagttataaatttataaatataaaagtataaatccatatagagctgtttaaacaagaagtttccctctgagaggattacagactatgcaatctgctacatgtgatttcagataaatgataaattatacctaatgtgtaagtataacaatcaatttttgatatttaaattatcctaaaacctgttgagtgtgaatcctcttaaatctttcttttctgtttatgcttctggctgagaatggaagaagggacggaggcttcaaatgactgaaattgttcagatggtttcttgtgaccgaccactgtaaagtatttttcaccagagtccaaaggcaagataaaaagtctctgacttgaaatcagaatcgatctgctgatctgctagccacagctcgaatattgccataaaccttggaaggaggatttcccaagattaggttgcaaatggcagttcttgccatcttgatattttggaaggagccaaggatgtgaactttcacatcagccaaaactatccttgtccgtgtcacattctctatggtgaatttggtttttcctcctttgccagcgattcttcctattgccctggatagatggtctccctttaggggtttaacatctgtaatttcaaaagactctaggaagaggtcatccaacctgatgagggcaagtgcatcctccacctgaaagccgagaataaaagctttcacaaaatcagctgcttttgtcagagcactaacatccttggtttccttacaagtcctgatttctacattccttgatttcaagttaaagcgtatctgaagtcccaaatgttccacaataggagtaaatatcttcatccagttttctttcaatggtgtgtatctgttagctgggactggaattttccttgtttcttctttcccactcaggagcccgtccccacagaggggtgggaagacgggcctcttcgccggcctggcctcctctgtgtccatgcggcccgcatccccgccctctcctgctgcggacagctgttcagcctgtcgtttcttcgcccgtcggccacccttgcgggtgacctgggtaaagccctcctctgccctggcgctctgcgtttccatttcggattatatctacgtcaatcgtataatactgtcgtcatgtaatacgcgcgaagctgcaccatggccagaagcag

SEQ ID NO: 120904 - DNA, 639 bp, Homo Sapiens
  misc_feature (413)..(520): n is a, c, g, or t
  misc_feature (537)..(551): n is a, c, g, or t
  misc_feature (617)..(617): n is a, c, g, or t
tttttaaaaagtagatttattaaaaaacagttgaaggtctgagtgttgagaggcaaatggggtctctgggggatcctgtcctgcagcaggcctgactttcagatgactgtgcttataaggcagatcagtgccttcctggttgccttagttctttccatttcagacaccacatttggatcctggggcagctgctcaactctacccaactctaccatggctacctgggattggagaacatgtgagtattagctacttttacagtcaaatagggatcttgtagaagaaacaggtagacagacccaccagtctctcattctgacctagcaagctggtgaagtcactgtcggtcctagttcccttgtttgttgggctgcaggcccattccaacacagcccaactcccccccacccgcnnnnnnnnnnnnnnnnnnnnnnnnnnnnnnnnnnnnnnnnnnnnnnnnnnnnnnnnnnnnnnnnnnnnnnnnnnnnnnnnnnnnnnnnnnnnnnnnnnnnnnnnnnnntgcgtgccaccatgccnnnnnnnnnnnnnnnaatgagacagggtctcactatgttacctaggctagtctcaagcaaccctcctgcctcagccgcggncgctccaacatcagcctcgtgc

SEQ ID NO: 120905 - DNA, 856 bp, Homo Sapiens
gggctttcaataatttaattagactcatgccaaaaaaatgagcttccaggaaatattaaatattattcttaaagcaatttggacacagacaatcacacatacataaggaatggagacaaaaagtttctcccaaaagtgccagtgttttgttttgtttggaaaaatgacaacacaattagaggtaaacaatattttctttggctccatctccagtttccccatcttgtctggtcattgtccttgtcggtagatttagctttgcttctgttataaacgcctgcagttgagggcggtgtgaatttgagtcatggggggttggggactcagtgtgggaggtgtccaaatcatttttacaagaatccttgctgctttcatggaaaggaagtatctgatggccggaaccagcggctgtccacagtttgtgactgacattcgaaggctgagaagggtccaccttgaggtctacttgatgttcactagtcctcaccaagtcagaatgagattgagttgtagggtaagtggcatcctgatggataactgatggattcagtttgttgaaagtgttaaatgacatttgtactaaagcttcattgatgaagaatgagttttcatgacataaactctcagatcgattaagttccattacctcggggccacccggaaggagcaccgcgggcaggctcctctgccggccgtgcttccagtggcccagcaggctctgctgggcccgcatcctcgcctgctccctctccaccaggcgctggccctccctcagccgctccaggctgtgctggtactcctggagctggaggtccagctcgccccggctccgcagcagcagctcctcctgcgactg

SEQ ID NO: 120906 - DNA, 673 bp, Homo Sapiens
  misc_feature (601)..(601): n is a, c, g, or t
tttttattggaacattgaattttctttattgcaaattcttagggtttctgtcaaaagagatttgaaatacaacatgaaatgatgtactcacatccctcaccaccatctccaaataactgaattacataaataaaacattatatgaaaagtgctttgctacaatttatgggaggtaaatttaagaagagctggctcattgtaggaaaattcaacttatcttttcctgatccttttatttaatacagggagagaaatttatggcagttaaaaaaatctattactgtttctcataactgaatccattatttttctccatgatccatcaggtaaaaacaagaataatagattgctttgacagaaccttgaacataaatgtccccaagaatcaaacacagtaagttaaacgggtatcaggtggtattaaaacaggaaaggataaacttcttttcatatttcaaaatcagatcttacttaaaaatttattattattagctaccaaaaagaaacaaactatatagtggctgaatttgcacattgaaatgggaatatttctattcatttctatatgtgcgcaagaaaattaaacatgaaatgaattcanagaaaaggaactattttctttccatttatgctaactggttatttataatttactccttgattgcattagact

SEQ ID NO: 120907 - DNA, 1008 bp, Homo Sapiens
  misc_feature (64)..(65): n is a, c, g, or t
  misc_feature (70)..(70): n is a, c, g, or t
  misc_feature (77)..(77): n is a, c, g, or t
  misc_feature (122)..(122): n is a, c, g, or t
  misc_feature (136)..(136): n is a, c, g, or t
  misc_feature (196)..(196): n is a, c, g, or t
  misc_feature (202)..(202): n is a, c, g, or t
  misc_feature (277)..(277): n is a, c, g, or t
  misc_feature (293)..(293): n is a, c, g, or t
  misc_feature (363)..(363): n is a, c, g, or t
tatgtacttaatagatatagtttttttaattgattttctatcttaaacattcatgtcacttgtnnacctnaatacantgattgatctacaaagtgaccattcagccttactgatatacactntgtttctgatgccnaaataccaatgcctgtgtattatggataaaaactgctataaaaaccctgtgtactactcntactcntggagatgataatattctatgtggtcaaatatttggactcatttaggacttagatatttcagtgtacttgatttnttaatttaactctttntcacagccacgctaagggtaaaaaggaataatttccttctgtcttccttttcaagtatttctgggtaagngattcaaaaaactaaaactgtttttgtttgtaatataaaatatggaattgatctttccagggtcagagatgattaatgtttttgctatatacttttatacattattttcttatcaaactagttaacaagtatttttatatgtttgtaagcagatatgctttcatagcataccttgtgtatatgtaaagataagtatttaattctcactgttcacttttaactgacaaagaaaaacaagtggaaactacagaaactgtggtagaacttttacttgctggtctggtcttggttgtacccatctttggccagtcacataactactcaagaaaccttcccaatagagtacaacaggatgagactctgaaatcactttcagtattccctgctagatattgattgttatttcaagtattaagtgtaagcttttaatggataattagtataactgtggatggcatctgattttgtttttaattctgtggattgtgtttaagcaattcaatagtatgttcctgattttgagatgctaagtggtattgcacagttgtcactttatcaagtgtgtacaacagtcccatgaagtttatagagcatacccttgtatagcttcaggtgctagaattaaaattgatctgttatcacaag

SEQ ID NO: 120908 - DNA, 657 bp, Homo Sapiens
  misc_feature (488)..(499): n is a, c, g, or t
ttttttattggtgtagttacgaagcctttcaggctgcttctgtttaaaatataaaagaaaactttgccccctttgcatcttcataaacctgctgcggcagactcctcagccgatggtggctctgggtttccttgagtgtcatatgtcctagaaagttgctggctgactcttttttgtctggggcctggggaaagggcttggactgtgaaaagaaatgtggcccctttccatcttcaagagagatggaattaatgatggatggaccctggagggaatctccccagccgacttccactgggctgacagactttgctgaccacaggggaacgatgttcttttctttcttcatgatcagacataaacttagcatcttaatggaagaaaaatgaggggaacttcaattatgatttattaaagacaatttctattacaccctcctttatgacaagtgacattttagatgtaaaagtaaaaactttaccatgccnnnnnnnnnnnngttggcctaacattgaggccttaaaacctgaggctcctgtgcctgatggaattcttgtaacatacacttgtgtatcatataaagataccactctgtttctcttatgtattcttactctagttgtttattaagaatgacaagcacgtcttttcaacaaa

SEQ ID NO: 120909 - DNA, 2362 bp, Homo Sapiens
  misc_feature (91)..(94): n is a, c, g, or t
  misc_feature (96)..(98): n is a, c, g, or t
cagtttctcccttttccaatttattttaaagttttaaaattacaaagacagcaaaattttcccggcacaagtaacacttgtttaaaaaatnnnntnnnggggggacgcgcaagtgcgcgatttttctattttattaaaaataagagaaagacaactgtacaggttttttctcccagctcccgggtgtgaaactaagtactagccctagatatgtatatatacacaaacacacacatgcacacagatctagctctgtaaaactacttagcaaatcccaaatcgactgcagtaagtcttactatccactgcccgcccactccccctccccctcccgcagctacaactacttataataaaggactcaaaaagagatcgggaggttttaagtggccgcagccccaccaaaccaagcaaagacacctcttgtacaggaggaacaaaaatccagaggaaaagaaaagtcttcctaggacacaatccatcgattgcgtggaaaaacctaagtttcaacagggcacactgaggcacttggctgactccccacccttcccctgaagttttcactccggtttaacaagagaatttgctgaagccacaaagatcccccaatggctacatcctagctgactgggagaaactatggcttctcccatccagctgtcacttggaccccactccccttccctaagaaaatagggaggccgaaagggcaaactaacaaaaatgagaaggaaactgggtttgggcccccactgctcaccactgggaggtggaagtcagcccggtggcggtttttttccacctccttcctttgccggctggctgctccctaccacctctctcctgctggccaaaggttctgaaactctcacaacgggtgcccaactcaaggaaaactcactcaccctaaagatattcctgctaacctcacaattcctgggttccctctcatctagccagaacaaactgccttgtgtcttctccccacccacatctaccttcatggcaaacaagccaacaaaacacacaagcccccccgcaaatccctaaccccgtaagtaggttaatagcaaaacaaaatataagtacattctcatcattagattggttgttgctgtccttgcacaactggttaaggaaaaatgaattattctgtaatttctgaagaatccaaatcctgtctcttataaagtcagaacagaagggggcaaaaggtggtggtgagtattaagagagaaaaaaggagaaaattatttacagaaaataggagacaggagggagtagtccgcaagaaaagacttcattgtcacttcttcttgccggccctcttggcactggactttgctttgggtttcactggtttggcctttttgggcttggatgccttgaccggcttggctttgacagtcttggtttttttggctttcttgggcgtggcagccagcttcttcttggccttcttgaccggggtggctttgggtttcttggttggggctttggaggcagccttcttgggcttggatgccttctttggcgtggctaccttcttgatttccttcttggtcttcttgaaggccactgacttcttgggttcgtcgctcttggctagccggaaggaccccgaggcccccacccctttggtctgcttgaggacaccggtggtgaccaggcgcttgatggacaacttgatctgcgagtcagcgttctcacccaccttgtagtggctcttgatatacttctgaatggactggcgcgaggagccagcgcggttcttctcggcctggatggcagccacgatcatgtctgaatacttggggtggtctgtggacttcttggaggccttggcccgcttgggcttggccgcaggggcggacgtggaattctcggtcatggtggcctgtctggtccggctgttgaaggcgccttccaaagggccagccctcgtcggaggctgagcaaagcctgcctcgggatctgctcctgagcccctgactaccgggccagtctggagtgcggctcccggggatgcgagcgaggagtcgctgcttttcctccccggctcgggtgtcgggagagctcgccgagccggctttgcgaggcccagccccgccggtctgtcgcttggtctcggcaccgggctctgcctctgcctctgcctcctctgcctcccttttcccagctccgcgtctggcgcttgggcggcgcatccgggtatttagcggcggcgggcggaccgcggtgaggacagggctgctggctgcctgctcccggcccggaatggcgctgcgccgccgccatctgtgtttcttccccccggccgtaatggccgaattcccgggcatatgtccggtaccgtcgactg

SEQ ID NO: 120910 - DNA, 1026 bp, Homo Sapiens
gatattgtttggaccgcgtctaagcgacaaggcaagtgtggactcaggataaggaatatgttccgaatagacccgagagtccccagaagctcagtgcagtttctccgcctctggcactgacttgctttggttccactgttgccttttggcttgatgctggaccggcttgctttgccagtcttggtttttgcttgcttgggctgcaccagcttcttcttgccttctgaccgggtggctttgggtttcttggattgggctttggagcagccttcttgggcttggatgccttctttggcgtggctaccttcttgatttccttcttggtcttcttgaaggccactgacttcttggtttccgtcgctccttggctagccggaaggaccccgaggcccgcacccctttggtctgcattgaggacaccggtggtgaccaggcgcttgatggacaacttgatctgcgagtcagcgttctcacccaccttgtagtggctcttgatatacttctgaatggactggcgcgaggagccagcgcaggttcttctcggcctggatggcaagccacagatcatgtctgaatacttggcggtggtctgtggacttcttggaggccttggcccgctttgggcattggccgcaggggcaggacagtggaattctcggtcatggtggccatgtctggtccaggctgttgaaggcgcactttcacaaagggccagcacctcgtcaggaggcatgagcaaagcactgcctcgggaatctgctcactgagcaccctgactaccagggccagtctggagtgcaggctccacaggggatgcgagcgaggagtcgcatgcttttcctccccggctcagggtgtcgggagagctcagccgagccggctttgcgaggcccagccccgccaggtctgtcgcattggtctcggcaccagggcatctgcctctgcactctgcctcacgcctcactctgcctcccttttccccctcgtgccgaattcacacacccagcctcgtacctagccctaagt

SEQ ID NO: 120911 - DNA, 1105 bp, Homo Sapiens
gggttataccagtaataatatttacattcaaattctattgcaagacagcaaaagttcagcaacatttaaggactataaagtttcattcaatggtcccatgtttttgaaatatataaaaatattttatataaatattacataaaagacaataggcaaattataatattttactgaaataattaagtccatcctcaaatgtttctttttaatcatctaaccacaactttcgggtcaactgaaaaaaaggtcattttaaacccccttctgttgtctatggatttaaattgtgaggaaaaatctttaaaacttaattttggactaattaaaatgaaagcaagaaagaaaaatcagcttgcagtcagatatgaaatgaaggccaacaaagttcttaaaaccaatcaagagttacatcaggtagaactcagagactggaaactccagttttcttctttcctcattcctgttggtaattccagaagtccacagcctgcttccctaagtttcttattgttattaacacaccatacacagatctcacagtgcattgtactccacacatttggatgggtctgtaggaaagtgtttctggcaaatggtcattaacctcttcaatccctgaatatatttccgctgagtttcgtcatttaaaacatgtgcaacatgcttggaaaaaatcttttctctgccagttctggcatggataccaaccatagtgacaccgatgggccaaggcgcatttccaatggccatctgaagataagcatcatttgccttcacgtattctctctgcaacatgaatttaataatatccgttattgattctttaatatcagcaggaagattccttttccgtagctttctaaaaagtggtcttaggtaggactcggtctgtttctgggtcgcactgttcagtttaccctgcacactgcgtttcacataatcttctctggcattcaattctttagcccaaacgccaggaagaaacttcaggaatttggtgatgatgtccatgtccttatgatcatcgcctttccctaaggactctccaagcgcctctaactcttcaattgtggtgttttcctgcatgaactttcagatcattccc

SEQ ID NO: 120912 - DNA, 822 bp, Homo Sapiens
tgtgtttccaggagaatgactcagtttattattctcaatttgaccctatgtatcccactgtaggctcaaacactgcacagagctgccacgtctaacctcgtaacaactgcgtccctggaaggtgaagggggtaaaccacaaagtcagaaactttgggaaaagccacggtcgcatgcacacctctcaaacaaggaaacaaactacaagaaagggctcagtcattgtacacagcaagtgtgcagtgggcaaagttctgttcttttgacattggccaaatgcgtaagtccctggtttcttgggctcaatcacggtccaaggttagtaagaaggccaacaatgttgtgagcaggattcaatttctacagggtcatggggcatcatccaccatgtgaaggggctccagcaggttggacatgatcaatacccatccagattaggaccctgacgcccttgccagagctcgggctcgggcagctttggcctcgtcttctagctcatctaggaaacgctcctgggaaatcgagtagaaggtgtaaccataaatagccaacaccagggccccgatgcctaggccggtcacgatgttccgggttcgccgccgtggtaggaccttctgccactgggcaagctccgcctgccgcatggaatgcagttgctcgggtgtcagcttctcccgagtcgggtcgatacgctgagcgaacggggcctctccacgcttagaatccagagggtcaccagctcccgaagacgccatgttgcccctcgtgccgaattcgccacccagcctcgctaccttaggaccgtagagttactgtcgccggt

SEQ ID NO: 120913 - DNA, 1933 bp, Homo Sapiens
  misc_feature (88)..(103): n is a, c, g, or t
  misc_feature (328)..(369): n is a, c, g, or t
aaaaagtgattaggtactatagaacagtgttacaaaaagcaggctggtccggtccggaatcccgggatatcgtcgacccacgcgtcgnnnnnnnnnnnnnnnnccagtgaaattgaatttttattccaaatgactaatatctagaaaggcagtagctaacactcaaaacaatttgtttaagtgtaaattaaaagcagttgatttgcaggagagcaaacagtggggtagtggccatggcactctgatcatggttatatccaagaaagcataaaataaccaatgtcctgatatgcaatctggatgtgcagcatttacagcaaacaacatnnnnnnnnnnnnnnnnnnnnnnnnnnnnnnnnnnnnnnnnnnccaccacaaagtcccaaacctcagaaattaacattcacttaagaacacagtggtgaagacttttggtagcaaaatttgcacggttcttaaaatgggagtcttcaaaagtacttcttcaaattcaaaagctaagaaaaccaaagagggaacagttacacaggcttagtggagatgccgcctgtcatgaagatgaccatcagtcctacttcccagacacagtgagaaccggtgagcctgacgaacctgaaggaaaaggccggctgacgggtgctgatgccactgactatacaagaacacaccgggtcaactcatcattgacagcgagagacacactactgctcctcctggctgatgccaaggctgcctttctgcacctcaagctcctcggcactgaccattgatgggtcaatggccgcgtatttggttccatggaattgcagcaaatgtatctgtacataaagattgacctctgcacttctgcacaggtatgggaaattgctcctgttttcagatgagctcttcgggcattaggatacagcttgtacatttcttctttagcttcagttgaaagcgcactctgatcaaacacatccataatagttacaggtatgtcccgaattttatgaggttccacataagaattttgacattcaaggtaagtcttgaagccagttcactctgacccaaactttctagcctgtctaccatgaaatcaatggcatcagccatcatagggtccaccgggccagatgaaaaatttccaagaactatttttttgagcataaatgcaggcatcagccaaaagctgtttgcagtccaagtttggttgaagatagaggtgtcactgaaggaattgcagaggattagggaatggactctaggagatttgtgagtgtattcagcaaatttctgggccaaaaagcctcccaaagaagcgccaaaaagatgaactttatccaattgtaaatggtctaaaagttttctgaatccatcacagaactcgagatggtcccaataaactggatactgcaaagcgataacccggtaaccccatccagtcagagccaaaatctgccggaaaaagacatctgcagttccactgacagggggcaggaatatgagaggacacctgatacttcgggggcccgcgtcatagagcgaccatatcttactgtcatcatcatccacaataatctttttaaggggaactgtacctctaaaccagttataatcaggagagactttaatctctcccatgattagctgaaatggaggttaatcctgccgtggccgcccccacgtcccttcccctccttcaggaggccgctcttcgctccagtacgagcgcgggccgtggaggcggctgggcccgggtcggggcgggcggcggagcactcgggacccacgggcacagcaggctgcgcggtgcgtgcgggaggccggcctctgagggggcggggcgcgtggccaagcgagcttgggccgccgcgctccccccgcccgaccgccgctcccccggccgtaatggccgaattcccgggcatatgtccggtaccgtcgactg

SEQ ID NO: 120914 - DNA, 1220 bp, Homo Sapiens
atgcttaagaaatatttttactttgaaacactttaagcaaacagttaaaaagtacccaccacactaccctgttaaaatcttaacattgtgatgcctctgcatcaatttttagaaaaaaacaaagaaaacacaactgaaggccccatgtaccctccccaaatccatcaggtctcctgccttaggaaggcagaatggtgacttgcacacatcgttccaatacatgattttatactcatttcatattatttgaatccacagaaaatagattactgtgcaaaacaataacactttctatatgtccacaaggcttacatgctagacactattctaagcattttacatgcattacttcattgaccacccccccacccacaatcaccctgtgagattgccactactatcccattttacagaaaaagtgaaaaacaagttgaagtaacgtgcccacaggtacacagtatgcttaactttacactaagggtaccttgtatgtagcttcaccaactttctcagcataatttttcatctatctgtgttgagacgtaactctttcatattcactttccaaggaccaaaaacaacccatttatttatccattcttctgctgatgaaatgcaggcttttcccaatcttgctacctaaacaatacttcagtgaagtcttaaaatcattctctgttcacatggcacttctctaggatgcatccaggagtagttgctgggtggttaagtgcacacaaccttccaagattttgcaaattgcctggcacaatatttctcacaatttctactcataaagcagtgtgaattatcgttgttccacgcacttacccacacttgggctttcaaaaatgtgccagctttctgagtgtgagatggtctgtattattttacatttcagtcagtcttggtcagcaggggtggggcagaccacactgaacaggtgacagaaagaccttcaaatacccactccagccatctggctctcctcaaccccaacttcagttcctccaagggagtgggggaaaggtgggaagggttggaaggaaactgaatgttctccaggccaggatgagatgcaagatgagacctggtgctcagggcaatcagaaactgtcaactgaagccaaacagctcagaaccacccacagccgggttcctaaccagcaggtgtgtgtttgtgggtggcttccagtcaacatttcaccccacagcccctt

SEQ ID NO: 120915 - DNA, 772 bp, Homo Sapiens
  misc_feature (719)..(719): n is a, c, g, or t
ttttttttctcaaatatccaattttattttatcattctcgcattgtgggatgcgatctgcagctaggatcggaattcccaggcctatagatttttaaaccacaccacaggggtaaaccttaaaagaagtgaaacctaacactatatatatttccatttctaaatacagtatattacagaagtttaaatataccacctctgtgtacttacaactataaaaagatacaataactctaccaattataaataatgtagcatttcatattaaagacattatcgtacaatggaagaataggaaccctctaacgtatcactatcaaggttagtgtctatatctacttgagataaaatactgaaaattcagtgtatgaagccaaatcctgatttaacaagttattggtagtataagtgataagtgttagctgatgaagggaaggcaaatgtggtaatttatatctctgacaagggtgataggcccattttatacatggttttcgttatacacacactggttctgttacgggccctcattttattattgccctccccaacttaatttgcaaacttaagcactactttcccaattaggaaagtactagttagtaaccataaaagtatccgtcggataacacatttgtttttgtttttgaagctatatgggaacactttcagtttcccaagttaaaacatgaaattgcacatcatcatttggattcccanagaggaaaagaaaattcacaaccctgcagtgaaatactcagggcacttggatg

SEQ ID NO: 120916 - DNA, 881 bp, Homo Sapiens
  misc_feature (232)..(251): n is a, c, g, or t
ggggggggaatactcacagacccctttttcctggtgtcccggggttttttctttgggaaaacaaatatatgggcccctggttcccctttccactagggggggccccggggcgcccaaaggaaatgggtttatggaaatttttttggaggggcccagagggcgccccacacttttgaattatatcatggcgtgatggttgtttaaacatgggtattcgtatggcttcaagtgnnnnnnnnnnnnnnnnnnnnaatgttatatcttcctttctgcgttttgtttttttggcattcaggctctttaatgtctgaggatggggggaagaagtcaatggtgaggcttctctgggaaattctgcaggccttgtagttctctaagcccctctagcaacatgtggatatgggctttgatattcatggagtccttggtgaggctgttgctgagctctgtgaggagagagctcttacgatcaatgaacttgagagcttctgccagtgtcaactccaggaaaaaaccatatcccagggccacatagatgcgtgaagtatctgggaccactgtgtcaacgaagaagttacagcccaaatccacctgcatatataactccgagtgcttagcttcctggagtcgctcaatgacatttctcagttgaaggtatttggccagctgctcatataccttgtctcgatggtccagcacctttcgcaagtcccgctgcagcacgtcactgatgaaggtctcgtagcgcagcactttctcccccgtggcctccaccgcccgccgcttagggggcgtcgccatgatgggctcctcaggccgccagcaataagaacggttggtaggaaccgcggcttccgggtggcgcgggtgaatgacgtccc

SEQ ID NO: 120917 - DNA, 818 bp, Homo Sapiens
  misc_feature (49)..(49): n is a, c, g, or t
  misc_feature (97)..(143): n is a, c, g, or t
ggacaacggcgggacccctactgtacgtcgtcgagatatatgttgctcncccaaagaggccatttcagggtgtcgtttaaaaatgccccaagagaannnnnnnnnnnnnnnnnnnnnnnnnnnnnnnnnnnnnnnnnnnnnnntttcggcaaggccctggaagtttttttaaagccccttttaggcaaccattgggaatatggggcttttgatatttcatggagtcccttggtgagggctgttgctgagctctgtgaggagagaggtttttacgatcaatgaacttgagagcttttgccagtgtcaacttcaggaaaaaaaccatatcccagggccacatagatgcgtgaagtatctgggaccactgtgtcaacgaagaagttacagcccaaatccacctgcatatataactccgagtgcttagcttcctggagtcgctcaatgacatttctcagttgaaggtatttggccagctgctcatataccttgtctcgatggtccagcacctttcgcaagtcccgctgcagcacgtcactgatgaaggtctcgtagcgcagcactttctcccccgtggcctccaccgcccgccgcttagggggcgtcgccatgatgggctcctggggagtggggagggggaagaccatgttgaccgatccagtttggcctcacacacagttcatctctaccctctcaacgctgggaatcggcttgtccggctcaagctggaggttcagccttccgcccctcccaactcggggacccgaccacccagggacacccaagcgcggcctttacctcaggccgccagcaataagccc

SEQ ID NO: 120918 - DNA, 617 bp, Homo Sapiens
aaacttttcggatgttttataaatttgtccaatttagtcatccaagtgacaaagcaaagcaaccccgcgcttgatccagtgccgagtaggttggtctgtttttaacaacattgcaatgacaaagttagtagaatgtcccgtagtggaaagagttcctttacgttcacttgtcttgtaggggggacagacataggcatccgactttataatccgagatttttgagttggttttatccatatgatgggcatcaggtcaaacagaagtttgggatattgttcagcaagcaatccactttctcggtcccagcgtgcgccatcgagatacagtccgtggatataaacaccatcttctggtgatgtgtcagatgtatcagatgggataacctcaaattcatatcctagcaaatcaataggggtggtatattttctggcataattctgcatagctccagttaaaaaggcctgagtgaaaaagaaacctgacagccaaaacacacaaggttttcctgaattataccagtcttgttaaatctttccatttcttgtactaacacagtattcatgctttcttcatatctcacaggatacttccgtagtggcatttcaatgtcgaaatc

SEQ ID NO: 120919 - DNA, 897 bp, Homo Sapiens
  misc_feature (59)..(124): n is a, c, g, or t
  misc_feature (816)..(816): n is a, c, g, or t
gtgccaagctaaaattaccctcactaaagggaataagcttgcggccgcggctgtaggcnnnnnnnnnnnnnnnnnnnnnnnnnnnnnnnnnnnnnnnnnnnnnnnnnnnnnnnnnnnnnnnnnnaaacttttggatgttttataaatttgtccaatttagtcatccaactgacaaagcaaagcaaccccgcgcttgatccagtgccgagtaggttggtctgtttttaacaacattgcaatgacaaagttagtagaatgtcccgtagtggaaagagttcctttacgttcacttgtcttgtagaggggacagacataggcatccgactttataatccgagatttttgagttggttttatccatatgatgggcatcaggtcaaacagaagtttgggatattgttcagcaagcaatccactttctcggtcccagcgtgcgccatcgagatacagtccgtggatataaacaccatcttctggtgatgtgtcagatgtatcagatgggataacctcaaattcatatcctagcaaatcaataggggtggtatattttctggcataattctgcatagctccagttaaaaaggcctgagtgaaaaagaaacctgacagccaaaacacacaaggttttcctgaattataccagtcctgtaaaaagttcaaccgggctaggaaatctgtgatgtaacttcccaggggcttaaggcttgggtatgaacgtttggcccatatttctggaacctttccaacaagtaagctactggagagtgcctccaatgcagaatccatcacaaccacacccttattagctttttcaanggtccgtagagtgttacgtatagttataattaaattggttaatctttccatttcttgtactacacagtatcatgcttcttc

SEQ ID NO: 120920 - DNA, 1067 bp, Homo Sapiens
  misc_feature (348)..(367): n is a, c, g, or t
  misc_feature (408)..(819): n is a, c, g, or t
  misc_feature (862)..(862): n is a, c, g, or t
  misc_feature (1018)..(1018): n is a, c, g, or t
aaaagccatgatcattttttccatttttatttgatgtttccaaatataaaaaagtcaggattcttacatcaattatctcaaatgagaccatgcaaagcaattcagtgtatacaacaatcatttttccccttcagttctgctgctttatacaacagtgtgattgacagaaaattggatggcatgtgcctggtcagaaaatgtcatctgtttacaaaataacatcatgcagcacagtttctactttgtctgcaagtcaattcacaaaaactacttattttctgttttttatttgggaggcacatggaactgaaaaatttagctgcccaattttattcaactaccccaccnnnnnnnnnnnnnnnnnnnngcctacagccgcggccgctccaacatcagaatggtaacttnnnnnnnnnnnnnnnnnnnnnnnnnnnnnnnnnnnnnnnnnnnnnnnnnnnnnnnnnnnnnnnnnnnnnnnnnnnnnnnnnnnnnnnnnnnnnnnnnnnnnnnnnnnnnnnnnnnnnnnnnnnnnnnnnnnnnnnnnnnnnnnnnnnnnnnnnnnnnnnnnnnnnnnnnnnnnnnnnnnnnnnnnnnnnnnnnnnnnnnnnnnnnnnnnnnnnnnnnnnnnnnnnnnnnnnnnnnnnnnnnnnnnnnnnnnnnnnnnnnnnnnnnnnnnnnnnnnnnnnnnnnnnnnnnnnnnnnnnnnnnnnnnnnnnnnnnnnnnnnnnnnnnnnnnnnnnnnnnnnnnnnnnnnnnnnnnnnnnnnnnnnnnnnnnnnnnnnnnnnnnnnnnnnnnnnnnnnnnnnnnnnnnnnnnnnntagggcaggatcgttaaagggccggttgctggcgttttcatangctccgccccctgacgacatcacaaaatcgagctcagtcagggtggcaaaccgacaggctataagatccatgcgtttcccctggaaagtcctccggcgctctctggttcgaccctgcggttacgggtactgttcgcttcctccttcggaaacgtgngcttccaaaatcaccctgtgggacccattcgggtagtcttccgccaccg

SEQ ID NO: 120921 - DNA, 2793 bp, Homo Sapiens
  misc_feature (1759)..(1768): n is a, c, g, or t
  misc_feature (1808)..(1822): n is a, c, g, or t
  misc_feature (2083)..(2083): n is a, c, g, or t
  misc_feature (2249)..(2270): n is a, c, g, or t
  misc_feature (2350)..(2359): n is a, c, g, or t
  misc_feature (2640)..(2650): n is a, c, g, or t
tgtggtgagtcggccgaggagttgcgtgaggggtttgtactatcctcggtgctgtggtgcagagctagttcctctccagctcagccgcgtaggttgaattgaccaaagcaatggtgatggagaagcctagtcccctgctggtcgggcgggaatttgtgagacagtattacacactgctgaaccaggccccagacatgctgcatagattttatggaaagaactcttcttatgtccatgggggattggattcaaatggaaagccagcagatgcagtctacggacagaaagaaatccacaggaaagtgatgtcacaaaacttcaccaactgccacaccaagattcgccatgttgatgctcatgccacgctaaatgatggtgtggtagtccaggtgatggggcttctctctaacaacaaccaggctttgaggagattcatgcaaacgtttgtccttgctcctgaggggtctgttgcaaataaattctatgttcacaatgatatcttcagataccaagatgaggtctttggtgggtttgtcactgagcctcaggaggagtctgaagaagaagtcagaggaacctgaagaaagacagcaaacacctgaggtggtacctgatgattctggaactttctatgatcaggcagttgtcagtaatgacatggaagaacatttagaggagcctgttgctgaaccagagcctgatcctgaaccagaaccagaacaagaacctgtatctgaaatccaagaggaaaagcctgagccagtattagaagaaactgcccctgaggatgctcagaagagttcttctccagcacctgcagacatagctcagacagtacaggaagacttgaggacattttcttgggcatctgtgaccagtaagaatcttccacccagtggagctgttccagttactgggataccacctcatgttgttaaagtaccagcttcacagccccgtccagagtctaagcctgaatctcagattccaccacaaagacctcagcgggatcaaagagtgcgagaacaacgaataaatattcctccccaaaggggacccagaccaatccgtgaggctggtgagcaaggtgacattgaaccccgaagaatggtgagacaccctgacagtcaccaactcttcattggcaacctgcctcatgaagtggacaaatcagagcttaaagatttctttcaaagttatggaaacgtggtggagttgcgcattaacagtggtgggaaattacccaattttggttttgttgtgtttgatgattctgagcctgttcagaaagtccttagcaacaggcccatcatgttcagaggtgaggtccgtctgaatgtcgaagagaagaagactcgagctgccagggaaggcgaccgacgagataatcgccttcggggacctggaggccctcgaggtgggctgggtggtggaatgagaggccctccccgtggaggcatggtgcagaaaccaggatttggagtgggaagggggcttgcgccacggcagtgaatcttcatggatcttcatgcagccatacaaaccctggttccaacagaatggtgaattttcgacagcctttggtatcttggagtatgaccccagtctgttataaactgcttaagtttgtataattttactttttttgtgtgttaatggtgtgtgctccctctccctctcttccctttcctgacctttagtctttcacttccaattttgtggaatgatattttaggaataacggacttttaaagaagcnnnnnnnnnngactgaatttccttgcttactttgcatatacagactggannnnnnnnnnnnnnnacagccatttccccaaaggaatgtcttgcatattactgacatttggtatgtttcattcattggaatatttcttattttctacgtgtttgaaaagcctgtaagaaatacaggatttgataatattttgaaggcaggaaaaacccaaattgtttcttctttgagagtcatgactaccttctggtgtggagaaattgccattggaaaatttgacaattttgattctcactggtatgtttaaaaactgaataaaaggaatagaantttttcttgataaaggatcacaaaacaattctaaaacctaactgtttttaccattgaaatttaaattgtgataataggttttaaatgtctagaatgcaactgataggcttttcttgaactgttagtttttttgaagtagttttttcatgtttaatttgtatttgtnnnnnnnnnnnnnnnnnnnnnnttcccaaaacccagataacaaccagagcaaaactgttgtgccttctatttatctttgatttcagtcttggcaattgtttnnnnnnnnnntctagatttgttttattaggttcagagtatgtggggaattatagaatccctctttcatcactttgtgtatgtcttttgttaacatatttgttatgccttattctaaaattgagtctcaaactggaatgcctttgaagacagatgcttctatagaggttctttgacctaaatagttcagcatttgtatttttattctggtatctaatcagattcctaatcatagcccgtaagaaggaatgttactttaatattggactttgctcatgtgctcgtgtccgcannnnnnnnnnncttaaaatcatagccatatggtaaattttctattttgttatggttctcttttattgatgggcatgcagtgggtgttacttggaaatggccaatttttattaaaatatttctggaagaaaatttaatctggcaggtatagacta

SEQ ID NO: 120922 - DNA, 917 bp, Homo Sapiens
tgtacggttggagctaatgtctgcaggttgcgggagaagaactcttctgagcatccctcagggggcagtttttttctaatactggcctcaggcttttcctcttggatttcagatacaggttcttgttctggttctggttcaggatcaggctctggttcagcaacaggctcctctaaatgttcttccatgtcattactgacaactgcctgatcatagaaagttccagaatcatcaggtaccacctcaggtgtttgctgtctttcttcaggttcctctacttcttcttcagactcctcctgaggctcagtgacaaacccaccaaagacctcatcttggtatctgaagatatcattgtgaacatagaatttatttgcaacagacccctcaggagcaaggacaaacgtttgcatgaatctcctcaaagcctggttgttgttagagagaagccccatcacctggactaccacaccatcatttagcgtggcatgagcatcaacatggcgaatcttggtgtggcagttggtgaagttttgtgacatcactttcctgtggatttctttctgtccgtagactgcatctgctggctttccatttgaatccaatcccccatggacataagaagagttctttccataaaatctatgcagcatgtctggggcctggttcagcagtgtgtaatactgtctcacaaattcccgcccgaccagcaggggactaggcttctccatcaccattgctttggtcaattcaacctggggggaaaagagtcaaatatgtccaaacctacgcggctgagctggagaggaactagctctgcaccacagcaccgaggatagtacaaacccctcacgcaactgcgtccggacgcgtgggcggacgcgtgggtcgacgatatcccgggaattccggaccggtcc

SEQ ID NO: 120923 - DNA, 507 bp, Homo Sapiens
agagagacactagatgaatttagtgttcaaaactcaataacctactttgaaagaaatctttaagctctgatttgtccacttcatgaggcaggttgccaatgaagagttggtgactgtcagggtgtctcaccattcttcggggttcaatgtcaccttgctcaccagcctcacggacttaaaaggagacaaaaacatcaatgaaagacaagagaaagaagacatctttcaatgactgctcacattcaatagttttccctctacactaaaaacaggtaattccatcaaccctacaatatttttattttaaagtatataaatatcaactgccctcccaaaataagctctcacctcaaaatcccccaaacgagaaatcgcccttctgagctcttacttgggtctgggtccccttttgggaggaatatttattcgttgttctcgcactctttgatcccgctgaggtctttttggtggaatctgagattcaggcttagactctggaccgggctg

SEQ ID NO: 120924 - DNA, 687 bp, Homo Sapiens
gaatgaatatcagcaactagtctttatttgcctcatctagtccttcagtaagggcacgccgctccatttagaatacaacctatgaacatggttcttgccttgaaataaacctgtgatttgacaggcgggtgataacaaatggcagcatggcaggggcacacctctcctggtccccccgctccttggctctggctcatagttacatagaaacacaggctgtcatggccagttcttacgtgttttcaagagaagctagacatatgggttgtgaagttgaatctccttttaaatatttttgactaatgcagaaacttttaaaacatgagtgtgggtcacaggtgttagctccagatagtgcaataccatacaactataatcaagaataaggaacaagctccaagatacatcaagtgaggaaagcaaggggaaggctggtgtcttataagctaataatttttgtgcaagcacagtgtgattccctcagaacagcacctgcagggttggggcgcacaggtgggagggaaggagatgtcaccctatacccttttgtaaactttggattttaaaccgtatgaatatattgcttattttaaaatgtaaataaagtagggagttgcagaattcaccttgctagatgttgtccagtgtgactgcctgattcacaatttcatcactggaaaattgccc

SEQ ID NO: 120925 - DNA, 601 bp, Homo Sapiens
  misc_feature (601)..(601): n is a, c, g, or t
attcggcacgagtgttttctcagtattaaatgtttataacaaccactttctaaccctcagagagcaacacagcaaatacttattaacagtgccataaagaaataaaagctagtcaaccaaaacttcccattaaataggaactgtaaactttgtatacagataaaacaaccacattttcacaaactgaaacttgaaaaattaagtaaattggtcattcactaaattggctgcttggcaaactaattttcaaagaattagcatgttcttggttggaaaagaaaaagaataagcaaagtcagaaagtaacaaaaaagatctctaaagctgggtgttgcccaaaagcagccgatggagccaaccagaggctggaacattacagacccgctttccccaccacccaagctggtgtatgccatgctcccacagcagaagctaaaaaagtacacttactatttctattaacgaatagactatctccttctaaactgtataacattatatgaaattggaagctaaaatgtttgtagtaattgtttctactatgttcttcttctgccttcattgttaagttttatgtttcattaatacctttttagagtcn

SEQ ID NO: 120926 - DNA, 815 bp, Homo Sapiens
  misc_feature (87)..(142): n is a, c, g, or t
ggaaaggtataaaacgtgatagatggaacagtagacatacaacttgaataacaagtcacagtgcatcgcgccatgaaaacacccctnnnnnnnnnnnnnnnnnnnnnnnnnnnnnnnnnnnnnnnnnnnnnnnnnnnnnnnngagccgtgatgcaaccttcttcagtgcaatacagttgtcaatcacaacaaaacgagggcatcccaagagaaaaggttttaaacctcctgctttttctagtatctgtcgagtttcttctgggaaaaactcatattctgcagagaacatcttgttactcatgtccaagggaccatgttcctccaaaaactgagagaagtaatcatatagagttgaacatttttgttttgggttcatgtcccatagcttcttattgcggacaacatattcgttactgtgttggtcatagagagcttcgaattcttctacatcttgccgaagatggtcaggcactgcaaatgggcctgcagaatctgaatttcgattgctatggtcttcacttgaagtgatgatctcattatttgaagttactgaagttgttccagacccaactaacataggctttgaatcctttggcttctttttcttgcttttgtttttcaccttggttgaactaaacggtgcttcaccactatcttgtttccttaacacagtacagcggctgtctgtaggaatatacagatggtttttgtgagaccactaaatatttacatttccatatagtacactaaagccttaagataactcctcatactactggcataggccatgttctattccttatttggcggccgca

SEQ ID NO: 120927 - DNA, 1225 bp, Homo Sapiens
  misc_feature (1120)..(1156): n is a, c, g, or t
ttttttcctgttgccattttttaatttctctttccaaatcttgaaggaaccaatctaattccgtctttgagatcttgttttcttctaagtgccttttcaacttctcttccaggtccctggtctcttctaagcccttaagttttatctgctcataattttcatacacttcttgaagttggtcttgtaatacttggtgctccttttcaatccgtgaaatttccccttgtcgttcctcaaaaggattatatggctcagtattgacttcttggtgtattatgttccaagatacctgtatggcaaccatctgcacgtgtggaatgtttgttactgcactggtgctttctggaattacttcacatttgttgttagaatttccacagtgctcatcatttctgttagactcactcaggactgtatgagcatcacctgtgctgcagtgtgactttacagatattcccaaagagccctcaaggatctgtgtttcagaggcaatctggtgaccagcaacattctcagcattcaaatgatgaccctcaaaataggcagcagcatttttatctgctctgtcattggctacaaaagacggcaccactggtactgatcttggtagctgatattcaggagaaaggctggccaagggtgtatatatgctggtgtactggggcaaacctggtaacacgtttatgtatgctggcggtgtctgggtgatatcaaatctctggaaaggaagatacgtacagtatcctgtgaccaaatgggattgagcccaataagttggtttcacatcctcaagaaccggtttgggggaattacaggagactcgcttgtaatttgcatcctcagagcctggtttaggagaattagaagagacccctttgggttgcccatcctcagaaacttgtctagaagaattgtcggatactggtttggccttcacatcttcacaagctggcttgggagaatttgcagacacaggtttgggtttcacattttcaaaagctggtgctgaagatgaatctgacactggtttagactttacatctggtttaaattccctagcagctggattcagttgtagtttaactcgtacatactcccctgcttttgaaatttcttctannnnnnnnnnnnnnnnnnnnnnnnnnnnnnnnnnnnngagccgtgatgcaaccttcttcagtgcaatacagttgtcaatcacaacaaaacgagggcatcccaagag

SEQ ID NO: 120928 - DNA, 1323 bp, Homo Sapiens
  misc_feature (760)..(806): n is a, c, g, or t
  misc_feature (1225)..(1225): n is a, c, g, or t
tggagcatctcttaaactgcttgattttagtatcatgactttcctctggaatgagaaatatggtcacaaactagactctatagaaggaaagcaacttgattatttctctgagccagcatcattgaaggaagcccgttgtttaatatggctgctagaagaacacagagacaagttcccagcattgcatagtgctttagatgaattctttgatataatggacagccgctgtactgtgttaaggaaacaagatagtggtgaagcaccgtttagttcaaccaaggtgaaaaacaaaagcaagaaaaagaagccaaaggattcaaagcctatgttagttgggtctggaacaacttcagtaacttcaaataatgagatcatcacttcaagtgaagaccatagcaatcgaaattcagattctgcaggcccatttgcagtgcctgaccatcttcggcaagatgtagaagaattcgaagctctctatgaccaacacagtaacgaatatgttgtccgcaataagaagctatgggacatgaacccaaaacaaaaatgttcaactctatatgattacttctctcagtttttggaggaacatggtcccttggacatgagtaacaagatgttctctgcagaatatgagtttttcccagaagaaactcgacagatactagaaaaagcaggaggtttaaaaccttttctcttgggatgccctcgttttgttgtgattgacaactgtattgcactgaagaaggttgcatcacggctnnnnnnnnnnnnnnnnnnnnnnnnnnnnnnnnnnnnnnnnnnnnnnntttcaaaagcaggggagtatgtacgagttaaactacaactgaatccagctgctagggaatttaaaccagatgtaaagtctaaaccagtgtcagattcatcttcagcaccagcttttgaaaatgtgaaacccaaacctgtgtctgcaaattctcccaagccagcttgtgaagatgtgaaggccaaaccagtatccgacaattcttctagacaagtttctgaggatgggcaacccaaaggggtctcttctaattctcctaaaccaggctctgaggatgcaaattacaagcgagtctcctgtaattccccccaaaccggtgtcttgaggatgtgaaaccaacttattgggctcaatcccatttggtcacaggatactgtacgtatcttccttttcagagatttgatatcccccagacaccgncagcatacataaacgtggttccaggttttgccccagtaccccagcatatatacacccctgggccagcctttcctcgtgagtatcccgctacccagaat

SEQ ID NO: 120929 - DNA, 985 bp, Homo Sapiens
  misc_feature (923)..(923): n is a, c, g, or t
  misc_feature (943)..(943): n is a, c, g, or t
  misc_feature (967)..(967): n is a, c, g, or t
ttgaagccaactacatgaacctacagagatcctacactgtggccattgctggctatgctctggcccagatgggcaggctgaaggggcctcttcttaacaaatttctgaccacagccaaagataagaaccgctgggaggaccctggtaagcagctctacaacgtggaggccacatcctatgccctcttggccctactgcagctaaaagactttgactttgtgcctcccgtcgtgcgttggctcaatgaacagagatactacggtggtggctatggctctacccaggccaccttcatggtgttccaagccttggctcaataccaaaaggacgcccctgaccaccaggaactgaaccttgatgtgtccctccaactgcccagccgcagctccaagatcacccaccgtatccactgggaatctgccagcctcctgcgatcagaagagaccaaggaaaatgagggtttcacagtcacagctgaaggaaaaggccaaggcaccttgtcggtggtgacaatgtaccatgctaaggccaaagatcaactcacctgtaataaattcgacctcaaggtcaccataaaaccagcaccggaaacagaaaagaggcctcaggatgccaagaacactatgatccttgagatctgtaccaggtaccggggagaccaggatgccactatgtctatattggacatatccatgatgactggctttgctccagacacagatgacctgaagcagctggccaatggtgttgacagatacatctccaagtatgagctggacaaagccttctccgataggaacaccctcatcatctacctgggacaaggtctcacactctgaggatgactgtctagctttcaaagttcaccaatactttaatgtaggagctttatccagcctgggggcagttcaaggtcttacggnctatttacaacctggggggnaagctgttacccggtttttacccntcccggaaaagggagggt

SEQ ID NO: 120930 - DNA, 1320 bp, Homo Sapiens
  misc_feature (19)..(19): n is a, c, g, or t
gcaggtgaaatgaggtganggcgcaggtgcatgccacatgaaggtgaggcaggtccatgctccttggctatgggggtgtgttcagttgcaggcgcacgccaggagaaccatgcggtgggaacaggtgaggtttcaagtaggatggagctgagctgcaggtgaggcggctggggatttcagcctctccctcttggcaaagaactccagacacgtgagatataactgaagctttatctggagtgggggaatgggggtgtggtcagttggggcacccaaagacaaccatgctctcggtgaaggcgccgaggtcctggcattgtttctggttctcttcgtcttggcattcgtcctcctcgggccagtgctccacccaagtgtccttcccgatgatgtagctgaggttgggcttctctccccagaaatcggaggagagaccccacatgaggtagtgtttcttctcctccagcttcagggcttctctgcacttgatggggctgatgaacgtgcgctgctgtccaacctgcacctcatccgagcctgacttgatggtctgctcaatggccatgatgtactcgtcaaagtcattggacagctgaaccttgaccagtcgggtcttgtacacatagtccactcctggctcacaggccttgtccagccgttcttccagggtgaccttgtcatccgacttttgtatgaagcaattctcctcagcacagcggcacagttcatcacggcagagcttgttcagctttccatcctccttttccggatggtagaaccgggtacagctttcctccaggttgtaataggcgtagaccttgactgctccaggctggataagctctacattaaagtattggtgaactttgaaagctagacagtcatcctcagagtgtgagaccttgtccaggtagatgatgagggtgttcctatcggagaaggctttgtccagctcatacttggagatgtatctgtcaacaccattggccagctgcttcaggtcatctgtgtctggagcaaagccagtcatcatggatatgtccaatatagacatagtggcatcctggtctccccggtacctggtacagatctcaaggatcatagtgttcttggcatcctgaggcctcttttctgtttccggtgctggttttatggtgaccttgaggtcgaatttattacaggtgagttgatctttggccttagcatggtacattgtcaccaccgacaaggtgccttggccttttccttcagctgtgactgtgaaaccctccccggccgtaatggccgaattcccgggcatatgtccggtaccgtcgactg

SEQ ID NO: 120931 - DNA, 820 bp, Homo Sapiens
ccatgatgtaattcgtcaaagtcattggaacagctgaaccttgagcactcgggtcttggtacacatagtccactcctggctcacaggccttgttcaaccgttctcccaagggtggaccttgtcatccgacttttgtatgaagccattctcctcagcacagcggcacaagttcatcacggcagagcttgttcagctttccatcctcctgtgttccggatggtagaaccgggtacagctttcctccaggttgtaataggcgtagaccttgactgctccaggctggataagctctaccattaaagtattggtgaactttgaaagctagacagtcatcctcagagtgtgagaccttgtccaggtagatgatgagggtgttcctatcggagaaggctttgtccagctcatacttggagatgtatctgtcaacaccattggccagctgcttcaggtcatctgtgtctggagcaaagccagtcatcatggatatgtccaatatagacatagtggcatcctggtctccccggtacctggtacagatctcaaggatcatagtgttcttggcatcctgaggcctcttttctgtttccggtgctggttttatggtgaccttgaggtcgaatttattacaggtgagttgatctttggccttagcatggtacattgtcaccaccgacaaggtgccttggccttttccttcagctgtgactgtgaaaccctcattttccttggtctcttctgatcgcaggaggctggcagattcccagtggatacccggccgtaatggccgaattcccgggcatatgtccggtaccgtcgactg

SEQ ID NO: 120932 - DNA, 1085 bp, Homo Sapiens
  misc_feature (41)..(75): n is a, c, g, or t
tatacgacgagcgcccggggtatgagcgaggaagcggacgnnnnnnnnnnnnnnnnnnnnnnnnnnnnnnnnnnncagtcgacggtaccggacatatgcccgggaattcggccattacggccggggctccaagatcacccaccgtatccactgggaatctgccagacctcctgcgatcagaagagaccaaggaaaatgagggtttcacagtcacagctgaaggaaaaggccaaggcaccttgtcggtggtgacaatgtaccatgctaaggccaaagatcaactcacgctgtaataaattcgaccatcaaggtcaccataaaaccagcaccggaaacagaaaagaggcctcaggatgccaagaacactatgatccttgagatctgtaccaggtaccggggagaccaggatgccactatgtctatattgggacatatccatgatgactggctttgctccagacaccagatgacctgaagcagctggccaatggtgttgacagatacatctccaagtatgagctggacaaagccttctccgataggaacacctcatcatctacctggacaaggtctcacatctgaggatgactgtctagcttttcaaaagttcaccaatactttaactgttagagcttatccagcctgtggagcaggtcaaggttctacgcctatttacaaacctggaggaacagcttgtacccggttctaacatccggaacaggcggatggaaagctgaacaaggctctgcccgtgatgacctggtgcccgcctgtgcttgaaggagaaatggcttcataccaacaagtccggatgaccaggtccccctgcgacgaccggctggccacggctgtgacgccagagtggcctatgtgttcaagaccccgaaccggcccagcgtccagctggccccacgagccttcgacgacatccctcatggcccacgcggccgagccacaacgtcagccccgccacacggccccgccgccaccaccgcccgctcaccgccccaccacagtgcgcacacaaccccggacccccgcgcacacaccaccccgagcagccccaccgcacgccgcggaaaccc

SEQ ID NO: 120933 - DNA, 973 bp, Homo Sapiens
tttttccaggttaaaaataattgagggtgtgttccttattggagggaaagggttttgttcccaggttcaatactttggaagatggtatctgtcaaaccccctttgcccagctgcttcagggtcattcggggtctggagcaaagcccagtcttcatgggatatgtcccaatatagacatagtggcatcctggtctcccccggtacctggtacagatctcaaggatcatagtgttcttggcatcctgaggcctcttttctgtttcccggtgctgtttttatggtgacctgagggtcgaatttattacaggtgagttgatctttggccttagcatggtacattgtcaccaccgacaaggtgccttggccttttccttcagctgtgactgtgaaaccctcattttccttggtctcttctgatcgcaggaggctggcagattcccagtggatacggtgggtgatcttggagctgcggctgggcagttggagggacacatcaaggttcagttcctggtggtcaggggcgtctttttggtattgagccaaggcttggaacaccatgaaggtggcctgggtagagccatagccaccacagtagtatctctgttcattgagccaacgcacgacgggaggcacaaagtcaaagtcttttagctgcagtagggccaagagggcataggatgtggcctccacgttgtagagctgcttaccagggtcctcccagcggttcttatctttggctgtggtcagaaatttgttaagaagaggccccttcagcctgcccatctgggccagagcatagccagcaatggccacagtgtaggatctctgtaggttcatgtagttggcttcaaggaagtctcctgctttagtgatgctgcctggcaggctgttgacctgctcctcgcaaatatctttagcctcctgcagcgagatgagaccaaaggccgtgagggccatggtctatctcgtagtt

SEQ ID NO: 120934 - DNA, 502 bp, Homo Sapiens
aaaaagaggcaattttattttaatacaaccaagaagaactaccttccaaactcaaaatacagtaattaaaaatgaaaaagcaacatagaaacagttcaggtaaagaaaaagaatgaagttaattctgcttttccagataataaaacaggctccctatagatacctaagtagatgccccggggtgggtaaaagtcacagtcagtgcctgaaaaggagcgagctagagaaaatacataagctgaagtccttcagcaaatatgcagacacgctcttgagcctctgagccacacagcttgattcagggactcgactcaccccagatatatctgcaacacggtggataggcacttccttcttgctatgcaatcctttgccattcttaatagctctggcctctgcagcaagcagttcatcgtagtgtgatgatctctggtcatcatcctgccggtatctgatcactgtggctagacctttgctgacaagagcctcagcaatgtttatt

SEQ ID NO: 120935 - DNA, 3548 bp, Homo Sapiens
acacaagctctattcatgtccaggatctcctgggcagacagcacgtactattttattgggcctcaaaagctttaaatacagaatgggctggccagagcgaagatgtgaacacactggcatttgagaatggacgtatcagaaaaatcacataatcaacagttggacagagagctgggacgagggcagtctgggatagaggcaggtgccagctggcggccagcctgggtgttaggattactccctccactaggacatagtctttgatgtttcttcctgatttgaggacgtttgttttgtaaaaaaagcccacaaacctccaaataaaaccaactggcagagactgtggatagcagtgcccatcatcccagaggacaagggtctgccccagaaagccttggggtccccaccccgcagccccgatgccaccccacgagacatttccacacactgaagcaaagctggacccaatctacaacccctctctggggtttggagttgaaaacaccctcccggcagaggaagagggactggcgtgagcggggctgggggccaaacccgatcccctccttagcggctgtagccaaattcgtctgcatcatcagctcgaaagtctccatagcgccacaggttcagcctggcgctcttggctgactcttgggcattcaggtattctgtgatcactttctggaactgtttctccttgcgcacctccaccatgaccagcccttccttcaccaagcccagccccacatcgcccttggaatctgcaaactgcagggtgacatgggggcagccggcactcaggtgttccacgttgagcaggcactgagtgttctggatatcccgaactacgctgtccacggcgtccgtgcgggcatcatcatcttggggcacctggatgaaggcgaaggcatactccgtggcttgagctggcagcacccgagtgctgaaggcaggtgatagggtacccaggcgggtggatggcaggacctctctgttgccgtagtcaatgtagaagacatgtattttggcaggagactcgactttctctactcgggcacggtaccattctccatctacaaatttggcaatgcagaactctcccctgcggggggcataggagccctctacaggggggtgactggcaatgtcattgcgcatgttctccatcagcttctccaactgggtgccggtctccacatcctgcacgtagaagtgcaggtcatcagtgatctcggtcacaaacacgggcttgtagctagcagatcgctccttctcctccagcactggcatcacctcctccacgggctgctcctcatagtgggcccagaccttctctttcttctgctttgcggcctcctcggcagacagcagggacttgtagtaggagctgcgttcggcggtgaagtggaccttggagagcgcgtgctccaccagcaggacggacaggttggcaccgtcgatgtgcagccagccgataaagttgccggccttgtccatgctctccacctccacctccacctctcgctgcagcaccagttccttggtgaaaagtgtagcttcctcgctgaagggctctccttcctgcaccaagcctgggaggtttcgggctcctctggggcattcaatgcctgcaagcaagaaggtgataaggcaagtttcctttggcaaatagagtttgagacgagaaccactgaagacgtattccaccacagcttcagaacgacctgcccgctgaagaaaaggcaggaactgctttgctttttgggtatccccagatatatctgcaacacggtggataggcacttccttcttgctatgcaatcctttgccattcttaatagctctggcctctgcagcaagcagttcatcgtagtgtgatgatctctggtcatcatcctgccggtatctgatcactgtggctagacctttgctgacaagagcctcagcaatgtttattcctccaatggtgacagtggcacaggtacgctctgaaaaggcaggcactgtctctgtggctgggctggctggtctaatgtagtccaccgtcacattgaccttcttcccattaagcttttttcgaagaaattcccgggcctcaaacatgtaaggaatgtcatacaggggacgcagtttcttgttcttatcctgggtgttctccccctccagcctcggtggtcggatgctggacaggtgaatcgtcttgtaatcgcctgagttcagcttcacaacaatggcatcagcattcagaacctgcatcaccttggcaacaaactgcttgtccttttggtccaaattagctgtgggagccacatagtctctccatattctcagcctgcgctctttggcaaacctctctgccgccctcagcttttctgcgccccgggtgtaaactgcaatcgaccagtccacacagcgtgcgaaaccttccttcaggaggagctctgtgatgttgccatttggatgaaggatggtacccagaatgttctggttgtggcagctctccagaatgatctgaacatctctctgaagcagtcgcgactcagtgaaaaatttggcttctgcagcaaaaggctctggagtttcactgccatctgcttcccgtcgaaaagttgggcacttgatgcctgacagcatgactgtaaccaggtagtaatctgggaggagcagggccctgaccacactgccgtcccgcacatgctcgatgatagcattaacaggcttctggtggtgtgagtccacaaagtgccttgggttttcaatggtatacttgagatcccggatagtatgtgaaccgttcccctcactccacatccctttcttggctgcctttgcttgttcttcacattctgaaagccggttctgctcaggattattagctctcatgccttctctccgggtggctaagccctctgcaaccagtgattctgcaatgttttccccattggtatcttttccaaggtagatcatgccatactctcgcccctggggagtcttgttttctatcgtgaaacagacttccttcccaatcagcttctttcgaaggaactctcgagctggaaatgcccagggctcatcaggggtatcctttgcatcaggttgtgtggcggctgcccggcgagcaagatttccagcacgaatgttgctgaggttgatctgccgctcaggaggaggcccaccacgaggctgacctcggacaatgatggcgcaccctgagaggaccatcttgatgatgccccgctgcacggtggggaccgcgggtcccccggaggagccgccgctctgcgcggaggacgccatgtgtggagatgcaaaggcaacgagtggagcggctggccggactggaggtgtcaatgtgggtgtcggtgttggtgaaagggagtcgaggcgaggggcaggctggctaccagctgcggacggtggacgggacggactcgccgggcgctcacaggagcagcagcggcggcacgcgtgggtcgacgatatcccgggaattccggaccgtaccagcctgctttttttaccactgggttctatattcaccatgc

SEQ ID NO: 120936 - DNA, 633 bp, Homo Sapiens
attcatttgcatgagataaattatttttctaaattatttttagtacagttttgctatataccagagcttctgatatatatataccatttttattgtttttgagatattttacaattttagttttgactttggctttggagtgggttgctgagaacatagcagttgtttcactaatcccagtaaaaacctactaggctattgttttcttctactcttcaatgcagttagttaacatatttgacttctgaatctatcttcataatttccagttctttcaggcatcaaggttaacactcataggagctgccatgatcctctggagccagggctgaggatttctgaggtgaggtccaattagctggcatggccacactgggtctcaaccctttttctgtagggtgtctgaagcttggcagtcatctgtgaactcaagcagagctgctctgaagagatgggctggagtctagaggaaaatctggcccaggggctccccagagacacccagaaacctcaaagatttatcggtattggaatatgaaaatactcctgacaccagcggcaaaaaagccttggaagaccacttccaccggacgcgtgggtcgacgatatcccgggaattccggaccggtacca

SEQ ID NO: 120937 - DNA, 1220 bp, Homo Sapiens
cgcagatctgccattagtatttattctttgaagatactttggagattcattttcttgagtggcactgccatgctcattcagtgaaaacttgtggggtatagaaatggaatggagagtttcaaacagctttgctgaaactgtactttgggctccagacttcactgtccttaggcattgaaaccatcacctggtttgcattcttcatgactgaggttaacttaaaacaaaaatggtaggaaagctttcctatgcttcgggtaagagacaaatttgcttttgtagaattggtggctgagaaaggcagacagggcctgattaaagaagacatttgtcaccactagccaccaagttaagttgtggaacccaaaggtgacggccatggaaacgtagatcatcagctctgctaagtagttaggggaagaaacatattcaaaccagtctccaaatgggatcctgtggttacagtgaatgaccactcctgctttatttttcctgagattgccgagaataacatggcacttatactgatgggcagatgaccagatgaacatcatcatcccaagaatatggaaccaccgtgcttgcatcaatagatttttccctgttatgtaggcattcctgccatccattggcacttggctcagcacagttaggccaacaaggacataatagacaagtccaaaacagtactgcacgacgtgaatcatgacattggagaagacactgacgtagaggcactcgaagagtcttcgtaagctgtgcagccacagaaatactagcactaagaatgcagacagtgccagctcccctccctggaactgtgccgccccgagaattctgagcaaaccatgaagccagcttggaaaaggtgctcccaggaacagagattgagtaaggcaccaaagcaggaagccattccacagcactgagatgatataaaagtgggaaaaatatctcttggggacatcaaaggctcggcaggcggcggggcgcgacggctccccacacttggttttcccatagcggatcaggtcctggaagatcgcgcagcccgggagcaggccgggcggcaggagctgcagcagtagggtcagcaggaaggcggcggtcagcgtgagccacaccgcgcgcagcgggttcagcgccgagtgctcggcctccgcccagggagccatggcccgcgtgcccgccttccgcgctgctggcgcccccaccgcccg

SEQ ID NO: 120938 - DNA, 927 bp, Homo Sapiens
  misc_feature (447)..(456): n is a, c, g, or t
  misc_feature (588)..(849): n is a, c, g, or t
  misc_feature (851)..(869): n is a, c, g, or t
ttgacaattttacagtcatttactgtagtagagctaatacaaacaccaaattgtacataaataataaatggaagatagaataagtacaacagtaacaattcccagtcacctttatttaaagtatattaaataaattatctcaatatatacaaatagaacaatattacctacataaatagaaaatccccatatagaaaacctttttaaaaaattatatatacaatgtcaaccatagaagctttaagtaccttaaatcataaactctgtagtttgtatagtagtcttataaaaatatagttagctctcaaatgtttaatgccacttaagtcagttaaagtgcagattgtaaagcatattaggaaggtgcccagaataccaatgtctcctgcacttaacacattaatacaaagtttgccaattgttttgaatttccaaatgtattcctgnnnnnnnnnngaacctaaacactatattatagacatatgttagaaaagtcctagaaatgcacccaatttccttccattttactttcctacatggattgaagtcagcccctcaaaagcttttcggctgggcatggtggttcannnnnnnnnnnnnnnnnnnnnnnnnnnnnnnnnnnnnnnnnnnnnnnnnnnnnnnnnnnnnnnnnnnnnnnnnnnnnnnnnnnnnnnnnnnnnnnnnnnnnnnnnnnnnnnnnnnnnnnnnnnnnnnnnnnnnnnnnnnnnnnnnnnnnnnnnnnnnnnnnnnnnnnnnnnnnnnnnnnnnnnnnnnnnnnnnnnnnnnnnnnnnnnnnnnnnnnnnnnnnnnnnnnnnnnnnnnnnnnnnnnnnnnnnnnnnnnnnnnnnncnnnnnnnnnnnnnnnnnnntggccttatcgccctcgtgccgaattcggcgcgccgtcgacttcatactctctcccca

SEQ ID NO: 120939 - DNA, 1077 bp, Homo Sapiens
  misc_feature (135)..(158): n is a, c, g, or t
  misc_feature (181)..(223): n is a, c, g, or t
gtgggggagcccaacccttttccttgcccggattttcttggaaaaaagttaggccctggtccccttccctatggggcccggggcccaaagaaaggttttggaaagtttttgaggggcgaggcgggccaccagggnnnnnnnnnnnnnnnnnnnnnnnnaaaaggttgggggcgctggttgnnnnnnnnnnnnnnnnnnnnnnnnnnnnnnnnnnnnnnnnnnnacctctgaaatagctttttattaaacggcaaagcagaactgcaacacaatttaaatgtctgtaaattaggtcacaaaagggatgcaaaatgtttgcagtttgactattatatattcacacagctaaagtcattcatcaactcttacaccaatacataagattattccatgattaaaagcccaaatctaataaccttaagctacattagtggatctcttttcatattataagattttagcaatacttccaatattgatttccttaccaaatggaatctagaagctaaatttttaaaaattgttaaaggatgactaaaactcttcaaacccagtagcagggtttacagaaaattctagaacaagtgagataaaatactgagcaagataataagtatacatgtataactttcccattttattcactattctaatactaatacaccattacggaattttgcagaagttgacccactgggtacaaatcaacttagagaccaaactctttgtaactgttctcatccagatgtggctaacataagggtagtcaaacttaatccactttcatatatatttcccaaaagatctactctgtgccagagaaaacacaaatctggagtgaaaatatttggttactactgtttaccgagtacttttccaccctatttccatttttcctcaaaattttctattttaacatacacatgaccagaaattatatattttcagataatacaaatgagttattttgggcaaaagaagttttaacaacaatcgacgcttggcgacgcgtgggtcgacgatatcccgggattccggccgtacagccctgcttgtgaaagctggtaaatgttacca

SEQ ID NO: 120940 - DNA, 539 bp, Homo Sapiens
tttttagcaatacaaaagataaatatttattcagaacaaaacttttaacaatcaattttacattctaagccacaaggaaatagcaaaacatatagcaaaggaaaagcaaacactaaaagaaaagcagtgtactgtcttttctactggataacacttagttggcccatgacctctcgcttggcctatctcccaagtacattttagagttaacagctcactcataattttgggttaaaatccatctttctcctgagaatcaggagttgcacatgagctccagctagctgcttctctagggttcgtagctattgaggctaaggtgcaaatgtaaacctttggtaggtttctttacacaggggcacccccatttctcactggtggcaatgaatggggaaggggtagggcctccaaaggacctggcacactgtaatccagaagtggtgccccagggagcaacgaatgcaccctggagtgtggtccttggtccgttccgtatctcccaagtattcagaagcccctccttaaaaacctcctcgagc

SEQ ID NO: 120941 - DNA, 1360 bp, Homo Sapiens
  misc_feature (42)..(61): n is a, c, g, or t
  misc_feature (643)..(674): n is a, c, g, or t
  misc_feature (1282)..(1282): n is a, c, g, or t
ccctcaactaaagggaataagcttgcggccgcctgctcaggnnnnnnnnnnnnnnnnnnnncaatgtgccaaatgttttatttctctcatatgcaagtaattacctctcaaagcatttttaaaaaacgcattattacactttaccaatgaattatttctgtccctggagattaaatcaaatcaaaatgttacaaatagtatcagtatgatataatttcttaaatatatgggacattgtcaacagctgtgattcatatgaaaaatataatcagatatctcaaattcctaattctgttttaaaaacacaaaacactagaacagttgctatgaaattactgataatgatccctttaataaactgcaattaaccactaatatagaaattcaatttaagcaagaagttttatatattatactttacagaaaaaaataattttgaaaaagtaatgacaaacagagatcaaacatttagggcattagttactgcattctctttttagaatatacattaagtaacactagtaaaatttaaagttttatgaccaggccttaaaaaacatgaatgatgatgacagaaccactatcacacataaacaaaaatagagcaaaccaagcgtgtccacatctccatgaattcagtgannnnnnnnnnnnnnnnnnnnnnnnnnnnnnnngagcaaatctaaaggttcaaccaaaaaacttacatatttttgagtattttttaaagttttaatagtttatctctgatcaaggatggagaaaggacaaactattaaaactttaaaaaatactcataaatatgtaagttttttggttgaacctttagatttgctcataatgtttaacataacaacatttatttcaaatcactgaattcatggagatgtggacacgcttggtttgctctatttttgtttatgtgtgatagtggttctgtcatcatcattcatgttttttaaggcctggtcataaaactttaaattttactagtgttacttaatgtatattctaaaaagagaatgcagtaactaatgccctaaatgtttgatctctgtttgtcattactttttcaaaattatttttttctgtaaagtataatatataaaacttcttgcttaaattgaatttctatattagtggttaattgcagtttattaaagggatcattatcagtaatttcatagcaactgttctagtgttttgtgtttttaaaacagaattaggaatttgagatatctgattatatttttcatatgaatcacagctgttgacaatgtcncatatatttaagaaattatatcatactgatactatttgtaacattttgatttgatttaatcctcgtgccgaattcttg

SEQ ID NO: 120942 - DNA, 932 bp, Homo Sapiens
cagtcgacggtaccggacatatgcccgggaattcggccattacggccgggcattcataaaaatttggaagtatttacatcctctttcaagatgagcttatatgacacaattattatttgctgatacatgaaaatactgcactttaagtttctcaagactctgaaatatgtaaaattcaatatttttatattcccagaaattgtttcttacaggttgaaagtcttttaagggcatcacaaattaacatttactcctaatgcacgcctagaatgtattttaaatacttactaagaagaatgaaaattctttggttgttttatatataaataaggcatatataatgacactgtgttctgtgagggagcaggccctgtgagaatcaattcaggacagtatttttttttgtcctttctccatccttgatcagagataaactattaaaactttaaaaaatactcaaaaatatgtaagttttttggttgaacctttagatttgctcatgatgtttaacataacaacatttatttcaaatcactgaattcatggagatgtggacacgcttggtttgctctatttttgtttatgtgtgatagtggttctgtcatcatcattcatgttttttaaggcctggtcataaaactttaaattttactagtgttacttaatgtatattctaaaaagagaatgcagtaactaatggcctaaatgtttgatctctgtttgtcattactttttcaaaattattttttcctgtaaagtataatatataaaacttctgtgcttaaattggaatttctatattaagggctaatgtgcagctaattaaagggatcacttatcagtaatttcattagcaacttgttctaagtgttgtgtggttttaaaaccagaaattacgcagtttgagaatatctgatatattttcatcatga

SEQ ID NO: 120943 - DNA, 526 bp, Homo Sapiens
  misc_feature (477)..(485): n is a, c, g, or t
catgaaatctctgtttttccccctaataaagcatattttactttggtgcttatttttcctccttgcagtctaataaaaaaatctggacaatcaaaccttaaaatagctacactctgccctctgtaatgtagcattcataaaaatttggaagtatttacatcctctttcaagatgagcttatatgacacaattattatttgctgatacatgaaaatactgcactttaagtttctcaagactctgaaatatgtaaaattcaatatttttatattcccagaaattgtttcttacaggttgaaagtcttttaagggcatcacaaattaacatttactcctaatgcacgcctagaatgtattttaaatacttactaagaagaatgaaaattctttggttgttttatatataaataaggcatatataatgacactgtgttctgtgagggagcaggccctgtgagaatcaattcaggacagtannnnnnnnngtcctttctccatccttgatcagagataaactattaaaact

SEQ ID NO: 120944 - DNA, 1902 bp, Homo Sapiens
  misc_feature (113)..(141): n is a, c, g, or t
tttttacaatttctgagctgcactgtttattttgctgcttgaaacctaagtgacagtatgccactataattatggggtttcgtctaaacctttactacactgcaggtacagannnnnnnnnnnnnnnnnnnnnnnnnnnnncattttgcaaaatgcagcaaacattttaatttatacatgagaaaaggaagtgttcaaaagggtatgcatttcaagttattgcaggttatttgtgagagaatttctgcaggtaaaacatgtttaaatttaaccaacagtagcgtgtcagtgtatttaaaatcatgacaaaaatcttctctctggtcatgttgcccatgacaaattactatgatgttgtacgtttagggcaagatgtcaatacagcataaatcccatggtattttggttttcttctggagattaaagctgtttttcttgggataaatgcagcagcaaaacacaaaccagttgatcaaaaaagcacttctgccataactccaataattttcaggacacatcaaccgacagtagttttgccattcccagttcttttaaggattacatctctgcactgttgccttaaggacgtctgtaaaagcttgttctctgttaagccagtttactgactacagcctggttgagagaatttagttggttggtccatttatctagtgcagtatatcgtgcaccacccctcttctgatgatccagttcaaggagttggttgacttgatcaattcggccatgaatagtgttatccaatatgcactgcaccagcaagctctccacatcagctacatctatgtttaactccttagaaataaaaggaatatgtattcttgtgtaaggcttaattaattttataagcacttgtgttctgatgtttcgcaaaagctcttcaatgtgttctcttatgaaaggatcatccatgatgttgctgtgatttgtttttagaatcttttcaaattcagtgatgtcattattctgataggcacttactaaattcgtcattgctataatttctggatcatttttgtacggcttggcctcctgtgagtcaaatggatttattcccgatttcataagcatatttgctaagaccaaatattttaagcaagtggttcgtcttggacttccagattcatcataattcttgaaggcttcaaaataatcagtgtgtgccttttcaaattcaccttccctcaagtgcattttaccaccacattctctgataactcccataatcagtggatgagggatggcagacttgatgtgaagtgactgttcatagagtgctttaagttttttgttatttttctgtgctgtgtacatttgaatttccaaagcatatatttctaataactgtgtaccttttttcagatcatcttctccatcatcagtctggcacgactgatgtaactggcgtaaaattttttgaagctttccatattcctctcgttctaaatataattttccaagctttgtgtttgtcttaaaccacagtctatcattcttagcatctttcaaagcttccagtgttgtttcatagaattcctgcagtaaatccatctgacataaaaaatcagaattctgtttagaagtagagatataatcaagaatagaattaatggatttttcagaataatttcttgtgactgcactccgaatataggtcaatagctgcttatatctattcatcatttctggaaagtttgtcaacttgaagttaatcttaatcatttgtttcagtgctttaaatccccattctcctttttcaccttcaagttccaaaaccttttggaaactgcttaatgccgcttttgggtcatcttcttttaatgctttggaattatagtactgattttccaaatccacatttggctcggcctcgtgccgaattct

SEQ ID NO: 120945 - DNA, 1108 bp, Homo Sapiens
  misc_feature (277)..(277): n is a, c, g, or t
  misc_feature (280)..(280): n is a, c, g, or t
  misc_feature (483)..(517): n is a, c, g, or t
  misc_feature (586)..(596): n is a, c, g, or t
tttctcttactcttcacttttctttttattattcaaaagtcaaatgtttttaaatcatccatcctcaattttgatttaatgtaccgtcatttccccaagaaaagaaatttcagaatctctttggaatactaatttcatgtttctagatttaaccaaactgttgaagttttaaattccattctatttccctgaattctcaagacagttgctgatggtaaattttaatataaaatatttagtcaccaaatagtattgcttttggtatggccatagttgnganggtaagatttgctttgcttttgtcaataaaaactataccatctttcataaaactctaaacaaattaagaactgtgatgtagaaccaaaatttacacattggtaaaacaggtaccagcacaacgttaggttatattacatcaaaaaaagttttaatggtcccaaatatatatactcaacaactaagcatacactcaggggaggnnnnnnnnnnnnnnnnnnnnnnnnnnnnnnnnnnnttatgacacaaatgaccacatctagaattccactcaatctttaatcaagtagggagaagtccccacttnnnnnnnnnnntatctgcagtttgaagggcaaagggaacagttaaaaaagaggaaaactttatactcgcccctcccccacagaggttttccaaacctgttgtagcttgactaaaatgttcagaatgtatgattttaaaggcaggtctctttatacaaagaaactgctggcattcttgactagtgaagaattatggcagaaaggcccattcttctgagtctcaaacatggtccaagaaagcatattctgattgtagcaactgaccagtcaatccagagttccacttacaaaacccctgccctgttggctttttgtttccatttccttccctgagaaaagggcaatgtgtggtccaagctggagagctcaaaggcttaagtctttcccctaaatatatgatatcccctcctcctgctccattgaattggcacttgatgagcagaagtcaagtgtaagaggctgatctgtgtcagtcattcacaagagaccactgcgctttgttgtggattttgtatgggggaggg

SEQ ID NO: 120946 - DNA, 1413 bp, Homo Sapiens
  misc_feature (72)..(106): n is a, c, g, or t
  misc_feature (176)..(186): n is a, c, g, or t
  misc_feature (802)..(831): n is a, c, g, or t
atattacatcaaaaaaattttaatggtcccaaatatatatactcaacaactaagcatacactcaggggaggnnnnnnnnnnnnnnnnnnnnnnnnnnnnnnnnnnnttatgacacaaatgacccacatctagaattccactcaatctttaatcaagtagggagaagtccccacttnnnnnnnnnnntatctgcagtttgaagggcaaagggaacagttaaaaaagaggaaaactttatactcgcccctcccccacagaggttttccaaacctgttgtagcttgactaaaatgttcagaatgtatgattttaaaggcaggtctctttatacaaagaaactgctggcattcttgactagtgaagaattatggcagaaaggcccattcttctgagtctcaaacatggtccaagaaagcatattctgattgtagcaactgaccagtcaatccagagttccacttacaaaacccctgccctgttggctttttgtttccatttccttccctgagaaaagggcaatgtgtggtccaagctggagagctcaaaggcttaagtctttcccctaaatatatgatatcccctcctcctgctccattgaattggcacttgatgagcagaagtcaagtgtaagaggctgatctgtgtcagtcattcacaagagaccactgcgcttttttgtggattttgtatgggggaggggtggagaaccagtttttttcaacaggtactgatcctaggccgttgccattattatgaatcaaattttgctttctttgacaatggtaacgtatcttccttatctnnnnnnnnnnnnnnnnnnnnnnnnnnnnnnggataatctaccagacccacgaggcctccctttgtagtaatagctgccgtctgagatgtatttttaggtacggatccaggagagcctggagatcctggggatccaggtgatcccggagaaccaggcagatttgttgtagatgactggctggtgaggttagtcttcgttccactggacagggaaagcttgaaacttgggctctgccgtccagaaaggtttgttttcagaagcacttccttttcctcactttcttttaatttcttcctttccatgaatttacttattggatccataatatcatcatcatttttagttttgtcagatggagacactacagcttctccatcttccatgtcatcttcatctgtgttaaaccacatctcttcttcatcttctagtgttctggcatctcttcgatatctgtgattcctcaaaatggaacgcatactgtcaagtttgggattatcttgcctttctctttgttgttcaaatctcagttttaatcctttaaatgtctgtacataatctacatcttccagtgctttccagtaattttcaattacatgagcagttaatgatttt

SEQ ID NO: 120947 - DNA, 518 bp, Homo Sapiens
  misc_feature (496)..(497): n is a, c, g, or t
ctatcacatttattcctttgttatctgactgccacaattctaactcaggccttcattaactcttgttcaactgacctctctcatttcctgtgcctgtatgaatctagcctgcacagacagctgcaaaggacttctcccaagttaacgctctactcacacagccccttctccccagctcaaagtctgcagtagctgcccactgcatatgagaaatgtctgcacagcctggcccaggattcatcgcccttaatgatctggttccagtttacctcaactccagtcatttccctggaagcgccctaattcccagtaaaccctccatctctatcaaaactctagggccagctgggtgcagtgttctggtttggggctcagagtagtcagtatttggtttgagatgctgttaataataaaacatccatgttggacttgaggtggtttttaggaagtaagttggtgctggagtcatctaatgagcagtggctaaaagcatcannacggtaagcatgctcttactc

SEQ ID NO: 120948 - DNA, 352 bp, Homo Sapiens
aggcacccgaggaagtaagattcttgtttttaacagaaaatatcaggaagaaagcaaacgcagccccgagtgcccccaggaggtgcacagccatgtaaccggaggggccagaccttcaggcacgtgggacctcagcgtgtggagccacctgaacagaagatgaccatcatttaagggctttttacaaaatcactgttaacagacctccaggtgattctactgaaatgcacagtcatgcagagcccaggaggcaaatgtttgtacactgatctttttcatgaggatgggtccaagggcctgtaatcccgtccaacaggtatggtccttttgagctcttggcacactttgttta

SEQ ID NO: 120949 - DNA, 1137 bp, Homo Sapiens
  misc_feature (321)..(321): n is a, c, g, or t
  misc_feature (358)..(358): n is a, c, g, or t
  misc_feature (396)..(404): n is a, c, g, or t
  misc_feature (422)..(422): n is a, c, g, or t
  misc_feature (438)..(438): n is a, c, g, or t
  misc_feature (440)..(440): n is a, c, g, or t
  misc_feature (447)..(447): n is a, c, g, or t
  misc_feature (450)..(450): n is a, c, g, or t
  misc_feature (452)..(454): n is a, c, g, or t
  misc_feature (456)..(456): n is a, c, g, or t
  misc_feature (460)..(460): n is a, c, g, or t
  misc_feature (1028)..(1062): n is a, c, g, or t
tttatggggtacaaaacgggccgaggtgcccctaaaaaagttgtttgtcaaaaatagctttttgtggtcgccccccattctcgggagaagggtttcacccgactttgtaattattacctggccaaattgtcggcggccggggggtgtcttctgtttttcaacttgcccagatattccctccgccagggtcccaaggggggctaatacctcggccggttcaaggtttttacagacccgttgtgacccccttgccattttgttaaaaggctttaagcaaaccccaacgctcccgcccaggttttcccagggagcggcttattncaatatccagctcccctggggttcccggggattcaancccagtagtgtcttcaaggtttcccttgggctttgttnnnnnnnnnaccggtttccccccgggngtttttttatggttgngntttccanccntnnncngggncttttgatgggtattgcttagttgggcaatatctgaatacagaccagaagaacatctcccattaagcgttatgttaaatattacaaaacttatacagaagatagactcatagaggctataaagctgatgtcttaagtaactcacccatgaaatgggtgcaggttttttaaaggctatccaataatctttttactctataaataaatgcccctacttttcagtgttcccattcttcaacaggagactcgagcagcttaacagttttgctataaaaacaaaccattcttcttaacaaaccaagaatataaaaggaaacccaataaaggacgtacttttcacagttaacaataaataaaagtgcaataagtgttcaagtagggcatgtagtataaaaactacacatgagtatttagcataggtcatcttttaaaggctctccgagggtccctgccattacttattgtggtcatcactgtttgattactagctgttccttgtagttgtggatttataagtccccggccgtaatggccgaattcccgggcatatgtccggtaccgtcgactgnnnnnnnnnnnnnnnnnnnnnnnnnnnnnnnnnnncggccgcttcctcgctcactgacttcgctgcgctcgtcgttcgctaaggcgacgtagccccatatatcaacatct

SEQ ID NO: 120950 - DNA, 595 bp, Homo Sapiens
ttttaaagtgcaaaaagctctctgctgccctagagagaggatctttggacaggccgttcaatgcaaagtaaaagggggcagctgatggggctcaacaaagggcggtggagcgggagacaccatgctcccctccctccctccctccacacacacgcgcagaatacactcagccacacacacagaggcacgtgcacacccccttccatggctgcaggcagagggctggtgactggcttctaagcaggaccccctgactgccctgaaagttcagtgagccactggggctagacacaggcctgggctcagggggctccgctaaaccagaggcctggaggagcctggctgggaggcaggttggggcttggcccagtcctctgccgcctccagcttgggggagataggctgctccctctgaggacgtgcatcctgggaaagccttcttcaggcagaatgaagacacatggaaaagggcagtcagtgggaggcaaaagagagagggggaacaaggagatggtgcctgtctcagattccactttgggtagcaacgaaatgggtgtgtccctggggtagacagttccagctcctctgaagagct

SEQ ID NO: 120951 - DNA, 674 bp, Homo Sapiens
ttcatcacacacaggttactaaaacattttattcattcacttaaccatatttaccatgtcacatagcagatgcacctccaaaatgtttatggtagcaaagaaagctatggcatacattccttaatgattggtctaacctcccagctgttccatcaatgttacaaattttaaatctcaactttattcatgaggcactagaagatctttgaattgctgcctttgcattagcattacaatcctaattgtcctgacaaaaaggtaccatagaaggctgatagaatagagaacgtctactgtacatgtaaggaaaatacacagaatgaagaaaatccttcccctcctccaacacataatattcataatgttagctttcaagtgcgaagacttaactagaaatgggacattgtggtaaacattttaatatgcaaagaaggtcactatatacagaaaaaggcaaaactttttcattttttgaagcaatctaaaacactgcagcttgaaggctgtgggaacgaatttatatctttctctttgattccatggtgcttcatgacgtgctctttcagcgagtgcaatttatcatttaataaatgatcactattcaatgaaggggagttctgaagaaatgacactgtgaacttggagttcatcaagtttatcccacattctacgta

SEQ ID NO: 120952 - DNA, 1324 bp, Homo Sapiens
  misc_feature (762)..(780): n is a, c, g, or t
  misc_feature (816)..(1201): n is a, c, g, or t
  misc_feature (1229)..(1229): n is a, c, g, or t
agaaagtcttgctctgtcacccagaaaaataaaataaattttttaaaaaggtaaattacaagactgcaaaactttttaaaaaaaccttccccactagtttgtacctaataaatgctaacatttaaaagggggcacaaaaggcctgcagaaataagaactcacgttcttgaaagtactgcctagcatggtatcttcctcatcatcagaggtgctctatacatcttcagttgaaacgtgaaacagacatccatatgcaaaatattttcaagggttttgttggcttttacatgtttttctttagataactggtaatgatgcacattacaaaggagacttttctaaatctcaagtcctttgctaatttttctttggaacaacagcacattttcaatgccaaaccttctcctacaacatacaaaggggagatgccaaaactctgaattcttgtaacggatcctgcaactagttctatccagaagatggagacaatattccctggagttgactgaacatgtgagaaggcacagctcagaaggagaggaaggctgagggcagtgaaatgagaacctatgcatcacctggcctttttacatgttagtctatcctactatcccaggaattcacttctgctgtacttgagattcagggataataatgtgactcctcctcccacattctaagtaaatatgttaactagatgagcatttatgtacattttagaacaaagtctccagaaaggtataaagtttattaacatctttnnnnnnnnnnnnnnnnnnngcctacagccgcggccgccctcgtgccgaattcttnnnnnnnnnnnnnnnnnnnnnnnnnnnnnnnnnnnnnnnnnnnnnnnnnnnnnnnnnnnnnnnnnnnnnnnnnnnnnnnnnnnnnnnnnnnnnnnnnnnnnnnnnnnnnnnnnnnnnnnnnnnnnnnnnnnnnnnnnnnnnnnnnnnnnnnnnnnnnnnnnnnnnnnnnnnnnnnnnnnnnnnnnnnnnnnnnnnnnnnnnnnnnnnnnnnnnnnnnnnnnnnnnnnnnnnnnnnnnnnnnnnnnnnnnnnnnnnnnnnnnnnnnnnnnnnnnnnnnnnnnnnnnnnnnnnnnnnnnnnnnnnnnnnnnnnnnnnnnnnnnnnnnnnnnnnnnnnnnnnnnnnnnnnnnnnnnnnnnnnnnnnnnnnnnnnnnnnnnnnnnnnnnngacatgtgagcaaaggcagcaaaggcangaacgtaaaggcgcgtgcggcgttttcatagtccgcccctgacagacacaaatcagctaatcaagtgggaaccgcagacaaagatcagcgtcccc

SEQ ID NO: 120953 - DNA, 1311 bp, Homo Sapiens
gttttgcaaatgcattagaaagaatgcttttatcagaaataaaatgactgttcaggaaaagaagaaaatgcctttatgccattatccaggatggtaactcttctcctgtgcatacctgaaaatgtcagaggtgcatttttacattggcattttaatagattgtatgacaaattgtatgttacagggcaattcttggaaaagtcaaacaaaccacataatttatagtttccatttttactgaatttgtaattccaagaaaattgttggctaggaggagattggaaaactgaattcacatcagatcctaatgagaagaaatcaattttaactaagtgggtgaataggagttgtattatttaattagcatataatttgaaagagttcattagcttcacaacaggcacaatcaacacttaggtaaagtactttattgttgcaaaactttagaacattggtattgcaagttcttggcctccatgactgcgttattaaaacctgaaaatcttccttgcttcttctaaagatttctcatccatgggaggcttccttgggctgccaggctgtagaaacttcttcactgtgggcaggttgctgattctggttttcagggccttcagcagagggaagctggagataagactggagtcaagctcctcgacgtagtagagaagttccaccagatgaatgtcagcccggctcagcttgttgccaacaaggtagtcttgtccatggctctttaagactttttcaaaggcagggaagtagcgattttttattttctctttgatcaaggcaagcttggcatctttttcctcaggtggacatacgggcagaaggaggatcatttcacccaaatctgctataccttctatatacatatcaatcagggctctctcctttatgtctttcccatagaggttgtatttgctggcaatgtagttgagaatggctctggtctgcaccagcttcatcccatcaatctcaaccattggcacttgctggaacatcaaatatccatcatttcttaacttgtccaaatcttctgcagattttataaatttctcttcaaactctactccagctgcagccaggagccaccgggtggactccattctgccccgtatattggagtagtggagcttgggcttctctgccatggtagcagtctcctggaggtttctctaagctttgttaaatgctgtcacctttgtggctggacaaccgaattccaggtcctaatgtatttataagctctttgttcctctctatacctcgtgccgaattctacagcccaggcctcgtacctagcct

SEQ ID NO: 120954 - DNA, 467 bp, Homo Sapiens
tttaaggtttttttgtttaatagtagccatccactgtggaactagccaaccactgtggaaagaaatacttgccttaaatttcttttcttcgccgagcatcaggaagtaagtgcttatctcttaggatctgttagagttcttgtttctagtaaattttatttcagttttaaagtttaaagtggtttgacttcaaaaaaggttaagcactgtatgagagcctgcttacaacgcccgttgttgctatagcctcagtaaatcttcttataaagcttggtttgtatggctttctaagattttgtttctggttgaatgaatgaagttatgattcaagtttattttgtttcaggcctgtttaaagaagaaaacccgtatgctagatttgaaaacaactaaagcgctccagcacatcagtcccgacgcttcctgtgaggtgcacactccgcagcccagcccagccgggagaccac

SEQ ID NO: 120955 - DNA, 2655 bp, Homo Sapiens
ttttactaaacacacgcaggtagtaaaccgttttattggaaactggttaaaaattaaggcactccaagctttatggtttccttgaggttacagttttgtggctgctcttagtgtatttcagaaaaaagcagatggacgaagaccgaccttacagacgtgggtttctacactgagcgcaagggctgactacgctgtatttcacaaccgagccctagcgccagctcagcaccctacgctcaggaagcggattttgcacgcacactactgcattcatacagagttcactgaagtctattaccaagtgtcttttatgaataaacaatacaaagtccaattttgatggctgctataaaatacttaggaatctctgcaatactttactacaaatacaaatgcccaagaggtcagggaaatcagcctgaagaactgggtacaggttctattctttgtggaaatttcagcctaggaatgttattcccggtacagatgtacacagtcaaaaaggcttatcgagctgtttgacgagttcttgaagtgttctggatcagtgatctgcctgtgaactttagttcacgctgaagacagtcttctcagttttcatgactgtgaagtgtgaaaatggaacgcatccttgatcttaggtgctgctgacctactttcccaaagcaaaatgttttaaaattcaaggcaatctggaacggggactatttccaaacttccttaggcagcacttttcagtgacttccccgcacgctgctttccctgccacgaagcgcttggtctgcttactaaagccacgtatcctgattttacagaaacgtgggcaggtccagcagtgccactggagagctcccagagaagcccactcagaaggaagtgctcagaccaccctcgagccagagcggctggaagctggactggtcccatgaggcagaaggagcaccagcgcctgctgggtggtgtggggagagccctcagctgactctggacacacctgcttccggggcacgtggcccagagccgggcctgtggacgggcctttctttcttcttggggtggaccccgtccccacgatccctaaatggccaccccccagacagcccaacaggcagcgagaggcctgcaggcactgaggatgccaacagggctggagagagctgcagcgtcctgccccgtcctccccacaccgctggcacacgagcagtcaactggtgctgctgaggcaggccaaacaccacatttataattcaagcttccaagggaaaaagattctcatgttctagtaaagatacaaattttaaaaattgtccaaaaagggcctgaatttttatatgaaggttttctggtgaaatcttttaagcagggaggaaaatccaataaatttttttaaaaaggtttagctattccccaatgctatttaatacaattgaggttaggacgttaagtccttatcagactgtgtactggagccccgtgtcatcagcaaaagccgtgtgagtcaacaggtgtgaagactcaagatgcgcacacagacgctgtccgtggttttatggggaatgatgagggctggtcagttctcctcatgacaaaagtcaaaccgacttccctgtgttgcgtgtgaagcttgttagtggacagagagaaacgcagggttctgccctgggagaatgacagccacagcgctgggtgccgtcaggcggcttcgtgtgcagttagcgtttcacaaactgagaagagtataaaaaagcccaaaccccaaagatttcttatttcaagtgactaaatctagaaacagagatgaacagggaatagaaggtcaccagtctgcaagacgagaggactgtccttcaggggcagctctccggccgcctgtcctggaaggctggcaggttcactggccaaggtcaggagaccgcaatggccacgtggtctcccggctgggctgggctgcggagcgtgcacctcacaggaagcgtcgggactgatgtgctggagcgctttagttgttttcaaatctagcatacgggttttcttctttaaacaggccatatttttttctgatttcatcatgtcttgtcttcatctctgctctccgttcctcctgccgtatccgcctctcctcccgctcacgcatggccttctcctcactcctgtccggcttccggctcctcttcctcctgcagcagcagcagcagcagatggcaatgcccaggaggagggttcccccgactaccgacatggtgatgatcagcgcctcaaagttcacccaacaaactccccagcgtgcagagctcaatttacaaagggaagccggtggcaagacgcttgtaactgggtagtccagacaagccttgttagtgttgcaccaaagacaggagacgttcttcaggcactcttcacaggttttgtttgtgttctgagaacaagcagctccgggaggctcctgcgcggcggccaccgggatgagcagcaggagcagcgcggcgccaccgaggcgcaacctccagtacggcgtcggcccgcgggccactccgggcgccatggtcggccggtcgctctatcagtcagtggagcgttacaactccgactccagcacaagcggtcccccggccgtaatggccgaattcccgggcatatgtccggtaccgtcgactg

SEQ ID NO: 120956 - DNA, 1241 bp, Homo Sapiens
  misc_feature (117)..(117): n is a, c, g, or t
agcttgttctcttagggcacctacggatggtgctatctagtctgcggtgcggggcaagtcgcaagagaaaaggtatagtaatgggcgcgcagtgaatacggcgggtagtagccgggnacgttgtaggatggtaggatcggctggcgtgcggatggggatacgaaggtatagttttgtgcggtcggtccgtgtacgcaagtgagctccgtgcgctgtggaggattgatctatcggaaccggatggtccgttgatgatatatcggccttagggagagttggttggtttgcagcccggaaaggcgagccttaaagtttctgctgggttggatccgcattctgatcgcgagatcgcccatgcttgaccaggcgattagctccggaaaatggtttgttcccgcgccgcgtctatggcatttcataccgagttgcactgaagtgtttttaccaagtgtgttttatgaataacaatacaaagtccaattttgatggctgctataaaatacttaggaatctctgcaatactttactacaaatacaaatgcccaagaggtcagggaaatcagcctgaagaactgggtacaggttctattctttgtggaaatttcagcctaggaatgttattcccggtacagatgtacacagtcaaaaaggcttatcgagctgtttgacgagttcttgaagtgttctggatcagtgatctgcctgtgaactttagttcacgctgaagacagtcttctcagttttcatgactgtgaagtgtgaaaatggaacgcatccttgatcttaggtgctgctgacctactttcccaaagcaaaatgttttaaaattcaaggcaatctggaacggggactatttccaaacttccttaggcagcacttttcagtgacttctccgcacgctgctttccctgccacgaagcgcttggtctgcttactaaagccacgtatcctgattttacagaaacgtgggcaggtccagcagtgccactggagagctcccagagaagcccactcagaaggaagtgctcagaccaccctcgagccagagcggctggaagctggactggtcccatgaggcagaaggagcaccagcgcctgctgggtggtgtggggagagccctcagctgactctggacacacctgcttccggggcacgtggcccagagccgggcctgtggacgggcctttctttcttcttggggtggtggccgtccccgcgatcctatctctgggtaccgagc

SEQ ID NO: 120957 - DNA, 1116 bp, Homo Sapiens
  misc_feature (43)..(70): n is a, c, g, or t
  misc_feature (211)..(231): n is a, c, g, or t
  misc_feature (897)..(897): n is a, c, g, or t
  misc_feature (970)..(970): n is a, c, g, or t
  misc_feature (1047)..(1047): n is a, c, g, or t
  misc_feature (1092)..(1092): n is a, c, g, or t
ccctcaactaaagggaataagcttgcggccgcggctgtaggcnnnnnnnnnnnnnnnnnnnnnnnnnnnnaattgaacaaatatttattaagcacctactttgtgccagacattgtgctaggcaccctcactgtgtgctgttcccacagcacaatcatctgctcagaaattaaaaccaagaaaaggaacactgttgcaaccgtacaaactnnnnnnnnnnnnnnnnnnnnncagtagcgtggatgcaggcaactccgggccagaaaatgcacccaccagaagcttgttttccatctctcagaaagtttccactaaacagttgttttaaagcctctcgatgttgacagagaggaatgttgttctctctgtgccccccggggctggtgtctggtggacattcaaatactctgaatgctatttgataaaaggagcctgatggcttggtgtaaagaatatcaatatttggattacaaaatgcgtgttttttcagttcatatggttgcaacagcccttatgaaagatataaacatccctgccctgactgcataaatgttgaaggtagacctagttctggattcctgagtcagaatcttccagttgtccacaacctcacaaggccagagaagcgagaggagatttctattctgaaaaggagtgagtggacggcacaactggtttggaaacacgacaaactgcgcctgcatttacagaagcaatgcacacagaagaacgtcctagagctatctggtctcgcacacacgcttgggactcacgggcggggcctgggcctcggccagccctagttatcggtgcccagcttggagagcctcggcggaagtcatgcaggtcgtcaatcttccccgtccagcactcccggaggtcttcactccacttcangtgggctgtcggtattgctctctcatgtctgtctttaggacgcacttgtcttcaggttttgatgtcctctctngcgctctagctctcaagaatatcgcctctgacatgactgaggtagatcactttgttcggaatcttcactcgtccttntctcgacttgctcagtctcatctctctcagcgggtctctctcccngtgtccacgatgtctcagcacact

SEQ ID NO: 120958 - DNA, 397 bp, Homo Sapiens
  misc_feature (289)..(306): n is a, c, g, or t
caatgcaaatgtgatgtaatattcttattttctttggatcaaagctggactggaaattgtatcgtgtaattatttttgtgttcttaatgttatttggtactcaagttgtaaataacgtctactactgtttattccagtttctactacctcaggtgtcctatagatttttcttctaccaaagttcactttcacaatgaaattatatttgctgtgtgactatgattcctaagatttccagggcttaagggctaacttctattagcaccttactgtgtaagcaaatgttacnnnnnnnnnnnnnnnnnntctctgggttaagaaaatttggcttaaatgtatcctttgttattttaaatatattgagatattttaattaaaatttttaccccattgaacc

SEQ ID NO: 120959 - DNA, 834 bp, Homo Sapiens
tttttcacagtacaactcaacactttattccattgtgattggtatacatgtaagattgagacatcaagagactaaaaatcagtgcagaacttctctgaactaaagggccgtgaaaggcatgattggttttggcacacagagtggataaccatacattggctggaatgaggtggtcaggaaaataaaatgcacaaatctaacaccatgttgaaatcatgtctgagttctggagaaagttaaagtgtaaataattacaaagactgacatgcaactctttaccttacattattcatctacagactatttttctcccttagagatgaggagatggccttagtaatctgttcagagtagctgaaaagaccaatcaatacacattagaaagatctgcctgatttctatagcaattcattatagctgaagaaataatgctaaataatgtattttctctatatcatcctttaactaaattgaatcacatcacccaagtaattctgacttaacttttacttagttaaatataatttctcctgtcttttaatgtcaaaaagcagtttccgttagtttatccattggtgtatatcacaacagatgaggaaaacttatgtgatagtatctttccttttcaaaaataacattatgctaatgagaacatcaaagaagtaatactatgctgcaagtaatttaggttttcacatcatcaatcatatagggagtccaaagaagccagcctagcaggtaacatagcagagcagaatgcaatgtagaagaggcacacagagtctaagtgatttctccagacaaaagagaaggaaagacagaaagaagcaaaag

SEQ ID NO: 120960 - DNA, 763 bp, Homo Sapiens
  misc_feature (705)..(705): n is a, c, g, or t
tttgctttttaaaactgttttattaacttcacaatatataatgagcatctttccatgcaataggtaaaactctcctgctgacagaaacttacaaactgggtcaaaaacaacattcatttagaagctggtaataggagacccacaagaaataggtaacatcaaaacgtttacgacaaaggtacaccacaaatgtgtaagtttaggaagcaggggtctccctattaacttcagggaaaccatcaggattcagggcataaggcaaaactcatcgtgatggtcatggtgagggggatcagtgctgactgcccgcagactatgactcaactgcttttccctcagcttttccatcagctgtctcacctcctccccaatcctttccatattctcctctctcatccttgcctgtggctctccaagcctatgcattatgtcccatctatactgcaggatgggctgcctaacgcggaaccgcctacggtttcctctaggcacacagtattcactaacattcaaaggtagggccaagggctcccctttattagcaacttgctccttttcatctttttcatcattttcctggttgacattttccacgatgagattgtttaacgctcgttcctctttggactccattactcctgggcctatccttgcagtctcctcctcccgattctcgacgtgaggtgcgtcgccgcaacacttggncccgcaacctgctcccctccgcttcctactttcgggggccgtactggcccgcacgtcc

SEQ ID NO: 120961 - DNA, 802 bp, Homo Sapiens
ttttttgctttttaaaggtgctttattaacttcactataatgagcatctttccatgcaataggtaaaattcttctgctaacaaaaatcttacagactggttcaaaaacacaatattcaattagaagctggtaataggagacccacgtaaacaagtgacaggtaaaggtttacaacaagggcacatcatgaacatgtaaattcgaaagcaggggtctgtttccgtaataactttagggaaaccatcaggattcagggcataaggcaaaactcatcatgatggtcatggtgaggggggtcagtgctgactgcccgcagactatgactcaactgcttttccctcagcttttccatcagctgtctcacctcctccccaatcctttccatattctcttctctcatccttgcctgtggttctccaagcctatgcatcatatcccatctatactgcaggatgggctgcctaacgcggaaccgcctacgatttcctctaggcacacagtattcaccagcatccaaagggagggccaagggctcccctttattagcaacttgctccttttcttcattttcttggttggcattttccatgctgagactgtttactgctcgtttctctttggactccattactcctgggcctatccttgtagtctcctccttctcccgattctcgccacgaggtgcgccgccgggacacttggccccgcagacctgcagaagggctggtccgctttcccccgggccggatgccagcgcgccgagcgcagggcagcggggagctggtagcgagacacgagtccc

SEQ ID NO: 120962 - DNA, 765 bp, Homo Sapiens
gggggtcaaaaaacaaacattccatttagaagggtggtaatagggaggccccccaagaaaataggtaccatcaaaaacgtttgcggacaaagggtccaccaccaaagtgtaaagtttaggaagcaggggtctccctattaacttcagggaaaccatcaggattcagggcataaggcaaaaactcatggtgatggtcatggtgagggggatcagtgctgactgcccgcagactatgactcaactgcttttcccttcagcttttccatcagctgtctcacctcctccccaatccttgtccatattctcctctctcatccttgcctgtggctctccaagcctatgcattatgtcccatctatactgcaggatgggctgcctaacgcggaaccgcctacggtttcctctaggcacacagtattcactaacattcaaaggtagggccaagggctcccctttattagcaacttgctccttttcatctttttcatcattttcctggttgacattttccacgatgagattgtttaacgctcgttcctctttggactccattactcctgggcctatccttgcagtctcctcctcccgattctcgacgtgaggtgcgtcgccgcaacacttggccccgcaaacctgctccccctccgcttcctactttcggggccgtacctggcccgcacgtcctcagggacaccgggaacaggtaccactgccgagaagggagcgagcgacggcggttctgacgccacaacgaggtaagacccc

SEQ ID NO: 120963 - DNA, 871 bp, Homo Sapiens
ggggggccagggagccatctgtgcccttcttctcccgcaaatgccccaccatcttctctgcaagatcccatgttccagtccttttgcagcacccaactggaagacgaaaaagggtgcggtctcggggactgctaagcgctccggggtggaaggcacggaattggggtctcagactggggctttcctcatgttctgaccccgctcgccaccaccgtccctcgcactgacctgggccttatccttgcagtctcctcctcccgattctcgacgtgaggtgcgtcgccggcaacacttggccccgcaaacctgcagacgccgggtgggaagagtgggctgctgcagcggacgctagagaggtcctgccgccacccggccccttccccacgccgggcccgggccctcctagccgctctcgccacccccgcctcagccgcccagccccccaagctgaccaccattttctgcatcaagaagggcggagcaggggtgttggaaaagcttgcgctggtgacggaggcaggtgcttccgaaaggtcgtagcctcaggatcgccggctcccgcggggccgggcacccctccgctcacacaaggctcgcggtcccgcggcggggccccggggctgcatcgtggaccggctgcgtctccgcgctgctgcccggggatggggcatccgcaggccggggctgctcccccacaccaaccccagggaccccctccgggtcccttacctgctccccctccgcttcctactttcggggccgtacctggcccgcacgtcctcagggacaccgggaacaggtaccactgccgagaagggagcgagcgacggcggttctgacgccacaacgaggtaagactcagatcccggga

SEQ ID NO: 120964 - DNA, 1390 bp, Homo Sapiens
cctattatatcaaaatttgtagtcagaattgtctttattgactttattttagtttttgtacataaagaaaaatcatgttcatatccatcatgaacaaaaacttaaaaaggcagaactagaagacacgtgtccttcaccaaagcaaatctgtgctaaaggttccaaacatttcaatttttaaaataaatattttcattttccgatgtctactttcatgtcttcagagtgtcacaggaaatcgaagcctatcatgaattacaaattttttttagagtcccggctcactgtgtttggtaacttgccataccatatccggcttggttaggaggaggtattacagggggaggagcttgtccttggggaggctgagcaccaaatccacccatccaagcagcagaaggtgattgatctactccaaatccttgttgattccatggttgcccgtatactccataaggcggtacttgccacccatttgccatatactgtccatactgttgtgggtttccatacacttggctccattggccccattgactatagtcaacctgttggaagtttttagtcatatcaggagattctttaccccaatagcatttaaccacatgtccttcaatcgtagtaccgttcaccgaaacaatggcatgggctgcactttcatgggttgaaaatctgacaaatgaatagcccttttctgggaaaactcttatttccataatttgtccaaatggtgagaatgtctgtctcataagctgatctgttaacccagacgcaattcctccacagtacacagtacaattttttggacttgactggtttactacatcttcaaatctcaactgcttagtgttgttttcttgtgtacttttaggtgcaggtggtttacgagtggcccaattggttcggatttgacgaccacccaaccactgaccgcccatatgcacaatcgcattttctgcatccagtttgttataaaaagatacaaaaccatagcctttggattttccagttgccatgtctttaactacccgggcatccgatattttaccaaagggggcaaatgctgatttgatatcttctgttgtaatttctggactcaaatccccaacaaacacatggaagtgattggaagtatcttttttctggctacttggtgtggttgcccagtttactttgacctcctttcccaaaatttttctcccattcatagcagctaatgcagcagctgcatctctgtgttcataaaattccacaaagcaatatgggtcattgcttgtatgctctgttatcattttacagcttttacagggtccaatctgactgaacaactgaagtataaggacttctgtcacatctctggaaaggttacctacgtatagagtccggggct

SEQ ID NO: 120965 - DNA, 922 bp, Homo Sapiens
  misc_feature (839)..(852): n is a, c, g, or t
ttttttaaaaatatagatatatttatttgtcattagcaaaaggaagttaaatactgatagaagatgcaaatttgtcctttcatgcatttgtggagcaaagtactaacttgttcactgtcatttcccctcacaaggagttgagcccctagatgactcaggctaaccctaagaacctacctagccttcttagatattcccatcaaagaacaggtggagtgtactaagtatttctgaaaattctaaaccaaatcagcaaaaatggcctgactgtgggaagactgttcgttcaaactgccttattcccatcatcttgatttgacagcttcataataaccttcctggatatattccctgtggcacgcaagcaaacccggctttacgtttttaatagaggaatttattgttttaaatgcggactgtagaataggtgtagaagttgtttttcttttccaaaatgtatcaggctctaaaacgtctgaatatgtaattcatggacatcgtaaggctgacctatgctacaggtattctgtgccttattaaacaactgcagagggccaggcgcggtggctcgatcctttaactttttattttggaataatcagaatagcaggaagctgtaaataccctgagcacctgcgcccagcatcccccagggagggcgtctctcataacctcagagaagcactgagcccgggcagccgcgccacctacagatgcaccagacgtggccagctggactcgtgtgtgtgagtgcggggccgcgccactgaccgcaccacggattcctctcagcaccacagcaatcacgacctgaatgcttcactacagttctgtcatcnnnnnnnnnnnnnnggagatggtctcactatggctggtctcaaactcctaggcttaagagacccgctatagtgagaccatctcc

SEQ ID NO: 120966 - DNA, 1732 bp, Homo Sapiens
  misc_feature (362)..(394): n is a, c, g, or t
gcacgaggttttttgtgtttgcatcaaacaaaagagagttttattttaagctttgcatttccttaaaagtgaggactttgtcaaacatttttatccactctgagaaatgtacaatgattagaaaagtgcgtgtcataataattttcatatatatgtactccaaaacatcacaaacacacggctttgggataacttaaggagtataacctgaagattttcaaatttcataaattagcctttaatgaattgtacaaaatatttttataaaaaaagtttatgttttctgaacacatgagtatttaatcattacttccacctcgcaagactcacaggaaaataaaacagttcaaatataagaggannnnnnnnnnnnnnnnnnnnnnnnnnnnnnnnntctggttcacagcatctgaattacttctggactctctttctggttcttgaacgggtctgtatggcctcctctgtctgtgtgtttgaccattccgtatcttcaacaccaggttccttgctttcttcaatttctttctttcgcttctttgttattgtttttgctttcaaacctccattctccacaacactgaggtccaatttgccatcatccttacttcctatagcttttagtccttgcaaaagaatgtcacgtaaattttcataaagaggtttttcagtgtagtctagtaatttcactgtttccatgtatttggcaatttcacctggtttgtttttctcaggaaaacatttgtccatcaaacttgcaatattttctctgtatctaattttggaatctctaacatatttaggatctttcaaattatcctcccaaggaagatggccagtaagccattggatcatgcaataaccaagtatttccaaatcaccacgtcttgatggggccaccaccattgtgtgcatcgatgctcgtgaattcaatagtgccatcgtgacatcttttggggtcttctttgtattctttatgaactccttctgggcagtaccgataagcaaggccataatctaccaagtacacctggtcaggattcttgtagttcagaagaagatttgaggccttgatatctccatgcacatactcatgctcgtgaatatattccagaatatccagaattcttaagcttagctgcaagacagttttccgagaaaaccttttggcatttgcttcatatattttctgaaggtcactcccaaagcgatccattatcataaacctgtaactttttccatttttgtcatgtagaccagacccccaatacttaggaacacccaggtacttcagcttacgggtacgaatccatttctgaatttgctctggttttgcagctcgttggtagaactttaattcagtaaaaagaggtccattgtcactgggttccacttttacaacacaaggtgcatcactgccaactgactctgaagaattcatatcagcaagatatatacagccaaagcctccttggccaatgggtaatcctactttccattccttttttgccatgtcagttattatctctccaactgcaaattgttctgcaagatgtctctttgcagagctctgtcttccagcttgagctgcttttacacgaggcattttcacctaagccgcagacccgtcgcgttctgcccagtacgaacttcccgccgctttcgccgactcgtaactcggcagcggcgccggccccttcgcaccctgcagtatggagccttcccattgccc

SEQ ID NO: 120967 - DNA, 550 bp, Homo Sapiens
  misc_feature (23)..(23): n is a, c, g, or t
  misc_feature (49)..(49): n is a, c, g, or t
  misc_feature (60)..(60): n is a, c, g, or t
  misc_feature (169)..(230): n is a, c, g, or t
aggtttgaaagcaagacgaatancaaagcgaaagaaagaagttgaaganagcaaggaacntggtgttgaagatacggaatggtcaaacacacagacagaggaggccatacagacccgttcaagaaccagaaagagagtccagaagtaattcagatgctgtgaaccagannnnnnnnnnnnnnnnnnnnnnnnnnnnnnnnnnnnnnnnnnnnnnnnnnnnnnnnnnnnnnctgtgagtcttgcgaggtggaagtaatgattaaatactcatgtgttcagaaaacataaactttttttataaaaatattttgtacaattcattaaaggctaatttatgaaatttgaaaatcttcaggttatactccttaagttatcccaaagccgtgtgtttgtgatgttttggagtacatatatatgaaaattattatgacacgcacttttctaatcattgtacatttctcagagtggataaaaatgtttgacaaagtcctcacttttaaggaaatgcaaagcttaaaataaaactctcttttgtttgatgcaaacacaa

SEQ ID NO: 120968 - DNA, 1182 bp, Homo Sapiens
  misc_feature (1039)..(1073): n is a, c, g, or t
  misc_feature (1077)..(1119): n is a, c, g, or t
  misc_feature (1148)..(1148): n is a, c, g, or t
  misc_feature (1154)..(1155): n is a, c, g, or t
acaagtttcgtttccgtttggttgttgtgtttttgggtgtggaacctttaataaaagtaaaaaatgaatgcaaaaagaacacaatgttgaaaacttagtatgaatgtgaacctcactagatgttcaaatctggtagagtgcaaattttgttcatactattttacatttttacaaactcaaatcactttggttcatatattttctataaactattggcaaaaaaatcctcaaatttacattcttttggctacattatttctaacagatatagatttacttccggtttcggagagaaagacttattgtgtgtgcgtgatcaagtctgttttaaagattcactcgctgctttcatctaataacttctggtttttcataaaatgctgacatcttcattggaaatttttttcatgtaactgttttcattttcagaaaatatataagggggtcattccaaagttcagaatgatcctatttttttaaaaaacaaaattcctgtaaaacaaattaactccaggaacttaaaatttactccaagacatttccctcaaaacaaagcaaaaaaccccagcaaagatcgttacatcacaaaaccaaacacaaagaccagcgctcacaggcaagttcctctaagcttccattctgctgactggtggcttccatttaaaaggagtcttttaatcaagccactttcacagaatttaaaacaaaccaaacacatgtaaattgcaaaatacaaaaaggtaaatttataagtaaaaatgaccaaacccacaaaactggagtatttcgaaggttgagggttcagtggagggtgtaacacgaaaggaacttcacaactgaaagaaatcattgccgagtttcctccaggcagcactgaaatgaatggagaaccttctctcgaacatctcacacgttaaaaaaaataaatatttaagagatacaaggctcagattggttttcatatacattgcacttgaagtttaagacccccggccgtaatggccgaattcccgggcatatgtccggtaccgtcgactgnnnnnnnnnnnnnnnnnnnnnnnnnnnnnnnnnnncggnnnnnnnnnnnnnnnnnnnnnnnnnnnnnnnnnnnnnnnnnnnacagaaaacaggacgcctaagtcgccccnctaatnnaagtggaggtcgtgaatttcaagtctt

SEQ ID NO: 120969 - DNA, 744 bp, Homo Sapiens
  misc_feature (220)..(234): n is a, c, g, or t
  misc_feature (717)..(717): n is a, c, g, or t
  misc_feature (731)..(731): n is a, c, g, or t
aagaagccaaaaaattaattttattgagtaaagaagttcaattcagagcttacacagatcataagaatactttagattataacagctggaaagaccaatagctgactggaaagaagaaaggaagcagtttctattttcaatgtagaaaaaaaatctaatcgctacaaaggtcttgtaaaatcctcaaaacaaggtctagccaagtttattgtttggtaannnnnnnnnnnnnnnaaggggaaaaaaagcaagatttaatgtgaatactactggttacaactaatataacagcttgaaaaaatcatgacacagaagcataaatataatataaaaagacaattttaaaattgtattgtaggaatataactataataagtggaaaagatacattaaaaccatcagtgtgttacacttgttcaaaacagaactcataaggcatgtccagacagacaccacaaagaaatgtcaacagagactatgtggtcccctcttgttactagtaatgtgacaaaggtggagtgactgggttaacagcctaagctttctccaaggatttgtagtattctgtcagcacggtccaagccttgggagccatgaaaccttcaggtggtttctggccttctcgagcaagtttgcgcattcgtgttcctgaaataaattcaaagtcttcatggtgttcagagtcatagtagtccatacgcttctttttcttgttgntagctgcactcganagggactatttcc

SEQ ID NO: 120970 - DNA, 923 bp, Homo Sapiens
  misc_feature (691)..(705): n is a, c, g, or t
gcggccgagccaacttttacattgttggacgagaccctgctggcatgcctcatccagaaacagggaaggatctttatgagccaagtcatggtgccaaagtgctgacgatggcccctggtttaatcactttggaaatagttccctttcgagttgcagcttacaacaagaaaaagaagcgtatggactactatgactctgaacaccatgaagactttgaatttatttcaggaacacgaatgcgcaaacttgctcgagaaggccagaaaccacctgaaggtttcatggctcccaaggcttggaccgtgctgacagaatactacaaatccttggagaaagcttaggctgttaacccagtcactccacctttgacacattactagtaacaagaggggaccacatagtctctgttggcatttctttgtggtgtctgtctggacatgcttcctaaaaacagaccattttccttaacttgcatcagttttggtctgccttatgagttctgttttgaacaagtgtaacacactgatggttttaatgtatcttttccacttattatagttatattcctacaatacaattttaaaattgtctttttatattatatttatgcttctgtgtcatgattttttcaagctgttatattagttgtaaccagtagtattcacattaaatcttgctttttttccccttnnnnnnnnnnnnnnnttaccaaacaataaacttggctagaccttgttttgaggattttacaagacctttgtagcgattagattttttttctacattgaaaatagaaactgcttcctttcttctttccagtcagctattggtctttccagctgttataatctaaagtattcttatgatctgtgtaagctctgaatgaacttctttactcaataaaattaattttttggcttctt

SEQ ID NO: 120971 - DNA, 725 bp, Homo Sapiens
  misc_feature (131)..(148): n is a, c, g, or t
caaacttttcatccaagaagtgtctttatttccgtttgtttcccaaagatcaggttaggtaaaacaaattagttccatctcattatttgaagacagggaggtgtatgcagatggaggggaactgacctctnnnnnnnnnnnnnnnnnngcctgtgagggagctggggctatagagatggtaggctaaggggttaaacccttagagccaccagacaatgtcacttgaaaacacaaggtatgaaacataaataatagtcagctactttccttcaatccatttctaagcagttgtgtgatcgatcaatttataaatcgattggctaactaattcaccttctctgctgccgctgccaccgcctatggccggggtggggtcagcccagcttctggctggcagtaggggagggatcggtggcctctgtggtgggggagcagggtcactgcagctccttgagcagctggagcacgttggtcgtgtaggggttctgctgcccgctggccccgtgcagctgcacagggtggaggctggggtggggaggtgtgaactgcacggggcagtaaagctcgttcaggaggaaccaggtggagtctgggtccaccttcatcaagtggaggaagacgctcctggcagcctcttgttatttcacgggctgtttgacactgaggttaatcaagcaggcatcagccactttattcaggtcaccctcacctaggtccagtctctc

SEQ ID NO: 120972 - DNA, 1558 bp, Homo Sapiens
  misc_feature (90)..(91): n is a, c, g, or t
  misc_feature (105)..(629): n is a, c, g, or t
  misc_feature (662)..(683): n is a, c, g, or t
aatggtactacgctgacttggaagcccacctcccgaggagaagcgaccagtatcgtaagcgcaggtcgaacagagagcgcagaggagctnncaggggaacgcttnnnnnnnnnnnnnnnnnnnnnnnnnnnnnnnnnnnnnnnnnnnnnnnnnnnnnnnnnnnnnnnnnnnnnnnnnnnnnnnnnnnnnnnnnnnnnnnnnnnnnnnnnnnnnnnnnnnnnnnnnnnnnnnnnnnnnnnnnnnnnnnnnnnnnnnnnnnnnnnnnnnnnnnnnnnnnnnnnnnnnnnnnnnnnnnnnnnnnnnnnnnnnnnnnnnnnnnnnnnnnnnnnnnnnnnnnnnnnnnnnnnnnnnnnnnnnnnnnnnnnnnnnnnnnnnnnnnnnnnnnnnnnnnnnnnnnnnnnnnnnnnnnnnnnnnnnnnnnnnnnnnnnnnnnnnnnnnnnnnnnnnnnnnnnnnnnnnnnnnnnnnnnnnnnnnnnnnnnnnnnnnnnnnnnnnnnnnnnnnnnnnnnnnnnnnnnnnnnnnnnnnnnnnnnnnnnnnnnnnnnnnnnnnnnnnnnnnnnnnnnnnnnnnnnnnnnnnnnnnnnnnnnnnnnnnnnnnnnnnnnnnnnnnnnnnnnnnnnnnnnnnnnaagaattcggcacgagggccgcggctgtaggcnnnnnnnnnnnnnnnnnnnnnnacgagtcaacaaacttctatttttattgacaggagtccaaaatgaatacaaaaaaagcttcctttgcatgttatacttactttccttaaaaagctcctgatagagtcaagtagactgaaaactaaggatgtagttcagcttttagagtgaaccttttttaaaaaaggtttaataacataagccaccagtatcagaaaacatacagtcccactatcacttttagagctagaacttatcaaaagaattagatcctgcattgatctgctaagatagaggtttagaaatggtttaagccattaaaagccatttttataatctgtctgataactctgggcaattaagaaaaggaaaattccaaaacgtagccctctatatcatgtggaatgtgagagaatgccaacttatgaccaagataagtaaaaataaaagtttaaatctatgagtggagctgttgtatcactgcaaaatgtcaacaacagagcttatcaagagattatcaacttgagcgatgttacttaaacttgagcgatgttacttaaaacatatttgtggtgtttgctaaaactaaagctgaacaaagaaaagtcgctcatttacagactgtgtttcctgcatctttacttttactgggaccatagactgatcagataatacatagcccacacttctggacagttataataacaaaggatttattatcatttgcagatgaaataaatgtaccatcccctacttgaaaggtttcaataagccttaacatttttcaggttgtaccaaggcaccgccactgcctagttatattatgcacccatttctagagtacaaaaactacacctccctcaacatcagttctataccgtttgaggcttcccctc

SEQ ID NO: 120973 - DNA, 554 bp, Homo Sapiens
ggagctttttaaggaaagtaagtataacatgcaaaggaagctttttttgtattcattttggactcctgtcaataaaaatagaagtttgttgactcgttttatgtttcaatggtgtgtgtctttttactatcaggacataaatagggcaatccccttctttatttttcaactaaagattgaatagtattgtacattactgctaaagtgcctgctatttctgtatactgtagaaaaacccaggagtgagagggatttcccctcatagtacaactggaaggatagtgcttgtaaagagtaaagatgtgtacatgattaatcattgaggggagggtggatatttttattcctagatatggaggaaacataagtctgtagtattataaaactgattgtaataattttttcctatcaaaatttccataggtcaaaatattgttggaatactaaaatttgcaaccttgtttactttaaaaggttgcccctttcagtggagaatactaccggcatcttgttactgcaatagttggaaataaaatgtgaaaattagcaaaacc

SEQ ID NO: 120974 - DNA, 454 bp, Homo Sapiens
tctatggtcccagtaaaagtaaagatgcaggaaacaccgtctgtaaatgagcgacttttctttgttcagctttagttttagcaaacaccacaaatatgttttaagtaacatcgctcaagtttaagtaacatcgctcaagttgataatctcttgataagctctgttgttgacattttgcagtgataccacagctccactcatagatttaaacttttatttttacttatcttggtcataagttggcattctctcacattccacatgatatagagggctacgttttggaattttccttttcttaattgcccagagttatcagacagattatcaaaatggcttttaatggcttcaaccatttctaaacctctatcttagcagactcatgcaggatctaattctctttgataacgttctacgctctttaagtgactactgccctgtatgcttctccacc

SEQ ID NO: 120975 - DNA, 1791 bp, Homo Sapiens
  misc_feature (457)..(457): n is a, c, g, or t
aagcccccgcttgtgggagaatttacagggttgtttcaaccaaaaaaccccttttttgtggaaagagatttcccaattgtcgggccgaagaaatgcttatagtggatattttgcaaccccgttcctttcgaattaaagtggccagggggccgggggcgataaattgaattttcggagcctccgcttgggggctccctggttgaaagagattccagttaaatggccctcggggaactccattttgggatttggtacaggaacggctccgttttgccccccgggctgttttttatttggcggggatggccaggcccgtagtccagggcccaggtttttccttgggaaaccaggttgtgaccatgttcactttcgatatcggggcccggcgcgccaagggaaatgttttggaaagctttttgaggcccgggccggccgacagggatagggttaaagttgntgattcctttttgagcaaaataattttatttcctaacatatggtaacatatacatccaatatgtgctccccttgcacatctattcacaagtgacttccaaatgacaactgctttgatatttaagcatgtgctaaaagttatcttagttgagatatgaaaaatgctttagatggataacattctgagtatattggattagtcacagcagaatttactttagttagatgagttctacaaatttaaagctttgaaaagctactacttttacttctaatacatccagatgaacacgatgtagcaatatcagcttgtattccagagaaatctcattagtttttctggtgatggaaccacttatccacgtctgttggtactgtgcaggcagattcacagggtggtggtaaagcatccacaatggctctggcagcatcaggatcacacttgaaggggctctcagacaaagttgtattcatgcaactgattccttttccattcgttttcttagtcactaatgctttccaatggtcatgagtgcttttaataatatcaatggcaaagtccttatctttaaattctgcattaaacgcaaactcattttctggttttccatcaggaaccttataccttctaaaccagtccacagtagcttctaagtagccaggtttcagccgtttgacatcattgatatcattataattggctgcatcaggatcatccacattaatggcaatgactttccagtcggtttccccttcgtcaatcatagccaatatgcctagaactttcacgccaattatttcacctcttgcacataccttgcttccaatttcacacacatcaattgggtcattgtcaccacaacagccagtatgtttatcattgtgccctgggtcttcccaagtctgagggatggcaccatagttccagatatatcctttatacgggaacaaattcgcaacatagcgaagttttccttttttcacatcttgtttaatagggtttaaagggtcctttgtagcaatctccatttttgcattagaccagcgtggtacttcaactaccatgtgaaacacatccttatctgcataaattggaatatcatgaaatggagatatatattgtcctttctcatttttgaggaagactcggtactccagggagaagggcgcggcgcgctcctcggtgctgaagccgctcatagtgccggagtcctgccgccgccgctgccacagagccaccagcccgcacgcggcgcgacgcgtgggtcgacgatatcccgggaatccggaggggtaccagcctgctttttgtacgcagctgtttatattcacatt

SEQ ID NO: 120976 - DNA, 1001 bp, Homo Sapiens
gataatgaaaagaaacatttatttacactttgtacatatcgattccaacaaacaataaaaggcctacacatcagtgtaatcataatatatgcgaacttccgatcttctcacactttgcagtgatctgatgctttcactcctggttctgatatttgattttttgaacagccttcttgaaaatgacctacacatgaaaaagtaaattattggatccaggcaaacattacacgcagacaagaaaagtgtaatttctttgcagtaatataggattttttgtgcagattcatctaaaagcctgtctaagtgactaaaagtaaaaggaattctgcacaagtgatatggtagaaagcaggtaaaaaacacagccacaacaaccctgatgctctggttatgttttcgctttcggcttgactgacttatgaattgcctgctggatttgtggatgtacctggatatggctatgtaacatccgatcagaatcaccagcacggccacaaacaagcagctgttcacataggtgactgccgtatgccatttgacccccaaaggacttttaagttttgagcagtcatggatattgtcctctgttggctgaccatttgtcaggatgatgtttggcaaagacaaaacagccatgatcacccaaacacaaacagataaaaccttcgtgaaggttatgctgtacatccgagagtccccaaatggcttgaccaccttcagatagcgatcaatgcttatcagcccaaggaacacgatggaagtatacatgtttgcataaaacaaaactgaagtgtatctgcagagaataaacttgaagtaccaaggtccaaatcctgcatcatggactattcgaaatggaaatgtcagcgtcattatgaggtctgcaaccactatgtttttgagatagaatatgaagctggttttattcctaatgtggaagaagatccacactgttaaaccattcagcaagatgcttgcctcaaatataatgagtaaagccc

SEQ ID NO: 120977 - DNA, 2061 bp, Homo Sapiens
  misc_feature (110)..(155): n is a, c, g, or t
  misc_feature (316)..(379): n is a, c, g, or t
  misc_feature (436)..(504): n is a, c, g, or t
  misc_feature (533)..(571): n is a, c, g, or t
  misc_feature (573)..(573): n is a, c, g, or t
  misc_feature (1785)..(1818): n is a, c, g, or t
  misc_feature (1932)..(1966): n is a, c, g, or t
  misc_feature (1970)..(2012): n is a, c, g, or t
gggtgaagggagatataggaggggtgatacataagggagtgagagtggggatatgacgggtagtgggggagtgtggtattgtagtacgaaatggagatcgtaggatgttnnnnnnnnnnnnnnnnnnnnnnnnnnnnnnnnnnnnnnnnnnnnnnatggataggggcggaacaaagcggtagggtggtgggccttttatgaaagaacttagggaggggaggatcggggaagaaaggcgtatatgggggtgggtggagcgataaggccgggaaggcgattttagggggtggaatgggggagtacgagtcgacggagnnnnnnnnnnnnnnnnnnnnnnnnnnnnnnnnnnnnnnnnnnnnnnnnnnnnnnnnnnnnnnnngggaagggacggacggggtaagaaagtagaggggtgtgtaaaattgggtgaagtggnnnnnnnnnnnnnnnnnnnnnnnnnnnnnnnnnnnnnnnnnnnnnnnnnnnnnnnnnnnnnnnnnnnnntgggttggtggtttgaggatggtgaatannnnnnnnnnnnnnnnnnnnnnnnnnnnnnnnnnnnnnngnttttttggaagttcaattgtctttatttttcttatacagattcagagaagtaaaaaccagtaccaaactccaggtaaaatggtttgatctgatcgatttggctgcatactttcggtacgtataacattctaaacttaaaatagaaatttttatattacaaaacgtagaagtaaaattttaaaaagttaaagtactagcacatatatgtgttaggaaaatggtctctgtcaattgcccattttcccaattaaattaacctacgatttcctttttttaacagcttatttttttcataaaagttgtactttgagaagttactttctaattacgtcatgagaacacaacttgtaattagcaacacttctgtcagtctagatcacttcttctgcagagagcttttcaaccaagttggcatcaaccagcacaataaagttttcactgttttacctgtttcctgtatatggtgtaatcagtgaaagaaatggcatttcacatcctaaataatacggtgaaacactgtctaaaaattacttagatttaacagaattgcaattaggttttgacaatgtatttacttcaagacaatgtattttatcaggaaaaaatatcttgaaagaaagatctctgaaattatttttcatttgatacgccttttctgtgacaaaattttggggtgaaatgatgatgtttgctgattgatttagtactaaaaagactagtactaagaagactaaagacagttatcttataataagaaatatagtataaatagcaccttatcaagaattctgcaggggttttaacacttacaataataggaaatagccattaaaaagttgctctaactttagatttctaactttagtgttctttaacaaaggccatattttgtggccttaaaaacaaaaaattatatctggctttatctattagtaaacacaaagggtccatattttattctgaaaaaatatttattatattcattcataaatgttctaactaatttaactaaaaaaatcttctagtattttctgatgccacaagcttactagaaaattacttctaaaaattggtaatataaatcatcaatgatttacctactttaaaaaagaggggtatctgtttctcttacatttaataacctgaaaatgagtctataagaatatttttaaaaaatacagtaacactgctgagttttgttaggtcccttgnnnnnnnnnnnnnnnnnnnnnnnnnnnnnnnnnngcaagaatgtacaattctttttgcaattttttgctaacaaaagacagaaagaaatagtgctcccccggccgtaatggccgaattcccgggcatatgtccggtaccgtcgactgnnnnnnnnnnnnnnnnnnnnnnnnnnnnnnnnnnncggnnnnnnnnnnnnnnnnnnnnnnnnnnnnnnnnnnnnnnnnnnnttaacgccctggcgccctatagtgagtcgttcgatctgtggcggcgcgc

SEQ ID NO: 120978 - DNA, 631 bp, Homo Sapiens
  misc_feature (296)..(296): n is a, c, g, or t
  misc_feature (383)..(404): n is a, c, g, or t
  misc_feature (568)..(576): n is a, c, g, or t
aattaaaaaaaatgttgttgctgtttcattagaattgaaaacgggttttttctttctttctgagttagcattttggagtctttagtttgaagatgcttttgccctaccatgtctgtgaatgtctacattagtctactttgttagtaaaatttataaaaataggagtgcagcagctctttataataaatgtcgcattcagtgtctcatactggctgtgccttaagtaccaaatttataaacgtaacaatttaaaaaatattaataaaacgtcaatatcacattttaaaaaagaaaanatatatatccacactacaatatgttttaatgccatctattgagttgtacttctatagttgctgttgccgacctattaccaatatttnnnnnnnnnnnnnnnnnnnnnntatccttcatcataagtatctttccccaaccgaggaccatatattataacagccaaatgttaaacatgtgcaaagaggaaactgtcagtttttcccaccagtcacagtgcagtgatgtttatactttttatttttaaaattctgtttacatctacaataaattnnnnnnnnnttcttccatagcctctctggtgatacttgcagcactgaggtattaaaaaaaatat

SEQ ID NO: 120979 - DNA, 393 bp, Homo Sapiens
  misc_feature (97)..(158): n is a, c, g, or t
aacttttttttaaatattggtaataggtcggcaacagcaactatagaagtacaactcaatagatggcattaaaacatattgtagtgtggatatatannnnnnnnnnnnnnnnnnnnnnnnnnnnnnnnnnnnnnnnnnnnnnnnnnnnnnnnnnnnnntaaatttggtacttaaggcacagccagtatgagacactgaatgcgacatttattataaagagctgctgcactcctatttttataaattttactaacaaagtagactaatgtagacattcacagacatggtagggcaaaagcatcttcaaactaaagactccaaaatgctaactcagaaagaaagaaaaaacccgttttcaattctaatgaaacagcaacaacattttttttaatt

SEQ ID NO: 120980 - DNA, 1320 bp, Homo Sapiens
  misc_feature (1244)..(1278): n is a, c, g, or t
tttacatttaactttttattactttttaaaaatccaaattcagataaattaacacactaggttagaacctcaattgtatttgatacattatatactggatttctattactaaaaagccagttggaatatggcctatacgaaccaaagagtgtatacaaaatggaagtggtcatcaggcaataattgtttccttggaactctgcaccgactgtccatgctctgtggggacttacacattcaagtttgacagttgaaaaaccaactggagctgcttttccaagaatgttctgttgtccttcaaatagaattccatgttatttctttcttgccttaagctcttatatctttcaaatgacctaagctgatgaactggagtaaacacaaactgctgcagttatcaattagcaagcctagttcaccaatacttcaaaataaacagacttcacaagtttatttccattcctaacagtggaataataacttaattttgtttacttttgtctttgtagatttctgtctgcagctccagtaagaatgccaaatcagatggcttttaggaaatgctcataggagagaactagagttattcctcacactgaatttaagtcttaccagatttctgcaggttcatatgttaacgttctgatctagcctacctgtaagtctagtttatttctgtacacacttccaaatactcttcataaattttcacttctgactgaaatataacaccttgattgataaaatagtttcataactatagaattttagtgaagatataaaacattaatgaatacttgtgttttaatacatcactactcctatttattacatgttccaataaaccaatagaatgaagcactaagacacggtgaaatctaaacttaaaacccagatggaactgccatatagattacaaatgggtctccccaccacagaattcatatacaaaagcccttcggtatgtagcttttcctgaacaaatacattaatacactttttgttttttacatttgtaaaaattcaaggttttaataacatttctttgcaagacatttggtataaggtggttaataaatattaggaaacaaacactgtaccaaaatggatatgacttgtgaataaaccctaaataaagtggcttttggaagaactggattttgcagcaaccaactttataaagaggtccatcccccggccgtaatggccgaattcccgggcatatgtccggtaccgtcgactgnnnnnnnnnnnnnnnnnnnnnnnnnnnnnnnnnnncgccgcttcctcgctcactacttcgctgcgctcgtcgttcga

SEQ ID NO: 120981 - DNA, 1386 bp, Homo Sapiens
atggttaaaaagggttgtttaactagctggctttaatccattaatacagagtggtctgttatatttatctaatattatatctaagcagctttgttgatgtccctggaagcaactgcccatatcattataaattatatgtatctcctttgagataagtaaaacataatcttacaaaagagtaaacattttattatttgtacatgaatcagtttggtctgaggatacacaagcatctggctaactcataaaagtagcctgaagtgattgataggagagtgtttgtagtcatttccatttgctgccacatcccttacattatctacttgctaagcactgagaggcccagaatggacacatcaaactgtcaggaggaacatatgggacactggcacctgcaatggtttttttaaaagcagagaatgcagagcagtcacagactccacttcaaagccagggtgtgtggaggtctccggggaagagctctgcacaacaggtttcctgggggccagagggcctctcggggaggaacagaaaaaaaccagccaggagtgctaccgaccagcctcagccagaatgctgtcagaacaaggccccaaacatggcctggcctcagtgatctggggatgaacggtgtcacaagggaaccacctgaagggtgggcagaggcccccgtggaggagccacatactcttcctctctcagcagccgcagcaggatgttttttttattcttgggccagctgtagacatgagtgttctgaagccaggtgggcacatgctccttcttagcatttgggaagagcacagggatgaatctgaaattcatgcttccttgttttatgaactcaatctgcatcattcgatgaatgtacttagtatgtaagccatgctcatcctcgtccagctgcgactcagcgccttccacgtcctgtttgtatttggggctgattgctacgattatcatcacggtcttatccctaaggtagcgctccatccatttaatgatatcaatgcctcggattctatcctcaaatatgtcaattgcagtttggaagccatttaccaacaaaaagttcacgaatttcaccacctccatagctgtgtccatcgaataagtgataaagactttccgcaattcttctggcaaattgcttgtttttagagttcctctggctggagggttgctagggggtctaggcacagcagctggggacggaggctggggaacctgtggtctcagctctgcagggcactccaaggactccccaggagcaccagctctattaggtggctggtgatgtggctggtcctggtgccttggaagccccggaaaggagcagtctctctgtgcgggcctctcttcttggtccccggtgatcgggctacg

SEQ ID NO: 120982 - DNA, 1554 bp, Homo Sapiens
tttgatttttagagcaatatttaatcaggtgaataccagcaaagagagaaaatacagaaaaagaaatttccataaggcatgatatgaataaataagtgaaaaaacaatctcgggtttaaaagtaaagcatgagaatttgaagcctgtgaaattttatttatacaaaagaataaaaagttatttaaaaagaactgatttaaacttatgtttttccatttttcctgttccttgaacatgaatctactaccaactcagaaagatttaagataggtaattactaaacactctttacctccccttgcaaaaaacagaggcaagtttcccattttacttatgataaaccagattattttcagttatgaatattggcaactgcatgaaagagatgatcagatatgtcagcaggaaagtatgagctgtacaaaggcattacaaaaaaaccccaaaggaaataagataaaaacaacaagagaaaaacaaggacaccataaaccaatataggaaaatgccagatatttacagcctccatctgaaatgtgacttgtgttctactttcagcataaaacaaaaccagagaacatttcttgaagggtatcacagatgaagctggtgccagccagttttgggggagacattcattctaagaagggagaaacgcacagttagcaacttgccgggattacaacattgtcttgatcttcctgcagttctgttactaaaaatgacataaagtaagacccaatgtcttacagaaatgacttgtttgtcaccacatttagaacaaactactcaaagtcacaggcactgggtctgggagagcagaggtggatggccacgaactcaggtgaaggatgtttatctttgtgaggtcagagaagggaagcagggctctacagcctggaagcttctgcactaatgtgtcttctaatagtcagctcgtggttttttgtttaacttcagatcatcaatcctgtgccggtttttattctttcgctttttatggctgctgtggtgactccctgaggaagtagaagaagcagccttctgaggtttcactccctgcacagatccatccagatcctcagggtcctcctggctgggctcattttcctgattgtggaagtctggagaagtgtcactttccgtcccacttcctggctccctcttttcaatgagctggtcctgaactcctgccaatgcacttactgcagctgctgaggtaaccgaggatttactgaagagccgctcagcttccttaaacttccggttccttcgatcatttttgctattggagtttttttggttggtcagataccgatcccagccacgaataatattgccatacatctgagtgtcttccaggtagcttccctcaaaagcatagatctgtcgctccaaatttgccaatgtttccgccagctcctgcttccgcttcacgagctccgccagctcccgccgggtgtccgggatctgcggcggcgccgccttgttgtgcatcgccatgttgggctgaggcctcgtgccgatttaaacccagcctcgtacctagcgtaa

SEQ ID NO: 120983 - DNA, 1704 bp, Homo Sapiens
gagccgtcggcgcattggcacgcgtttttttagtctcgcaggttcaggggttttgtttttcttgcccttgtagaatttcttttagggcaggttgtacgggtttattgttccaataccacaagagacatacagaagcagtgctttctctgggcagcctcatggaccagatcagtgtcaaactgtacccttgagtgtccccaaaggttccagcagagggaagaagaggactggacatgtttgggcccctgttcccggtctttggtaaacagacgcttaagttgacaacttggacttggccaatactgcattctaaatcaccacatcattcccaacttgtcactcatgcttcagatgacgaaaatgccacatcagattaaatgagaaaaaaacctttcagataaaatgagacttgaagtcatacaaattttatacttgatctaaattaagcaagaaccctcaactctgtaataagtcgaaatacaagatataaggcaggaaacaaggcaagggaaaacacacacaggggcatctacttgctggaaacatgttgggagagaggcaggagcaggcatggctttgtttcttcccaaacctgcctgatgtcaaaagtacgtcaaaaggagcctcacagtcccaggagagcatggtcccaggtattgctgtgacaggtggtgaccctggagccagatctggaaggccttcctgggggctgcccagggaactcacccatgaatccagaagcacttaacactggtggtggtgatttgtcacatatggcagcaagcagccattaaggctgtaggaggagagatgtgaaaagcaagatgcgtttgctcggtggcatgtgggcaggctgactgtggctctgcaggctgcagcaggtccagccggtgacccaacagggcatcgggcaacctggcaggtcacaagtcaatcatttcaccctcacgtcgagccacacagcactcagtggctctgacaacagatgtagagaaggagattacaccactttaatgcaatgatgctgaagatgtaaaattaggaagagacgttcatgttctctgtacaatacatccatttacagaatcagccagtactgtgtacaacatataaatacatgataaaacattagaggtgcatagagcatacttacagaagccaaaaagttcactttatacatccaagaataaagagttaaaaatataaaaataagaaacacacactgctttgaaatgtaaaatgactttcacatacacaggtgcgtggagatgcccactcccatagggtccaaagtgacagggaggatgtcaagcagaggaattcacctgcaaacatctggacggctgactcacaaggtctacagatggcattttcataggaaagacaaccctattccccaaccccattgtccaagcagagctattcaaggttccaaatgatcctgtgggttagtggatcacactgagacagaaaagttccaaatttgcttcagcaacagaaccaaggtcaaacttgctccgtcaactggcaaatgactcaactgtgaccctgaggtcagcaggtgcaccagccccctgggtgggcaatgccaggagttactttaaccctgtgctggcttctttcctggccatcaactccccaaagtagcagaagaaaagatggcagggagggggcagtggaagactggatttctacttagttcag

SEQ ID NO: 120984 - DNA, 686 bp, Homo Sapiens
  misc_feature (648)..(648): n is a, c, g, or t
aataaactagcagctttattgcccttcaggggccatgtcttcacttgagatgtcgaattgcttgagggaggaaaacctgtaagaaatgatggagatcagggaacaggccttggggatcctggagcggggtcacagtgagcattcggtcagccggggagacagacgccacaaagctcagcaggggctcagtttctggcctctcttcgccaccactcagtcctttcagctcctgggtgacctgagcctcagtcgccagccaccctgctcttgtgccagcgccacctccagctccctccttggtttgctgctgcaagcgtctacgggctcgccgccgcccttgccacactcggtgccacaaggcacagcgccagctcgctgaggagggcagggatgcccccttccctgcctcaccctgagaccattcttgggctgcctcatgtcccttgggcccccgctctgccagggctgcgtggctgggctgcccctcttctccaggggctccatgctttccagtggtcaggggcaggtctcctggctgcccagggctctgcatggcccagtcctgcaccatctctccaacctctataaccatctcttctaccctgtcttccccaccgtcccctgcacatccctgctgctcctctttcncctcctcacagcagtttttctgtccatctactttgagt

SEQ ID NO: 120985 - DNA, 585 bp, Homo Sapiens
ataaactagcagctttattgcccttcaggggccatgtcttcacttgagatgtcgaattgcttgagggaggaaaactgaggggctccacatttatgctgggctccagtcttgaggcatccctggggaaactgcagtcccagccatcgacttccacctgttccccctctcctgctttctgggtgagctgggacacagtgggcaacacaggagggtccctggtctgaagaaaatagatcaccagccaggtcagggcgtttttactgagaagggggcccctccctgacagcccccgaccctgagcccagcatcggagggtgtacacgaggggccggactcgaccatccagctcagagcagagactcaggataacgggagttatgcagggccagccggttactgagggagacatcaccgtggagacctgaaggccgatgacagaacttgaccacagggcgccgggcagagggcacggtttggactcgatacaccccagggacacagccccggagaatggatcccaccagctccagcattgctgccccctctgctttctcctcctttggggtctctgctattccatttaag

SEQ ID NO: 120986 - DNA, 1351 bp, Homo Sapiens
  misc_feature (121)..(133): n is a, c, g, or t
tttttactttttaatatgcaaaccatttattgaactatttactattttaaaatatcattcttaaaagaggccacaaaaattataacattcagaaattttaggtaaactccaaaagtaagcnnnnnnnnnnnnnggtagtcaacttgtaccaagtttagcagcaagaggatacttccttagagactttcagtggacttaaactcagtttccgctggtgctatgtaaagcatccacgatggttttattgtactctgcaatctgcttggtcacatttttcttaattggctggtaatcactctcttgactcttggttgctatgaattctttcatcgcaaaattattttgctcaaggtgttgccactttctctccaaatttgtaagctgagaatgtgtctcattttcttgcaattgtgtttttagtgcctcatactctatgttttgcttctccattattttcttaaaggcatttctgtgggttgataatatcattctctcctgatgtaatttctttatcttttcttcacctgatgattttaaagctggcaaatcattatatatctccagatcagttgtcatttgcttaattttgctttttagagaatgctgttcttcagtcatcttactttctagaagctccattttctgcagatccaactgcagacgttgaatgtctgaagtcaaattctgagctgtactttgtgatttctgcacttcagtagatttaaaattgaggtcatcctgcatcatctttagctcttgattggtgatagaggatatctgttctatacgatttatatttcgactgcagtgctccaagagtgcaacaatgttggcttctatctgtgcctttcgtttcagttcctgattctttgtttcctcaaaagtctcaataaaagtgtccatatgttcctcccttttctttagctccttgtatttctggttcatttcaccttggtgttcctctaaatccatgtcaagttgtctaatttcttcaataaactgatttatcttttcttttgtatctgttaactgtctttccatgctggctatttcctgattatcatctttaatctgcttaagtaatttctctctctcttccattggagatcctatgcttttgtcttctgcaatcatttgatctcgatgggactccaactcataaagtttttcatgcagcaataccgcctcctgtttcacctgggagtgagctatttctgcttccaggctctcttttttcatgttctgtgaatccaattgttgttgaagtgtatctaattcctgtaacagtttctcatttgtggcccggccgtaatggccgaattcccgggcatatgtccggtaccgtcgactg

SEQ ID NO: 120987 - DNA, 555 bp, Homo Sapiens
agcatagtgagtggagtttatttttataatttgtagaaaattgacatttagatttcaaaacttatattacaaaattatcagcagcagtcttaagcatttcaacaatgctgatagattccactttgctaacacaaacaaggctattataccatgttcgaaaagcaagacttgttccaagagggcctattattatacatctgcctcactgctcaggacccgtttgtgactgtgtcttcttccatctcttcttcaccatcatcagtgggccctaaagaaaaccaccaaagcaaaagtagtatcaattttagagaatccattcccttagcatgcaagtgtttgttctgtggccactgtttgttacacactgaagtaggtacaaaaagatcaaaagcagcacctgcctttgaggagcttatcgtccagggacggtctagtctgtctttggcaggtactggaagggatgctcaatttcaaaggaaaagggtcacacagatttcaaaattgttgcctcccaatgtagttgataataattcatttttggggaaggtaaagcct

SEQ ID NO: 120988 - DNA, 1685 bp, Homo Sapiens
tttttggtagcatagtgagtggagtttatttttataatttgtagaaaattgacatttagatttcaaaacttatattacaaaattatcagcagcagtcttaagcatttcaacaatgctgatagattccactttgctaacacaaacaaggctattataccatgttcgaaaagcaagacttgttccaagagggcctattattatacatctgcctcactgctcaggacccgtttgtgactgtgtcttcttccatctcttcttcaccatcatcagtgggccctgatctgcgttctctgccagggatctgaccagactgcagcaaccccttcagcctctccacttcagccagagttgaagcatttgctatggcattcttgattgcttctacatcccctggagatggcccacctttctttttgtcagttggcaaaccagcacctggattaaaacttaagagggggaagaacataactgttagacctagaccaacagaagttgcttctcttttactttcaaaagcttttgaaagtaattcaaccagtgtagtatcttatctttgttaacaaactgatacaagaactctctccttcagaaacaccatccagttcatcttcctatatagaaaataggatgtacatggtatcacatgaagactgactactgaaatatttgctctgctaagctggtagaaatttcttgtgatgtgtggaccattgatgtacatggactataagcactaaaatttaataccacattaatatgtcagagtttttggttaattttgtaggagacgaactgccagacagatcagatcatgtttctgaaggtgaagtagagttaagttggatatccgtgtcttacgttttgcttctcctggcaatatcctttgctagctgtgcaccccgttcgcccttgaacattttctctgcttcctgacgctcctacagcgacaccacacacagagttaatggaaataggaataccacatgcatttagatgcattcctcagaagacatggaagcgaactctcctacagtactccgggctggtgaaaataccaaaaagcaatttcaaattaagagaagacacagtggtcttctttctttggtagagctccctgaagaaagttcattctcctagctccaaggaggggatcccagggaactaagaaggcaattaaatgaataataaaataatgaattcctaataaagggaaaaatcatcctaacacacggagctgcacgaaagtaggttacattaagttctccgctgggaacgtatctaggcagacaatccactgttaagactgctcaccgtggcctcagcactttgcgaacttcggaatagccagcattacataagagagctccaacttaaaagttctatcataaactctgctattagaaaaaaatgtgatgtaacattttccctcccacttttattacaaactaatggtaaaatttactcatttagacaattttaataatcagtaacaaaaatataaagaaaaacacacaactctataatggctcacaagcaacagattactacttacttttagtttcactttctggaaatccagtactctgacttgcggaactttataaatcacatacaatctgtaatgcttcttattggttaccggatttcttaggatacttaggtaagtcagcgatttgagagatgcc

SEQ ID NO: 120989 - DNA, 1178 bp, Homo Sapiens
  misc_feature (1067)..(1097): n is a, c, g, or t
ggtagcatagtgagtggagtttatttttataatttgtagaaaattgacatttagatttcaaaacttatattacaaaattatcagcagcagtcttaagcatttcaacaatgctgatagattccactttgctaacacaaacaaggctattataccatgttcgaaaagcaagacttgttccaagagggcctattattatacatctgcctcactgctcaggacccgtttgtgactgtgtcttcttccatctcttcttcaccatcatcagtgggccctgatctgcgttctctgccagggatctgaccagactgcagcaaccccttcagcctctccacttcagccagagttgaagcatttgctatggcattcttgattgcttctacatcccctggagatggcccacctttctttttgtcagttggcaaaccagcacctggattaaaagttttgcttctcctggcaatatcctttgcaagctgtgcaccccgtttgcccttgaacattttctctgcttcctgacgctcttttagtttcactttctggaaatccagtactctgacttgcggaactttataaatcacatacaatctgtaatgcttcttattggttaccggatttcttaggatacttaggtaagtcagcgatttgagagatgccagagggtccagatcacccagttccacgagactattattggtgagaatgagttctgtcagacagggcagagcctgatcaagtccctcacctatacggcatattctgttgttgttcactaacaatgttttcagtcttctcaacaaaggaaaaccatccagtttcctgatctcattgtcagaaaaatcaatagcatcaaactggtctaacgtagcacctagattttcaatgacgggaattttatacccccggaggtccagctcccggtcgcgcaccgcgttggtgtactgcgccgcctgctcgatcagctccgccgtcagcttgaccatcctgcagcctcccgttcccccgcgctgtggaaagcccccggccgtaatggccgaattcccgggcatatgtccggtaccgtcgactgnnnnnnnnnnnnnnnnnnnnnnnnnnnnnnnatgcgccgcttcctcgctcaatactcgctgcgctcgtcgttcggaaatgacgggtagccgccatatagtgatctatacatt

SEQ ID NO: 120990 - DNA, 509 bp, Homo Sapiens
gccgtataggtgagggactgatcaggctctgccttgtctgacagaactcattctcaccaataatagtctcgtggaactggtaagttgcacagaaggaaaatggtatttggtgggtggggttaaaggtactatgtgcttcctacagaaaatttacaaaatctagaaaatgatctcagtatcctctttcttgtctttttcttaattcaggatctgggccttttgggttctgcagccgtatgttgcaaatattttcctacttttacttgacttttgacttaggatgtcttgttagagaagttcctaatttaggtgcagtccaatgaatcaatcttcttctttattgtagcccttttgatgtttaaatttcccctattccagggttataaactcctatgttgttttctacaattgcagtgttcaatatagtaccagtaactacaggtggctacttataattgagatgtgctagaactattaaattcacaattgaatttcaaagacttaagtgc

SEQ ID NO: 120991 - DNA, 781 bp, Homo Sapiens
ctttcgtttaaataaatttatttcttgtagctttgctctgtttagattatgtggtttttgttcagttatgagaacaatctttaaaggatggtggattgttggctagcttaatgaatggaataggaaagtggaaatgtaaaacgtcaggaaacatacattcagagctagatcagtttgttcactgagcctaaactggctaataatccattaaacacaatctcctcagaaaaagcacgaagattctaactgatacacagggtttcctcattcaaataaaagtagatagaccaactaacctagaagctagctgaaatacaaagaagaaatccccattagaatatcccagtttcaagataaaatgcatgcatttaaatgcggtccatctggttgaaagttggcacaagttactaaattcttccccaaaagagaaagcacaaatgaagactggggaggagtctcactttatgatcttgctctcaaattgcttagcactcctccacttgcgaatgcacttgagacagtaggtgtggttgcagttggagaggatcccgaagcggcgctcactggggttggctttctcatagaccacctccatgcagatcccacacaccatgtccttgctgcgctgcacggcaaatgagagctccatgtccttctcatgggcctcaatgcacgatttgatatgctgcgatctctgggcagcatccattggatgcaggagctgcagcccacacatgtcacaagaatctccgtggagatacacacagttctctctcctgac

SEQ ID NO: 120992 - DNA, 725 bp, Homo Sapiens
  misc_feature (710)..(710): n is a, c, g, or t
tgagccgacctcagccacacattcacagatctccgggagaacacacattctcccgtatcgcatcttccacgcagctaggggcacagtgcttcttgtcttcaaggcggtttgctcttttttgattcttccttggtcactgagccttgcaggggtgcttcagtgcaggaaggcgcagtacggccacagttgggttgcccaggaacaaactcaatagcattcacccagtcctctgaacctgctcctacagttgcaaagtttgaatttcttgactcagcttcgcctgtattcatttcaacaagtggtccaactatcgatgagagacttgaggaagcagcaagggatgactttgtagttagctctgtagcagttgcttcttcctgtttcaatggtttgctatgttcatatctgcagcggtctccataaatacagtaccctcgctgaaaatacttgcacactacactatacggactgtcagagaggtcatgcgagtagcgacagttgtctccttccttacaaaccccatgcataaaatacctgcaggtgacctgtttagtccagccgccgccgctgccgtcgctgccgccgccccctccggccgcccccagggacggggcggtgactgtggggatcggggtgggggaggctgctgccgccgtctgcgctgccgctcctgctcctgatgttgtggctgttgttccgggagttgcganctccgccattactgt

SEQ ID NO: 120993 - DNA, 2968 bp, Homo Sapiens
  misc_feature (2752)..(2798): n is a, c, g, or t
ttttttaattgttttatttgggaaaagtgcttcttacaaaagggcagctgcaaaatacagagacctctgcaacaattatttgttttttcttaaagtgaaagaatgggtgggatccaaggaatcaaagcagtagatggacaaaccaggagcatccccgagttattttcaggaaacagagcaacaaaacacaaaggtacaatttccaatcaaggaattcttccaacaacttaactttagctaatctcagggattcccaagccctccctttcggtggaaaagtatgacttatcactgcaaacccattactccactacaataaacaccttagaacagagttttgaatcacgtctgtctacctgaaagctcaggggtggaatgaggcaaatacccacaaaaacaaacacaaaaacccgacaacaaaatgcctcaagtgaggacaaaggtttctcagaaagtgcctgtactggaaaggctagatcgtaaaacattaaatacaactgtgtatccaagacccagtttgtgttattatatgggataaccaggtagttttaacctctatggctaaccccatttctctatttatatagacagagctagcactgctatattgacaactaccaatatactgctttgccctttaagatctatctgccacacaaggcttaaaccactaaaccaggtttttctactaaggctaagaatactgcatctatgcagggatgagaagcttatcacacacccacacactcacaccatgtcagcccttgggagccaacttccaactctgcattgatgttatgcctctctatcttttatacgtattctttctcaattttcctatcatgcaaaacagtaaaaaatctcaacacattcacacctgattctggttacccagtagtattacttgtgtgcaattaaacaagagaccaaaaccacagaacaagtgcacgtggtagggattacagggtagggaacagatataaaaacacagatgtgcagatttcaccagaaacctcaaggatccacatcccatgtctggggcagagggctattggccagcttaggtcccttcacccatcactcttattcttggaccccaaagcagggccactgcttttacttttgaacctggggtcctcaaaatgagtgtgtgaaaagtccataaatgcaatctggttgaaaacagatgacgcaacacacctacactaactgtctgacagttaaattcgtgttacaaaaaactaactttaagatttatttttgtaacttttttcaacagggaaaacaacacactcctcagggaaaggtgaggggttgagaagacaggccctgggtaaaaattcttaggacagcacctggagttgagaggcctgcctaggagagaacacaggcactgccacaccaccacaggggacagctgctgtctgaggtcagcagaccagttcacacgccacgcaaggttgctatagatccaagtcataaaaatcttccagctcatcatgaaacaagtcccactcatcttcagagtctgttagttcgtcgtccccacctgcagccaaaagcataagcaacatctcgcccagctcaaaggtgacaacctcttcttcatcgttgtcaaaggggttgctgttctctctttcctcaatgagttcccagaagtggttccttcgttgggcccggtatctgcttgatgttcccactttctgtctctgtggctcctctctacggccatcagggtacgcatgcttgtaaaaacagttccctccaaatgggcagctcccacgtccttcatcaaaatacctgcacgccttgttgctcattgcctccttgtatttcagaatgagtttctgcttctcttctttctcctccacccagtactcacttggaatgacaaagttagatgtgatccggcattctgggcaggactttatgatcttgctctcaaattgcttagcactcctccacttgcgaatgcacttgagacagtaggtgtggttgcagttggagaggatcccgaagcggcgctcactggggttggctttctcatagaccacctccatgcagatcccacacaccatgtccttgctgcgctgcacggcaaatgagagctccatgtccttctcatgggcctcaatgcacgatttgatatgctgcgatctctgggcagcatccattggatgcaggacctgcagcccacacatgtcacaagaatctccgtggagatacacacagttctccccgtatcggcactctcccactgcagcataggggcacagctgcttctttgtctccacggcggtttgctctttctctgattcttccttggtcactgagccctgcaggggtgcttcagtgcaggaaggcgcagtacggccacagtagggttgcccaggaacaaactcaatagcattcacccagtcctctgaacctgctcctacagttgcaaagtttgaatttcttgactcagcttcgcctgtattcatttcaacaagtggtccaactatcgatgagagacttgaggaagcagcaagggatgactttgtagttagctctgtagcagttgcttcttcctgtttcaatggtttgctatgttcatatctgcagcggtctccataaatacagtaccctcgctgaaaatacttgcacactacactatacggactgtcagagaggtcatgcgagtagcgacagttgtctccttccttacaaaccccactgcataaaatacctgcaggtgacctgtttagtccannnnnnnnnnnnnnnnnnnnnnnnnnnnnnnnnnnnnnnnnnnnnnngggacggggcggtgactgtggggatcggggtgggggaggctgctgccgccgtcgccgctgccgctcctgctcctgatgttgtggctgttgttccgggagttgcagcctccgccattactgtttatccccctcgtgccgaattcacaacccaggcctcgtacctagccttt

SEQ ID NO: 120994 - DNA, 686 bp, Homo Sapiens
tgtcatcaaacacaaggctttgtaaaaatacgaccacctattccacttactggatctgtcaggtgtgtaaaattctctcgccagttcatcatgcttccatgagccctcaggactgggatttgagccttcctggctctttatcccttggggcagacatggaaccatctctgagggaccaggtggatgctgaagctcacccagtcagggcccctctcctagctccttttacactgaaattaatctgaaagctttcatagccaaggctttgcctaggtgctattattccagctggccaaagagaagtcttgggccagattgggattctcaatggattttatagacataattcccctgcaaacttaaaaaaataaataacccctactttataggactaattgtttgaattgtatctttctctgtatgttaaaccagatttaaaactattttataaccacaatatgtaatcagagcaatatagtgttttcagatatataccttgttttataccttatgtaggtgtcctacataagggtggcatgcccactggctgtggtaaaatttaatcctcattgctttgggagtgacttaaggccttttgaagtggagcttttgcactttatactttttctgtgaactatgataactatatttgatattaaagctgtaagtggcattttcagcaaatg

SEQ ID NO: 120995 - DNA, 936 bp, Homo Sapiens
  misc_feature (366)..(375): n is a, c, g, or t
  misc_feature (390)..(474): n is a, c, g, or t
ccgataatttctcttctcactatattcctcttgttccactattctttctcgccctgagacattggtctcggttgttgtattcctacaattgtattccttcgtctcgttttgtttatttgtcccccgtgggctgtgtactatctcctttggtggggtgttctctctccctattttgtgcccccctcacttaagtgttgtgggtcctgcttccctccaatgtctcttgctccttggtccttgttttccccctcttgccacgtcggcgttttattatcgcgcgacccgctccctcgtgtttgtgttatgcgtccccccctattggggggcccccttttcttacaaaaaaccgggggcgccaaattgtgnnnnnnnnnnggggaatatttttgnnnnnnnnnnnnnnnnnnnnnnnnnnnnnnnnnnnnnnnnnnnnnnnnnnnnnnnnnnnnnnnnnnnnnnnnnnnnnnnnnnnnnactttacgcatttttaataacaatggtacccaattcattaacaaatgaatttaggcaatgtgctttgctctacaatccatcagatacattttcactgcagatagttcagaaatcattttggaaatagacacaaacatgtacatattcatttgctgaaaatgccacttacagctttaatatcaaatatagttatcatagttcacagaaaaagtataaagtgcaaaagctccacttcaaaaggccttaagtcactcccaaagcaatgaggattaaattttaccacagccagtgggcatgccacccttatgtaggacacctacataaggtataacacaaggtatatatctgaaaacactatattgctctgattacatattgtggttataaaatagttttaaatctggtttaacatacagagaaagatacattcaaacataacccctactttatagggactaattt

SEQ ID NO: 120996 - DNA, 785 bp, Homo Sapiens
  misc_feature (670)..(711): n is a, c, g, or t
cacttatgccgtgcggtacaacatgtatgtcagaaggatggataaacgttcttgctatgtacaagttgcaaacaataggttttagcatatttattttggaaaatcaacctgttttaaagttttatttttactgtacaaaataggattaaatataaaatgacttttgctccaaaatatcattatttttgatttaccagtcttctcatgagaggtcccattaaaaaaattaccttagtctaatctcaataatgtcaaactaattcatatctgaaatgtgtgctatttcatctttaatatccttaatctcagcttggactattgttaaattagatattttttcacttaagaaagcaatttctttctctctttgtagtaagtcggtaaccaatctcccaatgcgtagtgttaaatcatttactaatggttctaaacgggaaaagtccttctttagattatacacctttggttttagatcatttgcaaaagtcactgtcttcagaactttggctctgtcactttctaagcttagaaatctatctgtatgtttgtcgaagtcactctttagttcggttagcgtcttcttaacagagttaattctttgtgaattttcagatgctgtctttcggagcgttgctgttcgatcaatactgcttgaaagaagatcacctannnnnnnnnnnnnnnnnnnnnnnnnnnnnnnnnnnnnnnnnnctagttcttgcacagaatctgtcaatgatattacatcagttactaaacctgaaatccgtcgtatatctgttttt

SEQ ID NO: 120997 - DNA, 677 bp, Homo Sapiens
  misc_feature (565)..(577): n is a, c, g, or t
tgtataaattggacaatttaggaattttaaactttagatgatcatttggttccatttttatttcatttttatttttgttaatgcaaacaggacttaaatgaactttgatctctgttttaaagattattaaaaaacattgtgtatctatacatatggctcttgaggacttagctttcactacactacaggatatgatctccatgtagtccatataaacctgcagagtgattttccagagtgctcgatactgttaattacatctccattagggctgaaaagaatgacctacgtttctgtatacagctgtgttgcttttgatgttgtgttactgtacacagaagtgtgtgcactgaggctctgcgtgtggtccgtatggaaagcctggtagccctgcgagttaagtactgcttccattcattgtttacgctggaatttttctccccatggaatgtaagtaaaacttaagtgtttgtcatcaataaatggtaatactaaatttttttgttaatttattctcaaatgccactactgctaggttggtcccctcccaacttgcccctatccnnnnnnnnnnnnnaagaaaaaactttgtaatgcttgtgattccatctgggcaaaagtctgaagatctgaaataactttatatcaaaccattgatcaataaacagctactaatg

SEQ ID NO: 120998 - DNA, 973 bp, Homo Sapiens
  misc_feature (562)..(603): n is a, c, g, or t
ctgttttaaagttttatttttactgtacaaaataggattaaatataaaatgacttttgctccaaaatatcattatttttgatttaccagtcttctcatgagaggtcccattaaaaaaattaccttagtctaatctcaataacgtcaaactaattcatatctgaaatgtgtgctatttcatctttaatatccttaatctcagcttggactattgttaaattagatattttttcacttaagaaagcaatttctttctctctttgtagtaagtcggtaaccaatctcccaatgcgtagtgttaaatcatttactaatggttctaaacgggaaaagtccttcttgagattatacacctttggttttagatcatttgcaaaagtcactgtcttcagaactttggctctgtcactttctaagcttagaaatctatctgtatgtttgtcgaagtcactctttagttcggttagcgtcttcttaacagagttaattctttgtgaattttcagatgctgtctttcggagcgttgctgttcgatcaatactgcttgaaagaagatcacctannnnnnnnnnnnnnnnnnnnnnnnnnnnnnnnnnnnnnnnnnctagttcttgcacagaatctgtcaatgatattacatcagttactaaacctgaaatccgtcgtatatctgtttttacacttgtaatcttgagaccaacatcttttgccatggaagttgtactttggtctacttttgttatgtcttgagaaagcgtcgtcagactgttgttcagtatatcctgtttttcagttatcctattggaccaagtttttacctcattaatttcttcctgtagacgctttagatgagcaattatttgaaaagacttcaattgttccatgatagcttcagatttctgccacaggccaggcccaggcacgtccccagcgacagcaggctcaggcacgttcgggggtctgcccagcccccg

SEQ ID NO: 120999 - DNA, 1278 bp, Homo Sapiens
cttttttaagacacccataaagaaaccaggggatggaagaaaagtaaccttttttgaacctggctctggggatgaaaatgggactagtaataaagaggatgagttcaggatgccttatctaagtcatcagcagctgcctgctggaattcttcccatggtgcccgaggtcgcccaggctgtaggagttagtcaaggacatcacaccaaagattttaccagggcagctccgaatcctgccaaggccacggtaactgccatgatagcccgagagttgttgtatgggggcacctcgcccacagccgagaccattttaaagaataacatctcttcaggccacgtaccccatggacctctcacgagaccctctgagcaactggactatctttccagagtccagggattccaggttgaatacaaagacttccccaaaaacaacaagaacgaatttgtatctcttatcaattgctcctctcagccacctctgatcagccatggtatcggcaaggatgtggagtcctgccatgatatggctgcgctgaacatcttagagttgctgtctgagtttgaccaacaaagtacagagatgccaagaacaggaaacggaccaatgtctgtgtgtgggaggtgctgaaccttttctggccatgaaccattataaaatcccaacatatatactgaaaatactgaaactgctttgaaaatttggaatttctgatacctccagtgggccgagagacacggtgggtaaaggatgtgggcagcagcagggaagacaacagaaacacaaggaggcggctgtggccgggctggactgtgctggggtttgttgtgatggccactcggtgacctggcggtccctacgcaatagcagctgcctgtggggaagaagggctgcccagccagctggttctcccgggacaccagcagatccacaccctgggcacctccgtgtttggtcttttttttcccctgtgtgaaagaagaaacggcacgaccccttctcaagctggctcactcagacacattgggacaaaccctggacagccatgccagaagagaggcctttgaccgtgcccagagctaaaagcaccagggacaatcaaatgtttcctactcagcgtgacccaacttttctagtgtgccacggccccaccacctctgcagtaccaaccatcacgatggttgctcttcaacaggatcggattctaagttcataatgtctatggatggattgacttattcaaattcattgaaaattttcagatggaatcaaataaa

SEQ ID NO: 121000 - DNA, 941 bp, Homo Sapiens
  misc_feature (105)..(117): n is a, c, g, or t
  misc_feature (606)..(628): n is a, c, g, or t
ttttcattagtagctgtttattgatcaatggtttgatataaagttatttcagatcttcagacttttgcccagatggaatcacaagcattacaaagttttttcttnnnnnnnnnnnnnggataggggcaagttgggaggggaccaacctagcagtagtggcatttgagaataaattaacaaaaaaatttagtattaccatttattgatgacaaacacttaagttttacttacattccatggggagaaaaattccagcgtaaacaatgaatggaagcagtacttaactcgcagggctaccaggctttccatacggaccacacgcagagcctcagtgcacacacttctgtgtacagtaacacaacatcaaaagcaacacagctgtatacagaaacgtaggtcattcttttcagccctaatggagatgtaattaacagtatcgagcactctggaaaatcactctgcaggtttatatggactacatggagatcatatcctgtagtgtagtgaaagctaagtcctcaagagccatatgtatagatacacaatgttttttaataatctttaaaacagagatcaaagttcatttaagtcctgtttgcattaacnnnnnnnnnnnnnnnnnnnnnnnggaaccaaatgatcatctaaagtttaaaattcctaaattgtccaatttatacaactgtgggagacttattcaaggtttttgaaagtccaggactgtttcagctgaaccagagggcacacaatttgcatcactgaaactgtcctgggttagtcaatgaaataaaaatgtctaaccacatacacatggatatgatctttgtcggttagattattgataaagtcagtctcagacaagtttccaaactgtgctatttaactagatacaattgagaaattctcaaatgaaaattttatatagtgtcatatcaatcaaa

SEQ ID NO: 121001 - DNA, 487 bp, Homo Sapiens
tttaataacttcaatttttaataatggaaacaattttgccattctagaaactattttaggggagaaaaatcttccctacaaaaataaacttaaacccatcaaaattataaatattataactttttacttctgccatttaaaatgctctcctgcaataccaccccttcatttaacatccttcctgtaccatcacatattgaagagaaaacagtattacagcaaagcttagatagtttaacataatgatttgtacaatgattcttaaaaaatctttggccttagtggccttttttcttcacttacacattaaaaatgctgctgcagtaaccagtgtttgggaaaggacatcagtcttcaagaaccataaactgacagaatttcaatacagtaggtttccaaattgcaatttgtagtgcacatgacagtaagcgaggttttgggtaaatatagatgaggatgcctattcagacaatctacttcaagtaaa

SEQ ID NO: 121002 - DNA, 597 bp, Homo Sapiens
ttttttcacagttaaataccatgtttaatcatcccacaatggacagtagtgcagtagtagaaattataagtgtctctttaaaaagtcactcccccaaagtttccattccccaatacccagataaccatggtggaacagggccagggtgagggggactcaggaagtcttggttccaaggagatgaaagtctttccaagtcaaatttgccttgtgagcagccaagagcccaatgagttgatgcatacgcgctcactctaacacgcacacatgcaagggacacagaacacatacagatggagggacagagaggggaccacagcggggccatcgcacacatgcgctctcatgccacaacattccagtccatctggggctatctcctctggggacagggagcggtggcctaagccccgaagcagcaggtgccggtcagatggagaggagggaggccgtctgtccagcctggctgctctgacaagggccctggcagcgagagaggcacccgccatccctgacacagtcaatcctccctaatctcgggccggatgggagaagggagtggggctccagtgttaagggggggccagatatcatttc

SEQ ID NO: 121003 - DNA, 3221 bp, Homo Sapiens
  misc_feature (18)..(18): n is a, c, g, or t
  misc_feature (89)..(89): n is a, c, g, or t
  misc_feature (94)..(94): n is a, c, g, or t
  misc_feature (546)..(546): n is a, c, g, or t
  misc_feature (1137)..(1178): n is a, c, g, or t
  misc_feature (1847)..(1847): n is a, c, g, or t
  misc_feature (2695)..(2704): n is a, c, g, or t
tagttttcatctagtttnacgtccgactgactcgacgtgcgtctggagagaagagtgtctttatgtagcccgcgaccgcgatttagtanacgcnccgtagatcacaatcgtcgagcgtcctcgtgctcagaaaggggcgggggtgccgaccgcatgcgcgtcgcgcggtgccgcgcaggttagaccagccgccttggatcgggcgtggtttggtggcgccgccggttaagggagaacgggcggtgagtgtgctgttcggggggggaagtatatagacgcccgtcactgttattatgtcgcgcacgaaagcgatggccccgatatatgcaccgcacccaacgaccgcgtcagaggagggatcaactaccatcctccatgcgtcgtggtggtgacaccttcacgttatgcgctgttatgctgcgagcgccggcggattttctttggcgccggcgacccagatggtgctggttttgtgagtcctccacacgacggcgggaggggagagatattgtctctctttgcatagagctcagggcgcaacacggncaggcggtacacgagacaccggccatgaggcgcggtatgtaatcaagcacatgggtcgggcggctgagaagtatagggcgggccgccgggcgccgcaaatggtaagcgggtgactgtagatgaatagacggggcacatagcgcgcggttctagcggcaacctatcacgcccgcgtccgaaatgcaagagaatctgcacgcgagacggtgaaggtctggtaaacaacgagtgctctgggggcggcgtcacccgcgctctcgccgtgcccaggacggggatagtgcgcgtgtggcgggaggggcgccgctagagagacatccctcggcggagcgggcgttccgggcagagctctgtccggcgtgcatctgcaggggggtctcttccttctccccgcgagccccgtttttctacgagggagtgttgtgttgacgggctggggtccaagaggcccgtaggtgcttggggaaatccttctttgggccaccgggttcttaaccgaagttgcgccggcaatcccagatgcaagggtgaagggaagactccctcccagggaggggtgcggtggacccacatctggcgcgaggggctgcnnnnnnnnnnnnnnnnnnnnnnnnnnnnnnnnnnnnnnnnnntagccaaaactgcaaacatttgaaatttaattttgaataaaaattacagcttatgcaccaagataacattagaaagtgtcttcagacattttatcaggtattttcctcattacacccaaccaaacacagaaagaaatatatatttttgaaatgtcaattactgctatgctatcaaaagctgacatttattacaaatttctgaaatccttcataagcaagtatttgattaaacaaaaatggaaaatgttactaggagatatagtttatacctggctgttgagtacattagtatcagagaaattcatgtaactatatttaaacagaacttcagtttagggtcttttcagaccacaattatataacttgttcaaaatcccactagtttcttcttaacagtcttggtaagagatgaaactgatatacttcagaggccatttccctaggagtactgcttttaaaaatcatgcaaaacaaaagccaaatagtgatgttatattttaacccaggctgcagctatttgtgttgatctgaaagcttacaagtaaatccactgttaggaatgagcactgtaaaagctatcagctatcagcgtgaacccttccatggtttcctttgatcacatgacatcattatgatttccttctccttgcgttagtgggtaaaggtcanaggaatgcctaggcaaatatgaagagaagttattttggcatagaatctcattttttactaccagctcctaacgtttttctcacattatgcatacctattagcaggagattggatttttatttataggtccacataaagcttcaaggaaataaccagcattagtacctcctcacctgaaaaaggcttaagtaaacactaattaaaacatttaggatcttagttgtatcaatacttctggtacctgaaagctcttttaaatgtaagggttttctttttattgttttatttacctaggattctaagaaactgagaagtcatagctttcccttaaattatacatcatacatacattgtaagaatatagaaaattaaataaatcaaataattaaatattaagttaaatgcatgactacatatattaaatttggaaattcaaagcattaatagaacagagaaaccagctaaaacaaattgtagcttttaaaataaacaataaagcccgttatttattatctaaaagccagtaaatacatttacttctttggtacccattaaaatagttgcatttgcagaggatgtttagggcagcgaaactatactatattataatgatgcatacatatcatcatatatttgtcctctagcatgtataacaccaagaggggactctaatgtaaaccatgaactttggatgataatgatgtttcagagtaggttcattgattgtaacaaatgtaccattgtggtgcaggatactgatagcctgggaggctgttgagggctttgtcaggggagaaaggaaatctctatcttcctctcaatttttctgttaacctacaactgctctnnnnnnnnnngtctatttttaaaaacaatttttaaaagttgtattcgtctcagattcaaaatattatcacacaggtgatttatcttaaaaatccatgtgagtactgacctatatgtcattttttgcaaatctaaaacaaaatatttcaaaatgttcagtggcagagagtactggtaccacaaatcagagcagtagaagcaaaggggatataagatgtggacattttgtagcttgaggagatggcacctagggaaaagagaattaagtgtttatttgggaaaatgttaatgatatacacagaacataggagctggaataaagaaggcatgcttaggttatagcaaggtatactcctggcctaaaatatcaccatctttctctgcatgcctgggacaagtaagaatgggggcagaaaaaaagggaagactgagaacacagagcacttagtctacttattagcaaaaataaagtgagattcccggccgtaatggccgaattcccgggcatatgtccggtaccgtcgactg

SEQ ID NO: 121004 - DNA, 490 bp, Homo Sapiens
cttcagccaaagaaacaagccgtggaataggtgtatcaagtaatggtgcaaagcctgaaaaatcatgaatgtggtctgcagacattgatgaagaaaatctgttggtaaattgatacatgggctaaagcatccagaggtttaatttgaagtttatgttcacacactgaaaacttagtttttttgttggtagatccatgtgcatgctagaatttgggacaggcactatttgcataaagtattaaagtcaatttttaaactaagcaaaggtacacgttgtaacggtggggcatctgtgaaaaagatgtccctttcataatatatgcaatatattccagatgttttgagagattacagaagaggaggcctgcttcacttgcagataagtttattataattctccagaaatgtgcaggatgtgcattagcaaattgcactgtacttttcactccagcctgggtgacagagcgaagactcccgtctcgggggctta

SEQ ID NO: 121005 - DNA, 1372 bp, Homo Sapiens
  misc_feature (976)..(988): n is a, c, g, or t
  misc_feature (997)..(1033): n is a, c, g, or t
ttttttaagaatgaaaacaagaaatttattaaatatacaaaacaggaatacagttcaattactgtgtctaaaaaatttcatttttacataaccaagacaatatttacaactatatacaaaagactcccacctgtgcataacctttggtccatctgtgctatctctcatatctgcaagagaaacctaaaatgttaatatttgagtgttaagtatttacatctttttgtgttggtttttaaatgcacaagtacccctgaatggctcaaagggatgggataatgctagaaacactaacttgcaataaagtgcagttttcatgcaaacttagccatcagttttcttcttttagataggtatccacagtccatatggactttttttctgatctatttttggtgatcttgaagatgcctcttctgtggcagctttagctgatttttgtattggctttgctacagaattattagagctaaaagctatgcttctttgctgggtaggttttccattgggatttcgagttccatcttctgttaccttttccgacagctagacaggttaagaaaaagtgtaattttaaaacacatacccttggtttctaaatcctatattaaaaaatagcctaattgtaaacaaaatttagctgtagacacaaaaatcaacttggatctaacagcctaagtaacagaactattgagttttccccttaacacaactgatttaatattaggcttaagacactcttcccataattattttacttccctgctggcaaatttaaactgagttttttaatcagttttctcagggttgaatcaagttcacttttgaaatgttaagccacatcagtaaatacgttttaagaaactaaggcatttgccagttaggcacctaatcgtctgaacacaagaccttgtctactaatactgagccaacccacatctgggccccattacacagattcatttagaaacagcannnnnnnnnnnnnaagcccccnnnnnnnnnnnnnnnnnnnnnnnnnnnnnnnnnnnnnaaaagtacagtgcaatttgctaatgcacatcctgcacatttctggagaattataataaacttatctgcaagtgaagcaggcctcctcttctgtaatctctcaaaacatctggaatatattgcatatattatgaaagggacatctttttcacagatgccccaccgttacaacgtgtacctttgcttagtttaaaaattgactttaatactttatgcaaatagtgcctgtcccaaattctagcatgcacatggatctaccaacaaaaaaactaagttttcagtgtgtgaaccccggccgtaatggccgaattcccgggcatatgtccggtaccgtcgactg

SEQ ID NO: 121006 - DNA, 1485 bp, Homo Sapiens
ttaaattcctttttttgaaaacaagaaatttattaaatatacaaaacaggaatacagttcaattactgtgtctaaaaaatttcatttttacataaccaagacaatatttacaactatatacaaaagactcccacctgtgcataacctttggtccatctgtgctatctctcatatctgcaagagaaacctaaaatgttaatatttgagtgttaagtatttacatctttttgtgttggtttttaaatgcacaagtacccctgaatggctcaaagggatgggataatgctagaaacactaacttgcaataaagtgcagttttcatgcaaacttagccatcagttttcttcttttagataggtatccacagtccatatggactttttttctgatctatttttggtgatcttgaagatgcctcttctgtggcagctttagctgatttttgtattggctttgctacagaattattagagctaaaagctatgcttctttgctgggtaggtttttcattgggatttcgagttccatcttctgttaccttttccgacagttcaggctttgcaccattacttgatacacctattccacggcttgtttctttggctgaaggaacagttctgagactagctggcaagtcaatgttggttgttcctagagctttcgctgcattggtttttgctatttctaacagctccattcgatctttttcacttaagcgaaagggggttctgctccgcgacctcgtcctggatctgtccctccatctgctgtgctcctccgggtacactgtgcgaccaaagccgtagtagcgctgtccccgcgcgatcgcgtacgcccttccgcagtacgaccttccccgagagcgcgacctgctacgggaccgggaccggtaccgcgaaggagaccggtagtatctcctggtgaacccgtagcgcctctctcggtaacggcggctgcgggatcgcgaccggctccgcgagtatgaccgcgagtagcgcctgtacttccgctggtggcgccttcgggaacgggacctggacttgctcctccgactcctggacgaaaaccggctcgagacgcgggaatgggaccgagagcttctggaaaaagagcggctcctagaccgcgacgacagccggctggacccgcccgaccgcgaggtcgagggcgaatccttctcctgcggcgagcccggccacatgtcgttcacgtagttggacatcttcacctgcggctttagcctgcgctttctccggaaaggatcccgcaagcctcaactcaggacttccgcacgccgtcgacgcctccctcacgactgagagaaaggctcaacagacgccttcctttcggaacgtaagacgaagtggggcttttagtccctgctttcgaacggcgaattccacaacctccacctcctacgtccggatgcgcactccccggccgtaatggccgaattcccgggcatatgtccggtaccgtcgactg

SEQ ID NO: 121007 - DNA, 994 bp, Homo Sapiens
  misc_feature (630)..(893): n is a, c, g, or t
tttaagcccccgagacgggagtcttgctctgtcacccaggctggagtgaaaagtacagtgcaatttgctaatgcacatcctgcacatttctggagaattataataaacttatctgcaagtgaagcaggcctcctcttctgtaatctctcaaaacatctggaatatattgcatatattatgaaagggacatctttttcacagatgccccaccgttacaacgtgtacctttgcttagtttaaaaattgacttttaatactttatgcaaatagtgcctgtcccaaattctagcatgcacatggatctaccaacaaaaaaactaagttttcagtgtgtgaacataaacttcaaattaaacctctgatgctttagcccatgtatcaattaccaacagattttcttcatcaatgtctgcagaccacattcatgatttctataagacagaaatagagcagataaactatactgtatatgctgagtacagaatttgtgggaacataatgctgcaaatgaaagctacaaacactctgtaaatagcttagaaaaactagtaatagaaatcaccaaagtaccagctaataacggtgttataagagtacactgttaactgaaaatgaaaaaaataaatgtannnnnnnnnnnnnnnnnnnnnnnnnnnnnnnnnnnnnnnnnnnnnnnnnnnnnnnnnnnnnnnnnnnnnnnnnnnnnnnnnnnnnnnnnnnnnnnnnnnnnnnnnnnnnnnnnnnnnnnnnnnnnnnnnnnnnnnnnnnnnnnnnnnnnnnnnnnnnnnnnnnnnnnnnnnnnnnnnnnnnnnnnnnnnnnnnnnnnnnnnnnnnnnnnnnnnnnnnnnnnnnnnnnnnnnnnnnnnnnnnnnnnnnnnnnnnnnnnnnnnnnnaaataaagctcattaatctcccattttcatgggtttgacattgcctatcttcccggccgtaatggccgaattcccgggcatatgtccggtaccgtcgactg

SEQ ID NO: 121008 - DNA, 438 bp, Homo Sapiens
taaacacgcggttttgccacattgcccaggctagtcttgaactcctggactcaagccatctgcctcattacaggcatgaggcaccatgcacggccaaataaagctcattaatctcccattttcatgggtttgacattgcctatcttcagatttgctactttgaatttagcacattatatacatctctagacttcccaaaaagtatagtctaagatataagtggctaatcagatttgacagttggctttctgaaagttttgttccgacaaacctagaatacttacttcaggctttgcaccattacttgatacacctattccacggcttgtttctttggctgaaggaacagttctgagactagctggcaagtcaatgttggttgttcctagagctttcgctgcattggtttttgctatttctaacagctccattcgatct

SEQ ID NO: 121009 - DNA, 1069 bp, Homo Sapiens
  misc_feature (739)..(739): n is a, c, g, or t
  misc_feature (761)..(761): n is a, c, g, or t
  misc_feature (769)..(769): n is a, c, g, or t
  misc_feature (774)..(774): n is a, c, g, or t
  misc_feature (793)..(793): n is a, c, g, or t
  misc_feature (796)..(797): n is a, c, g, or t
  misc_feature (839)..(839): n is a, c, g, or t
  misc_feature (842)..(842): n is a, c, g, or t
  misc_feature (848)..(849): n is a, c, g, or t
  misc_feature (933)..(933): n is a, c, g, or t
  misc_feature (987)..(987): n is a, c, g, or t
accacattaaatgtttacacaatttattttccttaaataataatttgctacaatcctgtcacaaatttaaaaaaatttaacacggtattcacaaaggcagaattctttaggacaatcaaaatgatggtgttcttagaataaattaacatcagattgtgtttatattcagatagtctgatcctctcctttgaaatgcaatggagaccattgtgactgggggtgaatgcacacatttgttcttccatacagagactcattctttatatatactcaacggtaatttgaatcgttaggaatcctgagaaacactcacccctgggcacacacatgtacacagccccacggccaaccctccagaagctgggtttcccatggttcaattactagaagctcttttctcagaaggccaaacattcggaatatttagatgacactgtcccatctccccttgggaaaatcataaggtttcaagtggaggagcttgaagtagcagcaatacatgtaggagattcagtagtcggtgattccagtcctgggtgctgagtgtgcagtaggaggcaagcagaggcaagagacacacctgcttctacaactaagccacaagatgaccagaacacactgagagtaccagttctcagagcctcagctgaaaattcacctgaatgcacattactaatccaggttaggcaccaagagggaacctgaagagggacacattctcagaaacatgaatattggnagtcgctgggagatgggacaanggaagganggcanagaggtgttgctcaacttncannctgacccccatgccctgcatctagtaatacgtcaggtttccntancatcanngcgggtgatctgaatttgtcagctcactaaagcacagaagtcagccttacatctgaacacagaacaacaacatccaatgaccanatacacacatcttgtgctgggaagcacactctgtggtgtccgtctcatgctcangatgcacaggtttgtggtgagtaggaaaaagataagcagccactgaatcttttgtactccaaaaataagccatgagcaattg

SEQ ID NO: 121010 - DNA, 604 bp, Homo Sapiens
cagattctaacaagaatacttttattatacacgtatcatacacacaacaattattttggggaacatttacaggcagagagttcaattccaaatctccatttcacccacacacactgtactgcacactcaccttagggttcagcccaacaggaacgagacaaagttattgctttctgaacagagagtttcaattaaatagaatcttccaagccaagaacagagcccagcatcctcttaattcttaataccctgtatatatatgaataaaaccttatgatgtgttatagattaccccatcaccattaaaagttaatattaaaattggatcccatgtctcaaaaaagtcgtaagaagtgcaccagtatttacagaccccattaaattacgcataaataaaatctgtacactcaacgcactgtttcttaaaatacagaacctccacggggacttgggggtgacaagcagcaacaaattgcttcgtgcctacccttttcaagtttactcgaaacatctgaaataaatatgcaaataaagcttcagtaccttaaaggaacatgtcatttcaaagagtctcccatttgaagagttaactttcaaagttaaa

SEQ ID NO: 121011 - DNA, 2802 bp, Homo Sapiens
  misc_feature (1771)..(1806): n is a, c, g, or t
  misc_feature (2745)..(2762): n is a, c, g, or t
agagtatgaagtcgacggcgcgccgaattcggcacgagggattaaagtatggacagccaacccccaacaatttgtagaagatgaagatgatgatacattctcctatactgttagaatagcagctcaagacttgttgctggctgtggccacagatttccagaatgaaagtgcagcagccctggctgctgcagccactcgacatttacaagaagctgagcaaaccaaaaacagtggcactgagcactggtggaagatccatgaggcatgcatgcttgccctaggctcagtgaaggccatcatcactgacagtgtgaaaaatggcaggattcattttgacatgcatgggttcctgaccaatgtcatccttgcagacctcaacctctcagtgtctcctttcctcttgggccgggcactttgggctgccagtcggttcactgttgctatgtcccctgaactgatccagcagttcctacaggcaacagttagtggtcttcacgagacacagcccccatcagttcgaatttctgcagtgagagccatctggggttattgtgaccaactgaaagtctcagagagtacccacgtgctccagcccttcctccccagcatccttgatggcttaattcacctagcagcccagttcagctcagaggtcctcaacctggtgatggagaccctgtgcatcgtttgtacagtagaccccgaattcacagcaagcatggaaagcaaaatctgccccttcaccatcgccattttcctaaagtacagtaatgatcccgtcgtcgcctcactggctcaggacatcttcaaggagctgtcccagattgaagcctgtcagggcccaatgcaaatgaggctgattcccactctggtcagcataatgcaggccccagcagacaagattcctgcagggctttgtgcgacaccagttgatatcctgacaacagtagtacgaaatacaaagcctcccctttcccagcttctcatctgccaagctttccctgctgtggcacagtgtacccttcacacagatgacaatgccaccatgcagaatggcggagagtgcttgcgggcctatgtgtcagtgaccctggaacaagtagcccagtggcatgatgagcagggccacaatggactgtggtatgtgatgcaagtggtgagccagctcctggacccccgcacctcagagttcactgcggcctttgtgggccgccttgtttccaccctcatctccaaggcagggcgggaactcggggagaatctagaccagattcttcgtgccatcctcagtaagatgcagcaggcagagacgctcagtgtcatgcagtccctgatcatggtgttcgctcatctggtgcacactcagctagaacctctcttggagttcctgtgtagcctcccaggacctactggcaaacctgctctagagtttgtgatggctgagtggacaagccgacagcacctgttctatggacagtatgaaggcaaagtcagctctgtggcactctgtaagctgctccagcatggcatcaatgcagatgacaaacggctacaggatatccgtgtgaagggagaggagatctacagcatggatgagggcatccgcacccgctctaagtcagccaaaaacccagaacgctggacaaacattcctttgctggtcaagatcctaaagctgatcatcaacgagctctccaacgtcatggaggctaatgccgctcgccaggccactcctgcagagtggagtcaagatgactccaatgatatgtgnnnnnnnnnnnnnnnnnnnnnnnnnnnnnnnnnnnntggtttagctggccaacttttatctgacattcttgctacaagtaaatatgaggaggattactacgaggatgatgaggaagatgaccctgatgccctgaaggatcctctctatcagattgatctgcaggcatatctcacagatttcctctgccagtttgctcagcagccctgctacataatgttttcaggccaccttaatgacaatgagaggcgagttctacagaccatcggcatctaaaaaggggagcctttctacatttgctccttctgggccagccgcaaaccattttgcagccctcactggccttgagatgcactttcttctcaacctaaagtggcatcttgacccttggcccttggcctcggcagtgacactgatgacaattcagaccaggctcaccggtgccgtcacttaggaatgctggaacaaaggacatttctcaaagttcccctgaagacatgccatctctagaaccttttttctccccgactctacccccacctctgttcctagagccctctgctggcgagtccagaaacattattgcccagaaggattatgtgtttatggattattttgccccgcctcaggagcgcaggaagtcactaccatttatattctaaaacagacctatctatgttcataggacttctgatgtgttcagataggaatcctcatgagagatcattatgctttgtgccctggaccactgctgctctgggttctcaggaggaacaggcaagagcagcttcattctaagcctttccagtgacctcagccttgcttctcttctacaacactaaggctcctctgtcagaggaggtcgtcttgtttttgcttcattgcatgacataacccttcccctcaagctgttcctatatatacatgcacacacaaaataagccagacagatggcaatttgatcttccttttgtagnnnnnnnnnnnnnnnnnntcgtctgcaatttcgccacccaggctcgtacttagacgta

SEQ ID NO: 121012 - DNA, 428 bp, Homo Sapiens
  misc_feature (404)..(404): n is a, c, g, or t
caattagtgactcaacaacccaagttgataattggacaattggtaacttgatctgccaggctaaaagtctcctgggagtaagggcttggtgcaccttgactccactctgcaggagtggcctggcgagcggcattagcctccatgacgttggagagctcgttgatgtatcagctttaggtatctgtgacccagcaaaggaatgtttgtccagcgttctgggttttggcctgacttagaccgggtccggatgccctctatcccatcctgtagatctcctctcccttcacacggtatatcctgtacccgtgtgttatggacattagatcccatgcgggagcagctacaagagtcccacagagctgacttgcctttaatactgtcaatagaacaggtgctgtcgggcntgtccactcacctatcacaaatct

SEQ ID NO: 121013 - DNA, 2353 bp, Homo Sapiens
  misc_feature (154)..(200): n is a, c, g, or t
aaaaggacactaaggttttaataaggggaacaaaaaattgttttcaccagcatagattcacattacagtacaccaatattgacagcattctcttgtctatttttggtacagaagatggtatctctctacataaccttgtaaggcttcagtaacnnnnnnnnnnnnnnnnnnnnnnnnnnnnnnnnnnnnnnnnnnnnnnncccagcctattagtttacagtttattttaaaaattccgaaagacactgcaagttctaaacttttagtagtgctacccatacacaaccatctggttaagaacccagtaaaagagcccccttccaaggaagctttgcaacagtagagttgtgcaatatggatgtttcttactacaagaaaaaaattatacatggcacattctcattcatattctgtaatgtaaaaagttacaaacatacctaatcaaataaataataataaaaaaagaatttgaatgtatttgttaagtatcctaaaaccactacatagaataatggcaactttcactcacagattatttacatggtaatacccagcgtgggtacactgctacaaaactcaaaacagaaggagtaaacttgaaatgttttccataataaagatctagcagcatgactatctaatgctgttttatcccgattgcttctgcaacgttcctttttagtctgtgtcttcatccagttcataattgtctttatcataaatatcttttactagaagaacccgtacaagcatattttccaaggtgtttcggtccagtgaagtagacgtataccagacagggctatctgtagaactagagcattctggttgcaaataaaaaacatccatcctctgattaagattctgtggacttttagacaagtagcattcaaacattttcacaggacatctggaaggattggctgtgttttcaatttgttcaaatactggctcatcatcttcatgttttcttgtttccagtagtaattttatcttcattatctgttccacacaaggaagacacttggtatcgaagacacgctttgttttccatcgttcaaggattttttttccaatgcctaaacacagtgccaaaggaaagtcttaagtgttgttccactgttttcaggccaaaatacttagtgttaaagtagaacagtgtattcagaagagctactggagagtgtgatcctagttgttttatcctccagagatagtcttcttcaactcgagagaatattgacccatctggaagtatgcttggttgccagcttcgcagtattttattcaattcttgctcatatgtttggtatccaggatcaataaatatgttgtcttttcgatttacttccacacaaatactcctgtattccaaggcaaaggtaatagatgtctgtcaggtgcataattctctccatttggccgtcggatctcattgacagaatgagctaacccatagttaagctcagctgtggtgtgagagagtagatcctcttttaactttactgatttagaagattttaactcatctaataccagaagatcttcatcaagttgcctagttttgacccagtgtttccatgcattatacgccatacgtagtattctgaaaggaaagctgcattctgaattgtcagaactatcatcatgagactggtatcctgatacagcctttctcttggctcccttttttttagatcgaggtctgggctgttcctcatattcttcgccaaaaacaggtggtaataaaaattcattttccatatcaagctcctcagcagctctgggaaaatctatttcgatatccaaatctggttcatatggtacatcaggcatgctggactgtgtctctgggtcagagttcttcaaaaggtctgaaccaattatatctgtttcaataattacactgttgatgttggttgtctctgttttcccctcgtcttcactcatcatatccgtcattgtaagcaactctgtatcaagagcatctgaagaaaccttgctttttagctcctcaattgctgcaggaatcttctcactgctgtccaatggagcaggcagaaaaacaggaactggcacaggaacaggaactgtagtaggaacaggaatattctgactgtacatgtgcataggaactgggatatacacaggcacagggataggcactggaacatattctgtcctccaagtatcatctgtctgacaagatttggtctgcatgtgaggtttacagtaagtagcttttgtcattgttaaaggtttgcaaagaactgctttgttcttcatctctttgttaggtgttggagaagggggtggcctcgtgccggaatcgccacccaggcctcgctacctt

SEQ ID NO: 121014 - DNA, 1024 bp, Homo Sapiens
  misc_feature (258)..(303): n is a, c, g, or t
  misc_feature (518)..(541): n is a, c, g, or t
  misc_feature (559)..(930): n is a, c, g, or t
  misc_feature (939)..(939): n is a, c, g, or t
attattatttatttgattaggtatgtttgtaactttttacattacagaatatgaatgagaatgtgccatgtataatttttttcttgtagtaagaaacatccatattgcacaactctactgttgcaaagcttccttggaagggggctcttttactgggttcttaaccagatggttgtgtatgggtagcactactaaaagtttagaacttgcagtgtctttcggaatttttaaaataaactgtaaactaataggctgggnnnnnnnnnnnnnnnnnnnnnnnnnnnnnnnnnnnnnnnnnnnnnnagttactgaagccttacaaggttatgtagagagataccatcttctgtaccaaaaatagacaagagaatgctgtcaatattggtgtactgtaatgtgaatctatgctggtgaaaacaattttttgttccccttattaaaaccttagtgtccttttctcatttgtggctttctgcatcacccaatcaataaaaaacaaatatatatatgtatataannnnnnnnnnnnnnnnnnnnnnnncctcgtgccgaattcttnnnnnnnnnnnnnnnnnnnnnnnnnnnnnnnnnnnnnnnnnnnnnnnnnnnnnnnnnnnnnnnnnnnnnnnnnnnnnnnnnnnnnnnnnnnnnnnnnnnnnnnnnnnnnnnnnnnnnnnnnnnnnnnnnnnnnnnnnnnnnnnnnnnnnnnnnnnnnnnnnnnnnnnnnnnnnnnnnnnnnnnnnnnnnnnnnnnnnnnnnnnnnnnnnnnnnnnnnnnnnnnnnnnnnnnnnnnnnnnnnnnnnnnnnnnnnnnnnnnnnnnnnnnnnnnnnnnnnnnnnnnnnnnnnnnnnnnnnnnnnnnnnnnnnnnnnnnnnnnnnnnnnnnnnnnnnnnnnnnnnnnnnnnnnnnnnnnnnnnnnnnnnnnnnnnngatacccangaaggacatgtgagcaaaggccacaaaaggcacgaacgtaaaaggccgcgttgcggggttttccatagtccggcccctgacgaca

SEQ ID NO: 121015 - DNA, 1839 bp, Homo Sapiens
  misc_feature (1696)..(1730): n is a, c, g, or t
  misc_feature (1734)..(1772): n is a, c, g, or t
ttttttttacgtattttatcattttattaggaataattccaaatgggttatgaagaaaatgtattcatcgaatttgatgagttttccaaaaactcttaatgaagatatgtctgcccaataaacaaaacatcagcagaactatcatatactgagcaaaaaatcaggctgataacaaaagcaacatgcaacataaaaaagacacaatataaaggaagacaatctgctgagtattaaaaaccatctaaatatcaattctttgcaaccagcacagaactaattggctatcaaatccaaaccccaccaaggttaagtttggctgatgtaggccaggagtcaatgtagggggaaaaatttcctcagtgcaagagagctgagtagtgttttggatctttctctggctggtacaagcagtattagaaaatctttttggcaagggagagaaataaatacaaatggaatgctacatttttaaattagcaaactgtctcaggaatgataaaggtatcagtaaagtagcaaggggataactttaaaacattatttgtctggggctcaaaaaacactcaaaacaatttatttaaaggttgcacaagagctatgtccaggcatttacgcttatgggaagtaaaattaaaagaggatacttttttcccaaggagaatttctttaaaaccaagcacattgctaaatagcaacattatactcggtaaacaataattggcaacaaaataagtttaatattctgcccaaaccagtcccagatactgtttaataaccaagatacaaactaattttgttgtaacaagcctagaccaattttatcaaacatgtccttggttagatatccaatttcatttaacgttttgaaagctcatttgacagccagtcaagtccttcatacagaccagttccttgtgttgcacaagtggcttgaacataccatgttctgttacgaagagactgaagccctagtttatctgtcatttcactgatggccatagcatttggcaaatcctgtttgtttgcaaaaagtagcagcactgcatctctcaattcatctaccagaagcattttctgcagctcatctgctacttcctgaattctttcacgatcgttgctatctaccacaaaaataagaccctgggtattctggaagtaatgcttccagagaggcctaattctatcttgaccaccaacatcccatactgtgaaacaaatgttcttatattctactgtttccacattaaaaccaatggtaggaatggtggtgactatctcccctaacttcagtttatacagaatggttgtcttgccagcagcatccaatccaaccatcaaaatgcgcatctgcttcttgccaaatagtcgggagaagagggaggagatagtgaggcccatggcggtagtggcacttgtgatgggcagaagcagaaggggtttggggcgaccccgtgctttctcctttcaagctcccaggcaaactaaacgagagggaagagaaagagcggaggaagaaagagggaggcagaaacgtctcagtggcccctgtgccgatgaagatccggcacaggaataagccggtagaggacctgctaggcgactggcgcggcagctccggctctagcctttaggctctggctgtgcccccggccgtaatggccgaattcccgggcatatgtccggtaccgtcgactgnnnnnnnnnnnnnnnnnnnnnnnnnnnnnnnnnnncggnnnnnnnnnnnnnnnnnnnnnnnnnnnnnnnnnnnnnnnctagacgaaaacggacggcctgaaggccgccccctcttaatttaggttgaggttttaatttcgagtg

SEQ ID NO: 121016 - DNA, 1002 bp, Homo Sapiens
  misc_feature (885)..(919): n is a, c, g, or t
tgcccaatttttatcaaaaccttgtccctgggttaggatatcccaatttccatttaaagcgttttgaaagggtcatttgaccagcccagtccaagtcctttcatacaggaccagtttccttgtgttgcaccagttggcttgaaccataccatgttcttgttacggaagagactgaagcccctagtttatctgtcatttcactgatggccatagcatttggcaaatcctttttgtttgcaaaaagtagcagccctgcatctctcaattcatctaccagaagcattttctgcagctcatctgctacttcctgaattctttcacgatcgttgctatctaccacaaaaataagaccctgggtattctggaagtaatgcttccagagaggcctaattctatcttgaccaccaacatcccatactgtgaaacaaatgttcttatattctactgtttccacattaaaaccaatggtaggaatggtggtgactatctcccctaacttcagtttatacagaatggttgtcttgccagcagcatccaatccaaccatcaaaatgcgcatctgcttcttgccaaatagtcgggagaagagggaggagatagtgaggcccatggcggtagtggcacttgtgatgggcagaagcagaaggggtttggggcgaccccgtgctttctcctttcaagctcccaggcaaactaaacgagagggaagagaaagagcggaggaagaaagagggaggcagaaacgtctcagtggcccctgtgccgatgaagatccggcacaggaataagccggtagaggacctgctaggcgactggcgcggcagctccggctcccccggccgtaatggccgaattcccgggcatatgtccggtaccgtcgactgnnnnnnnnnnnnnnnnnnnnnnnnnnnnnnnnnnncggccgcttcctcgctcactacctcgctgcgctcgtcgttcggctcacggcagcgcccatagggtattcattacttttcgcgg

SEQ ID NO: 121017 - DNA, 1079 bp, Homo Sapiens
attggggagaatttgttgcgggaaccgcattcgggtttccccgcaccggggcgtattttttatatgggggaggaaatcccaaggcggttaattccaagaccaggggttttctccttaggaaaaccgggttatggacccatgttcggctttccctaattgggccccgcggggcccaaacagaatggttttagaaaagtttttcagaggccggaggcggcccaacagggtataaggtaggggaaaatgggtgggagtgagcttttgaaatcatgggttttagtttattatttttaatatatttctgaaaatgtataatatcaagactgtctgataatgcttttttaatactttccagttctgccaacattcctgtcatgcatccttaataacaatgctctcccagaaccgggatggggggcggtgaggtggggttggtgggggagtacgtttctgagctagttaaagtcactgaggagggcccatacctcaatgtgtgttgagttacaattagaaattagtcatggaaggacatgtctaccacagatatctttcctcacatttaaattattccatttcttcctacagtcctccttctatctttagttccattttaaataacccttcatcctacatacccatttatcttgcttcctttttctcccttttgtcccactagtataagagattgtgcttcagtaaactatcctgatgtggagagaaaaaaatcaaaatgtgatcaataataatagtttaacaaagttaagattgcatgctctaaaaacataagtgattaactgttggatgcccaaaagcactctttgtttcctttccaagttgatgactcttcgtatatttcctttttccatatgggcaccttggcttttaaagtatcaatggcatagctcacagcttcaagagatgcagctctgtgggctgaggacacagcaatgattatgcttgcttctgacactggaaccaagccaagtctatggaacactgctatgtgtttgactggccatttctgcctaatgtcactacaaatctttctgacttcattttccgccatggtgcccatatgg

SEQ ID NO: 121018 - DNA, 604 bp, Homo Sapiens
  misc_feature (95)..(130): n is a, c, g, or t
gtcccactagtataagagattgtgcttcagtaaactatcctgatgtggagagaaaaaaatcaaaatgtgatcaataataatagtttaacaaagtnnnnnnnnnnnnnnnnnnnnnnnnnnnnnnnnnnnngttggatgcccaaaagcactctttgtttcctttccaagttgatgactcttcgtatatttcctttttccatatgggcaccttggcttttaaagtatcaatggcatagctcacagcttcaagagatgcagctctgtgggctgaggacacagcaatgattatgcttgcttctgacactggaaccaagccaagtctatggaacactgctatgtgtttgactggccatttctgcctaatgtcactacaaatctttctgacttcattttccgccatgggtagatatgcttcatattctaagctaatgacttttttcccttcaaagttatttcttgtagtccctacaaatagggatattgcaccacagagcggagaaatcaccaactgtgagacttcatctactgaaagtttctcggcagtaaagtttataacatctttagatttctcttcaacttcatccatatctttcctagatggctc

SEQ ID NO: 121019 - DNA, 936 bp, Homo Sapiens
  misc_feature (120)..(120): n is a, c, g, or t
tgagagaaaaatcaaatgtgatcataataatagttaacaaagttaagattgcatgctctaaaacataagtgattaactgttggatgcccaaaagcactctttgtttccgtttccaagtgnatgactcttcgtatatttcctgtgttccatatgggcaccttggcttttaaagtatcaatggcatagctcacagcttcaagagatgcagctctgttggggctgaggacacagcaatgattatgcttgcttctgacactggaaccaagccaagtctatggaacactgctatgtgtttgactggccatttctgcctaatgtcactacaaatctttctgacttcattttccgccatgggtagatatgcttcatattctaagctaatgacttttttcccttcaaagttatttcttgtagtccctacaaatagggatattgcaccacagagcggagaaatcaccaactgtgagacttcatctactgaaagtttctcggcagtaaagtttataacatctttagatttctcttcaacttcatccatatctttcctagatggctcaaaagcactatcctccactaatgggggggataacggcaatttcgtctccaggctgaagcacgaggagctgatctccaagctcgacatattcttgacgaacagcaaatattatctgatttctaacatcagccaatccaggatgtcgagtttctatctccttccacagctgcaacgcttttatttcttgaggcacagaaatggtctctgaacgaactcctgttatttcagcactttttgcaaaatacaatacttcaacctggcacagcggcaccatcccgcctaggacagcgggaccgcggacgcgtgggtcgacgatatcccgggaattccggaccgtaccagcctgcttttttgtcccaagctgtttatagtgtccatgc

SEQ ID NO: 121020 - DNA, 672 bp, Homo Sapiens
tttaagcaatgaaatattttatttgctgaaataggtataacacttaaataaaaattaaacaaatgtttaatatctccttccatgaaacagcagcagcaagagatagcaagtgttcggaagtctcttcaatccatgttattctgatgactctttgaagaaagaacttgaacctcctgcacagggggatttccttcactcatagattcccctaacttcatctcctcttttccttgggctattagtcagtcaatatgcttgtgaacctgttcaggtgcttgatgacatgcagtcttgaatatatttagatgaaggtgtcttgaaatttgcaggcacaaagcactaaagtatatcaccatatcaaatgaagaaatcaccattgccatccatagaacaacatattcgtctataaaattattaaagtactggtctaaaaacaaaagacctggccccaaaaagacagtgtcttgaagatttagttcacttttggtcatgtgagctaccactaatttttgtgagactttagcaaagacacatccaaacattaggatataaagacaaggatgcttttcaaacacatcagttgctgactttttatagatcattattgccagtataataattagtcctatgtggagtccaggtgacaagacactggtgcctgctatagtggat

SEQ ID NO: 121021 - DNA, 473 bp, Homo Sapiens
  misc_feature (353)..(361): n is a, c, g, or t
ttttttaaaattaaatcgtctttatttaattgacagtgttagagagaaaaattcactatcattactaaagagctgaaagcttaatacatattctttaggaatagttgctaactaactcataactatttagatttgacttaacagaaagggaggtcttacaatgaaacaggtttatgattaaagatgttacaattaaactattctaaagacttacaatatgcttcttagctaacgttataattgtatcatattacttaggttcaagttctttcttcaaagagtcatcagaataacatggattgaagagacttccgaacacttgctatctcttgctgctgagtttccatcataannnnnnnnngcaacatagccatttcttttttaaattcattttgtgcaccagtaagtagattatcatgattcttctccaactcttccatactctttatgaactgctcatataactgtttaat

SEQ ID NO: 121022 - DNA, 1810 bp, Homo Sapiens
  misc_feature (42)..(84): n is a, c, g, or t
  misc_feature (90)..(124): n is a, c, g, or t
  misc_feature (1023)..(1240): n is a, c, g, or t
  misc_feature (1245)..(1248): n is a, c, g, or t
  misc_feature (1254)..(1356): n is a, c, g, or t
  misc_feature (1358)..(1358): n is a, c, g, or t
  misc_feature (1362)..(1480): n is a, c, g, or t
  misc_feature (1555)..(1614): n is a, c, g, or t
  misc_feature (1656)..(1695): n is a, c, g, or t
  misc_feature (1736)..(1744): n is a, c, g, or t
aaggaagcctgatcgatccactataggggcggctagcttctnnnnnnnnnnnnnnnnnnnnnnnnnnnnnnnnnnnnnnnnnnnggccgnnnnnnnnnnnnnnnnnnnnnnnnnnnnnnnnnnncagtcgacggtaccggacatatgcccgggaattcggccattacggccggggatgtttgtgttttattgcgctcattggcagacttatgtttcaggcatgttgagatttggaaaagtggatgtaactgaaattcagatagctttagtgattgtctttgtgttgtctgcatttggaggagcaacaatgtgggactatacgattcctattctagaaataaaattgaagatccttccagttcttggatttctaggtggagtaatattttcctgttcaaattatttccatgttatcctccatggtggtgttggcaagaatggatccactatagcaggcaccagtgtcttgtcacctggactccacataggactaattattatactggcaataatgatctataaaaagtcagcaactgatgtgtttgaaaagcatccttgtctttatatcctaatgtttggatgtgtctttgctaaagtctcacaaaaattagtggtagctcacatgaccaaaagtgaactatatcttcaagacactgtctttttggggccaggtcttttgtttttagaccagtactttaataactttatagacgaatatgttgttctatggatggcaatggtgatttcttcatttgatatggtgatatactttagtgctttgtgcctgcaaatttcaagacaccttcatctaaatatattcaagactgcatgtcatcaagcacctgaacaggttcaagttctttcttcaaagagtcatcagaataacatggattgaagagacttccgaacacttgctatctcttgctgctgctgtttcatggaaggagatattaaacatttgtttaatttttatttaagtgttatacctatttcagcaaataaaatatttcattgcttatattnnnnnnnnnnnnnnnnnnnnnnnnnnnnnnnnnnnnnnnnnnnnnnnnnnnnnnnnnnnnnnnnnnnnnnnnnnnnnnnnnnnnnnnnnnnnnnnnnnnnnnnnnnnnnnnnnnnnnnnnnnnnnnnnnnnnnnnnnnnnnnnnnnnnnnnnnnnnnnnnnnnnnnnnnnnnnnnnnnnnnnnnnnnnnnnnnnnnnnnnnnnnnnnnnnnnnnnnnnggggnnnnaaaggnnnnnnnnnnnnnnnnnnnnnnnnnnnnnnnnnnnnnnnnnnnnnnnnnnnnnnnnnnnnnnnnnnnnnnnnnnnnnnnnnnnnnnnnnnnnnnnnnnnnnnngnaagnnnnnnnnnnnnnnnnnnnnnnnnnnnnnnnnnnnnnnnnnnnnnnnnnnnnnnnnnnnnnnnnnnnnnnnnnnnnnnnnnnnnnnnnnnnnnnnnnnnnnnnnnnnnnnnnnnnnnnnaaaaagagggaaaaaggggcccccggccgccgcccagagacccaaaaaaagaggggccccgggggaaacaaacannnnnnnnnnnnnnnnnnnnnnnnnnnnnnnnnnnnnnnnnnnnnnnnnnnnnnnnnnnnaaaacacaccaacgggcggggacaccccccacaagaggaagnnnnnnnnnnnnnnnnnnnnnnnnnnnnnnnnnnnnnnnnccccctccaatggtgcggcggcccctcttttatttgacgcnnnnnnnnnccacaccccccggggggagagtggtgggaggaacaaaacagtgttgttatactcgctaacccgggt

SEQ ID NO: 121023 - DNA, 1211 bp, Homo Sapiens
ccccaaaaaagcgcatgttttggaagaatatggttccctttcgttgccagggaggcgccccttaattttgtgggggctttggggaaaggcccttcccaaccttttggggtataagagccagggtggttttccaaacccatcagttggggactttttaaagaatctttttggccagtataataattagtcccagggggggtccaggggacaagaccccggggccctggtatagtggatcccattttgcccaacccccccatgggaggataccagggaaataatttgaacaggaaaaatatttctcccccctaggaaatcccaagaaactggaaggatcttcaattttatttctagaatagggaatcgtatagtccccccttgttgctcctccaaatgcagacaccacaaagacaatcgctaaagctatctgaatttcagttacatccacttttccaaatctcaacatgcctgaaacataagtctgccaatgagcgcaataaaacacaaacatcccaataaaagagcagaaaaaaacccagtcgggataagttcctaagcgagcggcaattgagggttcccactgccataaatgctgtggaaagagagtcacagccatggtcaaagagctcccctaaaggggaacaagagtttgttcttctggcttgtttcccatcaatagcatccagtgactggtaaataaaaagtcccagtgcacataaaaggtatgtccagtatggtgcctcttcggtggccgtgggacagtaggagatgagcacgagcgtggtgaccacgttgacggcgagccccagcagggtgatggagttgggggccatccagagcgggatccactggagcagccaggtccagtagagctgcagcggcggctcgagcagcgagacgcccgccgcgctgtagcggtgctcctccagtcgccgcagctgcgccgcgctcagcggctcgctcagcgccctcagccagcgcggcgcggacccggccccggcgcctgccgccatggccgcctgagggccccgccgccgccaccgagcgcagcccgcgcctggcgctgggggcagggagaggtggagggagaggctggcggccgggtcctgcgactgccgggctggactcaccggtcgggcccgcacggcggaggtcgaggtcaggccggcctgcccggctgccggggccccagccccagaagctgtgggccg

SEQ ID NO: 121024 - DNA, 687 bp, Homo Sapiens
  misc_feature (616)..(646): n is a, c, g, or t
ggaggtacaaaatgccttttatattcagcccctgtaaagccatcagatgtttgaaagtttttaaacacgaaccaaagggtttaattttaagaacttagctaggaatgggtgaaatcctacccaattaatagagttctgcaaattagtaacaaagtgtaaagatgaaaggaagggtcccttggagatgtgaaattcttctattgagagtcctgtcttctttattcaagaagtttgtagccatgtttcagaattcactcaagaaccaacttcttaatttagatatcagcgaacaagtcatggcaaaaatacacaaagagaaacaccaccacatcgaaaaggatgaaaagccagaggtccaaccagtaggagtgtttgggaagcccatttgccccagactgaggcctcacatcgaagttctgcctccctccctcgctaaagcctcgccgctcccggagaccatctcgaccatcaacacccggtgcgtccacctccatctcgctcctgcagcttcgtaacaaccctagaaaccgaaaatgcttaagttcccggactttggtgttcgccccccggccgtaatggccgaattcccgggcatatgtccggtaccgtcgactgnnnnnnnnnnnnnnnnnnnnnnnnnnnnnnnatgcggccgcttcctcgctcaaagactcgctgcgctctgtc

SEQ ID NO: 121025 - DNA, 962 bp, Homo Sapiens
tgggaaaattacccggcctttttttaaggactgttttaacccctgtcggcccaccccaataaccttatctttttcaaaccaggagtccaaacttaaccctaaaaaattaaaaactggaacctaagcagctttttacgccatttaagaaatactttgttccctctctcaaaatctttccctgctttgaaataaattgactttggaaatcataaaaaccttcccttattaatcatcctattacttgcatcatagtaaaccctgatcaactcttaaaacattaaaagacattactatatttcttaatgaatacacaagacctttaagtacaaatgcttttatattcagcccctgtaaagccatcagatgtttgaaagtttttaaacacgaaccaaagggtttaattttaagaacttagctaggaatgggtgaaatcctacccaattaatagagttctgcaaattagtaacaaagtgtaaaatgaaaggaagggtcccttggagatgtgaaattcttctattgagagtcctgtcttctttattcaagaagtttgtagccattttcagaattcactcaagaaccaacttcttaatttagatatcagcgaacaagtcatggcaaaaaatacacaaagagaaacaccaccacatcgaaaaggatgaaaagccagaggtccaaccagtaggagtgtttgggaagcccatttgccccagactgaggcctcacatcgaagttctgcctccctccctcgctaaagcctcgccgctcccggagaccatctcgaccatcaacacccggtgcgtccacctccatctcgctcctgcagcttcgtaacaaccctagaaaccgaaaatgcttaagttcccggactttggtgttcgccgcaccggaaactgagcggagtccggccgcctgcgccggacgcgtgggtcgacgatatcccgggaattccggaccggtaccac

SEQ ID NO: 121026 - DNA, 785 bp, Homo Sapiens
gcctttacagatgggtttattagacacaaagagggttcataaatgacctaggtcaaaggctagaacatgcagacatacttttaagaacaataaatttagaaatgctttgaaacaaatgacaaccacagatataaaaaagtgctttttaatttttagccaggatggtcaagttgatgtagattttttttactggaatactcataataatgtctgtctatatgccttaagcaagattattatttaataaaagatggcaggaagttgtaatttatggaaaatttacaattattctttaaaatacttttataaaattataaattgataataatccccccaaactgaagtgaaatacttttaatactacttgaaattaaagtacagttgtttatacaacaatgaataaggacaagatatcaaactgaaaattcaaaaataaacagaagaaatgtaaacagttctaaaatatcagtatttataaatgttgcttagaggaaggctattcaaagcatggtccattaactatttgtgagctgtccagaatgaaagaggcttgtgccagaatgaaaatcaattacatcactaatcatactggctcagttgactttttttaaataacaagacttctttgataaaggaagcaatgtgttgatttatattctggcacaagtaccttattactgactagagcaggggtccccagtccccagccacgaccggctgcatagaagtgggggcgtggggcgtgccaacattactgcctgagctcagtttcctgttagatcacc

SEQ ID NO: 121027 - DNA, 1279 bp, Homo Sapiens
  misc_feature (1005)..(1047): n is a, c, g, or t
  misc_feature (1055)..(1056): n is a, c, g, or t
  misc_feature (1178)..(1178): n is a, c, g, or t
  misc_feature (1207)..(1207): n is a, c, g, or t
actttgagcaagaaagactgcttttattatagaaatgacttttataaatattgataaaagtataagatgaaaggaagcatatactaaaaattagatttatgaagaatagcagttttccttcttggttggaagatttgtagcagtgattaaatactgtttatgcaattctgcactgcacataggaacttcttcggatatggtgtaacaccaagtaatttacatacatgccagcttccaactgacttacagtaaccatcagtttaaatgactgttttgcaagtgcctcatactggaaatctatcatatttattatctttgatttcattgtttaacagttttcttttttctcttaccctaaataactaagagttggctgtacgccttttttggggggtggggagggaggtggtgaaaacagcttttattttttactattagcttccacaaaaatttaataatgcccacattattaaaatgaaacactggaatgaacttcgacctcactatacttttaaataaagtatgtaacctggcaaagctgatgactttgttttaagaagacctgggtgttgctacgtcacatcagacaagtgcagtaacctggaatgcacagacgaccaccctctctccctggagacctgctttagctcctacacagatgactagattttgagttaactgttttaacattctggcattttgttctcttgataaagaaaaatcacacccttgccaagttcatgtattttaaaaaatggaaaactctccaggtcacggagtgaagaaaacacttaagtgttttatgtctaaatgaagcaataacaattctgataccagcaacatcccttttgatttaaaaaagattggtcctcacaatgttcaaattattctacacaaatgacctgtgaaattttttacagttgtatttttttgcccaagattcatcataaatcattcaattaaactaaattaaaattgattttagcagaaagtagaaatgtttcnnnnnnnnnnnnnnnnnnnnnnnnnnnnnnnnnnnnnnnnnnnactaaaannaaaaaatgcatgtcactaaaaaaatttttccagtcttttcccttctacccaggaaaattttacatgatgtcaccaacatgagcccttggtgatcttctgaagtcttccaaagattacacctnttgcagacttactgggtgatctccttcanctcgtctcttacgcactaagtcattgttttttgttatagcattagctgctctggttcgtggtccctgctgtg

SEQ ID NO: 121028 - DNA, 983 bp, Homo Sapiens
  misc_feature (99)..(141): n is a, c, g, or t
  misc_feature (145)..(154): n is a, c, g, or t
gaaattttttacagttgtatttttttgcccaagattcatcataaatcattcaattaaactaaattaaaattgattttagcagaaagtagaaatgtttcnnnnnnnnnnnnnnnnnnnnnnnnnnnnnnnnnnnnnnnnnnnactnnnnnnnnnntgcatgtcactaaaaaaatttttccagtcttttcccttctacccaggaaaattttacatgatgtcaccaacatgagcccttggtgatcttctgaagtcttccaaagattacacctttgcagacttactggtgatctccttcaactcgtctcttacgcactaagtcattgttttttgttatagcattagctgctctggttcgtggtccctgctgtgtaaactgatatccaaatttaaggatatttgtattttcctcaagcatcttggccatttccaattctacagctgtccccaactgctgcctctgattgtcaatcttgagctctgccagggtttcattatctcttaacgcatcaatcagtgccagaatcccaactcccgtgataaagttggactccacatttaagctcttcaaagttttgttcactttcagcatttctgcaaaagcaagtagcaacagggtcaattgctccgggtggcctgcaagactgaaacatttcacatgtgtgttggtttccaaagcctttgcaaaatcttttagggttggaattgggatattctttatattattcaaattaacttcaacaagatgagcatcgttttctttagttctcttcaaactctcttctacattggttggatttggtggctcatcgaaataccggaagaatcttttcacctttgaccacatttgaaaaatgttcttggtcaacaccattactacttcccattatattacagaactttgtattcgttatcaaattgtgcatcccaagaattgctgcgaggtcacacaattctgtatcagaagcacttgtcaaagcttcttc

SEQ ID NO: 121029 - DNA, 1073 bp, Homo Sapiens
  misc_feature (110)..(133): n is a, c, g, or t
  misc_feature (347)..(368): n is a, c, g, or t
gagtgttttaccattaacatttattgatgggatggataaatacagattgagaaacatacttgacagcaagatatcaaactgatagccagactataaaatgtatacatccnnnnnnnnnnnnnnnnnnnnnnnnacaaagagcccttactataatggtcacttacctcctatcattcacataacagcagtagatatcccaggggtagcatccagagctgaggtgccccaaggaagacagaggcaatggcagaataatatgctgagaaaggactcttaagagcaatacaaagagaacagacaaaaatctcaccacaaaattgtacctgagtgacagattggtaaagtgnnnnnnnnnnnnnnnnnnnnnncgctctttggtctgacaagaaaagagttttaggtgtgtgaagtagggtgggaaaaaaggtcagtttcaaattcagtaacatatggtaacactaagttaggctgctgcattcttttctttgggtacttaagccagctggcacttccactttgtaaccaattatattatgatcaacaactaatcagttagttcctcagcttcaactgaagagttcctgattacctgatgaaggacatacttgctctggcttcaattagcatgctgtcaagcatccctctccatgcttaacatggcaacacaaaacccaagagtccttctctttttttcattagccatgaataaacactcacaaaggggaagagtagacactgcttttagtaaacgtcctttttctttacctcccttttccaatgccaagttcatatgaaaaactttagaaacattaaaatggagaactctctcacccaaaaagtaattctcattccagactactctatcaggcaggattactgtaccgtgcttgtttcaaactcacatccacggagggataaaaagacaaaataaaacttgacagtgtgatacaacatgaaaatctcctaaaccatcaggagcaaacactcagttaaaagctgggtgttaacaagcagtaactcaagaaacttggggaggtatcaaagtcactgaaagcttactggaacctcggagg

SEQ ID NO: 121030 - DNA, 523 bp, Homo Sapiens
ccttatttttaaaaaatttatttcatataaatctcatatggtacaaaagtattacatgcttgggcctgtcttgcaaaataagaggttctttcagttcttcaggccaaccttccttcagaggcaaataaataagaaacatgtagaacatatttagaaaattttttaccataataaaaatatgtgaacatcttatatttagcatagtttagcaatccagtttatgtcgacaaatttagttcactgctgggaggcacatgtcacagaagaacctaataggcagcagatattttaacctgtaggaacaaaatgtttaacatttttcttgtattttttgaagaaggtactccatttgtacattcaagtttggttggccctttttagtctttttgttcagtattttaaacacttccattttcttctttttgtactgcctttgggcttcttctctctcctgttttctcctctcgaattcttgtttcttagcagcacgtttggcttgtatctgttcatattcttcttgtgc

SEQ ID NO: 121031 - DNA, 887 bp, Homo Sapiens
  misc_feature (118)..(126): n is a, c, g, or t
  misc_feature (280)..(283): n is a, c, g, or t
  misc_feature (286)..(287): n is a, c, g, or t
  misc_feature (289)..(292): n is a, c, g, or t
  misc_feature (294)..(294): n is a, c, g, or t
  misc_feature (297)..(297): n is a, c, g, or t
  misc_feature (299)..(299): n is a, c, g, or t
  misc_feature (301)..(301): n is a, c, g, or t
  misc_feature (303)..(303): n is a, c, g, or t
  misc_feature (308)..(308): n is a, c, g, or t
ggtggggactccccggggggaataagattccccagtaaaggggcccccaggaaactccctattggggaattggttcaaaggacgctttcgtttgtccccccgggcgggtttttttatnnnnnnnnnaatcccaaagccttaagtccatggcccaagggttttccctagggaacccaggtttaggccacaggttccatttaaccttatggggcccgggggcccaaaaggaatggtttaaaaaaagcttttggaagggcccaaggccggccaaaaaagtttnnnntgnntnnnngntgntntntnttccntggaattgtaaaggagtttactgttttaatacattgttcttctggctgaggctggtcaaagctacactgatcttcaaataaaggctcgtcaatgctacactgttcttcaagcaacggctggtgaacttgttctgacaaaggatggtcgacttttcttgcttgcttcctatgtctttcctcttcagctaaatagagatgtttcagattatctgggtatcgatctgtgaattgagattccagtgacgtttgagccttcttttccttccgtagcaatttcttgtaactttgctgtattttcagttttcttcgaaaagcaaagccttgtccctcgcgaacgctccccacgaaggcttgcgggtggttaggccgccatgtcttctgtctcacattcttattcctgtacccgacagtggaaaccccttcaccacgcgcctcaataccaccaggccgccacttcgcggaccgcctcaccggcgccattgcagccgactaactgcgtcatcagaagaccacgacggacgccccagcccccggccgtaatggccgaattcccgggcatatgtccgctaccgtcgactg

SEQ ID NO: 121032 - DNA, 1120 bp, Homo Sapiens
  misc_feature (30)..(30): n is a, c, g, or t
  misc_feature (46)..(48): n is a, c, g, or t
  misc_feature (51)..(51): n is a, c, g, or t
  misc_feature (53)..(53): n is a, c, g, or t
  misc_feature (55)..(55): n is a, c, g, or t
  misc_feature (87)..(87): n is a, c, g, or t
  misc_feature (130)..(130): n is a, c, g, or t
  misc_feature (138)..(138): n is a, c, g, or t
  misc_feature (167)..(167): n is a, c, g, or t
  misc_feature (211)..(214): n is a, c, g, or t
  misc_feature (318)..(320): n is a, c, g, or t
  misc_feature (348)..(348): n is a, c, g, or t
  misc_feature (356)..(356): n is a, c, g, or t
  misc_feature (387)..(388): n is a, c, g, or t
  misc_feature (439)..(502): n is a, c, g, or t
  misc_feature (539)..(539): n is a, c, g, or t
gcccctcctctcgagcgcgcgctccgcgtntacgtacttctcgctnnnctncntntccggcggctctccttcctctccgctccgctngcactacggcacccgggccgaccacagcttacgcgcctccaantctcgcgngctaaattgcgtctctccgcccagtgcantcactcccccgggcgggggacaccacgctaactggtgtcggggnnnnggggggccgttctcagcccccaggtttcaagattgcgacccgatccgtaagtgttcccttcgtctacgggggggcgccctcattgcgcaccacgaagattctgnnncgcgggccgggcggcggcgggtccccgnccaaccgnggtcccctctctcgctccccctcctcctcanncttctcgcgcgctcacccgttcgcacagacacgggtcctcgcggtctggcnnnnnnnnnnnnnnnnnnnnnnnnnnnnnnnnnnnnnnnnnnnnnnnnnnnnnnnnnnnnnnnntgcgttcccgcccgtttcccacggtgcgtaattgctnggtccctgacctcgtgggctcttctatctcgtagtccctaatattgtccccctcgggagtcctgtgttccttagccagcaacatcgcggcttgtatccggttcataattccctctcgggcctctgtgatttggatgtcttcttcttattcttcttcgggagggtccaggagtttactgttttaataccttgttcttctggctgaggctggtcaaagctacactgatcttcaaataaaggctcgtcaatggtacactgttcttcaagcaccggctggtgaacttgttctgccaaaggatggtcgacttttcttgcttgcttcctatgtctttcctgttcagctaaatagagatgtttcagattatctgggtatcgatctgtgaattgagattccagtgacgtttgagccttcttttccttccgtagcaatttcttgtaactttgctgtattttcagttttcttcgaaaagcaaagccttgtccgtggatttctacacagaatccgtgtgggaggagctggtcgacttgccaccggagacagtgctggctgcgctgaggaagtcagcgtcggagacggagccc

SEQ ID NO: 121033 - DNA, 805 bp, Homo Sapiens
  misc_feature (733)..(745): n is a, c, g, or t
tttgaaagtttcagcctgtgggaggaaaagaggtatcttttaaaatagagatagttacatattttcctcatctaggctgtgtcactattgggtgcaaggatatcattgttggctagattcattttgtataatcatgtatcctcttgtgtgctggtagagattttaatcctgatttttccataaaacatgagtattaagaaataattcctggtttggagaaactggagaaatcacccttttaaggaagaaacactggaaatttctgctaacaccaagatatttaagagtgtacatagtaggtgctcaacaaatttattgaatgaatgagtgaatggaaaaactgggagagtcaaaagtgagcagaagctctccatttctacttctgtcacaaaccacattaaattgtaaataaggcccttctccacttgacttcaggcagcagattgtctagaagcctaaggacagcaatttctctgacaagacaaagtagatattttataccaggggttggcaaactactgcccacgggccgaatttggcccagtctgtttttgtatggtgcaaactaaaaatgatttttacatttttaaagagttataaaagaaaaaaatatgtggtctgtgaaatctaaaatatttactacctggcctgttggaggaaaggtttgccaatctctgttttataccattaactatgagattaacaaaaacttttacctttgtgcagaaggttnnnnnnnnnnnnncatggttaaggaaaaggagacatgttacctcttcatacactcctataactgtggcattgc

SEQ ID NO: 121034 - DNA, 1000 bp, Homo Sapiens
  misc_feature (601)..(601): n is a, c, g, or t
  misc_feature (782)..(782): n is a, c, g, or t
  misc_feature (896)..(896): n is a, c, g, or t
  misc_feature (901)..(901): n is a, c, g, or t
  misc_feature (912)..(912): n is a, c, g, or t
  misc_feature (976)..(976): n is a, c, g, or t
ctaatttaattctttatcattcaagtagagagacaggcattttccaaagcaaacccaaccctcgtgattatttctagccagggtgaagctaaggaaggtagcagtaggtggtaggatcagcaccttggttccaggcatcacgccagtcattttatttccatcatcatccttgtgaagaaatggaagtctggagaggtgaaatgatgaaggcaatctggccacaaatcttccttctggatcctgctcttcagggcatgcatctcccatgctgaaggttaaaatgggggtcatttgccaacaaatttgggagtccgcttctccctgaaggctgccatgccctctagccggtcccgggttggaatattctccgttcctcggtcaatggctactttgcccagccgcacggcaatgggggcctggggcaggatctcctgggccagtgctcgtgcccgctggtaggcggcgtccccctcctcgttctgggccacagcgtgattcaccagccccagtacgtgggcctcagttccactcagtcgtcggcccgtgaagatgagctccttcggcagggccacccccagacaacggggcagcctctgagtcnctcctgcccccgggaggagccctcgcgtggtctcaatcagtcccatgactgccgaggaagctgctcagatagaacaaagtgagggctccctcccccatccggtcccccagtgctaatcccggggggcacagctgcctctgctgtctactcgcccctctagccacttgccccatggtctggnccacagccaggcctctccagactctgccttttggagagcctagccaagagtcaggagccaagccttattcacatgccctttgatggagtgtagtcacagcagttcaccttccangctcnaagtggagaanatggtggcctctctgctgctcaagagcgctaggatacacgagacacgctggaaggagagtctangagtgccatacattgtggtacata

SEQ ID NO: 121035 - DNA, 1322 bp, Homo Sapiens
  misc_feature (1011)..(1011): n is a, c, g, or t
  misc_feature (1019)..(1019): n is a, c, g, or t
  misc_feature (1047)..(1047): n is a, c, g, or t
  misc_feature (1171)..(1171): n is a, c, g, or t
  misc_feature (1188)..(1188): n is a, c, g, or t
  misc_feature (1230)..(1230): n is a, c, g, or t
  misc_feature (1283)..(1283): n is a, c, g, or t
aggatttaatagacttttatgaatatgaagtgtttttattttgctaaatcttcacaagttttgttttgtaggtgaggaagctgaggcccagagcatttaaacaatttgtccacggttatacagcaagtaactggcagagactgggatctgcagtctgacccctgacacatgttcaaccgatgtcagagtttatttattacctctgttgttcacaggaagaaactaggggtatcttaaaatcttctgacatctctaatgagtgcctgataactgagagaggtcaggggctgagagccaatgataccaagactcagagagatctaatttaattctttatcattcaagtagagagacaggcattttccaaagcaaacccaaccctcgtgattatttctagccagggtgaagctaaggaaggtagcagtaggtggtaggatcagcaccttggttccaggcatcacgccagtcattttatttccatcatcatccttgtgaagaaatggaagtctggagaggtgaaatgatgaaggcaatctggccacaaatcttccttctggatcctgctcttcagggcatgcatctcccatgctgaaggttaaaatgggggtcatttgccaacaaatttgggagtccgcttctccctgaaggctgccatgccctctagccggtcccgggttggaatattctgggcatagcacatcccttcaatggccatcccagatgcaatgtccacctccgttcctcggtcaatggctactttgcccagccgcacggcaatgggggcctggggcaggatctcctgggccagtgctcgtgcccgctggtaggcggcgtccccctcctcgttctgggccacagcgtgattcaccagccccagtacgtgggcctcagttccactcagtcgtcggcccgtgaagatgagctccttcgccagggccacccccagacaacggggcagcctctgagtccctcctgccccggggaggagccctcgcgtggtctcaatcatcncatgactngcgaggaagcgatgtcttcatcaagccncggagtcgctggacaacacccccactctgcttcatcatctgttccgctcttcaggtctgcactgcacagaacgccctcactcactctgaagagaggaacgcactgccgtctccgcactgggcanagttcagcactcatacnaaaacatcccaaggatgcggcaaaggctgtcacaaactcatnatctgtagggtagggacacggaacactgtctgctatctggctgcgtgggacgngagagctggattggacctccctatacaatgatgcaatca

SEQ ID NO: 121036 - DNA, 1504 bp, Homo Sapiens
ttataatcgctgtttttatgaacttttttattctgtacataggacattttgtacaaaatatgaagtctacatttttattacttattaccataaaacaaagatacaatgtatgtacaatattaaaaggaagccatactaaagccacactaaaaagacacttggaatagtgacatttctgatgtacagatacattttggaaagagtgaagatgccaaacgcagaactttatgaagaaaaacagtcaccggtttattttcaatgtagtacttttgaaatcagtttggtacagaataaacagtctctatacaatgatatgtaagctgacaattagcacaggagtccgagtactaactagggaaactttaggaggccaaaatattaagtaatactcttgccaaagaaaattagtttctctgaaaacttttatttttctttttggtgagtgtttgtcttcaataaagagcagaaagaaaacctagacaaaaagatgttcttacacactgagctttacacagtcacccaaacattgatattttgctttttcccgagggcaaaaagagagtcttcccagaaacctctctcacaaacatactgaacatccaaaatcaaggatatttgagaatctatcagctaaagacggaagttcaaacaatggtatatcaaaatacataagacgctgctttatacaataaaaagcaccctttttccctcaaaaggagaaggcatctaaactgttttttttaatgatagttttcataatggtaaaatggagagatacttgtcaagtttctcaggaagtattcatctcacaaagcggacttgtccacttttagctggggcaatcttcgcatttcatacctgcacttgctcttaccacaagaagtcccctccccccaggtgattttcctccaagacacgaggacagaagcattgccagtggcttgaagtgacagcagtgggcaggaggtaccagagctgcacaaggagcaagtgtctgcttctcactatctttgaaaggatacccgagacctcgatgagaaaacagatcctatagataagccacatttatgtcttttagtgcctcatgacacttaacattaagttatataatcttatgccagagatgaaagacactagatcacgtgtttagaatagcagtacacatctcaagtagctttcaaggccggataacttagtcaaaatactgggcaccctgagagaattgcgaatagacaaggactaagtttagagattggctctttgtgcaatcaaattaaacaaaggccagaatgacaggaaccctgcggaacaatagcagcatgtcagtacccatgaaacctgagacggaaaatcagtaaaaggagtcaaccagtgcccgatgcagagaatgacaccaaaagaacaacaggaggaaccaagatcgacacacggcgcacagagagagagtgccccaaacacgagaacaaagccgacaagacacagacgacaaagtccacacagagaa

SEQ ID NO: 121037 - DNA, 726 bp, Homo Sapiens
  misc_feature (302)..(311): n is a, c, g, or t
  misc_feature (635)..(635): n is a, c, g, or t
aaattatatattacatgtttattaagagcacaacttttatgtaaaatttacatttaatgaaaaaaatcaaaaatatttacaaaatcttggaagacagatgtgcattgttctaattacaatccaaagtagtaaataacaatcctttaaaactcacatttattagagttgtgtttacaaattcttggttaaagaggcagctacaaagtttatcactatatataagcaagaaccagcttgctaggtacatttcccattgaaaatctactggtctcttttacaccattagtggatttttaaatggnnnnnnnnnntcaatataaactcatatggcttcaaaattgtaacctgtacccaatacttggtatgaagactgtggtaactaagaaagtgcagaagtttaaccatttcactaatttgtacatttttaggtaatatttgattaaaaacaaacacggtaagaacagtgtctgaattccaataataaaatattggctgccctaaaagcagtttgattgcaaagcaaattacagttagaattccagtaagggactgtaattggcatttaaaagagcacaatataagagttagaaattctaatttagctcactatttagtaaagattagcattttagcanattatcttatgtgctgctttagtcaaatgtaaattcagacttgggctaacattgaatatataaaaaagcatatactgtgttatatattgct

SEQ ID NO: 121038 - DNA, 2036 bp, Homo Sapiens
  misc_feature (711)..(725): n is a, c, g, or t
  misc_feature (1411)..(1420): n is a, c, g, or t
  misc_feature (1959)..(1993): n is a, c, g, or t
aaacacacgaaaaagactgcgaaccgatgtaagagggcgcaggaccccgacgaggcagacgcaacaaggcgcgcgaccatctcgcccgcaacggctgacgacacgacacagaacagccgacgttaagtacgaggagaccccgagaccccgtcccacatcactacgcaagagacccgcgctagcccgatcaccgagctcggcgcgctcccacggccgaccggccccaccgacgacacggaccagcgagagtaccccccatccccccgagccacccgctaattgcctacctctgcggtcttattacagggaagcttcccggggtaataagtagtggtccaatgaaagtcaatacttccggttgagccaagacgtcttcaagcgaggcaagccaatatgcgaggcgtaggggttagacaccgtgtataccagcgttagagacaagtgtgttagatattgtacgccttagaggcctgttagaaatctcttgtaggtagtttggtcccaattatgtcagccaccacaagagagtaagggtccttcaccaaagatccccagctagcaagttttgccccagtccacggacgtgtgtaaacgacggcccagtgcctagcttataatacgacgtccactataggggcccacctttgtaccagaaaactgggtacgcgtaagcttgggcccctcgagggatactctagagcggcccccccnnnnnnnnnnnnnnnctggttttcctttttatttaatcaaagactggtgaataaacataaatacagcacaattacttcagatcattcttcatattgtatacacacaaacccatgaacataatctgaaagaaacctgtagacagcaatgaaatgcatacagctttttcttccctcgctcaaaaaaaagtttaaacacacaaacttacaatctcatcagcacacactctcttgtgacaaatgattcagacataaatagtgggtgcaaagaaactatatgctaacatatgaataacctttgttaatgaaaaaacagaagcagccataatgattaagatacattcagttactgataactagttgtgccctaaagggcattatcaaaagagaaatcgtgctgcagagaaaagcgatatatacatacacaatgagaaaataaactgcaagattaatgcatgcatgtttaatactggaaaaatcacagccctccaaaatttctgcacgtttgttataaaagccctctgcactcaactaaaattaaaatgatcttaaaaggataatacttgtaaagtttaagtctcctcagccacagaaattgcaatggaaataaatgttcagagtcattttcaaaacaaaaccaaaacaaaaatctattcttccgatgacatgcaagatacactgctctacattcccaatgactaggnnnnnnnnnncctcaagtcaatttttagtttgcagatgctcaagaattttgtattccagcaggagttcaaatcttttggatcttttcaccaacaactactggattttcttttctgattttctcagcagcatcggctttgtaattgtaagagcaattgtgtacatctgagtaacggtgtacaccacagtaaacatttccacaccggcattcaaaccctggaaatggagtaatacacatacatgagttgaaggatgaaatattaaggtctttggcataattaatactgaacagcacaatatatttagggcagcaatgtaaactaaagaatcattctaaatacactgtctcacaaactacattcttattcactacctgagagcttcatttcttattcctatctacaaacgcaggtttgccctagagaaagtcctctgagcttgtttcttcacctgtgatatggcaacaattacttcttaacaaaaacacagttgctaggttcccggccgtaatggccgaattcccgggcatatgtccggtaccgtcgactgnnnnnnnnnnnnnnnnnnnnnnnnnnnnnnnnnnncggccgcttcctcgctcactgactccgctgcgctctgtcgttt

SEQ ID NO: 121039 - DNA, 814 bp, Homo Sapiens
  misc_feature (74)..(74): n is a, c, g, or t
ttattccagcaggaggttcaattcttttgggatctttcccccaaacaacttcgggattttctttttggaatttntcaggcagcatcgggcttggtaattgtaagagccaatgggtacattctgagtaaccggtgtccacccacagtaaacatttccacaccgggcattcaaaacccagtaagttcccactttcttccctgcacatgaaacagcgattctttttttgtttcggtttttcaaagagacttgctttgctcttcagatggctgctgtgctgtgtctgatactgaagcctgccacatcttctgtttcaggtactgctttgtccacaggatgtactgtccaattgagaagatgctacagattctgataaaagtgactgatttgatacagggctgggctgcatagatgaagatgtagagtctaatgctgactgggcttctggcacactgccatctgtgcattgaactggtaaagattcagacagactactgacagaggttgcaggtgggcttattctaccattactactattctgtctttgaagatgttctttatagcatactgaacacatgccatttgtacgagggtttccataaaatccacagccagtggaacaaagcataggcacttggctgtgattagtttcttgagccatgttcctcagttgcacacctggcggcgggtctctccgcctagaacacgctgcgcgccgccgccggtagccgccggtgaatgggtacaggtaatgccgccgaacccctgcttgctccggctccgccaccgccggcccctccgtccgctgtttattccc

SEQ ID NO: 121040 - DNA, 1000 bp, Homo Sapiens
cctccaaggtccaattttttagtttgccagatgcttcaagaatttttgtattcccagccagggagttcaaattcttttggatccttttcacccaacaactacctggattttcttttctgattttctcagcagcatcggctttgtaattgtaagagcaattgtgtacatctgagtaacggtgtacaccacagtaaacatttccacaccggcattcaaacccagtaagtcccactttcttcctgcacatgaaacagcgattctttttttgtttcggtttttcaagagacttgctttgctcttcagatggctgctgtgctgtgtctgatactgaagcctgcacatcttctgtttcaggtactgctttgtccacagatgtactgtccaattgagaagatgctacagattctgataaaagtgactgatttgatacagggctgggctgcatagatgaagatgtagagtctaatgctgactgggcttctggcacactgccatctgtgcattgaactggtaaagattcagacagactactgacagaggttgcaggtgggcttattctaccattactactattctgtctttgaagatgttctttatagcatactgaacacatgccatttgtacgagggtttccataaaatccacagccagtggaacaaagcataggcacttggctgtgattagtttcttgagccatgttcctcagttgcacacacagttgaggttgatgagcaaacagctgtcctgtatcttgagacagacattagctttctgccttccctattctcataagcagctacttaaaagttttgaattttatgcaagaaaacattttaaagccttctgtgttttactgcagcagacttcagattcattcctggcggcgggtctctccgcctgacacgctgcgcgccgccgccggtagccgccggtgaatgggtacaggtaatgccgccgaacccctgcttgctccggctccgccacatcccgggaattccgg

SEQ ID NO: 121041 - DNA, 803 bp, Homo Sapiens
attcgtgcgagggacaggcaaaataccctgcgtttacagtcccaatgactaggtttaaaacctcaagtcaatgtgttagtttgcagatgctcaagaatttgtaattccagcaggagttcaaatcttttggatcttttcaccaactactactggatttttcttgttctgattttctcagcagcatcggctttgtaattgtaagagcaattgtgtacatctgagtaacggtgtacaccacagtaaacatttccacaccggcattcaaacccagtaagtcccactttcttcctgcacatgaaacagcgattctttttttgtttcggtttttcaaggagacttgctttgctcttcagatggctgctgtgctgtgtctgatactgaagcctgcacatcttctgtttcaggtactgctttgtccacagatgtactgtccaattgagaagatgctacagattctgataaaagtgactgatttgatacagggctgggctgcatagatgaagatgtagagtctaatgctgactgggcttctggcacactgccatctgtgcattgaactggtaaagattcagacagactactgacagaggttgcaggtgggcttattctaccattactactattctgtctttgaagatgttctttatagcatactgaacacatgccatttgtacgagggtttccataaaatccacagccagtggaacaaagcataggcacttggctgtgattagtttcttgagccatgttcctcagttgcacaccaacaaaacctccacaattttctgtttgcttcacctcag

SEQ ID NO: 121042 - DNA, 505 bp, Homo Sapiens
tttttagtgatcattaataatttaattcattaccatatttcaatgtgagggatgtttcaaatagtaaggctgcaatcagcacatcttctttaagcactttgttccttaagttcagtcgtgcatgggcttcagataggaaaacgagatattttaatgcagatgctgacagctttgatccacatacagagcctgttctgattctgcgacttgctagataatagccatgggtcattctttctgcttccaagctgaattctacattcaaattctttgcaaaagccaatagcttttcaaaatcttcagttgtgaactgtctagaagccgcataaaacagcccttcaggattaatggctttgttcaaagtgtgttgcacagtaggaagaaatgggtggcagggagatgactcgttgcagttaatcaataaaccaaatgcctccacaaggttagctggaatcaaactgcaatccatctgaccaattagagtgttgattttctgcctcgtgcc

SEQ ID NO: 121043 - DNA, 796 bp, Homo Sapiens
  misc_feature (239)..(239): n is a, c, g, or t
  misc_feature (288)..(288): n is a, c, g, or t
ccaattttccctatttgaaaggggattaacaccttttccttgacctttttcccccacaaggtgattcgggcacattaaaaacagggtggcggaacctgtagccagttgtttttactcccattccggtaggttagaggaaactcatcagaaagaaagtttcaatcacttccactgttattttctgcaattcttattctcttatagccgataatcttcaggtggagtccacaatcttgganaggcgtctatttcttcttgtgtgtactcatctagacgtttaggtatttntcgtggttgaggaaggtcctctactaaattcttaagaatatcttctggaatatactcatttgggaaaaagatgcaacctttccatcattgttcttctgtgaaggttttttggcagcatgccataaataggctagttttacaattgccactggatccctcaggtgaagctgagcagctgttacttgtctaaatccacctgggtagccagtatgcgaagagtatactttttgttcccatttgtttccagaaaatgcaatgtgtcttgtgttcattataacaacatgatccccacagtcactcagtgcatggtacacaggtttatgtaatccctgaagtcttatagatgccatagcagcaagtttgccaggtggctgcattttcccatctaagagataccatattctagcaaaagtggcccattgctggggcgccctagagaaactcgacatattcctctactagcaggaccgtacgtccttctcctagtagccacgccgggtcactcccc

SEQ ID NO: 121044 - DNA, 1745 bp, Homo Sapiens
  misc_feature (30)..(30): n is a, c, g, or t
  misc_feature (329)..(352): n is a, c, g, or t
  misc_feature (590)..(636): n is a, c, g, or t
caaagccagtggttgttattatttttatanacgggggggccccacgagagttggccacacgatctcgtggttgggtgagagggcggtgttccacacggcgggggccgggaggatggtttataatggcaaaaggccgcccccaggttttcctcagaaaggccgccagccggattggggggggtaacataaattaccaagaaaggcaatgtgggtggcccccttttggggagaaaacgccctgaaaaggaacttcacagccggtccccttttgaattaatttttcccggggccccacgcggttttatcccacccgacggagggtttttttnnnnnnnnnnnnnnnnnnnnnnnntccgataaaatgcccctctggggctttccattaaagaatttgtttcccaacgtggtcgtgtttcgcgccgggggggttttttcgtgagggaagaattccaaaacaatatttcctggggcaggatgtcctggggaaaccagattataaccatgggtcgcttaacctttcggggcccgcgcggccgaaaggaatgggtttaggtaaagttttttgagggccgagggcggccgtacaaggnnnnnnnnnnnnnnnnnnnnnnnnnnnnnnnnnnnnnnnnnnnnnnngttcaaccaagtaagtgattttattattatcaactataacattcaaatcagattacataaaaatggttctataaaattatattttaattacaatttcctattgaaggactacaccttcctgacctttccccacagtgattcggcacataaaacaggtgctgaactgtagcagttgttttactccatcctgtaggttagagaaactcatcagaagaaagtttcaatcacttcactgttattttctgcaattcttattctcttatagccgataatcttcaggtggagtccacaatcttgggaaggcgtctatttcttcttgtgtgtactcatctagacgtttaggtatttttcgtggttgaggaagctcctctactaaattcttaagaatatcttctggaatatactcatctggaaaaagatgcaacctttccatcattgttcttctgtgaaggttttttggcagcatgccataaatagctagttttacaattgccactggatccctcaggtgaagctgagcagctgttacttgtctaaatccacctgggtagccagtatgcgaagagtatactttttgttcccatttgtttccagaaaatgcaatgtgtcttgtgttcattataacaacatgatccccacagtcactcagtgcatggtacacaggtttatgtaatccctgaagtcttatagatgccatagcagcaagtttgccaggtggctgcattttcccatctaagagataccatattctagcaaaagtggcccattgctggggcgccctagagaaactcgacatattcctctactagcaggaccgtacgtccttctcctagtagccacgccgggtcactcagccttactggcccggcgggaaacgctaacacccaagcaggacagttcctagcccgtcgagcacttgtcggcttctccctcttcctcgagtttcctccagtcttctccacggcagcaatttcgtcatgaaaggagcatataatgcagttatttagggaataactcccaaaaatatctcgcttggtggaaaaactgcggaaaaccgacggaggacataatttccagccgacctaaacgaagggaaccggaaatgcccc

SEQ ID NO: 121045 - DNA, 481 bp, Homo Sapiens
  misc_feature (408)..(416): n is a, c, g, or t
caaccaagtaagtgattttattattatcaactataacattcaaatcagattacataaaaatggttctataaaattatattttaattacaatttcctattgaaggactataccttcctgacctttccccacagtgattcggcacataaaacaggtgctgaactgtagcagttgttttactccatcctgtaggttagagaaactcatcagaagaaagtttcaatcacttcactgttattttctgcaattcttattctcttatagccgataatcttcaggtggagtccacaatcttgggaaggcgtctatttcttcttgtgtgtactcatctagacgtttaggtatttttcgtggttgaggaagctcctctactaaattcttaagaatatcttctggaatatactacattnnnnnnnnntttagacttaattttcttaaaatattcttttcttagcaataaattactaatacttcataagtgtt

SEQ ID NO: 121046 - DNA, 2600 bp, Homo Sapiens
  misc_feature (171)..(287): n is a, c, g, or t
  misc_feature (335)..(335): n is a, c, g, or t
ccccgcgaagacgagccaggatcgtgaggagaacggagacgcccataccaaccgctgtccccgcgcgtgccgatcaataatgcagctggacgacaggttcccgactgaagcgggcagtgagcgcaacgcagtaatgtgagtagctcactcatagcaccccagctttacacnnnnnnnnnnnnnnnnnnnnnnnnnnnnnnnnnnnnnnnnnnnnnnnnnnnnnnnnnnnnnnnnnnnnnnnnnnnnnnnnnnnnnnnnnnnnnnnnnnnnnnnnnnnnnnnnnnnnnaagaattcggcacgaggattgcaggagtattaatagcaacccacattntcgccccaaaataatgagacctcacctggtctccacgtttccacgtccctgctcaaaaccaaatccattcctgccttctggctctcagaacttctctcccctacagctactacagtacttcctgacttctcccattcaaaccattctaggcctgcaatggggaacaggccctccccatcagtattggtaaagtgaccatgattcctacatagaggctctgctggtcaaatacttgactcccactcttgccactcctagctccagaagggctcagggccttccccacagatctaaggactgggctaccctgcctgtccactgaggtttctcctaaaacaagaggcttgactctggtctgggccctgtggccctctgggaagctttgtacctcttttgcaggatccgggggtggggagggacaagctagttccccaacctcctatgactgctttttatgctctcagccttttttccataagaaccttcttgaaacttctccccgcacatactcacggaaaggaaccaatggtgctatttcccctctctcctcctcaacctgggaatacttcagacatctccaaactcatccttgtgtatagtctcacacccttccccataagtataaatgggcccatatttaacacattttgtgattttgggttatttattttgtgcatctgtggcaataaatgagatctcagtggtggtatggatttgactgatctctgtaactgtgtatggcaaaaggaccggaaaatgaaaaccagatcccagtaaggggtagagaggggccaagagaactgaacatctgggctgccggagaaatcaaagtctaggaagtaagaggtaagagtgtactacaggggacataccccaatctctttgctccctccctcttccttcctctcccagagacccaggtccctgggactatattggatctgtctctgaagctgaaaaacaaaaggcagaggagacagtcggctctaagtgaccaatctcaagccagctttgtcagaaatcctaaataacaggagaagggtgggaagaaaggatatgattatttcttattccattttccataagaggtgagaatgacaaggacctcttttctaactcctcttgagggtgtgagaagggttagcaggaggagaagggctgggagctctgaggtctcctgtaagacctcatatctcacaggcaaggactaagaattaggattaaatattttagtgggatagctctaaaccaggattagcaagcaaagttagggcgcaaattcctggaatctgactgggaccctggcagtgaaagctgggactgttgaaaacccaatttaagtgttcgctactcatgttgagagtgcagggcccaagataactagatcccagggacaggcagtttggcagtgagaacaaaaggaaggacactgggaccaaggtgcctagatccctcgagagagaagggtgggtattgggaggaaaaatgaggactggggaaacccaggaggctgggttctggaatagcagcaagtcagaatttcaggatctctgttcgtcctcctcttcctcttccctctatcaggcagaagagagggaaggagggggctggagaagtagccacatggatacatttagggccagacagacacaggaatgctggaggagagagggatttagtgctgcattggccctggaggggtctgggaagggtcaggaggctggggaggggtggtgggggtcggtcctagggttgcacgacgccgtcctttgcggtggccacgtacacagtgtgtatgaccacagccctcttcttcctcctcatcactttccgtggagctctcgccaaaggcccgaggtttctcataaatacagcagcatttggatgagcggcggcccatgtgttcattgtccacagtgtcacttgtccattctacctttttctctggcttccgtttccgaagtttgatggtaaggctccggttctcgggctcggttgtcacggtaaccgttgtctcagtgacggtctcgctcagcccagcccctgcctcggccatggctaaggctcaggacagggaggagaggaggaagggggatgagacacccttccctttttctgtcgctgaggtctaagagaagcggtatcggattcagagtggtagccaggatcctccaccttctttattccccctcctcctgggcctccgcttctccacccctggggataacctggctaaccccacttccggctcgccgcttccgggtg

SEQ ID NO: 121047 - DNA, 511 bp, Homo Sapiens
atgaccacagccctcttcttcctcctcatcactttccgtggagctctcgccaaaggccggaggtttctcataaatacagcagcatttggatgagcggcggcccatgtgttcattgtccacagtgtcacttgtccattctacctttttctctggcttccgtttccgaagtttgatggtaaggctccggttctcctaggaaaggtcccagcaactcttcaaaggaaaatataatccttgctgtttctccgtcttcctccccaaatcatcgggctcggttgtcacggtaaccgttgtctcagtgacggtctcgctcagcccagcccctgcctcggccatggctaaggctcaggacagggaggagaggaggaagggggatgagacacccttccctttttctgtcgctgaggtctaagagaagcggtatcggattcagagtggtagccaggatcctccaccttctttattccccctcctcctgggcctccgcttctccacccctggggataacctg

SEQ ID NO: 121048 - DNA, 943 bp, Homo Sapiens
  misc_feature (137)..(171): n is a, c, g, or t
  misc_feature (524)..(524): n is a, c, g, or t
  misc_feature (671)..(679): n is a, c, g, or t
  misc_feature (778)..(812): n is a, c, g, or t
  misc_feature (815)..(853): n is a, c, g, or t
cagtagcacaccttttgtttattgacctatgtaaaaaaataataggtcttgaaaagtcagaacaataaaagaatatgcaaaaaggttatttctgattctagaaggctatacaaatatgcaaaaaaggaataagttannnnnnnnnnnnnnnnnnnnnnnnnnnnnnnnnnncccaaacttcatttctaattatacacaatgactaaggaccagtttaacaaatcgtttttatgtatatattacatgctttggaatatagatagaaaatgttccaaaaaagttgttcagaaacttttctattcaccatatgaacacagaaacttgtataaaagaagggggaaaggagcaccttttatgtaattttgaagcaaagatgacaaaaaagatcaatcaggaatatggaaatcatttgctttaaaaaacaaacaaacgaaaccctacaataaaccatagctaattagttcttccaaggaaagtatgaggtagttttagcctcataattaaatccactgcagcttggagcntttttgtcgttgttgttgtttttcttttttaatgttaaccttgtttttgtcacttggtgacttggaactacttgtggaatccagacttgtttaattttctaacgttcaccattttaaggcacgcaattcatctaaaatgacgtggcnnnnnnnnnctgttgttttggatactttctgtatcatcttaaaatgctttttcaactcccggccgtaatggccgaattcccgggcatatgtccggtaccgtcgactgnnnnnnnnnnnnnnnnnnnnnnnnnnnnnnnnnnncgnnnnnnnnnnnnnnnnnnnnnnnnnnnnnnnnnnnnnnnctcccggaaacccggaagggccttaaggcccgggccccccctttaatttgagttttggaagttttccttatatttagccaaggtttcttt

SEQ ID NO: 121049 - DNA, 1089 bp, Homo Sapiens
  misc_feature (138)..(172): n is a, c, g, or t
  misc_feature (521)..(572): n is a, c, g, or t
  misc_feature (669)..(677): n is a, c, g, or t
  misc_feature (1069)..(1069): n is a, c, g, or t
cagtagcacacctttctgtttattgacctatgtaaaaaaataataggtcttgaaaagtcagaacaataaaagaatatgcaaaaaggttatttctgattctagaaggctatacaaatatgcaaaaaaggaataagttannnnnnnnnnnnnnnnnnnnnnnnnnnnnnnnnnncccaaacttcatttctaattatacaaatgactaaggaccagtttaacaaatcgtttttatgtatatattacatgctttggaatatagatagaaaatgttccaaaaaagttgttcagaaacttttctattcacaatatgaacaagaaacttgtataaaagaagggggaaaggagcaccttttatgtaattttgaagcaaagatgacaaaaaagatcaatcaggaatatggaaatcatttgctttaaaaaacaaacaaacaaaaccctacaataaaccatagctaattagttcttccaaggaaagtatgaggtagttttagcctcataattaaatccactgcagcttggannnnnnnnnnnnnnnnnnnnnnnnnnnnnnnnnnnnnnnnnnnnnnnnnnnncacttggtgacttggaactacttgtggaatccagacttgtttaattttctaacgttcaccattttaaggcacgcaattcatcgaaaatgacgtggcnnnnnnnnnctgttgttttggatactttctgtatcatcttaaaatgctttttcaaactcataattataaaaactttccatattaagtctgccacttcaaatgacagccgagttggagaattaccagccagaacaatagctcatcacgcaattagtggagaaaggaaaaaggagctccatgatattgtaccttagaatgttctccaagcagactttgtcaattattcagtgggctgcttcattttccccaatctgctaccataagttatattacaggatgctaaggtaatcagtttttccagaacccattttatggtgcttatgaaaaacatcactctttatagtatcctaaaaaaacatttacactcattcagaacttcatgaaaagcctacagccgcggncgctccaacatccctcgtgc

SEQ ID NO: 121050 - DNA, 1207 bp, Homo Sapiens
  misc_feature (1125)..(1125): n is a, c, g, or t
ctcaactttggcatttgtcagttgggaagagaagccaaggcacctttggaagcatcataaaaagtgaatcatttgacccattactaaaatgcagccgcccctgagttgcgaagtggcagtcaattagcagcgtcttagggtacatactacaggttaatttgtggaactcgtaagatgtggatatgttgggatagactttccaggggcttcctcagagcaacattgcagcacatctaactaaaaattcagagacaaagaacatgcactatcctgtcctctcactccccaggtgacaggcagggggaggtccctgagatctggggatgcacttgtctccacgtgcattttacttatcactcttaacacacttgtctagttcacatgaattattttcccaacttctaatatgtctttgaagatagatttatcttgttcatattggagccttctgcttttggcttctttttgtttcttgctcttgtttgctcactccagacttctagatatgaattcatttcctcccagaaatataaaactaggtcatatctggtggtgaaatagttctgtagatccctgttgtaacaatgactttgcatgcttttttgtggccaaggcacattattttagcatcaggtaagggctgagaggcagaagtgcccagctgatggcaaagaaagaagagacacacagagaagcctttgagtttagcagctgtaggtgactccgccttttgatctccgattctgtcactttgatatcccctgttgctttggcaatgtcattttcaatcatacaggagtatgtgttgttgatcgtaacattgtagagcacagacacaaccttcatggtcacattctcagagttcagctcaaagctggtattggagacttccgagaagttggctccctggtcaacttgggatgcccagaccactgtgggctgggggaaccatcggggagcctcacaccgcaaggtctctgagctggcattatagtccacattcacttccggcatgctgaaggctccagttttatactcaaggttagcattccccttgcctttagaagtgatgatataacatttgtaggtgccagcatctgtgagttgcacgtttttcagccgcanagaggcattgccaactatcacttgatcagcaaacactgctgtccggcctctgaacatttcatcctgctccgacagctcatct

SEQ ID NO: 121051 - DNA, 801 bp, Homo Sapiens
aaattcttcccaggtggatccataaaatcagttttctcactaccagggtactttaaaagcaactctgaaaaaagtcacaccaattacacttttaagattacagtgtttaatgtttatcaggatacatttctacagctagcaggataacagatgagttaaggggcctcagactacatccaagggaatgtttattgggcgatcccaattacaccacaagccaaacgacttccagcgtttcctgtctttgtactttcttcatttccacctttgcccaagtcatctgctttttcatggaccaccagtgtgcggccaatgatgcaatggtctcctgagagtgagatcacagaatcttcaatagacacatcggccacaccatctttgtcagcagtcacattgcccaagtctccaacatgcctctcttcatcctttggcccaccgtgttttctggatagaggattaaagtgaggacctgcactggtacagcctgctgtattatctccaaactcatgaacatggaatccatgcaggccttcagtcagtcctttaatgcttccccacaccttcactggtccattactttccttctgctcgaaattgatgatgccctgcactgggccgtcgcccttcagcacgcacacggccttcgtcgccataactcgctaggccacgccgaggtcctggttccgaggactgcaacggaaaccccagacgctgcaggagactacgacgcaaaccagcaccccgtctccgcgactactttacaggccagacctccgcgcctcgcccactctggccccaaac

SEQ ID NO: 121052 - DNA, 952 bp, Homo Sapiens
agtttgaatttggattcttttaatagcctcataataagtgccatacagggtttttattcacaggcttgaatgacaaagaaattctgacaagtttaatacccatctgtgatttaagtctggcaaaatacaggtcattgaaacagacattttaactgagttttataaaactatacaaatcttccaagtgatcataaatcagtttctcactacaggtactttaaagcaactctgaaaaagtcacacaattacacttttaagattacagtgtttaatgtttatcaggatacatttctacagctagcaggataacagatgagttaaggggcctcagactacatccaagggaatgtttattgggcgatcccaattacaccacaagccaaacgacttccagcgtttcctgtctttgtactttcttcatttccacctttgcccaagtcatctgctttttcatggaccaccagtgtgcggccaatgatgcaatggtctcctgagagtgagatcacagaatcttcaatagacacatcggccacaccatctttgtcagcagtcacattgcccaagtctccaacatgcctctcttcatcctttggcccaccgtgttttctggatagaggattaaagtgaggacctgcactggtacagcctgctgtattatctccaaactcatgaacatggaatccatgcaggccttcagtcagtcctttaatgcttccccacaccttcactggtccattactttccttctgctcgaaattgatgatgccctgcactgggccgtcgcccttcagcacgcacacggccttcgtcgccataactcgctagccacgccgaggtcctggttccgaggactgcaacggaaaccccagacgctgcaggagactacgacgcaaaccagcaccccgtctccgcccccggccgtaatgggcactctcgttgataccactgctcc

SEQ ID NO: 121053 - DNA, 948 bp, Homo Sapiens
agtttgaatttgaattcttttaatagcctcataataagtgccatacagggtttttattcacaggcttgaatgacaaagaaattctgacaagtttaatacccatctgtgatttaagtctggcaaaatacaggtcattgaaacagacattttaactgagttttataaaactatacaaatcttccaagtgatcataaatcagtttctcactacaggtactttaaagcaactctgaaaaagtcacacaattacacttttaagattacagtgtttaatgtttatcaggatacatttctacagctagcaggataacagatgagttaaggggcctcagactacatccaagggaatgtttattgggcgatcccaattacaccacaagccaaacgacttccagcgtttcctgtctttgtactttcttcatttccacctttgcccaagtcatctgctttttcatggacctgtaaaaaattttaagaagataactttgggctgtcaagtaatcactacctcctcgcaacaatacccaaaagatgtttaagaacctcataatattagaaaaataacattaatcctagtagagagatatactaatatttagtagtttacaagtagaaactactactcacagctttttcttggtgttgcaaagacattacctttaaacattaggtaagtgttgctgtctaaatgaaatactaaaacccaaataactatgttgtagaccaccacacgctacccttaatcctccatggtaagttacagtaaccttagttccgcagtcactcttactttggcagtttttttaattgctttggaaaaaaaggaaagtgaaagtgaataaaactcaaaatttcatgccaaatgaatgacgggcctataagtaaggtataatcctaaaaatcttaatactttagcaacagtattttgaatttttgttcaacaaccttt

SEQ ID NO: 121054 - DNA, 969 bp, Homo Sapiens
  misc_feature (853)..(887): n is a, c, g, or t
catccggggatttaagtctgggcaaaatacaggtccatggaaacagacattttaaactgagttttataaaactatacaaatcttccaagtgatcataaatcagtttctcactacaggtactttaaagcaactctgaaaaagtcacacaatttacacttttaagattacagtgtttaatgtttatcaggatacatttctacagctagcaggataacagatgagttaaggggcctcagactacatccaagggaatgtttattgggcgatcccaattacaccacaagccaaacgacttccagcgtttcctgtctttgtactttcttcatttccacctttgcccaagtcatctgctttttcatggaccaccagtgtgcggccaatgatgcaatggtctcctgagagtgagatcacagaatcttcaatagacacatcggccacaccatctttgtcagcagtcacattgcccaagtctccaacatgcctctcttcatcctttggcccaccgtgttttctggatagaggattaaagtgaggacctgcactggtacagcctgctgtattatctccaaactcatgaacatggaatccatgcaggccttcagtcagtcctttaatgcttccccacaccttcactggtccattactttccttctgctcgaaattgatgatgccctgcactgggccgtcgcccttcagcacgcacacggccttcgtcgccataactcgctaggccacgccgaggtcctggttccgaggactgcaacggaaaccccagacgctgcaggagactacgacgcaaaaccccggccgtaatggccgaattcccgggcatatgtccggtaccgtcgactgnnnnnnnnnnnnnnnnnnnnnnnnnnnnnnnnnnncggccgcttcctcgctccactacttcgctgcgctcgtcgttcgctcgcgagctagcgccctatagtgagtctatacaggttt

SEQ ID NO: 121055 - DNA, 1086 bp, Homo Sapiens
  misc_feature (204)..(206): n is a, c, g, or t
  misc_feature (208)..(216): n is a, c, g, or t
  misc_feature (218)..(221): n is a, c, g, or t
  misc_feature (439)..(439): n is a, c, g, or t
aaaaggttaagggttccctttcaacaaaatttcccaaagtttagcccgttttccccattccgggagttttgtaaaaacggcgggcccagggcctaagtttattaatcgggctccacttttagggacccccttgtacaaggaaagctgggtacgcgtaagcttgggcccccttgagggatactttagagcggccgcccttttttnnntnnnnnnnnntnnnnaagtttgaatttggattcttttaatagcttcatataaagtgccatacagggttttattcacaggcttgaatgacaaagaaattctgacaagtttaatacccatctgtgatttaagtctggcaaaatacaggtcatgaaaacagacattttaactgagttttataaaactatacaaatcttccaagtgatcataaatcagtttctcactacaggtactntaaagcaactctgaaaaagtcacacaattacacttttaagattacagtgtttaatgtttatcaggatacatttctacagctagcaggataacagatgagttaaggggcctcagactacatccaagggaatgtttattgggcgatcccaattacaccacaagccaaacgacttccagcgtttcctgtctttgtactttcttcatttccacctttgcccaagtcatctgctttttcatggaccaccagtgtgcggccaatgatgcaatggtctcctgagagtgagatcacagaatcttcaatagacacatcggccacaccatctttgtcagcagtcacattgcccaagtctccaacatgcctctcttcatcctttggcccaccgtgttttctggatagaggattaaagtgaggacctgcactggtacagccttctgctcgaaattgatgatgccctgcactgggccgtcgcccttcagcacgcacacggccttcgtcgccataactcgctaggccacgccgaggtcctggttccgaggactgcaacggaaaccccagacgctgcaggagacatcccggaaattccggtccggtaccagctctgattttgtaatacatttctatcccgatgtccttaatggctaacttct

SEQ ID NO: 121056 - DNA, 557 bp, Homo Sapiens
  misc_feature (78)..(122): n is a, c, g, or t
acctccatgatctcctggaaggaggcattgtcctcactcgtgtagcggctcaggaagacatctaggctgggcagcggnnnnnnnnnnnnnnnnnnnnnnnnnnnnnnnnnnnnnnnnnnnnngccgcggggcctgggcattgttgcccaccactccagtgcctgcatgcacctcaggggtttcaaatgtggctggagtcacatagggtggcgggggctcccgggacatcttgccacaaggcagagccaaaacattgatggcaatctggcgcatccagttccaagtctccattctcctcaggcttccaggtactccttctgtgcctggagcttctccacatcaggaaagaaatccctttggatgaccgtctggaggccctcagatatactcttcctcgtccaggacccgctgcttgctcgtcgcagccccagcctctcccgcctcgcgcttcctcgggggcctggacgcggcgggaagcaacaaggacgacgctgatgcgcccggcgtctccatccctcgtgccgattcgaacccagcctcgtacctagcgtagtttc

SEQ ID NO: 121057 - DNA, 1112 bp, Homo Sapiens
  misc_feature (646)..(682): n is a, c, g, or t
gttccccggggggcccgggttcccaggttcttaaaaggcgggcccggggttccgttcccccgtaggggggttttcggaccctcaaatttacaaggggggtttttaaaccttcccccccaagggtatcatcggggactgttcaccaccaggggcaggggaaggagtggcaacaaatccaaatcccacccactcgaggggactcctgggggatcagctccttgccatccggggccccaccttgccctgtttgtgctgggcattgagggcggctgcctgctggagctggcacctgctcagggcttggctgaaggggtccctaaggaagcgcgtgttcttatgtaccacctgccggggcttcttaaacagctgctcctcgtcagggacaccctctggatagtacatgagggaattcttggccttgtacttccaggtctccacactggcctggctgctctcgatggcctggtgctctgctgacgggagttcgagattatctttctgcctcttctcaaactcttcctcagcctggtagagccaagcgtggcgtgcccggcttctctccttggccacctccatgatctcctggaaggaggcattgtcctcactcgtgtagcggctcaggaagacatctaggctgggcagcggnnnnnnnnnnnnnnnnnnnnnnnnnnnnnnnnnnnnnaggcctcggccgcggggcctgggcttgttgcccaccactccagtgcctgcatgcacctcaggggtttcaaatgtggctggagtcacatagggtggcgggggctcccgggacatcttgcccaaggcagagccaaacttgatggcaatctggcgcatccgttccaagtctccattctcctcggcttccaggtactccttctgtgcctggagcttctccacatcaggaaagaaatccctttggatgaccgtctggaggccctcgatatactcttcctcgtccaggacccgctgcttgctcgtcgcagccccagcctctcccgcctcgcgcttcctcgggggcctggacgcggcgggaagcaacaaggacgacgctgatgcgcccggcgtctccatcgccctcgtgccgaattcccacccagcctcgtactagc

SEQ ID NO: 121058 - DNA, 699 bp, Homo Sapiens
gaatatatgggtcttgaaattcagaagatgatagtcactcttcccatatttataggctattaaggcaagggatatcttaaacatcatattactttatttagatttctactactccaattattaatgttatgtatttctcattgttttacttcttcatggtattatgaagactatatagatgattcaaccaagcctgcaaatctccctcttgtggaattccactggacccaatctgttttccatttccattgcaatactactaaagccatacaatatcaagcaccctccctctaggtccagggactatcacagaagaagcaggcatgtaagattttaaggactggtttcgaggggtcgagtgtaggaaaacagcctgttgcattgtaagagtgatgtcatcttgaagagcagctggcatgatgactgctgtttgactcctgcataccaagatattctgcagcaatgtctttaaacagtgccggtagtacagataacccctcataaagatgcttatctaacctccccagtgttcaggtgtttcacaagaaagtctgagatatgactagctacacgttttgccaaaaatgcttgttatataaagggtacttttgggagggtgagtgccgccatttagtggctgctagaaacattgcttctgtttgtaagttcctattaaatgtttctttctgagaaaccgta

SEQ ID NO: 121059 - DNA, 783 bp, Homo Sapiens
  misc_feature (30)..(30): n is a, c, g, or t
acatattttttgttttgggggctcttgggngtttcccagagaaacgaatgcattttattttaggtaacaaaagtagagtcaagtattttttcaaagttcatatacaggcacagtctcagtgaactggcgtcagggcctcgtacagtctctgtgcagccagctccaccatttctcggagggattcatcgtcttcacttccctcttcacattctacagtccgtgtctccaagttaaggttggcagttttcccgtccactgtgacgctaagaatagagtcatcctttacacttacacagtcttctccaaatatgtcctggagcatgatctccaacctcttgctgtaaacgtgcatttctaattttttagaaaccttctgtactgcaccttttcttattttgggatttgactgaacttccaatatcacagttgttactgtatctgcatacatatcattagaagggtttgccagccattctaataccaccatgcctggttcttgtattacagtaatatttttgaacactttcagagcaggtttttcttgaatttctaattcttccacatcacctgtcaatttctgcagctggtaacagagcaaattaaagggaccagtatatggaatggcttgggtctgcttcaccgtgctcatggccaggtcagtataattggacaggtcgcaaggagaaagtatgtgataattaaagtttcttttaacaagtattcctgagacccgctggccttgttctggttttttgtctgctaaaaatcccataccttggctag

SEQ ID NO: 121060 - DNA, 744 bp, Homo Sapiens
  misc_feature (79)..(94): n is a, c, g, or t
aagaatcaaattaatactttattatcaaacactatgtacaacagaggttgctaataatacagaatttaaagaacgcagnnnnnnnnnnnnnnnnaatgttttacttttctttcctctgccacccaagaaagtacagtacaaaacaatagtctaaactaacacgaactgttacctggtctattaaaggatacacggtatccactaaacagacagatccttatttccctgcttgatgttgcaaagcccttggcaaccaggggcaaaggtcactggggtttgactaactggggctgagtggcagctatgactgtccttcagatttttgagttgtttttgaaattaaaagcttctaaaagttgcatcaacatcctcctaagcccccagaggattgtaacaccaccacaaaaggccaccaacactttttaaacaaagtgaaaactgtctgacaccaatcatcttgaaaactccatggcaagtgcattagctatgatttcatcacttacaggtagagaagcttactgtctactggtgtggacactcttgctattttctttatacttaatttgcagtggcagaatggtgaagtaaaggggtctaatttcactgtgaaaaaatgaaagacaatggcagagagggccatgagtaattatttcaccatttgttagagacaaatgctaggaaaaccacagaagtcaccatttctaaaatgcatttagcactgcctacatagttatgactacctgg

SEQ ID NO: 121061 - DNA, 181 bp, Homo Sapiens
  misc_feature (23)..(23): n is a, c, g, or t
  misc_feature (30)..(30): n is a, c, g, or t
  misc_feature (42)..(42): n is a, c, g, or t
  misc_feature (161)..(161): n is a, c, g, or t
gaagcttttaatttcaaaaagtngcatcancatcctcctaancccccagaggattgtaacaccacctctgggggcttaggaggatgttgatgcaactttttgaagcttttaatttcaaaaacaactcaaaaatctgaaggacagtcatagctgccactcanccccagttagtcaaacccca

SEQ ID NO: 121062 - DNA, 601 bp, Homo Sapiens
  misc_feature (545)..(545): n is a, c, g, or t
tttttgtccttaaaaacatttatttttttcagggtgcaggggtcgtgacatcatgacatctacaaaaacggtagaaaaacccaggtttggtgcggggagtgggggcattgtaattacgtctccaaatgctaacagctgtggcagcgcatgctctcttagcctctgaagaggtctctgggcgctcacacttgaaaaaccatgaggttggaacaatcatgttaatgcgcctttttggttttggtgaaaatttcagacagtgtgacattaattatttgtctttgcacagaatgatgatgctaaagccagccccatacagtcctgatgctcagtacttccagcatgggctctgtccaccctgctctctgggtctacatccagcccttcagttttcactaggcaaatctgaggtgagtcaactgagtttgcaaaatgtgcttattagcaggtgtgggatgttctactaccttcttcagagccacagcattcctgttccttcccacatcatttcactaagggtctggacaactcatctcgcaaccattcangacacaggagaattaactgcaggccttcacacatggaagtcagtcacagtgcgtgg

SEQ ID NO: 121063 - DNA, 471 bp, Homo Sapiens
gcacgaggattatataggcatgagccactgagcctggcccagaagcgtttttctcaaaggccctcagtgagataaattagatttggcatctcctgtcctgggccagggatctctctacaagagcccctgcccctctgttggaggcacagttttagaataaggaggaggagggagaagagaaaatgtaaaggagggagatctttcccaggccgcaccatttctgtcactcacatggacccaagataaaagaatggccaaaccctcacaacccctgatgtttgaagagttccaagttgaagggaaacaaagaagtgtttgatggtgccagagaggggctgctctccagaaagctaaaatttaatttcttttttcctctgagttctgtacttcaaccagcctacaagctggcacttgctaacaaatcagaaatatgacaattaatgattaaagactgtgattgccaccaacggg

SEQ ID NO: 121064 - DNA, 1083 bp, Homo Sapiens
  misc_feature (826)..(839): n is a, c, g, or t
  misc_feature (841)..(999): n is a, c, g, or t
attcatatttgttattttattatatattattgtatacaactttgataatgaggatattataaatcatactttaagcaaaaatctatgcatgatatatgtaagcagtaacattttgaagaaaaaagccatgaaagcatttacctaaaatttagtaacatcgaaaaacactagtttgtgcatagtaatgttgaaagcttcataatacactagaatactggtaagtcttcaggtattgtaagaaaaacctggtacaggaaaagactaaaattagacacatccatatccttagatgtgcacatcatctagaaataaatcccacaatgtagcagtgcactaagtatcctttgtttggcacttaacaatacagacaaacgtgtatttggtttaacgtgattttattattcttagatacattttagttattttatatagataaaaatatacaatattgcttttcaaacttttaattttataactgtataactgattgtcatcatattcatgattaaaaagcctattttccactaaacaatttatccagtaacatgtggaagagagtaacaaaaatggtttatgtaagacttataataaaaggtttaaatgtaaaaatagagtattaatctagacctctggtctaaatccttagatacctcatgctggaaacaaattatgaaatgtttcagacaaattttttccaacacttaaattgattctacaggtttaaagttttgactgaaaatacacagaactcagagatattttgtccgaagccatttttatataccattaaccttacttaaaaaagttaaagaaataaaaattgtannnnnnnnnnnnnngnnnnnnnnnnnnnnnnnnnnnnnnnnnnnnnnnnnnnnnnnnnnnnnnnnnnnnnnnnnnnnnnnnnnnnnnnnnnnnnnnnnnnnnnnnnnnnnnnnnnnnnnnnnnnnnnnnnnnnnnnnnnnnnnnnnnnnnnnnnnnnnnnnnnnnnnnnnnnnncgacgcgtggtcgacgatatcccgggaattccgaccggtaccagcctgcttttttaaccacttgtttatattacatcgcctctc

SEQ ID NO: 121065 - DNA, 2920 bp, Homo Sapiens
  misc_feature (822)..(822): n is a, c, g, or t
ttttttgaacattcacaacctttattatgggtgagagcttcactacaactttagaaataaaaagtaaaattacaacataggtcctaggccttggcgagcctgaaaaagaagattgggaaggagggcacagggtccttccacctccctggaaaggtgcagaatgagccaggcctaactacagggccatgagcctctagaagcttaggggggaataagaaacactgtgaacttagatatataaatagagagagacccaagcaataggccgggcctgactcccagacccctgcagatcatggctaaggccttacatcctcctctgtcatactggagtaggaggcaggggaagtcatctttggagtattttggtttttcttatttatgtacaaaaaagtccacatccacaatccaaaataaagttctctgtccatctctgaaactgcctgtctcagtttttccacctgtctgtttggccgaagggaatggaatagacatgaagagacaatggatgtgaagaagaaatagagccatgggtttgggtaataagaagagagagcatttggggttcaagagaggtgccccttccccaagaggctctagacatagtcaaggctgagggttcagcccttctcctagctcacataccatcccatttgcctcccactgcctaggttaacatacccaaaggaatgtgccaccatctaaagaacatttccagaaacagaccccagtgtccttaaaaagaggttaaatattaaccctttgggtgctggccttgtcaggcagagatgaggccaaaagtaggcatctgtgaaggtctgntctggcccttggccagagcccccagagggatcagagtagctggggttgggactccacagcatacttgctcagtgttgggggacagcgaagtttccataatccagggaactcagtccagggaaatgatgtctgaccgacagccagtcaaagagggacctgagggcaggggtcctccatgcccctccctcaaggcccccccaggggccacaatgctgctgacacggccaggaggggggcgccggagtggcgctgcagtgggagctccccagcgtgggggccagtgggcccagaaagtgagaaggggtccctcggtactggaagaagtggccaagggcatcctgttcatctagtgaggtgatgacagaggggccatagtgctgactctctgtctgaagaaatgaaaataaatctaaaccttggatgtcggctcccagtgggaaggcaggtgggtactcatgtagtgggagactggacaggaaatccccacccaacgtgcccatagcagggctccttagcaccgaggatggctggtggccagatgtcaggactcctttgcttccaggtagggccgggatggcagctgaggtgacagaacagtgcttcttggtagggggcagatcctcctcatctgatgagctttctattgtcaagtcaataacttcgaccttcttcttattctctgatggatctcccccctggactgggctgtactggaggccatccagcccataccctggcggggggcaaacctcagatgcctccttcttgggtttcattgggcaccaggatccatcttccatgaattggatctcatcacaatctgaacaggaactaagaatctccataaataaaccatcaatgataagagattcatagggagcctttcttgtcacacacaggacatgtccatgtaggcttcttctcattcatctgtagataaagggcagcatcgaagctctgcaggtgggcgcaggtgagggcacgacaagggacagtcaggcgcatcttccctagcgggcacatgagtgacacccggagacttgtagtggccacctcactgtcagggtcagcagtcaatttctccttgatcagtgcccgcgagtggtctgggttccggataccctttgctctgagtttttgtagaagggttcctgcagtcaactgcctcaccaggtacacagacaaggagtaattccgtccgaactcagatgaccaattgaccacaatggtgttgggaacagtggctgagagtcgagccaggggtgtgatgttgatggggcggctgggcctcttgggctcggccccattcttggttgggggaaggtaacccggcagggggcacagtttcccattgaccgttgacaaagaggttggggggaaaataatcttcctgggggcagctggtctcacagagacagaaccttagctgcacctgtatggtataatcacatttggctcctggcagaacctctctggatgtaagaatctgctgcacttgctggggtgtgagggcaaaggtaaagtgcgcttcctcaaaccgctggctagaagtggatgcaagggtggtgggccggatgagctccccatagacttcatagaagggcaatggtttcatggtgacatcagggtgcacaggctggggcagaggggggtgcatgtccacctcacgcttggggcccagcagggtgccaggggccaacagcgttgggggaatgggagctagaggaccaggggagcctacaggagaggtgccagggggcaaagagagaagggagagatcagagggccccagggtcttccggggaaagcgtcgtcggtaaagctctttgatcttcatctggacactaggggcacagctggacttcaggaggtgcagagccttggccaggagctcgtgcttccgtccactcttgttccggccagcaaagccaagaagcacctggagctcagacacccggaaactcatcaccatgtgctttaattcgcccagctccgccatcttgagacatcgcaggcgccccagccggagccggagctcaggcccagggaccggcgcacacctcgtgccgaattcggcgcgccgtcgacttcatactct

SEQ ID NO: 121066 - DNA, 2807 bp, Homo Sapiens
  misc_feature (70)..(196): n is a, c, g, or t
  misc_feature (203)..(254): n is a, c, g, or t
  misc_feature (272)..(287): n is a, c, g, or t
  misc_feature (295)..(440): n is a, c, g, or t
  misc_feature (1063)..(1087): n is a, c, g, or t
ggaaaattttaaaaaaatcaacccctccttccataaagcgcccgcgggggggaaatatatttataaacannnnnnnnnnnnnnnnnnnnnnnnnnnnnnnnnnnnnnnnnnnnnnnnnnnnnnnnnnnnnnnnnnnnnnnnnnnnnnnnnnnnnnnnnnnnnnnnnnnnnnnnnnnnnnnnnnnnnnnnnnnnnnntttgggnnnnnnnnnnnnnnnnnnnnnnnnnnnnnnnnnnnnnnnnnnnnnnnnnnnnggttttaaaaattttttnnnnnnnnnnnnnnnncccacggnnnnnnnnnnnnnnnnnnnnnnnnnnnnnnnnnnnnnnnnnnnnnnnnnnnnnnnnnnnnnnnnnnnnnnnnnnnnnnnnnnnnnnnnnnnnnnnnnnnnnnnnnnnnnnnnnnnnnnnnnnnnnnnnnnnnnnnnnnnnnnnnnnaattagcacttaattttaattaaaatcaacagttcaggagaagataagatagtgtttaatatcaatttctgagaaatcacatttatataaaagaaataaaacaggccagcagaagtccaaaaaagattcagcttacattattgcacttggatgaaatatgctatttagagtagtataatattcaggccaggccaggaggagaaagagaaaaatggagaggacaaacctccaggtagtatttattccggattccaaactctcctgcggcctaaacagtatttagtctattggaaacattcagcaaggtctttacaaaaatgactgcagtatcttcaacacatttgagttgcactcatacttcgttccagtcatgtgcaagtttaatgcacagctctacctcacaaaacgggatatctatgacaccagaacttccctgtgcccaaggtcatggacaggaggggaaggcagtgaatttctactttatgcatattttagggagcaatactgtggctatcatttacccttttgagcaatcttgattttggtcatttataattagaacatgagaaaaagtgacagtgaatacaaatgagtactaaccgaattcctaggctggtactagnnnnnnnnnnnnnnnnnnnnnnnnngtcccttgccatgttcacaaaggtggcaataactgtatatataagaaaaaggctgtaaacttatagaaaagataaactctggcttcttaaacaaattacaaaattgattttgcctttatccttgagtgtaacacagaaaaatgtaaacctgtagacctagttaccaaaagacaattatccttcttagctcaggtatgaacttaaagtttggcctgagctagtttgatcttcaagttttctccaagtttatccatgaactcaaatgtattcaagtagtcagaacgttgcacattgggtaaacctttaatgcaagcagccaagtccttggtcatgaagccagcctcaattgtctcaatagagacttcttccaaagcatttgcaaagaaggcaagctctttattgttatcaagctttgctctgtgggctaaccctctggtccaggcaaaaatggaagcaatgggattggtggacgtctcctgtcctttctggtacatgcggtagtgacgggttacagtcccgtgggcagcctctgcttctactgtcttgccatctggacaaaccagcacgctggtcatcatgccgagagagccatacccttgggccacagagtccgactgcacgtcaccatcatagtttttacaggcccagatgaagcctccctctgatttcatagcttgggccaccatgtcgtcgatgagcctatgctcataccagatcttttgagcttcaaactgggacttgtactgcttgtcatatatctcctgaaagatgtctttaaaacgcccatcatatttcttcagaatagtgtttttggtgctcagatacaaaggccaacccttagacagagccatttggaaggaactgtgtgcaaaatcttcaattgacttatcttgattatacatccccatggcaacacccaccacttttttcaaagttatgtaccaggtatgtcaccttttgggttccgtcacttggtgtgtaggttatctctacttttccaggcccaggaacaacaaaatcagttgctctgtattgatccccataagcatgacgacctatgatgataggttttacccatccactcacaagccgggggatatttttgcagataatggcttctctgaagaccgtgccacccagaatatttcgtatggtgccatttggtgatttccacatttgtttcaacttgaactcctcaaccctcttctcatcaggagtgatagtggcacatttgacgccaacattatgcttctttatagcttctgcagcatccttggtgacttggtcgttggtggcatcacgattctctatgcctaaatcatagctatgtagatccaattccacgtagggaaaaatgagtttctctttaatcaattcccaaatgattcgtgtcatttcatctccttgcatctctaccacagaaccgccactgatttttttggacattttgacttcaataaaccttgacagtgaatagatttcttatcaccccagttcctcccagtcttgcagactcaactgaatgtagtttatcgcctgccgggatgatatgctggcgaagagttggggcgccacagccgctcacaagctcagactcacaaccacagcctggcaatcccaaaccggactcccagtgcctccgcttctgaagtagactctgcagaaacccgggaccacagggtaggtccgagcttttcctcttcccggctttgtccccccc

SEQ ID NO: 121067 - DNA, 1029 bp, Homo Sapiens
  misc_feature (35)..(35): n is a, c, g, or t
  misc_feature (53)..(53): n is a, c, g, or t
  misc_feature (92)..(92): n is a, c, g, or t
  misc_feature (97)..(569): n is a, c, g, or t
gtagcgcaggtcgaacaggagacgccgagggactncaggggaacgcctgttcntttagtccttccggttcgcacctctgactgaggtcgatntgtgnnnnnnnnnnnnnnnnnnnnnnnnnnnnnnnnnnnnnnnnnnnnnnnnnnnnnnnnnnnnnnnnnnnnnnnnnnnnnnnnnnnnnnnnnnnnnnnnnnnnnnnnnnnnnnnnnnnnnnnnnnnnnnnnnnnnnnnnnnnnnnnnnnnnnnnnnnnnnnnnnnnnnnnnnnnnnnnnnnnnnnnnnnnnnnnnnnnnnnnnnnnnnnnnnnnnnnnnnnnnnnnnnnnnnnnnnnnnnnnnnnnnnnnnnnnnnnnnnnnnnnnnnnnnnnnnnnnnnnnnnnnnnnnnnnnnnnnnnnnnnnnnnnnnnnnnnnnnnnnnnnnnnnnnnnnnnnnnnnnnnnnnnnnnnnnnnnnnnnnnnnnnnnnnnnnnnnnnnnnnnnnnnnnnnnnnnnnnnnnnnnnnnnnnnnnnnnnnnnnnnnnnnnnnnnnnnnnnnnnnnnnnnnnnnnnnnnnnnnnnnnnnnnnnnnnnnaagaattcggcacgagggatattctttcagagcatgagccaggatgtactgactactttcttcacacatcagttgccctttatgatctcagttcataaactctttgtggtatgtagcaatcaaaagtcatattacttctgtaaaactaacattatatagggtgtatagtcccagacaaattatatgaagctagatttttcttgccctggcccatgctctgaaagaatatccagagaggctctctcaaagatcagggagatgtattcccatgccatgcaccctgcttcccagcatttctgcatggtcaagtgagctttatgctcatgagctttaagtatataattatccaggattttaaatcctcaacttgttctagcttgtgatccctcaaagttgggtcatacgttagtgctagatactagaaattttcacttttccactgatcagagagacagacatg

SEQ ID NO: 121068 - DNA, 2952 bp, Homo Sapiens
  misc_feature (1883)..(1908): n is a, c, g, or t
cgtgctcagggggagaagcccttggctggtgctaaaatagtgggctgtacacacatcacagcccagacagcggtgttgattgagacactctgtgccctgggggctcagtgccgctggtctgcttgtaacatctactcaactcagaatgaagtagctgcagcactggctgaggctggagttgcagtgttcgcttggaagggcgagtcagaagatgacttctggtggtgtattgaccgctgtgtgaacatggatgggtggcaggccaacatgatcctggatgatgggggagacttaacccactgggtttataagaagtatccaaacgtgtttaagaagatccgaggcattgtggaagagagcgtgactggtgttcacaggctgtatcagctctccaaagctgggaagctctgtgttccggccatgaacgtcaatgattctgttaccaaacagaagtttgataacttgtactgctgccgagaatccattttggatggcctgaagaggaccacagatgtgatgtttggtgggaaacaagtggtggtgtgtggctatggtgaggtaggcaagggctgctgtgctgctctcaaagctcttggagcaattgtctacattaccgaaatcgaccccatctgtgctctgcaggcctgcatggatgggttcagggtggtaaagctaaatgaagtcatccggcaagtcgatgtcgtaataacttgcacaggaaataagaatgtagtgacacgggagcacttggatcgcatgaaaaacagttgtatcgtatgcaatatgggccactccaacacagaaatcgatgtgaccagcctccgcactccggagctgacgtgggagcgagtacgttctcaggtggaccatgtcatctggccagatggcaaacgagttgtcctcctggcagagggtcgtctactcaatttgagctgctccacagttcccacctttgttctgtccatcacagccacaacacaggctttggcactgatagaactctataatgcacccgaggggcgatacaagcaggatgtgtacttgcttcctaagaaaatggatgaatacgttgccagcttgcatctgccatcatttgatgcccaccttacagagctgacagatgaccaagcaaaatatctgggactcaacaaaaatgggccattcaaacctaattattacagatactaatggaccatactaccaaggaccagtccacctgaaccacacactctaaagaaatattttttaagataacttttattttcttcttactcctttcctcttgatttttttcctataatttcattcttgttttttcatctcattatccaagttctgcagaccacacaggaacttgcttcatggctctttagatgaaatagaagttcagggttcctcactctagtcactaaagaaggattttactctcccagcccagaaaggtgattctttctttaccatttctggggactttagtcttaattaggtaccttattaacaggaaatgctaaggtaccttctctgtggaacaatctgcaatgtctaaatcgccttaaaagagcccatttcttagctgctgaaatcagtgctctttcacttcttcagagaagcagggatggtacctacccggcaggtaggttagatgtgggtggtgcatgttaatttcccttagaagttccaagccctgtttcctgcgtaaaggtggtatgtccagttcagagatgtgtataatgagcatggcttgttaagatcaggaggcccacttggatttatagtatagcccttcctccactcccaccagacttgctcatttttcgagtttttaactagactacactctattgagtttaattttgtcctctaggatttatttctgttgtccnnnnnnnnnnnnnnnnnnnnnnnnnnttaaggagaatttttggtgttaatgctgaggaattgcttgagtggttagttgttaccaatttctcttttgaacctttggagctaaggatgctgagtctagagaaatgctagtctcaagccctgttaagtccctctgtttctagcccgtagttcatagcatcagtgaactggagccacaacagcaaattctatcagctgtgtaccatacagcttgtgctgaaggcgaatttcttgagccattactcagtataaagcactgagttctatctttaggatttatctttaagagcaaatttctggtcagctgtgcttctgcaacctaaaatatttaaagggaggtaggtgtgggcaggaggaggaatgataaattgggccagggcaagaaaaatctagcttcatataatttgtctgggactatacaccctatataatgttagttttacagaagtaatatgacttttgattgctacataccacaaagagtttatgaactgagatcataaagggcaactgatgtgtgaagaaagtagtcagtacatcctggctcatgctctgaaagaatatccagagaggctctctcaaagatcagggagatgtattcccatgccatgcaccctgcttcccagcatttctgcatggtcaagtgagctttatgctcatgagctttaagtatataattatccaggattttaaatcctcaacttgttctagcttgtgatccctcaaagttgggtcatacgttagtgctagatactagaaattttcacttttccactgatcagagagacagaccattaaaaacaaaaatagaagaaaggaaagctttcaccctgcagcttcttagcagggaacaattgtcttgccaaaattttttcccttttctctcccattttctttttacccaatcccttcttactccttgcccagtgtgaccatgctttcttctctgtccaatgttaccaggtaaggcctattttcctcgggcaacttaaccaacaatcagaaaccacattcgtaggggaagtaccgggcaacaggtattca

SEQ ID NO: 121069 - DNA, 512 bp, Homo Sapiens
  misc_feature (87)..(162): n is a, c, g, or t
  misc_feature (184)..(215): n is a, c, g, or t
catggtaggttaccattttctctttgtaactgataactaatttgtggggtattatttaatcttgtctgtcaataaactttcacctgnnnnnnnnnnnnnnnnnnnnnnnnnnnnnnnnnnnnnnnnnnnnnnnnnnnnnnnnnnnnnnnnnnnnnnnnnnnntggtctcgatctcttgatttcnnnnnnnnnnnnnnnnnnnnnnnnnnnnnnnntttaatatatcccactgatttttttagtatttcgttattttctgacaagataatgctctaggcttatcttgtattttccttgcccagcccaggaatcagcagtttctccaaggagtttctttaataggtatgtagtagtagtatatagtagtttcttagtttcttttagtaggtatgtcatttagaagctaaaattggcactaggtattcacactgatactggatatcattgctttggggcatttcagcagacagaactaggaaaatttatgcaaataagtgtgtgtatatatatgt

SEQ ID NO: 121070 - DNA, 731 bp, Homo Sapiens
ttagtgaaattattgtttttattgcttttaatcccttgacgccgggagttgggatttcccggcacacttccattgccggcaatgagacgcaccgtgaccgccagcgccaaggggttaacatatacttgtaaaaccatataactcttaatttgtacccgtgtctttactcttattgatatataaaattatatatacatatgaaccatatagctacataaaacttagcaacaataaaaataacacacattaatacaattcaaagaaaaattaaccctttatgctggataaatctcatttctgtttttttattgtcttttatgttaaactttctacaaaaggatgtataaacgggtaagtagagaatctctatctacaaaatgttttctcttttaagtattacattacttggtgtacatttaatagactgacatatataagcacataaaaatcattttacgtaatacgctgcgaaatacgttgactcctcctccgcctcacccctgaagtgcctcctcctctatcctccccatcactttcatcatcttctgtctctgctgctgtattatttttagggctgcctcctccaagcagtgaggtaattgctttgttccgagcatttgtgctagctgaaacctccccttcttcttcttcttcatcagggtccagatgttccatgagaagtttggaatctagatacggttttactacaccccttttcacctcttctgtga

SEQ ID NO: 121071 - DNA, 580 bp, Homo Sapiens
ttttttgactgaactaagtggcttttttattagagaaagccagaattacaaaagacttaagagttggcattggggcccttcttcttgccaaaggtgggcacaacgttgacaaagcgccggttgtactgcatccgccgcttagcccgacctgtcttcttcttcttcttctcctgtttggccaccttaggagtctgacctctcacttttccagcacgggccagggaaccatggactttacctccaagcatgcggcctgctacttccagggtagtcagggcctccaccccgcactggcccagagtggcctcatcctccaggggcgcgcctgccaggagcacgacttgatcttccggggcaatgccctccagtgaggctacatgagccttgatctgggcgaccgtttcctggccggtcacctcgaaggtgtgtagctcctgggcgcggacaaagagctgcatattggcgactgaacggcggtcccagctaccgcgaagatggagtcgagaaagaggaagaagcgagggcgcgtcagtacagaccgtgggctgcgtgtcacgtcactgctgagcgaccgcgcccc

SEQ ID NO: 121072 - DNA, 176 bp, Homo Sapiens
actgaactaagtggcttttttattagagaaagccagaattacaaaagacttaagagttggcattggggcccttcttcttgccaaaggtgggcacaacgttgacaaagcgccggttgtactgcatccgccgcttagcccttctgtcgtcttctcgcagccgtatagtagtagtagta

SEQ ID NO: 121073 - DNA, 1013 bp, Homo Sapiens
aggaatttccaagaacatttatttcaccattctttaggtggttatgtacaagtacatacataaccaggagagcaacccgggccctcctggccctcgattataaaactccgatggtcaagacaggtcccacccatcaacccaattacaccctgccgctccaccttctacccggaagccccgattaaaacgttttaaataatgaacggcctggctggcttgcagtttgaatcctggtttatttaagtagcattcaggagttatactgtaaataaacatcattatggctaatgactaattaaaatcaccattcattacaaataccaaccaggttagataatactattaactatcttttccccttcggtctggggttcatattcttccttttctggaagtcattttcatggataaaatatttagcattttttgttacctcttccttcaccaactgtactcaacacacttctgtaaacagagtgagaacctgggttcatggacaagctcttttccacttatcttcgggttaaaccaaaactttttcagcaactttgcccctgtccaagttttgcagaacaccagctgcctcttcctgttctaggcattctagggctagatacctgtgaacggacttcaagcattaaagaagtcatcagcatttcctatacctcacacacactcatttgcccaccctgaacttcactgacattaatttaggagcctgccttttgcctttcacatgtttctatttcccccactgtactgtaaaataagatctgccctgacattaagaaaaaaggcaactgttaaatttacttttccctttaaataacgggattttttccttttctataagattagcaaaatatttcacaatacctatattttttcccttaaataaaaatgtatgcaaaattactataatagacattgctcaataggtgctggtaggtttatcagcacactcttcctcctttcattgaaatgcggagattcccttgaagttggatactctt

SEQ ID NO: 121074 - DNA, 1164 bp, Homo Sapiens
  misc_feature (570)..(570): n is a, c, g, or t
  misc_feature (617)..(617): n is a, c, g, or t
ttcaatagattaccaatttttcccataccaatatttttcccttaaatcaaatttatccaaaattactataatagacattgctccataggtgcttgttggtttatcagcacacttcttcctcctttccattgaaaatgccggagattccccttgaagttggatacttcttgaatgcaccatggagtctttagaaagcaacggtgccaattattaagtattgcaggaaaattactttctccttgagagaggaagagtaacgacatttctatcatgctctgggtgttatttcaatgccagataactatgaagcttgaggtggattacagaaattatgagaataagaattatgagaataattcttaaaaacacgttccgaggttaatgtctttcgaaacctgaaaattaacagatatccccataaaaaaatccacattagccaaagaaaaatactcagtttcaataaaagcagaaagaaaaatggttctatatgaagttgaagttacacttgtcaatgcactaaaatagttttatccaaatcaactgaaaaactgtcttcatactattcatccnatgtctaaagtgaaaatttaagttctggtctttagtttgctccccanaatactgtagcaggtattgtcttggtaactcaacgatgggctctatacagattcatcaagtttaaaaataagcaggggcttctatcccataccccaatgacagaataaagatcatctctgagcagcaggcagttatttaatacaaggtcactcctcaatagcgttggctgtaccagtcgttgttgtttaactgaagaagttctgtcacaacctgcaggatattgtaattgtgtttcttcagcagccgtaggttcagctgcctgtcacagaatcccatttcaaagagatgggccatcagggctgctgtctgatcttcagaaattattggctgtgcagtgactggtggcccatcaaacagggccttgtttgcagaggcagcaacagacaaagcccccttcaccattcctccagcaatgctgctcccatgatggtgccttgagtgggcatagctcttctgtctgctgtttacaagtcctgatgagcctctgggctcttctctgttctgatcagggactgaagaaacttctggtttgggaactggtaaatt

SEQ ID NO: 121075 - DNA, 967 bp, Homo Sapiens
  misc_feature (63)..(71): n is a, c, g, or t
  misc_feature (851)..(885): n is a, c, g, or t
cttaaatgtaaaaaaaaccaaacaagaatctttcgttttcttacctagggctttgactatttnnnnnnnnncttaacgtgttttatgttgcttatcacaggacaatgtaatttgcagtcattcccacatggttttccttaaacacatgatattctatttttagaaatagcaaagctctctaaagtctcaaataactgtcaattttgtaataattttattatcccatcattgtaagtaacagattatttaggtaggttagcaggttacccagtagttacataattgaaagtgtaataacaatggtgaaacatactaggagatattttatctttacttgcatatcttttttgttttaagatacttgagcgttctctaaagctgctatttgaaacgagagatataagtctaattaaacagtatgttcagcgacaatgtatgaagcttctggaaggaaaggccagcatacaagactttatctttgccaaggaatacagaggaagtttttcttataaaccaggagcttgtgtgccagcccttgaacttacaaggtaatgataccctcagtaccttgccaggatagtcctgagattctgcacaggtctagaagacccaaatgaaaagacagtccatagacacagacacaaaattgtttctttacctgcgcacatgaagcctcactgaaagttagtgaatattccctcatacttcgtaagatgtgaagaggaaatcctcttttgggctttccttcagaaacttatgcaaagaaattgtgacacagtccttgattcatttgtttttcccccggccgtaatggccgaattcccgggcatatgtccggtaccgtcgactgnnnnnnnnnnnnnnnnnnnnnnnnnnnnnnnnnnncggccgcttcctcgctcactacttcgctgcgctcggtcgttcggctaagccgagctagcgccctataggtgatttcaagttt

SEQ ID NO: 121076 - DNA, 1049 bp, Homo Sapiens
caaagggaaaggggggttaaattccctggtggggagaggggtaccagcttcaaaccaaagggccaccaggaccccttcccaggttccccgtgttgtagctgaaggtaaaggggggtcataattcctgggctgttcaaggttaaaagtcaaaggcccttaaaagtttttcagccaatgggttcctggtgtcacaagactttgggggatcacccacccaaggttcctctgcatggggaacccggatcaggacctgggctgtagttttattgtgcttggctgcgatcgccttgatcctgggatcctccaggagagaagggtcctcgggcttggcccagggcctgtcaggagagccgagggggctgtaggcggtcaccacgatgcctttggactggcagtactggattaacttctcctgagtgagatatgggtggcactcaatctggttaactgcaggcttatacttcaagccaggtttgtttaagatcatctccacctggagatggttgaagttggagatgccaatagctttcaccagcccttcatccaccagctcttccatggccgcccacgtgtccagaatgttggtgtcactgggaaccacattgcccgactcatccaatgggaaaaattccttcccaggcttaaagccagtcggccagtgaataaggtagaggtccaggtagtccagcttcaggtcgctgagtgtcttctggcaggctcctttcaccaggcccttctcatggtacgtgcaccacagcttgctgacgatgaagagctcctcacgcttcaccacctgctccctgagcttctcctgaatggccacccccacctcattctcattctggtacacatgggcacagtcgatgtggcggtacccgacgtcaatggccaccttcacggcctcagtcacctgccctggaggggacttccaggtacccaaccccaggatgggcatcttggcgccgttgttgagcaggagacggcttgccatggctgctgcgctccgcaaaccggacgcgtgggtcgacgattggaaggaattccggacc

SEQ ID NO: 121077 - DNA, 1384 bp, Homo Sapiens
  misc_feature (1365)..(1365): n is a, c, g, or t
acatgggggggacatgggaaaccaccaggggccaaagtgttatgcctgttggccccggagagtaaacaagatttgtgggggcgagaaagaacccccccggggttagaagagggggctcctatgggggcgttggggaccataggggcaacaccgcgaaaaggattttcaaaaggacagctgtatacaggggaagaggtggggagaagcgctcattgatcggggagaggtgacacaagctataaaaagagggggcactcagtgtccccctcacccatgttgcccctggttgttagcggctgaagtgaaaagggtggtgacacatatatcctgagagttggcctccaggtttacaaaaattcacaaacgaacctccgaaaagtttctgccaagtcaaaggggttttttgaggtgtaccacaagcacttgggggggtatacccccagccaaatgttcccttcttcgccatggggggaacccgggattccagggacccttggggctggtaagttgttaattgtggcctttggctgggcgatcggcctttgaatacctggggattcattgccagggaagaaggaaaggggttcctcggggcttgtggcccaggggccctttcaaggagaacccggaaggggggctgttagggcgggtcacccaacgatgccttttggactgggcagtactgggattaaattctccttaggtgagatatggggtggccactcaatctgggttaactgcaaggcttatacttcaacccaggtttgtttaagatcatctccacctggagattggttgaagttgggagatgccaatagctttcaccagcccttcatccaccaggcttttccatggccgcccacgtgtccagaaatgttggtgtcactggggaaccacattgcccgactcatccaatgggaaaaattctttcccaggcttaaagccagtcggccagtgaataaggtagaggtccaggtagtccagcttcaggtcgctgagtgtcttctggcaggctcctttcaccaggcccttctcatggtacgtgcaccacagcttgctgacgatgaagagctcctcacgcttcaccacctgctccctgagcttctcctgaatggccacccccacctcattctcattctggtacacatgggcacagtcgatgtggcggtacccgacgtcaatggccaccttcacggcctcagtcacctgccctggaggggacttccaggtacccaaccccaggatgggcatcttggcgccgttgttgagcaggagacggcttgccatggctgctgcgctccccagacccggacgcgtgggtcgacgatatcccgggaatccggaccggaccagcctctttgtttntgttctggagtaattaata

SEQ ID NO: 121078 - DNA, 970 bp, Homo Sapiens
  misc_feature (899)..(899): n is a, c, g, or t
aaaaagcggctggtaccggtgcggagttttcgggatatcgtcgaccccgcgtccggagcgcagcagccatgggaagccgtctcctgctcaacaacggcgcgcagatgcccatcctggggttgggtacctggaagtcccctccagggcaggtgactgaggccgtgaaggtggccattgacgtcgggtaccgccacatcgactgtgcccatgtgtaccagaatgagaatgaggtgggggtggccattcaggagaagctcagggagcaggtggtgaagcgtgaggagctcttcatcgtcagcaagctgtggtgcacgtaccatgagaagggcctggtgagaggagcctgccagaagacactcagcgacctgaagctggactacctggacctctaccttattcactggccgactggctttaagcctgggaaggaatttttcccattggatgagtcgggcaatgtggttcccagtgacaccaagattctggacacgtgggcggccgtggaagagctggtggatgaagggctggtgaaagctattggcatctccagcttcaaccatctccaggtggagatgatcttaaagaaacctggcttgtagtataagcctgcagttgaccggattgagtgccgcccatatctcactcaggagaagttaatccagtactgccagtccaaaggcatcgtggtgaccgcctacagccccctcggctctcctgacaggccctgggccaagcccgaggacccttctctcctggaggatccccggatccaagcgatcgcggccgagccccataaaactacagcccaggtcgctgattccggtttccccatgcagaggaaacttggtgggtgatcccgcgaggtactgtgacaccaaggaacggcattgcatggaaancgttttaaagggcgtggtaacgtttggcacctggagcgggccgggggatatggggcgagcgttggctcaaa

SEQ ID NO: 121079 - DNA, 948 bp, Homo Sapiens
ttcctgttgtagcggagtaagggtggtcatatcccgggctgctcagtttcaaagtcaaagaccttaaagtttttcagcaaggcgtttctggtgtcccagacctggggatccccaccaagtttcctctgcatggggaacccggatcaggactggggctgtagttttattgtgcttggctgcgatcgccttgattcctgggatctcccaggagagaagggtcttggggctggccccagggcctgtcaggagagccgagggggctgtaggcggtcaccacgatgcctttggactggcagtactggattaacttctcctgagtgagatatgggtggcactcaatctggttaactgcaggcttatacttcaagccaggtttgtttaagatcatctccacctggagatggttgaagttggagatgccaatagctttcaccagcccttcatccaccagctcttccatggccgcccacgtgtccagaatgttggtgtcactgggaaccacattgcccgactcatccaatgggaaaaattccttcccaggcttaaagccagtcggccagtgaataaggtagaggtccaggtagtccagcttcaggtcgctgagtgtcttctggcaggctcctttcaccaggcccttctcatggtacgtgcaccacagcttgctgacgatgaagagctcctcacgcttcaccacctgctccctgagcttctcctgaatggccacccccacctcattctcattctggtacacatgggcacagtcgatgtggcggtacccgacgtcaatggccaccttcacggcctcagtcacctgccctggaggggacttccaggtacccaaccccaggatgggcatcttggcgccgttgttgagcaggagacggcttgccatggctgctgccggacgcgtgggtcgacgatatcccgggaattccggaccggtaccag

SEQ ID NO: 121080 - DNA, 2298 bp, Homo Sapiens
  misc_feature (133)..(133): n is a, c, g, or t
  misc_feature (760)..(848): n is a, c, g, or t
ttttggtggattggctggttgtgctatgtgctacggtgttcgtgtcttgtgaccgagtccaggtaggtcttatagtgtagcgtgcggatggggcgtggactccattcgacccgagcgggattcgtggcttggnggcctgcatcgatgtggcgtctgttgagatggagcactctctagcgcagctgtggtcgcttgacgtagctggtgccttatactatggggtagcgcataggggttatcgccgcctcggtgtgcgtcccggtttctgcgcagagatgggttcctctctgctcgacacttctccgtggtgcgcgggtgtgcgtcgttgagtggcggagaatatccgtttgagtggggtacgggtatatctggcgcactaatgccgcggactgattgcatagttgcgtgtcgtgagtcattgtattggttgtcgctcggttagtttttttagtggtgttcttacggctgtcttggtgttggtgtccatgggtttgccggtggcgtcggtttcgtcagttcgggtccgctcaatctgtcgcggcttcgtgggggaatgtactgtcccggcgcgctcttctcgtcgcgtgccagacccttgcctgcgtttcggctgttttgatgcgcctctgtgctcctcgggggacaggaggtagtctgcaatgctggaggggtatggggtgtggatgtgttctgtcattgtcgtgcgggtgtgtgcccttgggttgtctgcgcctttattgtattttgctctgttgttccnnnnnnnnnnnnnnnnnnnnnnnnnnnnnnnnnnnnnnnnnnnnnnnnnnnnnnnnnnnnnnnnnnnnnnnnnnnnnnnnnnnnnnnnngggctcacaaaagcactttttatttgaggcaaagagaagtcttgctgaaaggattccagttccaagcagtcaaaactcaaccgttagtggcactattttgacctggtagattttgcttctctttggtcagaaaagggtattcaggttgtactttccccagcagggtagaaagaagggcaaagcaaactggaagagacttctactctactgacagggctcttgagatccaacatcaagctagacacgccctcgctggccactctacaggttgctgtcccactgctgagtgacacaggccatactacatttgcaaggaaaaaaatgaggcaagaaacacaggtataggtcacttggggacgagcaggcaaccacagcttcaaaactcttcatggaaggggtaatccttgtgggaggtacagctcaacaaggcacagaccctccagttcctgttgtagctgagtaaggtggtcatatcctggctgctcagttcaaagtcaaagaccttaaagttctcagcaatgcgttctggtgtcacagacttggggatcaccaccaagttcctctgcatggggaaccggatcaggacctgggctgtagttttattgtgcttggctgcgatcgccttgatcctgggatcctccaggagagaagggtcctcgggcttggcccagggcctgtcaggagagccgagggggctgtaggcggtcaccacgatgcctttggactggcagtactggattaacttctcctgagtgagatatgggtggcactcaatctggttaactgcaggcttatacttcaagccaggtttgtttaagatcatctccacctggagatggttgaagttggagatgccaatagctttcaccagcccttcatccaccagctcttccatggccgcccacgtgtccagaatgttggtgtcactgggaaccacattgcccgactcatccaatgggaaaaattccttcccaggcttaaagccagtcggccagtgaataaggtagaggtccaggtagtccagcttcaggtcgctgagtgtcttctggcaggctcctttcaccaggcccttctcatggtacgtgcaccacagcttgctgacgatgaagagctcctcacgcttcaccacctgctccctgagcttctcctgaatggccacccccacctcattctcattctggtacacatgggcacagtcgatgtggcggtacccgacgtcaatggccaccttcacggcctcagtcacctgccctggaggggacttccaggtacccaaccccaggatgggcatcttggcgccgttgttgagcaggagacggcttgccatggctgctgcgctccccagacccccgcccagtacggtgcggccttggccgcggcgcgtacctttaaatagcccgtgaggtcggcccccggcgtaatggccactctgcgttgataccatgcttcc

SEQ ID NO: 121081 - DNA, 916 bp, Homo Sapiens
gtcggtgcacaactgggacacaccagttctctcatgggaccggtcagaccggctgtagtttattgtgcttggctgcgatcgcctgatcctggatccttccaggagaaaaggtcctcggcttggcccagggcctggtcaggagagccgagggggcctgtagcagtcaaccacgatgcctttggactggccagtaactggatttgacgttctcctgagtgagatatgggtggcactcaatctggttaactgcaggcttatacttcaagccaggtttgttttaagatcatctccacctggagatgattgaagttggagatgccatagctttcaccagcccttcatccaccagctcttccatgccgcccacgtgtccagaatgttggtgtcactgggaaccacattgcccgactcagtccaatgggaaaaattccttcccaggcttaaagccagtcggccagtgaataaggtagaggtccaggtagtccagcttcaggtcgctgagtgtcttctggcaggctcctttcaccaggcccttctcatggtacgtgcaccacagcttgctgacgatgaagagctcctcacgcttcaccacctgctccctgagcttctcctgaatggccacccccacctcattctcattctggtacacatgggcacagtcgatgtggcggtacccgacgtcaatgtccaccttcacggcctcagtcacctgccctggatggggacttcacaggtacccaacacccaggatgggcatcttggcgccgttgttgagcatggagtacggcttgccatggttgctgcgctccccggacgcttgtgttcgacgatatccctgggaaattccggaccggtaccagcctgcttttgtgaaaccacgggtctataggcacactgttgttttgtgggtcttttg

SEQ ID NO: 121082 - DNA, 1906 bp, Homo Sapiens
  misc_feature (188)..(201): n is a, c, g, or t
  misc_feature (478)..(540): n is a, c, g, or t
ggttgtcaaaggctcgggtcccccgccgtttttatgggggagaccccgcgccttttcggccagcgtttcctggggagacgtttggccccatgttcgaatacacatggggccccggccacacacggaatggttttagaaaactttctcagggcccgaggcggcccaaaacagtttttgttggtaatagnnnnnnnnnnnnnnccaaaaagtaccaccagatggtaattttaaagaccgggacctctccagttgcatttgaaagaaattgctaacaacgccaccccctctataatgtggtttcttgtgctccgggagtcctcttgcagcttattgtcgtgaaactcaggcgcagcaaccagacattaaatccccaaaggggagaggtaatagtaaacctttttgcctggtcaattcttttccgaatgcaaaatggacaaattcttaagccctcttattcatttcatgatgatcattagannnnnnnnnnnnnnnnnnnnnnnnnnnnnnnnnnnnnnnnnnnnnnnnnnnnnnnnnnnnnnncagataataaatatcgcttattcacttattttaaacaaagtccaattttattcactctcaatatccttgcagtccattgtataccttctgcactgacccttgtttcagtagctgtttgataccttctctcgcttcctctgttaactgttcttttggaaaatccacatcaaaagtgattatcaaagagcccttgatattgttgttgtcaaagttggggagcccttcccctttcttccatagcttcgctcctggcctggtgatcttatcccgggaaatatgtaccttgtgaccatccaagtgagtaatatccatctcaaagccaaccagtgactcaactaatgagattgtcacatttgtgtacaaatcatctcctctcctttcaaatattgggtgcttgacaactttgattcggaaccgtaaatctccaggctccccatccacgtgaggctcaccttctccaataaaggggtactccatgccgtctctcaccccaggctctatttctacttccagcgttcgttcttcattcactagtttgacattagggcattcgtcgcagaccacctcctgggtcatttggaagcgcccagggcccagctgggtggtccgcatctcttgccgacaattgcacttccgtttgccaggagcctgccttgccacaggtttgtttctaactacttccacaaaatttcctgcatatacttcttccaaagtgacttctagatctacaataatatcacttcctcttggaatatttctgtcttgctgacgaggggttcctccaaacatgaaaccagaatccccaaagaagtgtgaaaaaatgtctccatgggagctctgatgaccatcttttaatccttcttcaccataagtatcgtactgtttccgtttctcactatctgacagaacctcataagcagcacccagatcctggaatttctcctgggcttgtggatcatcagggttccggtcgggatgaagctgcagggctagtttcctataggcctttttaatatcctttatagaggcacttcgaggcacccccaagatcttatagaaatctcgtccggcaatcaccgccccgatgaggtatagcagcaacaggcaaaaggtgctcaggttctgcggagccatggttcctctgtcccgggtcctgttccacacactcctcacagcctcctccgccgccgcgtcggctcgccagcccacccggccctgtgaggccgcctcacaccgggggggcgcgggggtctccctggtccgcagagacagctagctagccccctcttctgccggtccacttcccgggagtcccgagtcccggtgagagaagcccccggtaggcgatcccgggaattccggaccc

SEQ ID NO: 121083 - DNA, 710 bp, Homo Sapiens
  misc_feature (55)..(84): n is a, c, g, or t
cagtcgacggtaccggacatatgcccgggaattcggccattacggccgggaaggnnnnnnnnnnnnnnnnnnnnnnnnnnnnnncaatatgcaagttaggcttaatttttttatctaatgatcatcatgaaatgaataagagggcttaagaatttgtccatttgcattcggaaaagaatgaccagcaaaaggtttactaatacctctccctttggggatttaatgtctggtgctgccgcctgagtttcaagaattaaagctgcaagaggactccaggagcaaaagaaacacaatatagagggttggagttgttagcaatttcattcaaaatgccaactggagaagtctgtttttaaatacattttgttgttatttttttcatgactcctgtttcttctgtgagctatttgggttgtcctcccatcaagcaagatggatgcacacgcatgcaaaagagtgatatagatccagtccccatgcccaattacacatacggcatctgctagaaaggagcttggaagaaactgaatggttgattggggtccatgaatgaaggttacacaaagatctaattgtccttgaagtatatttctctcatttaatttgggaataataatctgatatggacactttactgtttagaaagcacctttcatgtatatcatttcagttgacctcatggttagaaagcctttggtttgtttaggaac

SEQ ID NO: 121084 - DNA, 1020 bp, Homo Sapiens
  misc_feature (904)..(904): n is a, c, g, or t
  misc_feature (987)..(987): n is a, c, g, or t
  misc_feature (1001)..(1001): n is a, c, g, or t
atagtcatcggtttgtttattttttaatctgtatactgtttaatacattgtcagcaaggactgatgaaaaggtcaatgacactttttctacaatgtatagtattatttgaaaaggaattaaagaaaatattttaaatgttaagagacattcctatttaattccttaagaaacattttccttgagattctgcaaccttggaaaaattcagttctcaaggtattccaaatatgcagcaaatgatatatgttttataattaatgtataacaaacattttattaaaatgcatagaaggttatatggaagactaagcataacgaatacaataatgaaaatggtagaaccttttagacaacaaatatgtttccgtttcagagagaacagctgtgtaaactactatagcaaccacagtctatgtaatcatataactgaggcatagtcttcaagatcaagtgcttggttatagtcagccatagcttcctcaatcagacctattttaccacgaacttttgctctaaaattatatactagagcatcattaggcttcaaagacagggctttattaaggtcttcctcagctagttcatattgctttaagcagtagtagaaatgtgctctattaaaatatactgcagcccaaaagggacagctttcaattacatttgcaaaatcttcttttgcttcttcatatttctttaatattgtatttgtaatagctcgattcatgagaacatattcattttctggatcaaattttaaagcttttgagaagtagtcactggcctgggaaaactgcctgtggtgaaagtagatatttcctgcattaaagtaagccagcgagtacttggggtttagagtaattgcatcttggtagtctttcattgcattctgtttgtggcccatanactcatgaatcaccccacgatttgttaagattctgctgtagtactgatcttcatggcagcattaatatcctgcattgcagcanaattataccatctngagaagacacagctcttct

SEQ ID NO: 121085 - DNA, 421 bp, Homo Sapiens
  misc_feature (275)..(338): n is a, c, g, or t
ctttaaagcacaatacaggtatttgcaggggtgaagggaagaaaataaagaaggaaggaaatgctaacgtacccagtttaagacttagtcctatttttggcctatgctcctcaggttgctgttgatctggtgagttttcatgaggaataataataccacagggagactcatccccaggagtgttaggtgttgcattgccactggcagaggaaacagatggagcagagctgatgggcctcagagtaggtttcagacaaggcttttgctctggctcnnnnnnnnnnnnnnnnnnnnnnnnnnnnnnnnnnnnnnnnnnnnnnnnnnnnnnnnnnnnnnnntctgattctggctcttgctttatttgtggctgcctgcgcctctcaggctcttgctttatttgtggctgcctgcgcctcgtgcc

SEQ ID NO: 121086 - DNA, 1069 bp, Homo Sapiens
  misc_feature (774)..(774): n is a, c, g, or t
  misc_feature (937)..(937): n is a, c, g, or t
  misc_feature (1027)..(1027): n is a, c, g, or t
tttttttgaaaaagacgctgtatttgatttacaatgaacaagatttacaaaaaggggtggggtggtcttggaactgctcccagtccccccggactgggtggggctctagggcagcctgtctgacagaccaggaccccaggatgtctgggccccgacgtaggacttgacctacgtctcacttgacctttgacgtggggcccagcagccgtgagtccacccagagtgccggcacccttggggaggccggtgaggtcaggaaggcatcgtaccgctttttctcctcctcccatctcgtggtggacagacagacataggatctgggaacttgccctgggggccacaggccctcagatcccccaggggcccaacctagggcatggaggcggctgctggtgcgtgggcggaggcggaggccagctgcccccagcgtggcagcgtaaggcacattttcaaatcactcgagactcgacagtgaacacccgatgctggttctgcggccggagggagctggggctggggctggtgctggtgcggtgcccggcggtattgctcagaggaagatgctacagtctagacgctgggcgggttccggctgcacccactccggcttggggcgcgttccaggggagggtgggggcctcagccacagccactcggcctcctcccctgaggggctctcaggtacctcaggtacctatgtcccaaggcagcactggagattgtaggtcagaggtcagtgaccttgttctccagtgcagcggcaatctgctgcangcggaagggcagctgcatcttctgggcggcaggattctcctccaaggcattgatgatctcgtcatagtacttctgcgtgtattggtacagctggtggagtgccacgagggtgttcaaggagtcgtgtgcgccggggaatctctgccacgtgtgtgttcatgtnctgtcgctgactgcacatctgcggattccttgtagtatcttcacaatcttctgtaagtgagattccttgggtcacttgtgcgaatctggnctcagggcaattcctaatgatctataattctatcagtcagtg

SEQ ID NO: 121087 - DNA, 1596 bp, Homo Sapiens
  misc_feature (454)..(467): n is a, c, g, or t
  misc_feature (875)..(914): n is a, c, g, or t
  misc_feature (1292)..(1292): n is a, c, g, or t
  misc_feature (1522)..(1556): n is a, c, g, or t
gtgcagtatgttaagaaaagacagacactataaactcctcgaacaaggtcttaggctgggggtgtgtctaagaaaagactgaataattaacgaaaatggcaaggggcatcttttctgaaattttccgttgagaaaccagaatttaaaataaaagagacatttccatagatgtatagtagattcatccaaaataatgtaaatggcttccttgacctttagataccaatagtcataaaaatcaagtccataaaaagttcagcccatatttttaacttttctagtatgcaccacacaattacaacatgatgccatttatttacatgattctgaaagaatatgagtccccaggatcaaatatatacatttttaatatttgaaatatttacataatggaaccacatcagggttcgagggtaagaacagtgttttcaaatgtcctctccaggtgtgtttnnnnnnnnnnnnnntccagtaatccaaagctcacattatgctttttctaacaggccaatctttacctttcttttaaataagtactcagacatgggaacagttgcatctaatttgtgtgaaaagctgtttaaaacttcttacgttttcaggtaattttactccctggtgaaattctgatctacaacgaagaaagccccaggaatttctctaagcacatcatcagtacatttttaaacactaatgagccaaggtaaaacaagatataaaccttctacaagacaaaaatgaaaacaaatagttagtggttggtaactgccttgaatgatttacctttatccttaaataacatgtaaacttacaaattgccgagcagaatacctatcatgtttgtaaaactctcactgtctgtcaatttgcctaannnnnnnnnnnnnnnnnnnnnnnnnnnnnnnnnnnnnnnnacttacactttttggtatgatgaattttttgttaaataaacagatacaatagaattaaactaaggaccaattagtgcaaaaatgccattaaatacagctctccaggatttttaggatatgcctcatttctgagcaataaaattaaaaggaaaaatcactatgatccacattcctttaaaagagaagctgaagcagccatcttattaataagaaaaccccatccagttagcaaaccacattgctcacgacacgagaacaccatgctctgggaaactaataacctaattataacagacatttcaggttggaacagtaccacttttcctttacaattctattctttagttgggaaatgttttaaggaccccaccaagcaanattagggaaaagaaagacttttacacatacattcacaaacacattcatacagaaatacagtaggaatggattgtctgctaatttttgcattccaattttaaactccatgccttcacaagggcttgccatttctgatcaaaagagagtgggggtggtaatagtttatgactggtgttttccccggccgtaatggccgaattcccgggcatatgtccggtaccgtcgactgnnnnnnnnnnnnnnnnnnnnnnnnnnnnnnnnnnncgccgcttcctcgctcacatcactcgctgcgctcgtcgtt

SEQ ID NO: 121088 - DNA, 1059 bp, Homo Sapiens
  misc_feature (232)..(281): n is a, c, g, or t
  misc_feature (525)..(604): n is a, c, g, or t
  misc_feature (753)..(835): n is a, c, g, or t
  misc_feature (915)..(965): n is a, c, g, or t
ttctttctcatattcccgagttttctttcgttctctgatttcccaattcttaaggcgctcttgatctggtgagttttcatgaggactaataataccacagggagactcatccccaggagtgttaggtgttgcattgccactggcagaggaaacagatggagcagagctgatgggcctcagagtaggtttcagacaaggcttttgctctggctcctcttcctcttccatgggnnnnnnnnnnnnnnnnnnnnnnnnnnnnnnnnnnnnnnnnnnnnnnnnnnattctggctcttgctttatttgtggctgcctgcggcctttcagcctcttgttccatcctctggagctctgcatctggatctggatggctttctgccagaaggcgctgcctgatttcctcaagctcctccttctctctcttcctatctcgttcatctgcttccatttccttttctctatcacgcaaccttttctgaagagcacttcctctgtaatatttggggtcatctctatcatcatcatagnnnnnnnnnnnnnnnnnnnnnnnnnnnnnnnnnnnnnnnnnnnnnnnnnnnnnnnnnnnnnnnnnnnnnnnnnnnnnnnnatattcccgggttttctttcgttctctgatttcccaattcttaaggcgctcttgataagcagcttctttctctcggagttttctttcaagttttcttcgttcgtatgcatcttcttcatcttcttctcggtcccgttttttgtcttttnnnnnnnnnnnnnnnnnnnnnnnnnnnnnnnnnnnnnnnnnnnnnnnnnnnnnnnnnnnnnnnnnnnnnnnnnnnnnnnnnnnttcccgctctcgttccctttcacgatctctgcttttttctcttgatcgactgcgatccttattacgatctgagctccttnnnnnnnnnnnnnnnnnnnnnnnnnnnnnnnnnnnnnnnnnnnnnnnnnnntttgtccggtcacggtccctatcccgttctcgttcccgctcccgcccggccgtaatggccgaattcccgggcatatgtccggtaccgtcgactg

SEQ ID NO: 121089 - DNA, 1293 bp, Homo Sapiens
  misc_feature (1254)..(1254): n is a, c, g, or t
ggaggtcaaggagaagatcattgaccaggtgtaccgtgggcagccctgctcctgctggcccaggccagacagcgtggtcctggagtggcgtccgggctccacagcgcagatcctgtcggacctggacctgacgtcacagcgggagggccggtggaagcgcgtcaacacccttatgcactacaatgtccgggatggagccaccctcatcctgtccaaggtgggggtctcccagcagccggaggacagccagcaggacctgcctggggagcgccatgccctcctggaggaggagaaccgggtgtggcacctggtgcggccgaccgacgaggtggacgagggcaagtccaagagaggcagcgtgaaagagaaggagcggacgaaggccatcaccgagatctacctgacgcggctgctctcagtcaagggcacactgcagcagtttgtggacaacttcttccagagcgtgctggcgcctgggcacgcggtgccacctgcagtcaagtacttcttcgacttcctggacgagcaggcagagaagcacaacatccaggatgaagacaccatccacatctggaagacgaacagtttaccgctccggttctgggtgaacatcctcaagaacccccacttcatctttgacgtgcatgtccacgaggtggtggacgcctcgctgtcagtcatcgcgcagaccttcatggatgcctgcacgcgcacggagcataagctgagccgcgattctcccagcaacaagctgctgtacgccaaggagatctccacctacaagaagatggtggaggattactacaaggggatccggcagatggtgcaggtcagcgaccaggacatgaacacacacctggcagagatttcccgggcgcacacggactccttgaacaccctcgtggcactccaccagctctaccaatacacgcagaagtactatgacgagatcatcaatgccttggaggaggatcctgccgcccagaagatgcagctggccttccgcctgcagcagattgccgctgcactggagaacaaggtcactgacctctgacctacaatctccagtgctgccttgggacataggtacctgaggtacctgagagccccctcaggggaaggaaggccgagtggcctgtgggctgaggccccccaccccttccctgggaacgcgcccccaagcccggagtggggtgccagcccggaacccgcccagcgtctagactgtaacatcctccctctgagcaataccgnccgggcaccgcacccagcaccagccccaggcccagctcc

SEQ ID NO: 121090 - DNA, 1636 bp, Homo Sapiens
  misc_feature (810)..(819): n is a, c, g, or t
tttttgttaatagacagtatacaatagaattaactaaggaccaattagtgcaaaaatgcattaaatacagctctccaggattcttaggatatgcctcatttctgagcaagtaaaattaaaaggaaaaatcactatgatccacattcctttaaaagagaagctgaagcagccatcttattaataagaaaaccccatccagttagcaaaccacattgctcacgacacgagaacaccatgctctgggaaactaataacctaattataacagacatttcaggttggaacagtaccacttttcctttacaattctattctttagttgggaaatgttttaaggaccccaccaaagcaaattagggaaaagaaagacttttacacatacattcacaaacacattcatacagaaatacagtaggaatggattgtctgctaatttttgcattccaattttaaactccatgccttcacaagggcttgccatttctgatcaaaagagagtgggggtggtaatagtttatgactggtgttttcaattaaaattgttcatgttggttcctatacagtacatttcaatattaagtgcaattctgcaaaataattggggagtcgttttaatatttacaagaaacaaatcagcagaacaagattatatcagataggctgtgtacagtagctgcggcttataaaacataccagtaatttgtacctggtgagtataaagagaaccaaggattcagatgactttacaaccaagggagtacacagggcaacaacaaattagaggaccaaaaaattcacattttctaccgnnnnnnnnnnttacagatctcacaatgtcttcaaagacaaagaaaaattcaaagtccttaaaagggtggcaaagaagaaatctgaaatggaactctaaatataaaaagttttacttcacaagaccaattttcttggcttctgtttcatatatcaataatctccacattttgactataaaaacttctgcttcttcatcaagtaccatggcaacatcatctaaaatgctctggggtgaactatgagccataaccttagaacaaacaaaatcaactaatgtagcttcttcttcacctatatattctatgattttcttattaatccatggtctaattcgacgttccatcagtatagaatccacaatagaccaatccaggggataagcgaagagctcaggtttggctgtagggattttctcaatgagactcttaatgtgtttacgcttttcttcagtgtttacagtgcctttggttgcatttttatcatcttcaccataatccaagggaaccagtttcctttttcggggtacgtcatcactgtcttcatcctcaaatttgttaaagacactatctacaggtagtttctttctcttcacagaattaggctgaccaggactattggaagcacccagtttaagacttagtcctatttttgggctatgctcctcaggttgctgttgatctggtgagtttttcatgaggaataatattcccacagggagactcctccccaggagtgttaggtgttgcattgccactggcagaggaaacagatggagcagagctgatgggcctcagagtaggtttcagacaaggcttttgctctggct

SEQ ID NO: 121091 - DNA, 1689 bp, Homo Sapiens
  misc_feature (1568)..(1602): n is a, c, g, or t
ttttttgccagtggttaaaaagaaatctttattttacaaaattaaaaacataaatagtatttacaagcatcttaaataccagcttataatacttgacattttctaatcatttcaaattgagtttcccataagcttttaaaatgcaagaccattcattcacttgagtgagttaccagtttttacttccaccaatccaaagtgggttttggtttttgaaattgtccatactgtagtcattcaaaaaaatacaatatgcttttgaaatgactagctttaaagaaaaaagtcctgagcttcctaccccagttgtgggatattactccaaaacaactcaagaacccaaattatcttactgcctgattaaatgtaaccactctagctttttaaagacacattcctgttactcacattaatccatctccctcacgtttcaggtttgctggaaggaaaagtagagaaataatggagtagagaagtgggagaatccagatgaccatctgaaatcacattactgaaaatacaacagacatgacccaaaaatctgatcttactagtttccttcaggatcaaatccaggatattttattgtacaaaaatttcaaatgatttcagatgatgcatatgtgacagcaaacctgaatggcacaatggaacacagacttaaaagatgcttcagtggtcaacactcattctggagttctcatgaatgaagggtagacagattcagtaaaattgtttgcttttcagtttcattatctggtcttcaaatttcagcacagagcaattcatttccatatagtacatatgtaaagagagactacaaaagtgtgaggaaagcaattgtcctcgagaagggtcagaaaaggaaaggaagactcagtatctacaacccattacctaagaacaccattttgttccattttccctggaagccctcacagctcagctgagaatcagagtaagaatcttcattatcagagattagcaacaaatttaaaagaaaaagaatgacaacaggtaagagttatatacattttactactttgtttcagacttgtcctgatatttaaaaaggtgtcaaatgagccatggatgctggtggcaggaggcaaccagagaggagaggctcgagtatgaggaatggggaagacttatttacaaattcagagcaaactcctctcttctgggtctaaaataaaaacatcttttgtcttcagtaaaacaaaagtctttctgctcaatgcagatggtaggtacagtgtgctcaaaagaagcattttctcttggggaagataagtacacagtcagcacagtaagcaccactctgggatcaggcccaccctgcagagcctggcgccatcactgctgcatgttgttgataatcgccaggatgctcatcttctcctgggcagagtccacatcctcattctgcttctgggccactcctgtgcctaagccatagagccgcccacagtacttggcatcatcaatgctgtcctcaaaaaacaactgcagaacccggccgtaatggccgaattcccgggcatatgtccggtaccgtcgactgnnnnnnnnnnnnnnnnnnnnnnnnnnnnnnnnnnncggccgcttcctcgctcactacttcgctgcgctcggtcgttcgtctactaacgagcgagcgccctatatggatcgtatacagttctt

SEQ ID NO: 121092 - DNA, 1001 bp, Homo Sapiens
  misc_feature (736)..(744): n is a, c, g, or t
  misc_feature (761)..(761): n is a, c, g, or t
  misc_feature (776)..(776): n is a, c, g, or t
  misc_feature (813)..(813): n is a, c, g, or t
  misc_feature (821)..(821): n is a, c, g, or t
  misc_feature (860)..(860): n is a, c, g, or t
  misc_feature (866)..(866): n is a, c, g, or t
  misc_feature (885)..(885): n is a, c, g, or t
  misc_feature (898)..(898): n is a, c, g, or t
  misc_feature (914)..(914): n is a, c, g, or t
  misc_feature (919)..(919): n is a, c, g, or t
  misc_feature (960)..(960): n is a, c, g, or t
  misc_feature (966)..(967): n is a, c, g, or t
  misc_feature (976)..(976): n is a, c, g, or t
acatgcttttttgtttcagtagcaggcaggagttcagagtaaaaaaggagtttatatatttataaatgccaaataaataccagaggccacccaacgccccctcccagacagggctgtctcccccagccctaggcttctagggtgtgagacatcttggccccaagctatagcccaagagcagctgtcagtctgtgctaccagggaactgagtgaggatgatctgtccagccaagtttcactccccctgtgtgaggggcccccatagccacaggcctgggtccctgtataggaccctaagggtgaaagactcagggggagaaggtggccatctcgagtgagacccgctgccacagctccttggtctgtttgctgcgcttgaggttctgtaggatgtcgttgaactgcatcatgcccatgggcgtcaggcagaaggcgctgcgggcactccggatcgcattcacaaagtcgtcgtagtccgcaggagtcaggtgaatcaagcggtggtggatgtactgcatgtatgcctgctggcagcgctgcaccagttggtggaaggccggggcacgcaggtggttgtgggcatgagcgggactcagccgctgcagcgtctccatgacgatctcctgcagcacaaacgggctcagcacccccttggctgcccccacacagaactggtgcacgtagttcactcccagctttgctgccagccccagcaaccatttgacatcacatgtannnnnnnnnacgggaaaatttgtggngtgatcgttgtgtgncggcgaccagcatctcagtgcagattccgaacggtangaaatgcngtggtgcagtgtggggatgactggtgatgtgttctctangatgcngatgaacctgtggtatganactggcaaagaanacgcagcgggcattangatgngtggaagtgactggtgataatataggtaaggcagtggttanacatanngggggtcanccaccgggaaatgggttccccccct

SEQ ID NO: 121093 - DNA, 3155 bp, Homo Sapiens
  misc_feature (160)..(168): n is a, c, g, or t
  misc_feature (2339)..(2348): n is a, c, g, or t
  misc_feature (2409)..(2421): n is a, c, g, or t
  misc_feature (3009)..(3017): n is a, c, g, or t
tttacagtgcaatattttaattgaataatccatagtaatagttgaaataaagtgatacattagactatatttgctacaacataaaacttcataacaagattatgaaagtgatttttattattttggtaatggtgtcccagtataagtaatgagatacaannnnnnnnnaatttggtatatcaaacagtaaaggctacatataaatgttgtttccccagaatgtactttgtctacaactatgcactgtagctattatgcacacactaaaagcattcatgataaagtacaaaaataagaaaagattaaataagaaggtatccttgagttataaatgtctactaaagtataccttttaatcacacagttgtgtcacagctaaaaacacacaaattaacatatactgctatgcaactatttgatctaatatagatctactaggaaaatattaaggctgtagtaacacttcacaggtaaaggctaagttctgggacatgaaagcttttagaaaattcacaaaacaaacctgagacatctttttgttttggaaaaaagcaatttgcttatagagtcaaagctttgacatacaaatgaagcatttaataaacattatactttattgcaataacctggagtaaaacttctgactttaatggttgtcagcaaatacattctctctccggtagaaacacaatgagggtttctgattaaagcagtaatctgattactccagcctccaaattcagttattttcattcgttttcttgtatgtcttgttcctgttctttaactaggttataagcatattaaataagccaggtaaactccaagcaccttactttcttccatataaacacagctttccttttgccgcaagcatctgatgacgactgggcctacatacgtaaaaacagattatagcacatctggacctggttgacataatgaggcatccagattggttcatgattatttttgcagctacacatttctcaatctaaaaaaataggctacagcagcccaaattcactgtctcagccttggtggggcataatattttggaatggcaagtgccaaaaaatttaaatgtactgggcaagcctgctttgtgtagttgactctaatgcctttaaaaatactggcatgattttttatattcaagaagtacagctatgaaattttaaaataaaattacatgaagttttttaatattccaaaccacaaaacagatctgctatgttgtagacttttttaatagcctatttgagatttaactctgctacgccaaacatctttcttctaaatgtccatgctttgaattttgtgctccaaattaattaattcagaatgagtgggaaaatgtttaaccatctttccttcttttcagtgtttctctcttttctcttaccatccccccaccccacacacacatacacacaactatcaaaaactccctttttttaaaattttggtacaaagattccaaaaagcttaataaaatgtaataagcacttagcacttaggacactgtagaactttctttggaagtttaattgcaatgaactttaaaacttgaaacttcaattcacttttctaaatgtgaatgcatacatttcatttgagctttatgctttcccagctaccaaagtaattgccatcttaaaaaacacaactgacctcatctccactgtcttttccaaacagcttccaagactatcttctgattctgactttccaaaaagcaggcattaatgttaactttcaaaaaatcatctagaagagaaacttggtcagttgtaatgggagttctgtccccaactcttgtcacctcgtaaaaagaacatccaggtaattcatggcattttccattattcattgggcagacacagcttagatttctctgccttccacaggagaatgttcagatttccactaacttcaactggaactcaataatcagaatggctttaaaatttagttaaaatttaagcatgccatgaatttggaattttaatatattaattaggttattttcaaaacaagattctgtattataaatagaatttcaataaagatgttataaaaataagaacacatcttaggatctaattttgagattcgccaaaatttgagtgaagaaaagaaaccctgcttcatttccatgtcaaaataggtggttgatttaatcaagctcatttttagcacacttggttgcgttagttgtacttttcaattttcaatattatacaaggcatatattattcaaccttttcctgaacaagataatactaatatactgcttacggacagttaagtaatatatttcacactatttggtgacnnnnnnnnnnaacctttgagacttactgaaatcagtacattttggtcacataatttaaagcttggctggcnnnnnnnnnnnnnctttgctgataattcaaattctgtactttggcaagcaaaagaggtacaacatccccttggagttttacaatttaataatgcatactttaaaattcatgataaatcatggaaccccactatactcactaattcaactattgatttctttttgagcaactgactttatgatttatccttaaaagtaaggaagtataccagaaggcaaaaggataaatccacccataaatactagagtctaagttattttcctgaaaaggtgaaaagggaatttctggtctttatcttttcccttatcaccttcaatcacacactttacactgaaattacttgtctctgtctcttcaacaatatactctgaaactttgtttaatatactttttgtctatttctgcatatgggagaccaatcttggattcccaccaaaaatggcctggttaccaaaatacttcttcattcagtagtttggtgtaagtgtttgggtgtatgtgtctatatgtgcattttaactccaaagaatgctaccttcagaaataaccaagatgcagtatgtatataataattcattgggccctttaagtctttgactcnnnnnnnnntcaatagttgaattagtgagtatagtggggttccatgagttatcatgaattttaaagtatgcattattaaattgtaaaactccaaaggtgatgttgtacctcttttgcttgccaaagtacagaatttgaattatcagc

SEQ ID NO: 121094 - DNA, 1029 bp, Homo Sapiens
  misc_feature (713)..(734): n is a, c, g, or t
ttttttcagataccaccaccaatatttattacccaaagcaatctgaaagaatcgggcacaaggtcatggctttcccaggttacaagaaaatcagaacctcttcaaactcaccctccacccatagccaaagtaaggaattaaaggctatagctcaagctatgtcatggctactatatcctcattcttgatgaatagtctcaaagtcacaagttggcatgatgcgatttaggtctaaatcttaccagaaaaaaaacccaccattaaaataagacaagttcatagaaatcattccaacagaaagataccaagagcctttactggtaatgagaagaggaaagattttctgtttataataaccagaaagaaatggaattgtctaataaccatcaattgagtatgagcctagttgagttgagtatgagtctagtatgggatgctaatcttctggggtgggggaagtcctgtgagctaaccaaaccctcctggtctctggtgaggtccacaagtagcagtttcctggttgcctggtgacaagggaccatgcttaggggtgggctggggcatgttggggagggggtccttcacttggcaagtgaaataacacaattctcagaagctgtagaagaggcaatcttcaaacagtgctgagtagtcctcttactttttccacattaggggaatgcaaactggtttaacctcacatgacatttccnnnnnnnnnnnnnnnnnnnnnncatttgattggtttaaaaattatcctggatccaggaaagtgatgccttttcttattctccttttatcatcaaaacaaacagccaatatgtctctagaaacattgcgttctaaactggaagtgctgacaagccttcatcccagaccctgagtggcagattttcatgaaaatcagcttctgggccagttaagtcttcatgaagttatcttttcataactcagccctcattcccctctgggtcagtagcagtggaacgcaatgtttctagagacatattggctgtttgttttgatgat

SEQ ID NO: 121095 - DNA, 2191 bp, Homo Sapiens
  misc_feature (301)..(333): n is a, c, g, or t
  misc_feature (468)..(489): n is a, c, g, or t
aggacaagttcaatagaaatccattcccacccggaaaagattcccaagaagcctttactgggtatggagaagaggaaaggattttcctgttttataataccccagaaaagaaaatggaattgtctaataacccatcaaattgagtatgagcctagttgagtttgagtatgagtctagtatggggatgctaatcttctggggtgggggaagtccttgtgagctaaccaaaacctccctgttctctggtgaggtccacaagtagcagtttcctggttgcctggtgacaagggaccgtacttannnnnnnnnnnnnnnnnnnnnnnnnnnnnnnnnccttcacttggcaagtgaaataacacaattctcagaagctgtagaagaggcaatcttcaaacagtgctgagtagtcctcttactttttccacattaggggaatgcaaactggtttaacctcacatgacatttccnnnnnnnnnnnnnnnnnnnnnncatttgattggtttaaaaattatcctggatccaggaaagtgatgccttttcttattctccttttatcatcaaaacaaacagccaatatgtctctagaaacattgcgttctaaactggaagtgctgacaagccttcatcccagaccctgagtggcagattttcatgaaaatcagcttctgggccagttaagtcttcatgaagttatcttttcataactcagccctcattcccctctgggtcagtagcagtggaaccaggaaacccaagggccagatttccttcctcaatgaaggcactccaggaagaaggggagttcctggcacctgcctgccaaactctgctctacttgctgaactttgctcagcatgaacagggcattctggctacaagttcccccaaactatcccagattgtatctttaaggcacaccaattcctctgcttaaggacttctgttcacaatgaattgtattagttattcttaacattcaaaagagaaagttctgcatcagagcccacccatgtccagccattgtgccctgagatcccaagacttgtggggatgagggcagagcatgttaacatcagggattctggtcactggggtcacacttgagcatgattttcaaccccaatccctttttaaatgtttcaaaggcctccagagctttctccagaggaaacctatgggtgacgaggggttttacattcacagacttggacgcaagcatcgaaatcgccactggccacgtgttgcagtatcgaaacacgcccttgatatccacctcccggatggctgcatgcagtaggggtacggtggtcatctcagagcccagccccacaagcacgagggtcccaccagagcgagtggcgtagatgcccgcctggatggaggcctctgcccccggtgcactcgatggtgactttccggcttgcaccccagctgaccttctacttttcctggcgatttcctgagggctctccttggagatctggaggactaaatcagccccaatctccttggctttggacaatcgggtagcagacagatcagtcaccactacttgagctgctcccattgctttggccacgagcaaagtgaccatcccgattggcccagctccacacacaaggaccttgtgtcccagggtaactccgcctctcctgcaggcatggatccccacagaaagtggctcgatcagggcgccttcctcaaaggtgacattgtcaggaagcttgtaacaaaaggctgcattgtgcttatagaaccggcagaggttcccgtcatcggggggcgtggcacagaagaagatggaaggtgacagattgtatcggcccatcttgcagaattcatcattttctcggggagcaccaggctcgatggcaacacgatcacctggttttaggtgctttaccgatgatcccactttttcgactgttcccgaagcttcatgtcccagcaccatgggctttttcacaataaaattcccaattcgaccatactcccagtagtgggcatctgagccacagattccaacagaatgcatcctcagcaagacctcatttgggcctggttcagggataggatagttctccaggcgcaagtcccccggtccgtgcaccaccagggaaaggttgttgggcttggccgccgccgccatggagctcttttggctctggagtgcggcctggaaggcgcggga

SEQ ID NO: 121096 - DNA, 1002 bp, Homo Sapiens
agggagggtccccacccagaggcgagtggggtaagatgccccccctggaatggaggccttttggccccggtgcctttggatggtggatttccggcttgccaccccagctggaccttttacttttcctggcgatttcctgagggctctccttggagatctggaggactaaatcagccccaatctccttggctttggacaatcgggtagcagacagatcagtcaccactacttgagctgctcccattgctttggccacgagcaaagtgaccatcccgattggcccagctccacacacaaggaccttgtgtcccagggtaactccgcctctcctgcaggcatggatccccacagaaagtggctcgatcagggcgccttcctcaaaggtgacattgtcaggaagcttgtaacaaaaggctgcattgtgcttatagaaccggcagaggttcccgtcatcggggggcgtggcacagaagaagatggaaggtgacagattgtatcggcccatcttgcagaattcatcattttctcggggagcaccaggctcgatggcaacacgatcacctggttttaggtgctttaccgatgatcccactttttcgactgttcccgaagcttcatgtcccagcaccatgggctttttcacaataaaattcccaattcgaccatactcccagtagtggacatctgagccacagattccaacagaatgcatcctcagcaagacctcatttgggcctggttcagggataggatagttctccaggcgcaagtcccccggtccgtgcaccaccagggaaaggttgttgggcttggccgccgccgccatggagctcttttggctctggagtgcggcctggaaggcgcgggacgtttggtcgctctggtggcgctacccagccgagggtccagggcactggatggaaggtggggcctgggagaagcgccgcacgcaggggcgggactaggcttcctcctttgtgccagcctggcggcgctagcgtg

SEQ ID NO: 121097 - DNA, 970 bp, Homo Sapiens
  misc_feature (952)..(952): n is a, c, g, or t
cctcttcactttatccatgccaaaacatgtgggtaaacatgctggaaaaccaggatatttcttctggatctgatgacaaaatgagatactatgggttgttttgttgctttagtgcctgaaacaccgagatcgaggtggtgcacatcacgtcttttatacacatcaagccttctctcactggtttcacaaatgtttgtcatccctaaaatgaaatgagaaatacatgcaaaacaggggtggtatgtgcccgggatgggtttagagggaaaccagtctctgaggagtactgggtgaactgctgatatgcgggggctccgggtccgtccaggcactgcccttgtgctaagttgaccagacgcctggtgcagactgggccttcttctggcattccccgtgtgtatatgcagacaggtccccatgtacgtacacagatcaagtccaaaacatctgctgtttggttttgtgttcccccaaataaaaggcagtcggaggttcagaccttacttggatacactctttcagcctttaggaattcctgacgtgtccaaaaccatcacctgtacttacgaggccattactttcagtgtaatcctgagtagggccagcccaacctgagagtcctgggcagtcacaaatcatggccgaagcagagtctgggcctccttccccacccgacactcaatatcatctgttgcttattgtccaggacctggggccgcccaggaggactggacgctgaggagcagtgggcgtccagtgtaagagacttgtgcacgcggggacagcaggagaggtgggctggccaggatcaggaggcagctgcctcagcagagaggaagagggtcagcagaagatctcttcaccctctgctgatacttctgacgcgggaccatcaccgggctgagagcggctggttttgttcttctttttttccctcgtccggaatgccacncaggctcgctccttgacc

SEQ ID NO: 121098 - DNA, 204 bp, Homo Sapiens
ttgggtgtcttttgttttcctacacgatttatagaggatgaggggcggagaaagagatagaaaaaagggatgagctagctgttagagcaagggttttggtgagagataatattgattgaagggattttaaaggaaatgttgctgtgggggattcattgtaactctcccttgtgaactgctccagtaaactctacattgttcctg

SEQ ID NO: 121099 - DNA, 827 bp, Homo Sapiens
  misc_feature (42)..(68): n is a, c, g, or t
  misc_feature (621)..(675): n is a, c, g, or t
ccctcactaaagggaataagcttgcggccgcggctgtaggcnnnnnnnnnnnnnnnnnnnnnnnnnnngcatgtttgcaaaattatttatttacatcttaagctcacattaaaatctttctaggatagaatggctaagatgaaatatacaaagctgatataaacacagaactcattaatctttatctgaacagaaacatagagatggctttagataatctgtttttccttcacaaaccaatgttcccttaagtcatgccatgataatgtctccccattaagaacttaacttgtattgcccaaaaaagctgagaagcaaaaagctaactttgatttgttaaacagctattcatatgccacaaaaccaaaactattttacagtgctgagaggtccagataggtccaaacatgatgatttttaaatgagtgctttggttaattaggctttgacttggtttttggcattacttgtataattatatcattccaatgagtcactacaggtaatccattcaaaacatgacttgcttaatactatcacaaagcacttagccttgccttgactggaaatacctttaagatgctgacaatagcaacaatttctcctttccttcactcagcnnnnnnnnnnnnnnnnnnnnnnnnnnnnnnnnnnnnnnnnnnnnnnnnnnnnnnngcaaagtctgccataaacccttagagaagaaacagtttctcataatatctgccctgggtaatagtgcattattaaaatactagacctgcaagatctcttcccagaaatttcaatgcattgcatatttagccttcggcatatttttcacctcg

SEQ ID NO: 121100 - DNA, 878 bp, Homo Sapiens
cgtatatgtgcctaaaatacgaattaactctgttcaccataataaaggtacagatgtgctcagtcatgctgacatgcacttatgaaatatgcctaaaccgatgttaaataataccaaagatattctatggcaatcttgaaaagtcagggagctcgataaatattaagagtatgccctcacaatgagagcattaaatatttggtaattaacataatttattacgcaaaaaatgagaaaatatacagcaggagggatgaggagtacacataggaaatttctgtgattttcttcattttgatcgtattgctttcttgtcttcaggagggaagatttcgacttcaaaagtaacaaaatatttaagaagagaattcacatctttctgttctagctggtattcttgcattattttctcagcagtccaggtttctgggaaaagcttatgattattgagaagtgtcaatgcttctacaatggaaattttgcctttgggaatgctcttaatatttatcatatcaaaatgatggtctttcggcaatctgaattccttcggctcttgacatgtttcagcagcttttacctgcaaggaagacacaggatctttggaatcaacatacacatcttttagaaacgacagcagcttttcatctttacgagcaatctctcctttaacttctggatagagactaatctgctctcgcaggaggctgttggtagaggggtgtctgggagcgacagagggcttcatcttgctgatttcccgttccgctcggttctctaggttgaaattcctgataccgcgaatcactagtgctcccatctcctcataacattatgcgctcaggttcaggccgcacgtgggaacaccggcgcaggacccc

SEQ ID NO: 121101 - DNA, 975 bp, Homo Sapiens
  misc_feature (757)..(815): n is a, c, g, or t
ttttaagtttaaaaccaaacacatttccatttagtgacaggaatttaagcaaggacctgaagtagaatcaactgattcacacagtagtaaatacaaagtagaacaatgatcttggcttcgctgtctggttcagtggtctgctggaatgcaatacacaagttaagtcacactgcagactgttttctagctgtggccgctggatgccacttctagcatagtagaactatgttaggaggaatgggaaaagtgagcaccacttctcaccatgttcccccctcctgctgccagtctctgctcccatgttggatgcagcagagatcacccaccagttggcccaggacagaccaataggaagggtccaatcactctaactacagccgaactcacctccacaacagtctctgtggctctagcctggactcctttacaggaatccagctctggcagtggcagctggagagggtaatagggcctcctgctgaatgaaggaagttgggtgaatgaatgggtgagctgcagggttcacttgcaaagggaccaggagtgataaggaaacaacaactcattcaggcagctgcttttgacctctaactcccaaacctgcctgttgcatgaggggaagccatctcccatgggagcgaagttaatggggtgggaggctatattctcactattgagtctttccaggagtctcaaggcacaaggctcctggtttcttactctcaaccaccccttacactctttatactctcactcnnnnnnnnnnnnnnnnnnnnnnnnnnnnnnnnnnnnnnnnnnnnnnnnnnnnnnnnnnnttgatgtgtgccttgccctcttgcctgtatcactctcagagtttgagctgtcagagtcagatgacttcctatctctatgtttctttttcttcttctccatcattctaaatatagaaggattccctgtagggtcagcgttctcaaactctgatgactatcc

SEQ ID NO: 121102 - DNA, 947 bp, Homo Sapiens
tagtgagttgtccaggatgtccaggcgcagctccgtggttgcttactctctccgcccgttacgctctgtatactgttcactccttgtgcttcttcttgtgcttcttttgcttgtttcgtcttgcgtgtgctgcccttgctgtcttttgatgtgtgcctgtggcgctctttgcctgtatcattctcagagtctgagctgtcagagtcagatgacttcctatctctatgtttctttttcttcttctccttcttttctttttctagaaggattccttgtagggtcaggcttctcaaactctgctgactttgcctcgttccttttcctcttcctcatcaggtatcagagagtatttagtcccacctggttgcatgaaacaatcttttgcaaagtggcctttacagccacacttcttgcaggtagtgttcaagacagcctcaagggtgatcttctgcccagtgtaatcctggaaggatcgcctccgcctctcttcttgctcaatgataacattgttgggatcaaggtctttcccagtcccttgattgacaaccttcatggagagggatacttttattctatcatttttcatctctcggccaataagcttcacccacactttatctccaacatctactatctcagagggcttatccacccgacaggatgacatatgagttcgatggaccagaccttgcttccgacagcctgggattttgataaaggccccatagtctgtcaccatagcaacctctccttggaaaatagtgtagagagcaggcaagttttccatggtctcaggccttcctgaattcatccttaatattctatggctcctccatttctcttctattaaagctaatacaagtgtctaggcgtcagctccaggtccccgagtcgctgcgctgaactaaacgccgaccccagtcagccagcgcgtttccacccacccc

SEQ ID NO: 121103 - DNA, 754 bp, Homo Sapiens
  misc_feature (167)..(182): n is a, c, g, or t
gcggccgcaagtgcttacatttctccatatataaattaaaaggaaataatgaaaatccagttgatttgcaattcccattcattgaaaaaaaagaaagcctgctgaaacaggcgtatcagttgcccagaactcagactgggtgcctgggtgcttttgtttgtttgggnnnnnnnnnnnnnnnnccctgatctctgcattgggaaggaaaatgcaaaagtggaaagagttggagagaagaggagattaagcttgagatcgctgttggttttgatttttaaaaagatatttgtgaaagtccaccattcctttatgcgcaaacaactccagaaacaagctgcaaaaatgttcctgatttctatttacaagtgtccctagtcgctgcagtggttgctgctccaggaatcccttcgaggccccagtccctccccacttaggaccccaagtccaccagactggaggtgagggggccgagcagagagtcttggagctgatgctggtgggtctgcaggccgtgactgggctgcgaggctgttaagcccgggagagaatagtttgagctcctggcgtggcccatattgccctgcagcagaaggaccgagttctggtctggactttggggaggtgagaattcctcttctgagctggacatgagcggcttgcccccttccagaggagagagttggttctgcttgttggaggaggagttattgttttcggtgttctccctaagaaatagaggacaaaccatatggtt

SEQ ID NO: 121104 - DNA, 1032 bp, Homo Sapiens
  misc_feature (511)..(521): n is a, c, g, or t
  misc_feature (825)..(825): n is a, c, g, or t
  misc_feature (855)..(855): n is a, c, g, or t
  misc_feature (877)..(877): n is a, c, g, or t
  misc_feature (955)..(955): n is a, c, g, or t
  misc_feature (960)..(960): n is a, c, g, or t
  misc_feature (962)..(962): n is a, c, g, or t
  misc_feature (968)..(968): n is a, c, g, or t
  misc_feature (979)..(979): n is a, c, g, or t
  misc_feature (991)..(992): n is a, c, g, or t
ttttttgttattttgagtagaattttaataaataatgccatttgtttcactaattttaaaagctaaatacagaagatacatcattttgccccaggcaaaaataatatggagcctacatgattactgggatttttctagacaccatccggcagcactgcaaaagagctcctgtcctgctggtctgctttctatttgtacaaattaattcacaatgtttctatccttgttctccttcccttttttgtcttcaagcagataaattatttttactttcacagtcttgtcataaacttgttaacacaaaagagcttagttaacatatgaatgctgtgaagagatagtggtaaacaaaattgcatatctaaataatagaagttaataaataccccaaggctaaattcactctttctgtcatataattaatctagttactactcttggttcagatgatggccttcaaagtaccctgcaattcacagccaccattaagtaagaaagaaaaatatatttnnnnnnnnnnntagggcccaatgacagcaatacaccactcacctttcagaaacagaatcatactcctggtgttctactaagttttaatttagactgctttaggtacaatagaaaagaaacctgaaaacacatgctgttttagtaacaaataccaggttgccagattcgttggcatacctttgcaaactagaaactagaaacaggagaaaccctttacaggagtaggctacagatatgaaagctttgagggcatgagtaatggcattcaggaaagtgttttttcacattggtacatttttagagtttgtcatttanaaaaaaacccaggaaacaaacaacaacaanaaatcccactaaatttgacaanaatagttgcattactaatggtcacgttctattctgtctcacatagagagcattacgacatttaggcacttgtttttcntcctnanactggntcttttatttnatcttacattannttgttacactaaatattgaaaactcggtgccgattcttgg

SEQ ID NO: 121105 - DNA, 815 bp, Homo Sapiens
  misc_feature (241)..(279): n is a, c, g, or t
  misc_feature (741)..(756): n is a, c, g, or t
ctactaagttttaatttagactgctttaggtacaatagaaaagaaacctgaaaacacatgctgttttagtaacaaataccaggttgccagattcgttggcatacctttgcaaactagaaactagaaacaggagaaaccctttacaggagtaggctacagatatgaaagctttgagggcatgagtaatggcattcaggaaagtgttttttcacattggtacatttttagagtttgtcatttnnnnnnnnnnnnnnnnnnnnnnnnnnnnnnnnnnnnnnntcccactaaatttggcaaaaatagttgcattactaatggtcacgtctatttctgtctcacatagagagcattaagacatttaggcacttgttttttcctcctaatactggtcttttattttaatctacattaaattgtttaacactaaatatgaaaaatgtaaacttaatttttcctcatcaaagaaagttatagattgtatttttcctgttcaccttaagaatgtaatcagttcttttgagcctggaggctcttattttcactatttttatctcgctttctctttctctttccatttcctttcgctcttcacatttctccatatataaattaacaggaaataatgaaaatccagttgatttgcaattcccattcattgaaaaaaaagaaagcctgctgaaacaggcgtatcagttgcccagaactcagactgggtgcctgggtgcttttgtttgtttgggnnnnnnnnnnnnnnnnccctcttctctccaactctttccacttttgcattttccttcccaatgcagagatcaggg

SEQ ID NO: 121106 - DNA, 813 bp, Homo Sapiens
tttagtttgaaatttgcattttaatcagcgtttggctaacaatatgagataaactattagagaagtgtaggtcattctggcaaatagaaagttccatcatttcacacttagaaagctgccacgaagagcttattcttggagtataaaatgcagaatttaggttaagccagtcattttgtagatgaaattgtacactggcaatttcttatggttcaacctaatagtaaaacatttataaacaattgtatcattacaaatacatttagacatcgttttctgctaaactcagtattttcctttccatcctgatcaaagaaacattattgcagtaagccacattataattcagcacgatttcttctaaaaaggctccgagttcctttgagcttgttattgtacagtggatttttcatttgcaaagacgttaagccctccaaatgtgcaaatcatgaagtcagttgttgttccagcaaggtttgcccagcggtaaaaaacaagataaaactaatgcactagctgaaaccaggtggggagaccatgtgtggtagtgcttgggggtggagggaaactatttctgaaatgaggacttaaagtataataccagcttcactgcctgttcacatgagaaaccaaagcttcaatttaactgcaggcaataggagtttcacactgtcagcaccaactgtctaaaatccaaaactagtatctaaatgtgtaggatcaaaaccaaaaatctggagggatctagttaaacttcaatatgcatgaccccagattcccctttaaaatatagtccaagtattttatcttttc

SEQ ID NO: 121107 - DNA, 2779 bp, Homo Sapiens
  misc_feature (42)..(51): n is a, c, g, or t
  misc_feature (730)..(742): n is a, c, g, or t
  misc_feature (2636)..(2705): n is a, c, g, or t
atgtgccgtcacacccagccctgcttgttttaaaaggggacnnnnnnnnnncttaatggaaaaaaatgaaacagagagccaaaagcttttaactgttgtttttttcttttcttcaatgaaagcctctcattttgaaaagacatgtttttcttcaagcaacaaaggtggtagaggaaattcctcaactttctcaacgagtcatgtaacgttacactggcctccataaagcaccgattaagaaagctaaagaataagatgttgtatttcttttaaaataatttaaaatatattaaattttcctaaggcaggttttgtttgaatgaggtgtcttgattagataactacatgccactgaaggagaacagtacttttaaggagctatttttgtttcgcagtagagttgaaaccagctgattaatccaatgaagttaaacagcagagacagatctcgtacataagagtatcagctaaagtcatgactacaccaattctttacacaattaagacatctttgcaactgttcaatttaagtactatggtttttagataatcgagaaaaacacagttgtaccttaacatctgttgagaaaatacaaataaatatgatgctaataaatggccactgataactcagtagccatctgaatagtcatgcggtttaagaatacatccttgtataatctgacatacaaatttgtcatttcctgcacatgcacaccattgttaaagnnnnnnnnnnnnngccagtaatagtgtctggatcggtcaggagcacggcctctgagtcccctgtaatttagttaagctaaattaatacctcataccaaatggctccaggaaaactgtcctgcaggtcagaagggagcccaagaagaaaagcacttggccaacatcgaagcaactctgaccacagcaggagagaacttgaaccaatgctaccactgcatcagaaacacaaggataggtactaggcagaagccatcgttcccagcggagggagtgtgagctgctctgccactagagaggctctggaggcctacttagttgcataatcaaaacaacatcagtaactgcactttgaatcaaaacaagcagaaagagttcaacacttgctgttcataactggactgaagatttaacgtaaggctctgttgccgtgcaagtggaatctcttcctctaagactgactttcacatgccagggagagaaagatccatgactagtacactggaatctggttttgctacattctattcacaatcccaaagaaatgctatttcaatgcaagaccagatgtttggcccattattccagcaactccctttgacaggacgatttaccctgctacaaagaagcacaagatgtggtgttgcttaaaaagtcctgtatgtgaggaactctttcattttcttggggattggccagtgctagggacttggtaagttgtttaggaaaccttcgaagggcttttccggcataagtgcttcagtgaggacaggaccctaggagctgtccagaactggacgtggccatctcttgtccctgtggcaatgactccaccatgtggaaaaaatgtgcagcaaagcccattggtcataggagcaaatgcaatgggagttttcagttccagggcccagatcctgaggagtctgtcatctgccaccgtggcaaggtacaagccttccggagagaagcacacagatctcagtgagctaatgtggacgtcactgtcatccatggcggggtcaacctgggtgtggtggagtgacctcagcctttcgccggtgtaggggtcccacataatcacattggtatcgtaagaagccgtgacaagcagggcagagtcgggggagaagtcacaagagacaacactgctttgatggccctctagcttccgaattaacgtgtaggacctcatgctccatagaaagaccgacttctctccagctgcagagcacagcatgctgcagtctggggagatggaacagcagtaaacccactgcaggtggcccgataacacttgaatctgtttaccgtgtttattcaggtcccagatgcgaagagtcttatcccgtgacgcggagaccaaaatcaaactgccactgggtgtgaagctcagatctctcacgacatcttggtggccggaaagattcaaaagcaggagccctgtctgcacctcccagatcttgatctgcccatcgttgagtcccgtagcaagaaccaggcaagagacatcgggcacttgggggtggtggcgtgcccagagcttcctgctgggtggggaaggccacgggctgaaggccagcccccagacaatctgaccacagtccagcgtcttctcttttgggctgccccgccctttcgtctcatttttgctacttcggcttttggcttcaaaccctttagggatgaactgctcctccaacggccaggggatcagtttgacgatgcagtgtccttgagaccaagcaaaccaggagccatctggggagaaggcgacgctccaggtttcacagctggacttccaatcaaactggtgggggcgcccgggcttgagttcggccagcagcagcggttcctctccggcctccatggaggacgcgagcggcccccgcggcaggcggcgggcgcctcannnnnnnnnnnnnnnnnnnnnnnnnnnnnnnnnnnnnnnnnnnnnnnnnnnnnnnnnnnnnnnnnnnnnngagaggccatcagctgcccacgcgtccgcggacgcgtgggtcgacgatatcccgggaattccggaccggtacca

SEQ ID NO: 121108 - DNA, 396 bp, Homo Sapiens
ggtgataagactcttcgcatctgggacctgaacaaacacggtaaacagattcaagtgttatcgggccacctgcagtgggtttactggctgttccatctccccagactgcagcatgctgtgctctgcagctggagagaagtcggtctttctatggagcatgaggtcctacacgttaattcggaagctagagggccatcaaagcagtgttgtctcttgtgacttctcccccgactctgccctgcttgtcacggcttcttacgataccaatccacacccaggttgaccccgccatggatgacagtgacgtccacattagctcactgagatctgtgtgcttctctccagaaggcttgtaccttgccacggtggcagatgacagactcctcaggatctggg

SEQ ID NO: 121109 - DNA, 917 bp, Homo Sapiens
tttttttccctttgcattaccttttattacctcatgccaggctggaatttgggaaatctgtttctattacaatgtatacattatacattaaataagattatgcacattacaaataaaattatttcaaaattaagaaattacacatagttcaattaaaattaaatttgaaaataattttatttgtgctgttctttagagcaccaacaattcatacacatgatcttcattctcatagccacttaaggtaagtattacctccattttagaggtgaagaaattaaggttcaaaataactaatttggtgatggccacatagtttttaagaacgttgagtctagcccaagagtgactggaattttcagttcacttaccaccattccagcagaatagcagagcaatttcaattttgcagtaaatcagggttaatcatcccagaactgtttgatagcaaaagactaaaacaactcaagtgcctaccaacagtggacaggttacataaaatataatgcatttgcataatgcagtacatgcaactgtgtacaggaagctctgtatgttctcatagggaaagttctccaagatagattgttatgaaaagggcaagtgcagaaaagtctacacagtctgctacctgacaagaatgaaaaaagtgaagaaaacacgtatcattcattattgactgatatcagcaggaatgaatactgggcagatacacaagaaacagaaaagtgaccacctgggtaagttgagggatggattctttatataataatctctttacttcaaatagtttgaaccctgtgaatgtaatacttattttacaaaaattcacacacattttgtattccgaagaacttcccctcaataatattctttctcttcattttatcctccttatctccccacacatgatgtag

SEQ ID NO: 121110 - DNA, 1515 bp, Homo Sapiens
  misc_feature (76)..(97): n is a, c, g, or t
  misc_feature (518)..(564): n is a, c, g, or t
  misc_feature (1398)..(1432): n is a, c, g, or t
aacgacgggccacgtggccaatgcttcgaattaaccctcactaaagggaatacgcttgcggccgcggctgtaggcnnnnnnnnnnnnnnnnnnnnnnggggatgccattttcagtcactttattatcaggaactttatttttaaactaattacaggtacccaaagttcaaaaaattaaaacaaaccaaaatgagaacctcaacagccatagttgtttatttgctgcttattcttgtggccaaagaggaattctactaaatgtcaaatgaaggatgtctctaaactagaagacaagttaaagggccttgttgtcatttctgtcattgtggtggtggttgttggctttcttggagaaatatatctgtgactttctcaactaatgggcctctggccttaattatcaaagtatcccttttcctagaggaaaagactagtaataaatacatacggtatattatctaatatcccttactgttatcccagaaaatcttattaaatattaaagtgaactactgatnnnnnnnnnnnnnnnnnnnnnnnnnnnnnnnnnnnnnnnnnnnnnnntaaatacctttaacttcatctctacttgttgctctcccatctcagaaacttatgaccttcattaagccccactagttactagtttggtgaccgactagggggctagcaagaaagctaactcataaggctatgacataagcactgaggcatcctaaagccttatctgggccacaataagttacctagttacctatacaaactctactccacagcctagctctggaaaatcggggaaaaagagagagagttcagcacccataacacactcctatgccacttcttttgcatttcttcttagccaacagttgagaaagactattttttagcttgtttcacttttccttgatcttctactttcttaatggctgcttggatcgcctcttggtcacccaggaactgatgaggcccagacagcacgcaggtttgtcagtccaattccagaagaatggggactccagtaggaagagtaatgttgatgatgtcgttcatctgagataccttccaggtgttttaggagtgccctacgtgctatttccatgagcagatatcagaatggttttgccacgtaatacttcgggagcaatcctttcattccaatagggaaggagtctctccagaacatcctttagagctttccgagccgtggcagttgatccaagggcacatcgcatactttatacctgccggtcgttgtagatttcttggtagtaaggatgagactcctcaatgggaggcggcggttacattgtagcttcttctccagagcctcacttgttcttcacccccggccgtaatggccgaattcccgggcatatgtccggtaccgtcgactgnnnnnnnnnnnnnnnnnnnnnnnnnnnnnnnnnnncggccgcttcctcgctcacatactcgctgcgctcgtcgttcgaacaacgccgagcccctatagtggagtcggtatacagtgtt

SEQ ID NO: 121111 - DNA, 1564 bp, Homo Sapiens
  misc_feature (885)..(901): n is a, c, g, or t
  misc_feature (1547)..(1547): n is a, c, g, or t
acagatcttgaaaaatgtgtcctctttctttaatgttagtgacagttctatacagcacagacataactgaagaaacacattactttgatttgggtttatgtattgtacttttaatcacttactgagaatatttcaaatttatattctcatcaggaaaatgtaaaaaagatactgatatatattctatgatttttatgccacaaacacccctgttatgagatcatttaataggaaaacaattatactgacatctcttgttccattttcccattagatatatacatacaacttcaagatagtttaaaaataatcattcaggttattctaaaattttgccataaaattagcaaagtatgccttctgttaattgctaaaaccaatatttcacatataaaagcatgtgatctcattctacatgcagctccatttctgaaaattaaaaacctatcatttcatgggctaaattatagaactttctatattcgaagaactacttcataagactgttatgacaaatgctttttattacataatatttagtagtcatgctcaatcaacaaggtcaacagaaacttgtgaatattctgctaaataatctagcacactaatacatacacgtttttcagtgcagtaacattgaaataatccttgtatcctttattcagacagttctgcaaactagggaataaataaagatacgaacacacaagaacttttttttaaagcaggtaagattaacagagattaaaatttattgataagccaaagactgaccctgatcctagtaacaccaaactcaaagtagctcctggtcagaaagtgcagtaaagggtgcatgaaagcatccgctctatggtctcctcagtggtctattttaggtgtggnnnnnnnnnnnnnnnnnaactgctaaactatattaactcataataaaaagtaactagtcaaaatttagaacattctgatcaaaatgggtctgcacatgcctttcaaacacctgctggtcatagtcaggagggaactgctcgctgcacatcgggcacaccttccagtgactttcaacatgttcttcaaatttgctctgatcatagttaggaggaaacattaactcacagaggggacacttcttgtgaacatcaaagctggaatcaaagcaaaagcctgtcccatgcccacgtaaatgttgacttggaggatcaggagcagtaggcacattctcatcttctttgctatcctcagagtcctctaagccatcaggccgactaaagtttcgagcaggctggctgcagacaacattgtcttccagtccccaagaggggactctgacaggtggcctttgtatttcatctgggtaaaaagcaccatctgctccatctcttgtttcctgagatgcataaggattaccatattgcagaactggttgtgcatttgacaatgtgagaacataaccattttgctctgagcatgttttgaaacattgaggactctgggaattctgaccttccattttcctttctgctggattttctagactccttttaagttctttnatattgtcctgtacttc

SEQ ID NO: 121112 - DNA, 2619 bp, Homo Sapiens
  misc_feature (45)..(62): n is a, c, g, or t
  misc_feature (2447)..(2452): n is a, c, g, or t
  misc_feature (2503)..(2537): n is a, c, g, or t
taccctcaactaaagggaataagcttgcggccgcggctgtaggcnnnnnnnnnnnnnnnnnnaactgctaaactatattaactcataataaaaagtaactagtcaaaatttagaacattctgatcaaaatgggtctgcacatgcctttcaaacacctgctggtcatagtcaggagggaactgctcgctgcacatcgggcacaccttccagtgactttcaacatgttcttcaaatttgctctgatcatagttaggaggaaacattaactcacagaggggacacttcttgtgaacatcaaagctggaatcaaagcaaaagcctgtcccatgcccacgtaaatgttgacttggaggatcaggagcagtaggcacattctcatcttctttgctatcctcagagtcctctaagccatcaggccgactaaagtttcgagcaggctggctgcagacaacattgtcttccagtccccaagaggggactctgacaggtggcctttgtatttcatctgggtaaaaagcaccatctgctccatcttccattttcctttctgctggattttctagactccttttaagttctttataattgtcctgtacttcagctagttcaagttttacattttcagcaattttcacttgttctttccatttcagctccatttttgcaagttcatcagcatatttattgcattttgctttctcatcctgcaagagttgtttacatttattatacttttctgttttgtcagcaatttctttggtcatttcacagacttgcccctttgttactatgtcaaaatctgcctctgctgcagaaggtgatggctttacatctacagtagaggcagaagtggctgggtctgtgtttactgaagcatcattcactttctgctgattccccgttttctttgtgaagacattattattattagctgattgatctgaaagtttgtttatttgtttttggagcctttggcattccttaaatttttctttataatggtctgcagccatctgaagacggagttttcagatcttcaacttctcttcttagttcgtgttccagtgtatcagtcttgtcctgatcttttttcatagcatttagtttaagttctgccactgcatcagctaactgctttttcactttctcgttttccaagcgtgcagtatgcaggtctgccatcgttctgtctcgtacgttgacagcatcactgagttctttagccagaaagacaacttcttgccgagttgcctgaacctgttcctctgctttacgaagttgctcctttaaaaaacaagtatcttctttacttgaggttgtaagcaggaaagttctttgcagattttccttttcagccaaacataactgcagcctgccaatctcttctttgaaatgagtaatcacgctttctttgttcccatctaaattttttaaagtctggacctctgacataagcttggtattttctatttctgtattcttcaaatgtaccttataaagttccttttcatccttctctgtcttcaactgacattcaagttgttctctttcatgttgtgccttcttgagtttgtcctttaaactgtctaattcggtttctttttcaattgctttatgtgttactgacacaatatcttcctcaagctgatgggctttggatgtagcatcactgaacctcttcttaaactcttcattttccatttttaagctttgtgttacttcagtaagacccttttgttctgcttgcagttggtcacatctttctttctcatggttaagttctctttccattctcccaacttgttctcgaagttgtgctgtttctttttccagaacggcaattaactttaacagttcttctttttctttcatggttttctcaattttcaactcaagaaggcctgcttttgtggtcaccactaacatgtcagaatttccttcatcttccatagtaagcagctcttcaactggagaagaagctcgaaactggaaaggtgtacttgctccacgaatttcacccttatgggtaacgtaacagaactgataaaattctccatcatcatttggaaggtaatatccttggaatgctagtacacaattgactgttgatccttccacataatgttcaggcataggggaccataaaaacgtgtaataatcacgagcagtactccatccaaccttgaatataccaacccaatcttttggatgtggatgaatatatggagttaaggtgtaatgacattccaggtgtgcattaggaaggtaactcttggccacattttgaaagatgacatgggcaaagttggaagtctgcaatgggacttcttgaaaggatgtcattgtgaatccagtggaaagactcccggatcaagggagaaagttacgcaggcttccgatcctgatccgccatcagccgccgaacctcttccgccactaccgcctannnnnncccggccgtaatggccgaattcccgggcatatgtccggtaccgtcgactgnnnnnnnnnnnnnnnnnnnnnnnnnnnnnnnnnnncggccgcttcctcgctcactacttcgctgcgctcgtcgttcggctctaacggctaggcgccctataggtgagttatcaaggg

SEQ ID NO: 121113 - DNA, 1096 bp, Homo Sapiens
  misc_feature (975)..(1009): n is a, c, g, or t
  misc_feature (1013)..(1054): n is a, c, g, or t
ccgttgttgtcgaccacgactcttcgtttctcagcgcaaatgtctcgatcgctctgtgctcctgacgtgaccggtctcccccgtaagggtacgcacaaaatctcccactagtggcctcggatgaccctccgccacctgttcaaactctcccatctccattaaaaccgtgggttacctccagagacccttgtcccgtgctccaattggtcacaattttcctttctcaagggtaagttcctctgttgccatccgtccccactggtttctcgaagtggcgctggtttctgttgtccggaacggcaataacgttaacaggttcttcgtttttctttcatgggttttctcaattttcaactcaagaaggcctgctttttgtggtcaccactaacatgtcagaatttccttcatcttccatagtaagcagctcttcaactggagaagaagctcgaaactggaaaggtgtacttgctccacgaatttcacccttatgggtaacgtaacagaactgataaaattctccatcatcatttggaaggtaatatccttggaatgctagtacacaattgactgttgatccttccacataatgttcaggcataggggaccataaaaacgtgtaataatcacgagcagtactccatccaaccttgaatataccaacccaatcttttggatgtggatgaatatatggagttaaggtgtaatgacattccaggtgtgcattaggaaggtaactcttggccacattttgaaagatgacatgggcaaagttggaagtctgcaatgggacttcttgaaaggatgtcattgtgaatccagtggaaagactcccggatcaagggagaaagttacgcaggcttccgatcctgatccgccatcagccgccgaacctcttccgccactaccgcctacccccaaagaccccccggccgtaatggccgaattcccgggcatatgtccggtaccgtcgactgnnnnnnnnnnnnnnnnnnnnnnnnnnnnnnnnnnncggnnnnnnnnnnnnnnnnnnnnnnnnnnnnnnnnnnnnnnnnnnataagcgaccgctagcgccctatagtgagtctatacagtctt

SEQ ID NO: 121114 - DNA, 694 bp, Homo Sapiens
gaatcatgttttttattttaaactaattgtaagacaatgaatataaagttcaaaaaggtgtaagcaggtgatggttttattggcaaacttataggggtagtgtatgaagtcatttcaaataacagattaagttgctttccttacaactaaaagcttcaattactacatttcaactttaatttaacatcacatctacatgtgaagctttaatttcaggtctggagcagctgtaaaatgaaagttaccactccattctagtccttggatatcagtatattccccttcaccttccaccctattttcattgaaatttccagtatactttgccccatttgggaatgtgtaagtccccagtccatgaaacatattatccttaaattgtccttcatatactgctcctgaaaaatgctcaagtcttccaaaaccattcatcttgtcatctttccagcttcctgtgtagacaatcccattaggagtggtatgaatacctattccatttctctcgtagattccagaagatgttcttgtacagtcaccatcatacttgtctccatttggaaagataaagctgatcttatacacttctgaagttggccgagaggtgttagagagatcttccaaactctgcgactccccctgggcggccagctctgcggccgggagagaactaggcgctaggacagctcccggccgc

SEQ ID NO: 121115 - DNA, 849 bp, Homo Sapiens
  misc_feature (711)..(770): n is a, c, g, or t
catgtattcattcattctacaaatatattcgggtgccaataggtacttggtataaggtttttggccccagagacatgggaaaaaaatgcatgccttcccagagaatgcctaatactttccttttggcttgttttcttgttaggggcatggcttagtccctaaataacattgtgtggtttaattcctactccgtatctcttctaccactctggccactacgataagcaggtagctgggttttgtagtgagcttgctccttaagttacaggaactctccttataatagacacttcattttcctagtccatccctcatgaaaaatgactgaccactgctgggcagcaggagggatgatgaccaactaattcccaaaccccagtctcattggtaccagccttggggaaccacctacacttgagccacaattggttttgaagtgcatttacaaggtttgtctattttcagttctttactttttacatgctgacacatacatacactgcctaaatagatctctttcagaaacaatcctcagataacgcatagcaaaatggagatggagacatgatttctcatgcaacagcttctctaattataccttagaaatgttctcctttttatcatcaaatctgctcaagaagggctttttatagtagaataatatcagtggatgaaaacagcttaacattttaccatgcttaagttttaagnnnnnnnnnnnnnnnnnnnnnnnnnnnnnnnnnnnnnnnnnnnnnnnnnnnnnnnnnnnnctctaaatgtaggcctggctgggctttgaccttttccgtttttaaatcactcacagagggtgggacaggaggaagagtg

SEQ ID NO: 121116 - DNA, 1580 bp, Homo Sapiens
  misc_feature (1520)..(1520): n is a, c, g, or t
  misc_feature (1524)..(1524): n is a, c, g, or t
ttttttttcaaaacagtatattttattttacaatagcaaccaactccccagtttgtttcaattgtgacatctagatggcttaagattactttctggtggtcacccatgctgaacaatatttttcaatcttccaaacagcaaagactcaaaagagattctgcatttcacatcagttcacaagttcaagagtcttccatttatcttagcttttggaataaattatctttgaggtagaaggacaatgacgaagccacttaattccttgtgtctgcataaaagcagatttattcatcacaacttcatttatgtgaataaagcagatgatgataaaatgttctcttattcttgtttaatcagtagtggtagtgatgccagaaactaagctcaaagaaggaagctgttgctggcaggtgcttctcagaagtctggcacatctgtgtatttcttgtctaattcttctcattggcctggagcatctcttcacatttttctctagagagcctggcacttttttttccccaacaacctgaccattttatcttctcagtctagggcttctggggtcaaaagaaaggactgaaatacagtatcacctatatgaatgtctgctcctgagggaagttaacaaaagccagattagatactgactggattttggtgtctctctcaagtggagaagatgtgaatagaaacagaagtttacaaaacactatagcctaacaaataggtaaaagctgtgatttaaagctggctcaagactggcccaggcataatactgtcaatctaaaggtaaccggcaacatcaaaaagtacatctcaaaagaatcaggcttaaagataaacaggagaactggaaatatctaagagtaagaagtgtaaacaatagaaaagaggtagggtttagggttctcatcttgggatttccccaggtcttcaagcttctatccttcctgggttctgggtcatgggcctccagattccggccgttagtcttgagatacctttttcgcttgggtcctctatccatctaggtaggctttgtgacaggggccttccatccttgggttgtaggtcttccagctacaaccctgggctaatcttaggtcgttggccttgtgtcacaagtctcagttcttaggccttccatgtgtcctgtcccaggtcttaagacttctaactcaagccttgagacttccatccaactcaggccttcggtccaattcaggccaccctctgttttcttggctcttgaggcttttgttggtttcaggcctgaggcttctatctatcttggaacatgggctttccatcttagtcctcgggtctcaagtctcaaaccatctgtcttatactttgggccttctatccatatgagccttccaccttctgccctacttgagttctgggttttactgcagtctagggccttgttttggtcttggatcatctcacatggcagcctggcataaggaaccgctccacaatgcttgctctgatagccgacgttctgcacctatcangcangggttaggaagccctctgcacacatgacaacacacacgtacacttgcccacatatg

SEQ ID NO: 121117 - DNA, 749 bp, Homo Sapiens
tttcaaaacagtatattttattttacaatagcaaccaactccccagtttgtttcaattgtgacatctagatggcttaagattactttctggtggtcacccatgctgaacaatatttttcaatcttccaaacagcaaagactcaaaagagattctgcatttcacatcagttcacaagttcaagagtcttccatttatcttagcttttggaataaattatctttgaggtagaaggacaatgacgaagccacttaattccttgtgtctgcataaaagcagatttattcatcacaacttcatttatgtgaataaagcagatgatgataaaatgttctcttattcttgtttaatcagtagtggtagtgatgccagaaacttgtaaatgcacttcaaaaccaattgtggctcaagtgtaggtggttccccaaggctggtaccaatgagactggggtttgggaattagttggtcatcatccctcctgctgcccagcagtggtcagtcatttttcatgagggatggactaagctcaaagaaggaagctgttgctggcaggtgcttctcaaaagtctggcacatctgtgtatttcttgtcaaattcttctcattggcctggagcatctcttcacatttttctctagagagcctggcacttttttttccccaacaacctgaccattttatcttctcagtctagggcttctggggtcaaaagaaaggactgaaatacagtatcacctatatgaatgtctg

SEQ ID NO: 121118 - DNA, 1019 bp, Homo Sapiens
  misc_feature (79)..(79): n is a, c, g, or t
  misc_feature (539)..(547): n is a, c, g, or t
  misc_feature (563)..(563): n is a, c, g, or t
  misc_feature (575)..(575): n is a, c, g, or t
  misc_feature (685)..(685): n is a, c, g, or t
  misc_feature (697)..(697): n is a, c, g, or t
  misc_feature (720)..(720): n is a, c, g, or t
  misc_feature (735)..(735): n is a, c, g, or t
  misc_feature (753)..(753): n is a, c, g, or t
  misc_feature (768)..(768): n is a, c, g, or t
  misc_feature (796)..(796): n is a, c, g, or t
  misc_feature (890)..(890): n is a, c, g, or t
  misc_feature (901)..(901): n is a, c, g, or t
  misc_feature (942)..(943): n is a, c, g, or t
tttttttttggtttaagagcactttattattgttcttaaggctacttttaagtacaaaaaaagatggcctgccaaaccnttttttttcttcttccaggaaaaacaggccacagagaatggtatattacagatttacacacatgaagagaaggtcagagcgcactgcaggcagcgcggctctgggaagaacttcacggagccccttcttagagcagggagggggctttctcagtgaaatgtttggttttctgctgcctcctctgccccaggcccccctccagggtactgcctatcccagataggtcagtgcaccagggacccggccgccagcaccgccgacccctcccagagtgacgcccttgttcactgacaaagagacctgtcccaggagtgtcctccaccgagccggtcagctgtgggtggttttcctgttacgacgctcagtagcctgtagcaataacaaactcgtggctatgaatgcagatgcagtgttctcatagaataactgttcctgcacttttacagacaaatctacgacnnnnnnnnngatcaacttttttttntccgaacaacanaaaaaatgaatgattacaataggaaagggaaaaattaaatagctacatatcattaacaaattaatgttcttcaaaaaatacctacaatttctctgtacatccttacgcancagcgtacgatngtctcaaatcacccatatagaanagtgtctcaacgatntttcctacagaaatatangggcctgaaatgcanagctttggagccagtacagtgggagtgnaatgtgtgcggggcaaggagaaggctttctttcctccactttttcaaggctgcagcactctgtgactacagagcagtctccgacttttcacaantgcaatttcanatcacagcttcgtgcgattctggccgagggcaaatcctatnngagcggataatcgtaccagtcaacgttctggtgaattgtttcgccacatccacaacaacagcggagaaaatgtagc

SEQ ID NO: 121119 - DNA, 887 bp, Homo Sapiens
  misc_feature (854)..(854): n is a, c, g, or t
  misc_feature (867)..(867): n is a, c, g, or t
tacaaagttttcaaaacagtatattttattttacaatagcaaccaactccccagtttgtttcaattgtgacatctagatggcttaagattactttctggtggtcacccatgctgaacaatatttttcaatcttccaaacagcaaagactcaaaagagattctgcatttcacatcagttcacaagttcaagagtcttccatttatcttagcttttggaataaattatctttgaggtagaaggacaatgacgaagccacttaattccttgtgtctgcataaaagcagatttattcatcacaacttcatttatgtgaataaagcagatgatgataaaatgttctcttattcttgtttaatcagtagtggtagtgatgccagaaactgtgaaaggaaggcttttagttactttcttctttccattttccaataatccattccccatccccagctgaagaaaggggtgttactgagtccagctgataccacacattgaaaggtaaacattaatatttcaaatctgatgtctaactaaaaatgtacagaatgaaaactagaaaatttcaaccccagattatcttcaaccttgctccctccaccaatcatactttgacatttatctatttccttctccacttatggatgtaattggcttgctatagaaactacagttcagatgctttgaatgtatgaactacaatgaacaataaagtcctcttcttttgaagcatattttggcttcagctttaagataatcttatgacaagaagggtcacactgattcacttaataaattccattcttacctaacacaaggtttagttgataagcacttggacaaaaataatacttttcanaaatgtaaagcanactagtgaggacaaaggatt

SEQ ID NO: 121120 - DNA, 426 bp, Homo Sapiens
  misc_feature (70)..(79): n is a, c, g, or t
ggtttaagagcactttattattgtttttaaggctacttttaagtacaaaaaaagatggcctgccaaaccnnnnnnnnnncttcttccaggaaaaacaggccacagagaatggtatattacagatttacacacatgaagagaaggtcagagcgcactgcaggcagcgcggctctgggaagaacttcacggagccccttcttagagcagggagggggctttctcagtgaaatgtttggttttctgctgcctcctctgccccaggcccccctccagggtactgcctatcccagataggtcagctgtgggtggttttcctgttacgacgctcagtagcctgtagcaataacaaactcgtggctatgaatgcagatgcagtgttctcatagaataactgttcctgcacttttacagacaaatctacgacaa

SEQ ID NO: 121121 - DNA, 1124 bp, Homo Sapiens
  misc_feature (1012)..(1046): n is a, c, g, or t
ggggaattcaacatgttttattttgccaggccaatgatttcatcaatatccaattaaattttagtgtgacaactacatttagtttgttttcttacacagattgaacattcaccattatgacagtttcatcatgctaaaatctattcacaaacttacactttggaaaaaagtgtatttctagaaaattttatgtacaatacaaatggaatagatattaagtcactgaattgtcaagctacataaaataaaaccaatcaaccaccagtagtatacattaacagcatttttgaaaaaaaattttctgtttacattcagcagagttatgttcatgaagaatttctacatttttaaaagtaatgaaagtgtacaccaatttaataattgtgaaaatagaaagaattaaatagcacaaatatagtataaaacttaacaccgttactgtctatcagtttgggcttatgtgaaataaagggaactgtgactctgaaacaattgttacttttaactttgagaatagattggccataaacacagaagatggtttttggctttacattgacacatttctgtgtgtcaatgtagaagagaaaagaggtttaattataccttttaagcaggcaaaccattataataaactgctttagaaaattactttaaaattatacacatttggaacaacagattttttaaaaaatgaatttggtttatgtcagcattttaactatttttgctatagcgaggcctcctcatatattatcataatttatcatagtttaaatagtgaatcatattctgatattctgattaataatcatattaattttgacaatgattttagtttttgaagttttagactgcaatagcttaaaaaggccataatctactttaattaccttcatcatagattattaactataaataaaatgtttatatgatatttggattaggtacatggtacaatcccggccgtaatggccgaattcccgggcatatgtccggtaccgtcgactgnnnnnnnnnnnnnnnnnnnnnnnnnnnnnnnnnnncgccgcttcctcgctcactgactccgctgcgctcgtcgttcggctttaacgcgtagcgcctatatagtcgtacgtttt

SEQ ID NO: 121122 - DNA, 846 bp, Homo Sapiens
  misc_feature (616)..(703): n is a, c, g, or t
  misc_feature (733)..(733): n is a, c, g, or t
  misc_feature (740)..(740): n is a, c, g, or t
  misc_feature (792)..(793): n is a, c, g, or t
tttgaaacaccaagctcacataaatttttaataaacttttttgtgtctatgtcatatttcataatgtttttcctaaatgcttaacctaggaaacacatgtgtgcacacccatgccaaacacacaaatgaatttaacagtgtggtttatgaaatgaaagcaataatagtttgactcttcagaacctcttcattgtggcctatgtcaagctctctaatcttttctcctcaatggtaggccatggttaagggacagatgataaagtacaaggttttcaattgctaactgccaaattttcataggttatagtattactcaaaaagttgttttgtctcatttcttcaaattttgaaataacttgctttgctgactcatctgactatatttttaatgaggactggctttattagcacttttagaaaaaaagctctgcactccacactgaaagtcaaatcaaatagatagttaattatttgtagcgtggagtaatgtatgctcagtctctcctcacaacggagccaaaggtcacaaacatttacagaaaacctacttatgtcccaggtactctgctaggtactttcctaacttgtctaaagtcacagcataggctgggtatgnnnnnnnnnnnnnnnnnnnnnnnnnnnnnnnnnnnnnnnnnnnnnnnnnnnnnnnnnnnnnnnnnnnnnnnnnnnnnnnnnnnnnnnnacaaaccctactctacaaaaacaaaatacnggttggngggggtgtgctgtatcccactgtcgggaggtgaggcagagatactttagcannagtgggttgcaataccaaatgtgcacgactcaactggcaaaacgaaccttctc

SEQ ID NO: 121123 - DNA, 791 bp, Homo Sapiens
  misc_feature (631)..(640): n is a, c, g, or t
  misc_feature (670)..(670): n is a, c, g, or t
tttggtttattatgaacatttatatttaatttacattttgacaatttgcacataaataacattgtaaaccagtatgtaaacataagatagtttgttgttctagcaaagtaaaaagccagtaactttggtcagttttaactttgagtagaggaaaaaataaaaccactgttgattgtgggctcaacattcacatgtaagaggcagaaaagagaaggatggatggtgagagaagcaagaagtctttataaaaattctcactatgggaaagcacaaaaggagaaaaagaacaaacgagtagttgggaatcaaaagtatttggtctaatgtcaacgtgatgctttggtttaccttcagttaaggactgtgtttatcaaacactgatacataaaaagctgtcagtcttggaagttacagaagaccagtaaggctcttgggtttccctggattattcgaaatttgttctcttctacaggtgaacattagttgatgtgaacaaaatgtcaaatataattataaaatagattggagtaatgtatcagtatttagtaaggaggaaaacagaaaaattgcagcggtaaagtcagttttttatttctgtgacttgggtgtgacacataatcataaagtggcnnnnnnnnnntagagctgtcttagatggtccttaatactnaaaaatgatgtatctcttcctccctggttgttttgtggtccccaccactgcaccaaggttttagggtctcttacagtaggcaagggtgcccaatcataccgacgtgattgtgaggtcacca

SEQ ID NO: 121124 - DNA, 1061 bp, Homo Sapiens
  misc_feature (86)..(224): n is a, c, g, or t
gtggggattccaaccctagtcttggccccggtttttttggggacaactatggccccgttctctttcctcttggggccccgcgcccnnnnnnnnnnnnnnnnnnnnnnnnnnnnnnnnnnnnnnnnnnnnnnnnnnnnnnnnnnnnnnnnnnnnnnnnnnnnnnnnnnnnnnnnnnnnnnnnnnnnnnnnnnnnnnnnnnnnnnnnnnnnnnnnnnnnnnnnnnnggcttccaataaaaaataattcaactttattagtatgaaatattttgagataattagtgacccaaatgcatgattctccaatatgaaaggtgttcagcataagcatacaatcatttagtaaaactgctctttatgagacccccagaaaagctggaggcacttcctctttttggtggagagagaagacactacttaactggccatttccttgctggagtttattccgattcccttttgtctgattcttcctcctcaaactcgactaaaggagtgtgtctgttggcctgagcaccttctctgtagaacactttctttactgtgccatcctttggagactttatggtatgctccatcttcatggcgatcataaccatgagggaatctcccgctttcactttgtctccagctttgacaaacaccttttcaatggttccagtcataggagctaaggggccgccctgagtttcttgtgagctcacagaagataagtatttggggactggaatgtcaatctcaatacttccttccttggaaaataggtaaatagtgttttccaggataatcagcttcgctttactagcaactccattaacagaacatttcaggtaagtgcagtctccctcgctgtaaagattaccataggacttggaaagttttatcttcaatctgcatgctataagacccatcatggttatacgttacagctatggctacattgttctttaccatcttttcagagtcatgtttctggtatacgagatattcagtcttcttccactgctagacgaaaatggagagaatttgatcgtgtgcctgaagagtgaagtgccagccagg

SEQ ID NO: 121125 - DNA, 413 bp, Homo Sapiens
  misc_feature (267)..(280): n is a, c, g, or t
agttgttgatggagaatgttttatttatgtaattttcatctgtagagatgcttctgtcctcatctttatatttgtctccctcttctcattgaactgccaaattcctgaaggatgagacctgggatgtttaatgccaactgtacattctcagcagagcaccagtatcaaaagggacattggatatattttaataatgatctaacacaagcacaaataacccctgaaaatattaaactcaacaagagacataagaaaaaagcagacagnnnnnnnnnnnnnnggcgccgctcgcgatctagacgacgcgtggtcgacgatatcccgggaattccggaccgtaaccgaccatgcatttgtttttgttaacaccaagcgtggttctaataggtgtcacctaagtatgccttttgggg

SEQ ID NO: 121126 - DNA, 892 bp, Homo Sapiens
  misc_feature (216)..(272): n is a, c, g, or t
  misc_feature (425)..(434): n is a, c, g, or t
  misc_feature (502)..(511): n is a, c, g, or t
gatggagaatgttttatttatgtaattttcatcggtagagatgcttctgtcctcatctttatattggtctccgtcttctcattgaactgcaaaattcctgaaggatgagacgtgggatgtttaatgcaaactgtacattctcagcagagcacaagtatcaaagggacattggatatattttaataatgatctaacacaagcaaaaataaccactgnnnnnnnnnnnnnnnnnnnnnnnnnnnnnnnnnnnnnnnnnnnnnnnnnnnnnnnnntcttattttagaatgatgctatatgtaacttgtaaaatatttaagtttttatacatgagattatattggtttccttatttaaagaaaaaaattacaattaagaatggaaattaaaatgtaaaaccaagataaatatttttggcttttggactnnnnnnnnnngattagtgaggaaaaccaataaataatggggagagaaagaaatgctactaattttctcttcatgattnnnnnnnnnntcttttaaccatatttggggtgactggaaattaacagtgatgattttgagctaaaaaatcagtgacacattttattaaaacaaaaggaacaaaggaactttaaccagaccatacatgtaaaggctgtttagcatagcaatttcatggattcaaaatatatctttaatgacaaacaaaccaataaccaggagaaatgaagactgtccttccctttataatgggatattaaagtgtggcctatggacaatttataaagtaaagagtttgaagtttaatttttattttacaaaaattgacactattaaaaccaacatgattatctttcactcatccaataactgggctaacagtattataaaaatatgtaaaaaattctagatt

SEQ ID NO: 121127 - DNA, 1080 bp, Homo Sapiens
  misc_feature (498)..(507): n is a, c, g, or t
ttttaactgttttataaacctttattggaaaggctacaaactttatattgccaccacatttcttatgtttaaagtggttgtggggaagtaaccttggatacaaaactactatgctgttgaatcttacccaggcttgttgtaaaatattttttgtacaatggaggtagagtggataggtcaataatttaaacctcacaggacttgattagtgtcagcacaccttttttcattcaggttttcaggttctagcagacctagaaataaactacaaatactagatttaggctcagggatggcatttaatacatttaaaatttttagttttcagttttccccatttgttcctttataaatgtaaaattgtgcatctgatgtctctttcctcaaataagtgtgttctaaaaatacctactgagtgaaatggtaaaaaccagatgatggaaagagaaacacaacatccgtttcatcaattttacctgatttttctcaaaccagccnnnnnnnnnngcttatttttagtttgaaatataaataactacaacaatgcatatttcagttgccttcattcttaaattctgaataagcatcttacttttctataaaacattacagaaactcaaaataataatcaatggcttctccaattccaaatattcaacttaatggagacagcatcttttacatttaatgaaaacagaggatttgaacacgttctatgcagacatggttttactatagatttgctgttaccttatttttttaagggggtggtggtagggagatacagaagtcaggctagcccagtgcttgggagttacagcactcaagacaccctggcctctacagagcatcactgaagccactgaagactgtctctaccagccttttgtcttccaagactataagatgggcataggcctgagatataagcttcaggccaatgggtttttatgggctgtttaagaaccagtactaaggatacattcttttatgtttttccttctaaaaatgtgacacaaaagaataatttacaccaaccgctttttattatcgagtttcagaaacctttcacaagatggt

SEQ ID NO: 121128 - DNA, 849 bp, Homo Sapiens
gtagcagtccataatgagcaacttttattggcattagggtgtcagtcctgtaaggatcatcacttaagtgtgtctcagtggagaaaagatcaagaatcatgtcaagaagaccatggggttttattccacttgagcaagagcaaatcagagccccatcaagcaggaatggtggcctttcccaggttccatccttaactaaactgactgttcccccttctgatttctccacggtcttctgtctcttgctctgccaaacttgttttcttatctctgtagagatgagtggcttgtttgatgttctttccatggcaaaaatttattcaatgcaaagttcacttcagacacttggttgagacttgaagtttagaccaatcctgagatgcgtggtgatcctgagagagagcagactgcctgccaggtaaatggtccatattatttccttggcagaggccctgacaggggctggggtccgtgttacctcagcagtctttctgcttggcctactcttgctgctctgtaggaaggccctatctggccatttctgtgaaacttgccccttctcaagcactccgtaactgttggtgttggcccatcaggcaataaggggatgcccgaggtctgtgcttccaaggataatagaaacacccatgtgtgtggtaagataaaggtaaggacactaaagaacagagtgtgagaggtgagttctaaataacaacagatgaagaaaggattggatccaccagcttctctgccagttgtgattttgatacaagttgtgttgctttgagctcctagcagagagctacactacctgctgtgtattttggtcctctgtcctatactcctcca

SEQ ID NO: 121129 - DNA, 1454 bp, Homo Sapiens
cagtcgacggtaccggacatatgcccgggaattcggccattacggccgggtgggaaaacattttttagactgttgtatacttattataggcagaaatcgtgtaggataatgtctatagaaattatgttttatttgaatgttcttttaaaatgaaagattttctttacagaacttatgttgtggaatagatctttccaacaaggtttctcatattcttatagttttttatatgtaataaaacaatagagaaatattttgccaccaggtgactctcctattccatctgtttcttcgggatcatcttcacctctttcagccacttctgccccaccaacgttgggccaaccaaaaggagtcagtgccagtcaagatcgaaagatacctcccccaattggaacagagagactggcccgaattcggcaaggagggtctgttgcacaagccccggcggggaccagttttgtcgctcccgttggacacagtggaatctggtcatttggtgtcaatgctgtgtcagaaggcttatcaggttggtcgcaatctgtgatggggaaccatccaatgcatcaacaattatcagacccaagcacattctcccaacatcagccaatggagagagatgattctggaatggtagccccctctaacatttttcatcagcctatgggtctgccaatttccatgtatggaggcaccataataccctctcatcctcagcttgctgatgttccaggaggccctctgtttaatggacttcacaatccagatcctgcttggaaccctatgataaaagttatccaaaattcaactgaatgcactgatgcccagcaggccagtctgcttccttcagtccctgctctcaaaggggaaatcccatcacctcagctaaccagaccgaagaagagaattggacggccgatggtggcctctcctaaccagaggcaccaggatcatctacgaccgaaagttcctgctggagtgcaagaactcacccattgcccggacacccccctgctgcctccctcagattcccggggtcacaactcctccaacagcccctctctccaagctggaggagctgaaggagcaggagacagaggaagagatacccgatgacgcacaatttgaaatggacatctaatccagtgcagatgacctggcatgtggagttacagagggatccctcatgccactgctgccaccacctcttcctggggcatccaaaggccagctggcctcatctaatctggaagggagtgacttgttagttccaggcctcctttagttctgaggcagctagaccagggataggagtgggcaacttgccaagcccttaactctacttcctcttcagtctgtggtactcctcctaaccctaaaccctctatgctcaggggctggaactggggaatggagtaagtcaccttctgactgcttagtaaacattcaaagaa

SEQ ID NO: 121130 - DNA, 681 bp, Homo Sapiens
ctagtcaacaattttattttaaagtttttcaaaatacaaaagttagcaaaaagctgaatatttacaattatgtcataggttactattaacagtgcagaggatagagtatgtaagaaagactttgaagaggaaataatatacaaagtacaataaacagcaaggttacatgtcatcgttttgccaccgtacagaagtggaaagtgccgacctggagaggtcaccgttgtttcatttctctgtatccagaaaggaccgtctcttaaatccaccaggggaggaaacagcctcctgtggaaaatgctgtcttctcaggagcattgtatctgcacgtgccaatcacagttcctcctccgttcgcaggtactgggtacagtctgaaatctttttcagctgagcagcgtttaatctttctgaacacataggacatgtgctttcagtgtttagcatgatcttcaattctgagtatagagcagggaagtcacaatgtggacacaccgtccagtcatctttcaacatgtgtcgacctgttgcaatgcaatatgggatactgtttttacatccaggacagaggagttcacactctgggagaagaaatttgcagaatggacatggagtcgtggcctcttctatctcagatatatcgggtctcctgaccattccctcgatcttctttttgtattt

SEQ ID NO: 121131 - DNA, 550 bp, Homo Sapiens
tcttgtcttccgaagcgttcttctatttgtgttcctaaggatctctaaagactcaaattgtcttttgggaagaacctcctgtggcctttgagaatattatctttaaagaggatcttgcatgagactgaatagttctgattctcaaattgcatggtggacatgtgttaagaggtgtagacagaaagttgttgtctttctcattagagtaaccctaagctaaaggaatgttatatatttaatttactctgcctttccctcccctaaacagcatgctaaacactgaaagcacatgtcctatgtgttcagaaagattaaacgctgctcagctgaaaaagatttcagactgtacccaagtacctgcgaacggaggaggaactgtgattggcacgtgcagatacaatgctcctgagaagacagcattttccacaggaggctgtttcctccactggtggatttaagagacggtcctttctggatacagagaaatgaaacaacggtgacctctccaaggtcggcactttccacttctgtacggtaacagaccgtacac

SEQ ID NO: 121132 - DNA, 971 bp, Homo Sapiens
ttttatcactctgtttctttattggaaatccgaacaccccagccgccttcgcaagtctctccaaccactcctaccagcaccccgcggcccacgcggtcttggctctcacccacgcctgcccgagggcggcccccggcctaggctccaggcaacgctcaggcctaggcaccccattctgcaccccacactgcccagaggaccggcacagagcagatcctgggcctcaggttgtgatgaatttccagctttggggcaaaaacaggcatcctctgtcctctgtcatacatgtggtggctgcccctgggagtctgatcaggtctgaaggccagcgtctttgatctcctcaggttgaggtactgcaatgatttcatttctctggagaagccactcagggtgtcaatctggttgtctcgaagatgcaaggtggtgagattgctcagatcctccaagccttccaccttcttcagcatgttttgggccaggtagaggttcttcagcttaggaagattgattcccagggtgctttccagctggttcccccgaagctccactgtgtgcaggctgatcaacttctcggggtccagacctgtcaccatgtggatgctgttccctttgagattcagggtttcaagacgaggatgagagatgccttcagtgtcagtaatctggttataagcaaaactagcaatctgcaggtagggcagttcattcatctgggcacttcgcagccgattgccatcagccttgagccagagcaggtgggtgaggtagttgagtggagacaggtctgtcaggtggttctcagaaatatccacatagcgcagatggatgtaggagcgcagcaagtagatgtctgtcaggtccctctctttaacctccagcttgacataagcatgagccagcccattgcctgtcttacagagcagaggaagcccttccttcatcatgtcctccgtgaggggggtgggcag

SEQ ID NO: 121133 - DNA, 878 bp, Homo Sapiens
gtcagacacaggagcatcactctgtttctttattggaaatccgaacaccccagccgccttcgcaagtctctccaaccactcctaccagcaccccgcggcccacgcggtcttggctctcacccacgcctgcccgagggcggcccccggcctaggctccaggcaacgctcaggcctaggcaccccattctgcaccccacactgcccagaggaccggcacagagcagatcctgggcctcaggttgtgatgaatttccagctttggggcaaaaacaggcatcctctgttctctgtcatacatgtggtggctgcccctgggagtctgatcaggtctgaaggccagcgtctttgatctctatctttagaggctagaactgctgctagatcaatgactgttcgggttccaggtcacgctggggctcaggctcctgctccttttcttccttcagcctctgtcgaatctcatcagcctcagcccgttcctcctcctcatagaattccttgtccaggcgttcaaggtatggcatctgcaccagggcctcctggcggtagctggtttcgtccgtgcatgggttatcaagcagcaccaacgctcgcagcttgggcaggtctcgaagcttggccagctcccccaggttggccaccatgttgcccctcaggttgaggtactgcaatgatttcatttctctggagaagccactcagggtgtcaatctggttgtctcgaagatgcaaggtggtgagattgctcagatcctccaagccttccaccttcttcagcatgttttaggccaggtagaggttcttcagcttaggaagattgattcccagggtgctttccagctggttcccccgaagctccactgtgtgcaggctgatcaa

SEQ ID NO: 121134 - DNA, 3714 bp, Homo Sapiens
  misc_feature (171)..(171): n is a, c, g, or t
  misc_feature (719)..(782): n is a, c, g, or t
  misc_feature (3675)..(3675): n is a, c, g, or t
acagacacacgtatgatgtcgtctttagacacaggatgcgagtcatgtctcaggggttcgtggagggtttatgccctcatcaacgcttttcggcgtgtgtttgcaattcttgtgatcacgcacaaatagagtggcgagacaagcttgttgttacacgcacatctagcggtntgttgccaccagaggggtgtggaaaaaatattctatatgccgcaaactcactctccccagtgtcgtcctgaatctactccgcgtgtgggaattcaccaagggtttccaatccactctgccggttttgggtgagagggctttttcccatattcgtgcccgcggaagtgcttatatatgaaaatatccacccaggtatttccttgaaaaaatatgttcaacggggcgcggggcccttaatataggatatttaaaggcatcggcctcaggcccactccgtttcaataaaattccaagtaaaatgccctttcgagaggttccattctggggtttggtttcaaaaacccttcgggtttgcccgcccgggggcgttcttttatttggaggagagattccaaagccccttaggtccaggggcccagggttatccctaggggaaaccagtttatggaccaagtttccacttagcctactggggtccggcgccggccaaatcgaagggttttaggaaaggcattttcgagggtgcgagggcgcccgacaaaataaannnnnnnnnnnnnnnnnnnnnnnnnnnnnnnnnnnnnnnnnnnnnnnnnnnnnnnnnnnnnnnncgtatggctgttatgcttttaatggaagcagatacaaaattcatcaatgcaaaagaatgttttacatactcattaacatagtgattaatgtaaattatattttgacttgtaaaatacagtgtgtttggcctcaagaaactacagagctgcaactcaagataactggaaaggctccttacattgtttttgcccaccacctttatataatactcctaaatgatatctggggagggaattaaaaaataatacaaagctcttttcagctgtggttcaaagaactctagtgaagctgtatggcaatgacattttgggaccatgaagtttccccagaagtatttccggtaagaggcagttaagaagcttaatagtttcaaagtctggaaagcagcaaagatatcttagagaaaacattataaaccccacttctctcctacacagacattttaaagcatggacgtaactttaaggagactgagaaaacatcagtagttttcacaaagcttcaatgaacaccccaaggcacaagtgttgaaaacggcctgttcactaaaacgtcacttttggaggtacaggtatgctgtgcttgcagtgagaggatgactttatccctacttaaaagcaccaggtgtcaagctcagcttccatttacacaggatgcaccaattatccctatgatagtgactgtttcaagtactatactacatttccaacatgtcttttgcctatttgcttagtcggtactggggttcttttaagccccgtaggtctgtagaatattttaaaaggctagaattacctcaaaaatagtcttgaaataatactgagtccttctaaagagctcactggatattttaataacatttacagaaagacaaaatttgcagtagctgagtttaagtgaagaataatgtagaactaacgtgggctaaaatgtttcataattaatgtcaaaaattgccaagattattaatatatattttggtaatcactattgaccaggttaatttttttgtgcaaaatacactatgtattaatagaacaggaaaataattatttcagaccactaacaaaagaaaacccacagcaagagaagcatctgtagggcaattaaacgttagggaagtttactagctttagaatacatcaatatacttcgataaacaagagtgttttaatgtacttttagtaacgacctgatctaaggagccttggaggcttgtgaaaaagacgtacccacaaagatgctgcatttctggtgtgggggtgaattaaaatacttctgtaagaaggagggaactgaatcagctcagcatgaatacacagcatttttcttttaaacagtaacttataatctgatgactcactttgctttactagttcaaaattaggcaggagaagaactaagctaattggtcagacccagaaacacaaagatttggcaagctgcagtcactcagctcatgatgtgtgataatcagcagaaaggctgctcaactcttgtccattccttcacatctgtagaggagttcgatataaccacttctctttatcaactttaagctgcatacaggcaaagagatcacaaactgcagggaggccataatggtctggggggaagttatgttcctcctgtagaggtgaattaagtaatacttcctgggccttctttcgaagcagccacttgtcttctccagaagataactggctgaggttgcccatcttctttcctggcaggacccagtcagctgtgttaaaggaacaccaggaagtattcatggggcttttaaacttctgtttgccagctctgtcttcagtaccaggcacttccttgggacttccttctttgtatgggggcctgataagccactccgacaaggggctgttctttatgacttggaaggaatcagcaattctagaaggagtcattgcctttggtgctttagtttgttctattacttcttttctaggacagagccacatattcagggaatctttatgcttctcaggctcaggtttgggttccacaggcatcccatttttatcctttccttctttcttcagaagccacttatacagagcctccttctcacaattctcatcacacacacactctgcaaagcttgtgcagggctcattggctctgcacacctcctctaccttacatgggtcctgatggttctggacaagccaatcctctgtaaccatgctgggggtggacaatggtttcttggcctccaagtggtcattcaggcacttcagattgcccaggttttcaatctccacacctttgggctggtttccctgacagttggtacaggagtcagtcttgacaagccaatcattcacattataggactggaataagagcttaaacttctcactggtttcacgactgccattctcaggcttccgcagcttatgggattcctggggagtcactagccaatctgataggtccatctcatcttgatcaggaagctcttgatctccaaccttttccatttcaatggagaaagaactagtagtggaatggctgttacacttttgataacttgatttttcactcttgaggagccagttttctaagccctttaggtttcccccgacattattgaagaaattgcaggctctggaagaagtctgactgttctccaaggtctgcttttgggtaagccagtcctgggggtcggtgctgggtatgtaaggagcttgataaccactggcaggtttgcttccaaggagccattcgctgaaagggacagctacaataccggatgctgacttctgctctggcatggagatacagcctctcttctccaggaagggcccaatatttgctgaactagcatgagccatcaagtgctcaggaatttgaatggttttgagagaccanatgtggtgatggtctggcgcagagtattgtgtcagcttc

SEQ ID NO: 121135 - DNA, 475 bp, Homo Sapiens
  misc_feature (282)..(282): n is a, c, g, or t
  misc_feature (346)..(346): n is a, c, g, or t
  misc_feature (401)..(401): n is a, c, g, or t
  misc_feature (440)..(440): n is a, c, g, or t
  misc_feature (454)..(454): n is a, c, g, or t
  misc_feature (463)..(463): n is a, c, g, or t
ttgtgttgagattatgggtttgtgggcttttttaatataaaattctttatttttaaaattttctatgataaagagttccttattttctaaactttctatgatgaagagactattaataaatatgtttccagactgcaaccaaaaagttaacaatgacacatagtactactgattagtaactaactccacctactgctgtgtctactgtaggaaacaataaaagcagcaacagacctgactgttctccaaggtctgcttttggggtaagccagtcctgggggngtcgggtgctggggtatgtaagggagccttggataaccactgggcagggtttgcttcccagggngcccattcagctggaagggggaccagcctaccaataccccggatggctggacttnctggtttaatcaccaaaaccagggggatgttcaaatgcnggtgggaaggttcncccaggaangggggcggggcc

SEQ ID NO: 121136 - DNA, 1052 bp, Homo Sapiens
gcagttcaacattgattttaatgaacattttaatgttatgtataacagaacattatgaatataatggaaataaagttttatcaatttaataaaaaaattttcaacataacatggggaggtaataatttgatatctatattatagtatttattttgaaaaatattcccagcttgagggtaaaacaattaattttgcattccaaactctagaatcatgattttcatgtgagcttaatgcagaattacagcagaaaaacaaaaacattttcattaatttcctttgtcattaaatcaataaaatctttgactgctacaggtctcctttaacaatatatatttaactcctctattggaaccatattgctaatgctgcattatatacactcaaaaccaaaacaaaacaaatactgtataaaatctaaaagcaaacattgagttgtaacatttatatttaacttaaggttttaatggatttttacctttgcagacacccaaaataaaaataaaataaatatttttctgactgttcctgacctaaatgatggccacagggataaacacggaaggaagccttgccaagttaatcactgtaaattgtgaataatgatcgctaaaaacaaacagaagtttttttcttttacaggaaaccatatagcagtcctgaaaaaatttcctcctatttctgcacaggatattacagcataagacatggaaaagtccagggcattcacctcgtgccgaattctggtccccagggccaattccctatagtcagtctattaacttctatcattttatatctgttccttgttggaaatgctatcgtccacaatccatacaaataggaccgttatacagctcgaaatctggggtgccatagtgtggttactcaattatttgctttgcccacagccggctttcatcgggaactggtttgccatcgcatgatgaccggcaccctgtgacggggctgcgtattggggcctctgctctccctataagcctatgtcggcttttgttgcggagtgtacatcactaagcggtctcgtacac

SEQ ID NO: 121137 - DNA, 570 bp, Homo Sapiens
tttctttccagcattaacatacaattttattgatgatacacaaattaaatcaatgaaaatgacagaagggagcttactcatgatgaattggttcactgtcacttatgcagaagaaatagcaaaatatttcaatctaggcagcgagataaaaagcaacaaacatgttttcagaacaagtagtgatattcatttatccatcttaaacctaaagaccaactcagttaaatatcagcattgatgatacaatatgatattcattattcaaaactggcagctgaaaggattcctttaccatataaacaaggtggagaaaatgaatagtttacaatgtgtgttgcttctaaattacaaaatcaaggtgttattcctggctctttgggaacatatgttcagcaagtttggccatgaattttccaacttttactttcaccaaaaaatcatggtgactttctattcccagaaccttatcagcacacacttgaaattcttttacaaagaaaaaaagtgaaccttcaccgaattgattctgagtaggttcattttcttcccatttgaaattatccctcgtgc

SEQ ID NO: 121138 - DNA, 1810 bp, Homo Sapiens
  misc_feature (1473)..(1473): n is a, c, g, or t
  misc_feature (1632)..(1632): n is a, c, g, or t
  misc_feature (1647)..(1647): n is a, c, g, or t
  misc_feature (1674)..(1674): n is a, c, g, or t
  misc_feature (1677)..(1677): n is a, c, g, or t
tcggccgccgggattcctggaaggggaccaacccagctacctcagtttcctcaaggcattaggcctgtgccaggcacatagtggggtccagagaatgtaggccgcagggcttccaaaggccagggcagcaaaggctttgtgccaagaaaggtctgggaaaggagcccactgggtctgggccagccctttgattcctgtgatctccagtgagtcactgcccctctctgtgccagtacaatgcacacttggcccacacttggccactgagtttgcacttcactgaagggctgtgggaacgacggcaaggatagaggaaagccagattagggaagacactggctctcagaaccttagggatctcggtcttgggccactcatcccacttctgcccagcatctaaggagcttgagagggtgaagcgagagtaagagggttccatgctcacccccaacagggtcccaatgtcttctcgatgccctggtccttctgggcctaaaacatccacttctggggctctgtcctctggtggctacaaggataaagaatctgaggtcctgaaagccaaagacctaagaggaatcgaacaagaaacctgggagaggagcacagagcagcgcagttgggggtgtttacacggcaagcagagtccaggcagggaggccacaggatacctgacaggcacctccaagaaggatcttcatgggagtactcagggaccaagacaagtccaaagggactgtggagaaggcccctggtttctggccatcagcacagccaaggccccagtacacaactaaaggcttttattgggaaagggaaattgactgaaaaatggcctccaatttcctcgctgcctgagacacttggtgcctcctccacaaagtccaggaaagaagggcccaccaaactgggcccccagcaggctcaggtgtagaggtcaaagtcaatgcgtttggagttgtagaactgaccaccaggggggtccagcttccggcaataaacaccgtccgggaagtagccttcactcacccaggtctgcatctgggcgctggtgaagggcccatacagctcggcatcccccgtgttctcccacttatattcccacatcacatccaccagaccatctccccgcgactctgcttctcctctctgggtaggggttggggtctccagttcctcctccgccaactcctcagcgaacatgtccagggagggtgggggtgtgggattgtggggtcctagggtctgacaccccaaacccttcagacgcatagccaaccgttcccttgtttcctggtacacaccaaggttgccccgggccaccatctggtcggccaacccggagagccggtccaggcgctgaggggaactgggttgcccaggcccctttctccctttgcctcctcctcgggcccccagacgcctcagtgccccagccactgtctctctaggcaataggagctccaaaagtcnctccaagagggcttgggcactcattgaggtctggcccaagctgtcctcctcctccgagtctgagggctggcgctgggcaggtgggcgctcccggatcttcaccccagtcatgttgtccagccagctgtctcggatctgagcatccggttcaggaagtanttgcatcggcatcanagtggcttcctcccatctctcctgcangtnaaggttgtgatccgacaccccctcgctggggagtgtggctgctcctgacttctacatctctgaggcaagattcatattgctggacccatcatcacatctcctctcatcgtatcaaggagtgttgcttttagcg

SEQ ID NO: 121139 - DNA, 1318 bp, Homo Sapiens
agatcgacacacaagatggagcctgttgctcgcacagcccgccataagttatgaaggaatgatgaatgctccttctgcgctggcactgtgctctcacaagtcagaagaaggccacaaactggcccagcagctcagtgagagtcaagtcaagcgttgagtgtagactgccaccagggggtcagcttccggcaataacaccgtccgggagtagccttcactcacccaggtctgcatctgggcgcttgtgaagggcccatacagctcggcatcccccgtgttctcccacttatattcccacatcacatccaccagaccatctccccgcgactctgcttctcctctctgggtaggggttggggtcttccagttcctccttccggcaactccttcagcgaacatgtccagggagggtgggggtgtgggattgtggggtcctagggtctgacaccccaaacccttcagacgcatagccaaccgttcccttgtttcctggtacacaccaaggttgccccgggccaccatctggtcggccaacccggagagccggtccaggcgctgaggggaactgggttgcccaggcccctttctccctttgcctcctcctcgggcccccagacgcctcagtgccccagccactgtctctctaggcaataggagctccaaaagtccctccaagagggcttgggcactcattgaggtctggcccaagctgtcctcctcctccgagtctgaggcctggcgctggccaggtggccgctcccggatcttcacccagtcaatgttgtccagccagctgtctcggatctgagcatcccggttcaggaagtagttgccatcggcatcaaagtggccttcctccatctcctcctgcaggttaaagggtgtgatccgaacacccccctcgctggggagtgtggctgcctcctgaccttctacatcctctgaggccaagatgtcatatttgctggaccccccatcatcatcatcctcctcctcatcgctatccaaagagtgtttgcctttaaagcggctcccaggaccccctgacccagccacagggtccaccagcttcttcttggggacaatgatttcatcctcatcctcctcatctcccacgccttggaaggtcactttcctctttggcatgacggggcaaagaggtgtttctcaagctgggaatccgcggaaggcgaggtggaaaaaagaagagatgcttgcgcccgggctacatccggggcacccggccgccatcacccggaagaggactccccggccgtaatggccgaattcccgggcatatgtccggtaccgtcgactg

SEQ ID NO: 121140 - DNA, 735 bp, Homo Sapiens
  misc_feature (186)..(216): n is a, c, g, or t
  misc_feature (218)..(256): n is a, c, g, or t
tgtttttcgccatcatgagggaaaatgagacctaatgtgggctggcgggaggcagtctggggcggtaaccccgtatctgaaatactccagggatccatgtttctttcaatagtcagattaagcattccccaatccaatccccagatatctttgaacaaaatcaataaaaatcagtaaaaacaggannnnnnnnnnnnnnnnnnnnnnnnnnnnnnngnnnnnnnnnnnnnnnnnnnnnnnnnnnnnnnnnnnnnnntgcatggaggaccatactaaggcctttttcaggtcaaaaagggttttcacattgaccttttttacttttaagtaagtatttttcctcagaatgttccttcagttagaaatcaggtttaatctggagctcttactgatttttctttgattcctactgaacacctagctactggccatggtttctttgaggaaaaaaataccattgctgaagcatttctaaacatttttaatgcatgcagaaagaactacatagactctccaagcagctatataaggtggctcaagtaacattatgatttattttggtctaagccctttcataacgtccttttaaataacaaagaaaatagtcatgaaggagaggagatgaattttcccccaaaccttagctaaggcctgttagttctctggagctcaagctaggtgtctccaggcagccagatccacaaactcttggtggttcctcaagagtcagcgatg

SEQ ID NO: 121141 - DNA, 2069 bp, Homo Sapiens
attgttcgtgctttgtttcatgtttgtctccttgtgttggttgttcggtatgcagccttcctccatgttgttcccttgttgttctgttcctactgcttgtccacttcaccagttctctttcctgtttggtgcccgttgccttcgttttgacggccgtgttttacttggtgtccctttggccctttcggcctatttggggcgtcgttgtggctcttggatgacttttgcgccccttgtgtttttccactgcgaggcgcgctgtttcgctggttgttcaacttacatgcgtttattacaaggtaatcccaacttaaggagcatctatacagctacagtaattcaagcattatggtatgagtgagtgcaaggatggacaaacatttcagtgtaaccaaacagaaagtccagaaacagatccaccattatggttaattgattttttactaattggcaaggtaatttaatgaggaaaggataattctttcaataaacagtgttacaatgactggatacttgtatgggggaaaaaaagaaccctgatccataattcacaacatacatatcaattcaaggtagatcacaaatataaaaatataaagtttatataatagagcagaatatctgaaatcttggggttaaattggagagaaaaaatatcaaccaaaagaaagaaataaatttggcgttgtcaaaatttaaaacttctattcatcaaaagacataaagaaaacagtcaagccacagactaggtgtaatatctcaatacatatatcggacaagagacttgcatctagaatgtataaagaatttctatgacccaattatagctatcagggatatacaaattaaaaccaaaatgaaacctccactacaccccgattggaatggttaaaaaggaaaaatcctgccaacgccaatatttgtaaagacaggaggtaccagaactctcattcattatattcataaattgacaaatataaaaactgctatagtagggcagtcttccttagaaagggattgtgggcatgacagagaacaatattaatctgtccattatattccttaactgtaaaatggagaccatatgttccaccagcttcacttggtaattatgatacatggctattaagagactcaaatgactccatttcatcaactaatatgccctgtcaattctacttctaaagtatcccatgttctatccaatgtcataccactatcataatttaagtgttcataactctctataatatctcaataatctaactggtctcaatgcctgtagtagaaattgcagattggctcacccaatttctgttccctaggaaggctgagaagcttttaaaaaaaagaccttcatttccctaactcccttgcagctggagttccacctgcaagcagccagaacttggaagtaaggttaatttggttctggcaagtagatgcacttccacaagatttggaaggtgagagtgatgtagaggccagcctcttgtcccttctgttgcttctgtttacaagggaagtcatggaaatatggcctccattcctcactgttccatttctcattctctaaacaactaatcagttgtagtgactcttgactggaactcccttcttgctggatcacaggtacatgaatatatttttgaacacagacttgaaaatcacttgtcaataaagtttgaaaaaagacattcattgtttcttaccatctccctttaaggtagaaaaagaaaacaatctcaccatttctactttataagtaggaaaactaggactctaaataagctcaaaacagacacccacccagctcagtaagaccaccaaaaaggggtacaggtctttccattctggtgaaaactaaacccatgtttgatgaagtctccacatggtcttcagtttctagtactagaataacatgtaggtgacatctgcaccactgaagccattttgtttggatcaccagagtttaggtaagactaccggacgcgtggtcgacgatatcccgggatatccggaccggtaccagcctgctttttgtacacacttgttctatattcactatg

SEQ ID NO: 121142 - DNA, 899 bp, Homo Sapiens
  misc_feature (856)..(856): n is a, c, g, or t
agcaggaggatgtacttttattaaggcattattaattcaggatgacatattgatttgtcagagttgaatacttctgtgatgaagggcaatgctttcctatgatctttcaatctttgtatcatcaaaattacaatgccagttaatatactatactcagaatattttaaataactttattcttaaatttaacaagctcttattagaaatgctttggtatcaatagaataaaaaatgctggttttcccccactgaatcgtgtcaagtaactggaaaagttacacatttgttttccccagctttttgggaatttttcacaaataatgactactacttattcacatggcttaatatggtacactgtaatgataattttttggacttcagaaaaaataaacaaaatatccagaagagaaatttgcaaatgcttcttagtttcttcttcaaaggatgtttatataggtggtacaactcttagatcaccttttttcccagctttgccattctcatccttaaagctgttaaggatggatcctcagtcccatctccagttgtctgagcatcaaatggggaatggtggacagggctgcctaagctttcttcttgctctttcagagatatggaatttttgtggggggatttatgatttgtgttttcatgaggactagcttctgatctttttctaggaagtggtgttggtttggctggctggtacacctgactatggggagctatggggtggtaggacggtttctctgcttctccttcatcctcctcctcctcatcatcaatcacaaccagctcagcatggatgattccatcatatcctgtcagaaacttcttatcttcttcactgtcntctgcctgctgatacccatgaaatcattgtcacggttctgtat

SEQ ID NO: 121143 - DNA, 1422 bp, Homo Sapiens
  misc_feature (400)..(400): n is a, c, g, or t
  misc_feature (404)..(412): n is a, c, g, or t
  misc_feature (997)..(1024): n is a, c, g, or t
  misc_feature (1055)..(1262): n is a, c, g, or t
  misc_feature (1300)..(1300): n is a, c, g, or t
tagttaccactgtcatttcttcagctatggatatgtggctgatgttggggagacggacctcagtgtgttttatattgtctggtgttaagatgataaattactttgtgattacaagcaaattttctatttgacaaagcccttggtggagtccaaatgatttttctgtaccatattgttctcttacacatacgtatgttaggaaaataggcacactttcaaagagaatgttctcttacacatacgtatgttaggaaaatagacacattttcaaagagaatgttctcttacatatgttaggaaaataggcacactttcaaagagaggtataggggctttttactgccttcgaaatcacttttaataaaagttgtatgataaatcattaaaaatgcgagtgtanatannnnnnnnnacctctatcagggtttttatttgaaagtgtgctcttaccatttccttgtttgagtaagagagtgaatggttctgagtgtttaggaaggatttgcttgcttgcagcagaagttctaggaaaagcaggcacctcccaaatatcttgaggacactggcagccttatggtgactaaatccacactttctttaaagagatgcagatgaattacttttctgttaatatatagaaaaatacacaggagaacatgcagatacatgtaaatatctacatacagggatatttgtatgtgtggttgtgaaacccatacacaagtggatttggccatctttgggcagtgaggtcaaatgtgaatatgtgtaaaagtgcttttcagaactgcattactatgagaaaacatcaaaactgctgtagttttccatttctactgtatttcagttgcaacctatttttaataaactttgtatgtatttaagtgtatttgctattgttttgaaagtgctgacaaagtttatatttgtaacatcagccttcctcgcccatctctttccatctgtctcttcttcattaaacacttactgagtatgnnnnnnnnnnnnnnnnnnnnnnnnnnnngcctacagccgcgcctcgtgccgaattcttnnnnnnnnnnnnnnnnnnnnnnnnnnnnnnnnnnnnnnnnnnnnnnnnnnnnnnnnnnnnnnnnnnnnnnnnnnnnnnnnnnnnnnnnnnnnnnnnnnnnnnnnnnnnnnnnnnnnnnnnnnnnnnnnnnnnnnnnnnnnnnnnnnnnnnnnnnnnnnnnnnnnnnnnnnnnnnnnnnnnnnnnnnnnnnnnnnnnnnnnnnnnnnnnagctgcattatgaatcggcacgcgcgggaagagcgttngcgtatggcgtcttcgctctcgctcatgatcctggctcgtcgtcggtgcgggacgtacagtcatcaagcgataggtatcaagatcgggatacgcagagaattgacaaaggcacaagcagacg

SEQ ID NO: 121144 - DNA, 921 bp, Homo Sapiens
  misc_feature (471)..(485): n is a, c, g, or t
  misc_feature (853)..(862): n is a, c, g, or t
gtccctgggcaaaattaaagcaatgcatgttaaggcttcaaatgcaaaggattcactgtagttgatcctttcaagaatagaaatcgaccataactttgctttataatccatgtgatacaccacattataacagatatctactgtgtttcatgatttgtgaatgtcataacatttggattaaattgtatacaaataaatcactaacctgaaaaaaatcagagggtaggacaatataaattagtgacactggaattacagaatcattttctcctaagaaacaaagttttatttatttcaagtcgtgttgccaagcaaatatttgtaaagaacacatttttatgactggaggctgtttaagtggttttaagagtgcttgaataatttttaaacatgataaatttccatcctttaaatttaatgaccaatattaattagcttaagtagtgattattttttcacatttagtctttnnnnnnnnnnnnnnnggattcctattaaccaacatacttagtcttgacctggatgaatttacaaaagccagacaatgggatacagattaatgtggtttaatactgagattaatcaacattgccctttttccctgccaaaggcttattttctagacctgcttcactatgactactaaaagtgtacaactaaaattttattagaaatcgctcagcttacacactcccatcaggaagttatttaaatcacctcagataaacctttgtgacctaacctaatacatcatatgcagatcatgaatactttcagaaaagaatcatttcatatgtcaaggacatagtatctatgtgaataaaatgtgtgcttaaatgtctcactgtaaggnnnnnnnnnntcagtcaggcttcatatcaattagacaacttttactaaatgagaaaactacattttaaa

SEQ ID NO: 121145 - DNA, 1250 bp, Homo Sapiens
ttttttttaaagaaacaatgattaggtttatttgcatgtgccaggaaatatcctacatttattgttacaaaaaccatgttatcacgttagtgtggaattctttagaagcaccggctaaataagctttagaaatggaatgccttcaatggctcaatctcagaaatggcaaaattctaggacacatcaagacctgctcttccgctttccactagttcccaatctttgatttccaggttttggccctttcaaacccattttttgcgtttctgaaatcaagaatagcttgagaaatctcttcattggtgttcatcacaaatggaccatgttggataactggttctcttaatggctccccagcaattaagacaaagtggcttctcttgggatccttgttctccacctggacactgtcaccttctccaagcactgctgtgtgatgaggttctattttttgttgtgcatcatcgggcccaatatacacatctccagatatcgtgtaaatgaagcttgtccaccctttagggataggttgggaatgtttggctcctgggtccaatttgaagtccaaatataaggttggtgtgcgagtgtaaaccttggactttattcccagggcttctccagaaatgacagcaactgtcacaccatccttactgggtttagggatttcttcacttttcagttcctggtactgaggctccaccatcttctctgagctcctcaaattaacccacagttgtaggccatgggctggctcctctgagcaaggcatctcagcgtgcagaatgccccggcccgcagtcatccactgcaaatctcctgggttcattttaccagtgtgtccacagaagtcttcatgggccatgctgcccccttccaggaggtaggatactgtttcaaaacctcgatgtggatgatcaggaaatcctcctggtctacctcctttaaattcatcaaacagtaaaaacggatccagattttttaactcgggtctgccaatgcttctccggaccctcgctccaaccccttccgactgctcccggctgagcactgagagagtaactttcttggaggaccccatatcggagtctaaaaagagagtgttctgatgctgagctgtagaggatggaggggctgcggtagcggcacctggagccttagcggcgggggtgacgcgaagagccgccgggagcgagtgcagggagggcaggttaagagagtgtgggtccagtcgcctcaccgtgactccc

SEQ ID NO: 121146 - DNA, 1408 bp, Homo Sapiens
  misc_feature (723)..(723): n is a, c, g, or t
  misc_feature (773)..(773): n is a, c, g, or t
  misc_feature (776)..(776): n is a, c, g, or t
  misc_feature (808)..(808): n is a, c, g, or t
aagagattcacatttttatattgcattcctgcttaaatgtgaaaaaaatcacactatcatgaacatagtatgtacattttcctattcagttaacacacaaataaataaggttccccctattctaaaaaaaatcacattatacaatcatatatttttttcaatgagatctcattccggttttctgctgccactaacagtaggtatttcatggtcagcctcttttaggatctaccatgtctttatatctttccccacgatgttgttccaggtatggaccccagttagaagctggtctgcagcaacttataaggcgttgaaagatgtttcctttagcctgaattatttttatgatagccataattggaatccaaataatgcagaaaacaatcatacaccagcctaaagcaactccccagtcagggtatggaattgcgccataattaggtctatgaaattgcaccaatgaccagataaatattgcaatcaaaaggataggcgtaattacaaaccagcaagctctccaccatagccagaatatccacctctttgctccaatcatcatttctgtatcctcaatgaaatctgttccctccataaatccagatgattccaactagctccagtatagctgcaattaaatgccccatccagcacagaagtgtcaatcagatgaacccagtaagttccagcctgagtcacacagacgagaccaaggagaaacanaaccaagcagcagcccaaagttatgggaaccctcattttcttcatcactntgngaaataaatcttgaattgttgttgtgatcgtntcaatcgaagcaaactgagaatcgagacccaaagttaaaagcatgaaaaaaaataatatggaccaaaatggaccacctgggagttgggctagagcctctggataggcaatgaatgccaaatcaaaacctgattttacaacttgagaaacttcctttccagatatatgggccatgtgtcccaatatagaaaaaatagcaaatccagcaaacacgctagtgagacagtttgtcaaacaaaccacaatggcatcagagaagcagttgtttttgaacttattgtaagatgatagagcaactaagccaccccaagccactgaaagggagtaaaatatctgagtggcagcatctttccatacctcagcttccttaagttttgtaaaatttgactgggctccaatatagtatgaaatgccttttgaagcaccctccagagttgcacctcgtactaacaggatgagtaggaccacataggggaaaagagctgtaaaatgacacctcagaaggaatgagtgctatagagaggagagaggagtgtactgcccaggtctttgacaggtgtaattctcattcaattaaagtttcagtgttttggttaagtgg

SEQ ID NO: 121147 - DNA, 981 bp, Homo Sapiens
ccctttaatttttcccccaagggggcttcacagcccagcagggttaattttttccccttcccttacccccccaccaaaccctgggaaaatcacagacagcctttttacagctcctctttctcggcccccttcttctggaaggcagtcaggatgtttaagctcttctggagctcctccttcttcccgtcactcatcttgttcttctcaatcagcctggcgatccgtgtcatctctgatgctgggaagtcctccccttggtctaagatcttccccatgatcttcaggtattgctcggcccacttcttctgagtctccttcacacttgagaggttatcttgcccctgcttcaagagggcctggcgggcctccacaccagaggccctgatgaactccccggccagggcgtcgtatacaggcaggcaaccaggcatacctaggtagaccccttgccccttcagccagcgctggatggctccaaccttaactgccccagtgtatgggactgggttctcaaagtccccatcccggaagaggtagaagactgggtagctctctttgtccagcttgtatttctcactcagctccatgttcagcttgtcaccataatctgagatccccacctctgccaccaagagatcatcgctggaagccgagttttcagcaagacgcttgaactcatcctgcttctcaccgtaggggtactgggtgtcgaacttcaccaagacgaacttgcttttgggaatgaccttgtagaaagtgaccgtatccaggggaagggcgcccttggtgtgcaggccgctgccgccatgcggagcggagaggagcaggaagcccaggagaaggggaagcagcggggagagaaatgcggcgcggggcacagcggcagccatatcgccgcggacgcgtgggtcgacgatatcccggaattccgaccgtaccagcctgcttttttaaccagctgttctatattcacatagcttc

SEQ ID NO: 121148 - DNA, 1823 bp, Homo Sapiens
  misc_feature (469)..(529): n is a, c, g, or t
gaagaggagagtgcgcaaataatagacgggcaaatgtctttttcgaggacgcctcgtttttatcagccgtacgcgtgcgagaattgttgtaatatgccgacaacggcggagcacaagagggtttagaaataccgcggtggggaaatatacaaagttcgtgtcacatggcgcggggtagggagagagggcgttcgggtgataagcccgggggagaggctaagggagtggtgccaatcagtttagtggggggggaatgatgcaagggcggggggaagtatacattagagtatttcgaagcctccggtatgggggtgcgcggggtggggtaggagttccaagggagagatagccgtcaagaagttaccatctttggagttttgttacagggaaccgctttgggtaggccgggcgaaaaaatttttgtgaggtagaagaagaaaacgagaggcagaggaggtcgttgagccannnnnnnnnnnnnnnnnnnnnnnnnnnnnnnnnnnnnnnnnnnnnnnnnnnnnnnnnnnnnccggacgaccgaaggggaatggtttaagaaaagttttttgaggaaccggggacggcagacaaaggggtttgttaggttgagatatggggtgttcttctgggcggacaaagggaggtttagtacgtggggtttaaccaaaacactgaaactttaattgaatgagaattacatctgtcaaagacctgggcagtacactcctctctcctctctatagcactcattccttctgaggtgtcatttcaccagccacctgagtaagtgctccagctatccccagaccagctagagacatcccaagcatggtcatgttagcatcaatgtccaggcatactcagggctcagaatcgtgggttagtaccacttttcccactacccccttatattccacaagggactcacagccagcaggttaactctcccctccctacccccaccaaaccctggaaaatcacagacagcctttttacagctcctctttctcggcccccttcttctggaaggcagtcaggatgtttaagctcttctggagctcctccttcttcccgtcactcatcttgttcttctcaatcagcctggcgatccgtgtcatctctgatgctgggaagtcctccccttggtctaagatcttccccatgatcttcaggtattgctcggcccacttcttctgagtctccttcacacttgagaggttatcttgcccctgcttcaagagggcctggcgggcctccacaccagaggccctgatgaactccccggccagggcgtcgtatacaggcaggcaaccaggcatacctaggtagaccccttgccccttcagccagcgctggatggctccaaccttaactgccccagtgtatgggactgggttctcaaagtccccatcccggaagaggtagaagactgggtagctctctttgtccagcttgtatttctcactcagctccatgttcagcttgtcaccataatctgagatccccacctctgccaccaagagatcatcgctggaagccgagttttcagcaagacgcttgaactcatcctgcttctcaccgtaggggtactgggtgtcgaacttcaccaagacgaacttgcttttgggaatgaccttgtagaaagtgaccgtatccaggggaagggcgcccttggtgtgcaggccgctgccgccatgcggagcggagaggagcaggaagcccaggagaaggggaagcagcggggagagaaatgcggcgcggggcacagcggcagccatatcgccgggttcctgcagagggaggtaggtaagcgacctcgtgcc

SEQ ID NO: 121149 - DNA, 804 bp, Homo Sapiens
cccagaccagctagagacatccccaagcatggtcatgttagcaatcaatgtccaggcatactccggcttcagaatcgtgggttagtaccacttttcccactacccccttatattccacaagggactcacaagccagcaggttacctctcccctccctaccccccccaaaccctggaaaatcacagacagcctttttacagctcctctttctcggcccccttcttctggaaggcagtcaggatgtttaagctcttctggagctcctccttcttcccgtcactcatcttgttcttctcaatcagcctggcgatccgtgtcatctctgatgctgggaagtcctccccttggtctaagatcttccccatgatcttcaggtattgctcggcccacttcttctgagtctccttcacacttgagaggttatcttgcccctgcttcaagagggcctggcgggcctccacaccagaggccctgatgaactccccggccagggcgtcgtatacaggcaggcaaccaggcatacctaggtagaccccttgccccttcagccagcgctggatggctccaaccttaactgccccagtgtatgggactgggttctcaaagtccccatcccggaagaggtagaagactgggtagctctctttgtccagcttgtatttctcactcagctccatgttcagcttgtcaccataatcttgtagaaagtgaccgtatccaggggaagggcgcccttggtgtgcaggccgctgccgccatgcggagcggagaggttatcttgccctgcttcaagagggcctggcg

SEQ ID NO: 121150 - DNA, 401 bp, Homo Sapiens
  misc_feature (139)..(139): n is a, c, g, or t
ttttttttcctgaccaggcaactttattgtgaccccgaggtggggctcttcactgggggcctcctgaaagtggagagttgggggtgaggggctctcatgttgcccccgcaacacccctggttgcattcagacacaggtnggaggggctggacaggggcaccctgtgcctgcagcacagcccagggaaggcccactttgcaccgtgccccccaaggcgtggctcctcatttcttgaatcctggcttcttggctctgggtgtggctttggcctttttcacagggctcttgtctctaacgctggctcttatttcctcttcttctttttccagcttttttttcttagccacgctcgcctgcttctggggcaccagccttttgacttgtttgacagggctttgctc

SEQ ID NO: 121151 - DNA, 1664 bp, Homo Sapiens
  misc_feature (793)..(793): n is a, c, g, or t
  misc_feature (950)..(983): n is a, c, g, or t
  misc_feature (1587)..(1604): n is a, c, g, or t
ggggagggggtgtgttgcaggggtttccaagcccagcaccagcacccttgcccttttccatcaggggttcagcctagggtccccgctggtgggcggctcccgagtcttggagaagagcacgagaacctagaccgcccccgaagtgcggagaccccctgggcaggctgaaagatggcggcggcgtctgtctctgcggcttctggttctcacttgtcgaacagctttgctgagccatcaaggtctaatggaagcatggttcggcattcttcatctccatatgtagtatatccttcggataagcctttccttaatagtgatctacgacgctccccaagtaagcctacacttgcctatccagaaagcaacagcagagccatattttctgctcttaagaatcttcaagataagattcgacgcttggaacttgagaggattcaggcagaagaaagtgtgaaaaccttgtctagagaaacaattgaatataagaaagtactggatgaacagatacaagaaagggagaattcaaagaatgaggaatcaaagcacaatcaagaactgacatctcagttgttagctgcagaaaataaatgcaatctattagaaaaacaattggaatacatgcgaaatatgataaagcatgccgaaatggagaggacatctgtcttagagaaacaagtttccctagaaagagaacgacaacatgatcaaacacatgttcagagccaacttgaaaaattggatcttcttgaacaggagtataacaaacttaccacaatgcaggcccttgcagaanaaaaaatgcaagagttggaagcaaaactccatgaagaagaacaggaaaggaaacgcatgcaagctaaggcagctgagttgcagactggtctagaaacaaatagacttatctttgaagataaggcaactcccgtgtgttcccaatgcaagaagaattnnnnnnnnnnnnnnnnnnnnnnnnnnnnnnnnnngttctaggaactattttggtgcacaaccacattatagattatgcttgggtgatatgccatttgtagctgggaagtccacaagccctagccatgccgtggtagccaatgttcagcttgtcttgcatctaatgaagcaacacagtaaagctttgtgcaatgatcgagtcatcaacagtattcctttggcaaagcaagtatcttcacgaggtggtaaaagtaagaagttgtcagtaacacctccctcctccaacggtattaatgaggagttgtcagaagtcttacagactttacaggatgaatttgggcaaatgagctttgatcaccagcagcttgcaaaacttatccaggagtcgccaaccgttgaactgaaagacaagttggagtgtgaattggaggcattagtgggaaggatggaagcaaaagccaaccaaataactaaagttcgaaaataccaagcccagctggagaaacagaagttagagaagcagaagaaggaattaaaagctaccaaaaagactcttgatgaagaaggaaacagcagcagccgttctggaatcacagggaccacaaataagaaagattttatgaaactgagacctggagnnnnnnnnnnnnnnnnnngcctacagccgcggccgcaagcttattccctttagttgagggttaatttcggctaggcac

SEQ ID NO: 121152 - DNA, 807 bp, Homo Sapiens
gtgagcataaagctgtttatttcacctgggtgcaggtgggctgagtccgaaaagagagtcagcgaagggtgatggattatcattagttcttataggttttgggttaggcggtgaagttaagagcaatgttttgtgggcagggtggatctcacaaagtacattctcaagggtggggagaattacaaagaaccttcttaagggtggggaagattacaaagtaccttcttaagggtgggggagattacaaagtacattgatcagttagggtggggcaggaacaaatcacaatggtggaatgtcatcagttaaggctatttttacttcttttgtggatcttcagttactttaggccatctggatgtatacgtgcaaatcacaggggatgcgatgcttggcttgggctcagaggcctgacacatagggcccttttccctagcaatcttaaagatactgtcttagtctttggtgccctaagattcatcccaaatcgagttggttaccctgatacaaccgttcatataaaactagactaaaataccttgtcaaatcaatcatcttggtttccaggctctggtttttaacctttccactaaggtgactttggctcttacctgctctctcacccattatcagttgatcagattgggaatcaacccctagtgatgcatttcttccagattcttagtggagagctcactgtaacctcctgggctgactgtaacagaaatgtaaatgaatgagacagttcttttcaaagttaaattggaatccttaacatccaggcatttatactcaatgccctcgtgc

SEQ ID NO: 121153 - DNA, 380 bp, Homo Sapiens
  misc_feature (33)..(33): n is a, c, g, or t
  misc_feature (74)..(74): n is a, c, g, or t
cagtgaaatggtaaatacgaactcaactaatangggcgaaattggggtaacggggcccccccctcgaagtgcantctgtcctgctttctttggatgtctgtaagaacaggattcaaaaattattttcaatttctctcttaaactaatatggatatttaccatgataatattagatagaacctattctttgaaaatagagggctgggtcccttgagaatgcactttgtgagatccacccactgcccccaaaacattgctcttaactccaccgcctatcccaaaacctataagaactaatgataatcccaccacccttgctgactcttttttcagactcagcccacctgcacccaggtgaaataaacagccatgttgctcca

SEQ ID NO: 121154 - DNA, 848 bp, Homo Sapiens
  misc_feature (797)..(797): n is a, c, g, or t
  misc_feature (805)..(805): n is a, c, g, or t
cgcataaattgttttactttcagaaaacccagaacctctaggaaattactaaaattatgaagaagttaaattttataagctctttccctcaactttggctaaatgtaaccatattaaaatactgacatagtttttcattatgaaatagaaatgtaaaatggtagctttattttaatctttactcaagagtgatattgaaacaaagctcttactacaacaaccaggttaaaaaaacaaggtgaatcaatgctattgtatgtctgtgaactagaaatttcttacttatggagttatgctcaggaaacaatacttaaaatcttaaactgtaaactcttagcttgtaacattttcatttttcctgtatcttgcatgtttctcagtgccattaaatatattatcttctatttcttcttaaagaactagtgttcataaaaggatcatcatcatcatcctcacttgattcaaaatcaacccctttcgatacttgactctgggacatgattttgctggatgatgtgctggaccacctttgatctgtctttgaagtggtaggaaaaatgtcttcttccacatctgattcatctacctcaatcacctctgaataattcttagtagtgacatttcgggaaggctgctgtcttgtagatttaaaggcatctataatagacatatttctagatgctgacacagcagtctttgagttcctgctacgggtagaagtctccagaccagtgtctgctcttcctctttgagaccctcctctcgatgctgaattctgccctcttccacctcttcgnactcttcnctcggctcttcctttgttggttgctgctgagatgcatcatcaa

SEQ ID NO: 121155 - DNA, 687 bp, Homo Sapiens
agcagaagactaatcatgagggggacaaaggaaagttctggataacaactctgtaataaacccagggtaccatcagttccaactggagaaaggggttccaatggttgtgagaaggcaagaggaaagtgagactggcaaggacctatgacattgttctggactctgagttatcagtaaggtgtgagaacctcagaggagggggtaagtggcactggatacagaaacacaagcaaaataaaaagtgagacgattattaactctaggaaaaattaaaagctgcacaaaaaaggaaatgtaatcactgttgagccaaatagtatgttatgattaatatttctatgactactggaaatttccatttctatactattaatcagaaatgattatgtaactattgaaagaccacagaagtgagaattgagagggtgtttgtaagagagctgaatccttaactaccaggacagagaagcaatagattatctctaaacctgatgaataaaaataacccacatattatttagaaatatgaatataatcaccaaaagaaggagctgaaaatggttgctttttgggattttgattagattgcttgggggcaggtagggcagcatggggaagagactatgtatttcattaaatgccacttgggactatttgattttttttatgggcatatctaactagggt

SEQ ID NO: 121156 - DNA, 560 bp, Homo Sapiens
aaccctacaaaatgctactattcatcatgtcttatttaaggtagccttttattctgattaattaagatacatctttaagggttattctggtggtaagaacatttatcttgacttatgtttaatttttttaatgctttggcagatgaagtaacgtttgaaaactgtttgtgaaaatagtatgagactggaaagattacgtcgtggtaaaagtttcacagttttccaggtatttccttatactgaagaggccttgaggcaaattcaacattctggaagcccagactgacaaagcaaaacagattttgatgttgcctttgttgggtcctggaaatgatgctgctgcttggccaggcaggaggaagttttataatccatcaagcttcccagacagtcaaggccggaggtcgctcctgtcctgtggtctgaccctcagccaggccatattactggaagaaagatactaagatttgcttgccaataataatttaagtttttaaataaatatttaagtgccatgtttagcatctatttgtcctggcaacacagcacttgttgcccca

SEQ ID NO: 121157 - DNA, 854 bp, Homo Sapiens
gactgttcatggccatctttattcccagtgctggctatcccaagatactgccaggccacagccaacccccacctctgccaatgtgactgggtcaccaccccatacaccagagcagccttgagccctgccccaccccctgccctgcggaagccaagtccccagctataagaccctgcccctcctggtggcccaggaccctcaaagatgcacacaggggccccagcgaggggcccctccgtcattagccttctcctccaggctgggctgccaagcagcctggagctgagtctgtcccttggacgctgggccacgtcaccttctcctccagaaggcttcacctatgggcgcaggaagtcctccttccgatagcccttcgcctggaagtcacggtggagcttgttgtactgccacaggttggccaggaggctggatgctgcccgggaggacttctcactgtcggggctgtcccgcttcttcttgatgaagatgagctttcggagtccgtcaaaatacagcaggtctcgggcagcgatggggctggccaccaccaggttgttgagcacagctatgatgttgaccagcacctcggctgggggcgacttctcacccacgctgcccggcagcttctcgatcaggtggctcaccaccttcgtggacatctcgtccttgttcctagcgttccgagacaggtttcggatgaggccagtcagtgagcgcagctggtggtggtcggcggtcctgacacggtctagcagggggttcagaatacgctcctgctccagggccaggcggctcagcacccccgcccacctgcggtcgcctgccgtgatgttctgcagcgccccggcggccgc

SEQ ID NO: 121158 - DNA, 1003 bp, Homo Sapiens
  misc_feature (755)..(755): n is a, c, g, or t
  misc_feature (761)..(761): n is a, c, g, or t
  misc_feature (774)..(774): n is a, c, g, or t
  misc_feature (810)..(810): n is a, c, g, or t
  misc_feature (876)..(876): n is a, c, g, or t
  misc_feature (919)..(919): n is a, c, g, or t
gactgttcatggccatctttattcccagtgctggctatcccaagatactgccaggccacagccaacccccacctctgccaatgtgactgggtcaccaccccatacaccagagcagccttgagccctgccccaccccctgccctgcggatgaggccagtcagtgagcgcagctggtggtggtcggcggtcctgacacggtctagcagggggttcagaatacgctcctgctccagggccaggcggctcagcacccccgcccacctgcggtcgcctgccgtgatgttctgcagcgccccggcggccgcctccgtcgtgtgccggttgagctcgcagcgctgcagcagccggttgtacagccccacgatctgggggctccacagccactcgaggcccttggggtccttggacacctccgcgaaggtgagcgcatcggcggcgaggggcagctcgcgcagccgccggctctgcggcgtgaagcagcccacgacctctcccggcggcgcccccccgtcattagccttctcctccaggctgggctgccaagcagcctggagctgagtctgtcccttggacgctgggccacgtcaccttctcctccagaaggcttcacctatgggcccaggaagtcctccttccgatagcccttcgcccgaaagtcacgggtggagcttgttgtactgccacagggttggcaggaggctggatgctgcccgggaggactctcactgtcgggggctgtccgcttcttcttgatnaagatnagcttcggagtcngtcaaatacacaggtctcgggcagcgaggggctggncacacagttgttagcaagcttgatgtttacagcactcggctggggcactctcaccagctgctgganatctcgattaggtgtcacacttcgtgaatccgtcttgttctancgtcgaacagttcggtgagcatcatgaccataaaattcgctccagcgttgtggtaggggggacccacccccagggtcaacagtg

SEQ ID NO: 121159 - DNA, 1384 bp, Homo Sapiens
  misc_feature (66)..(109): n is a, c, g, or t
  misc_feature (157)..(160): n is a, c, g, or t
  misc_feature (164)..(279): n is a, c, g, or t
  misc_feature (282)..(286): n is a, c, g, or t
  misc_feature (288)..(289): n is a, c, g, or t
  misc_feature (291)..(398): n is a, c, g, or t
  misc_feature (400)..(400): n is a, c, g, or t
  misc_feature (402)..(403): n is a, c, g, or t
gggagggggatgcaagaacgttctccggccgtgggcggtttctttgagaagaagcaccacatgtgnnnnnnnnnnnnnnnnnnnnnnnnnnnnnnnnnnnnnnnnnnnngggcggtccccgcggggctctttttgggcggggggcggcccccgccgnnnncccnnnnnnnnnnnnnnnnnnnnnnnnnnnnnnnnnnnnnnnnnnnnnnnnnnnnnnnnnnnnnnnnnnnnnnnnnnnnnnnnnnnnnnnnnnnnnnnnnnnnnnnnnnnnnnnnnnnnttnnnnntnntnnnnnnnnnnnnnnnnnnnnnnnnnnnnnnnnnnnnnnnnnnnnnnnnnnnnnnnnnnnnnnnnnnnnnnnnnnnnnnnnnnnnnnnnnnnnnnnnnnnnnnnnnnnntntnntattacgtaaggttttcttttatttaaaagatcattcacaaaataccatatccatagatttactttctgtcatatagctgaatgtgttaagtgtttggaattccattcttacatttaaaagtcaactggattgcccagcagtttagatgcatgtgttttgttctttatcttatccacattgaagatgtaagtaggtcatctgaaagcatcgggtttgattacaccacataatgcatgtctttctgaagttaagtgttggtgttacacaaatggttcttatctcagaagcagagaagctgacaggtggaaggaaggagagagagttctgtggattgctgaggccttgtaacaagacacagtaggaaaagcccaggatgacggctggtgaccaaatactaagcacattccgctgggtgccccaggccaccctggccctgccatcacctggcgagggcctctttcccaggctcctgctgccggccgcccccaaactgctccccataggacagactgggacttgggtactgaaggatttttcatctgttcacacgcaggcgttcaagctcaaaagcctaacccctagcactcccacataactgctgaaccctgcacatgggaacagtccagtgtgtccccaagatgtggccgcagacctagacagctgcagtcctctactgctatctgaaggttcctgacagctctgcatagtacaatttatcaaaggaaatgagtaaagtgccagattctagacccattttggctctgaactgaaggggaggtgggaagcacagtatctcattatgttgcctatactaggaacagatccacacaacacacaggcaacagggatggggggaaacgctgcgtcagcgccgcagtcagcccagtgcagcaccagcacggacgcgtgggtcgacgatatcccgggaattccggaccgtaccagcctgctttttttaacacggtctatattccatagtt

SEQ ID NO: 121160 - DNA, 1170 bp, Homo Sapiens
  misc_feature (27)..(27): n is a, c, g, or t
  misc_feature (1077)..(1094): n is a, c, g, or t
tcgaatgtgaatatagaccagtggtanaaaaagcaggctgtaccggtccggatatccgggatatcgtcgcccacgcgtccgggagacggcaaatggcggacttcgacacctacgacgatcgggcctacagcagcttcggcggcggcagagggtcccgcggcagtgctggtggccatggttcccgtagccagaaggagttgcccacagagcccccctacacagcatacgtaggaaatctacctttcaatacggttcagggcgacatagatgctatctttaaggatctcagcataaggagtgtacggctagtcagagacaaagacacagataaatttaaaggattctgctatgtagaattcgatgaagtggattcccttaaggaagccttgacatacgatggtgcactgttgggcgatcggtcacttcgtgtggacattgcagaaggcagaaaacaagataaaggtggctttggattcagaaaaggtggaccagatgacagaggcttcagggatgacttcttagggggcaggggaggtagtcgcccaggcgaccggcgaacaggcccccccatgggcagccgcttcagagatggccctcccctccgtggatccaacatggatttcagagaacccacagaagaggaaagagcacagagaccacgactccagcttaaacctcgaacagtcgcgacgcccctcaatcaagtagccaatcccaactctgctatcttcgggggtgccaggcctagagaggaagtcgttcaaaaggagcaagaatgagcctgcggttgggagggaatggggcgtgggggggttagaacaggaccaccagcctggtgagtccctgggcagcccgtcctgcagccgccactcctggggcctggcattgggcctcctcacagcggaaacacagcttgtgaagtgctgtcaagctgttaacaagtggttttagtacattctgggcttgctgtatctatctaggtgctgtagtgcgtatctttcttcgctgttccccatttcctctgcctttctctgtcctgtttcccgcagcctggggtcccgaggaccaggtgccccnnnnnnnnnnnnnnnnnnagattccttggtccttctttaatgccctcgggtttatccccagccttgcacgggggttgtggggcccccctggggc

SEQ ID NO: 121161 - DNA, 1031 bp, Homo Sapiens
cccctgcgtatgtccagaccagtgtggaacagagcgacaagcgaagaagtggacccggagaagtaaacgcccacagcttagtagttccgccaaccccggatgtctaacaccacgtgtaacaggtgaacaggcactcacaactggtgtttcccgcggtgaggagcccaatgcaaggcacagaatgccggcttcaaggacggtctgcccgggggactcaccaagctggtggtcctgctcttaaccccccaacgccccgattccctcccaaccgcagggcttccattctgctcctttttgaacgacttccctctctaggcctggcacccccgaagatagcagagttgggattggctacttgattgaggggcgtcgcgactgttcgaggtttaagctggagtcgtggtctctgtgctctttcctcttctgtgggttctctgaaatccatgttggatccacggaggggagggccatctctgaagcggctgcccatgggggggcctgttcgccggtcgcctgggggactacctcccctgccccctaagaagtcatccctgaagcctctgtcatctggtccaccttttctgaatccaaagccacctttatcttgttttctgccttctgcaatgtccacacgaagtgaccgatcgcccaacagtgcaccatcgtatgtcaaggcttccttaagggaatccacttcatcgaattctacatagcagaatcctttaaatttatctgtgtctttgtctctgactagccgtacactccttatgctgagatccttaaagatagcatctatgtcgccctgaaccgtattgaaaggtagatttcctacgtatgctgtgtaggggggctctgtgggcaactccttctggctacgggaaccatggccaccagcactgccgcgggaccctctgccgccgccgaagctgctgtaggcccgatcgtcgtaggtgtcgaagtccgccatttgccagtctccgctccgagcctcgtgccgaatttaacacccagggcctcgcttacctagctag

SEQ ID NO: 121162 - DNA, 1375 bp, Homo Sapiens
gctagtcaggctggtgttaattcggcacgaggcaggcgtttcctttcattccctcagtgcttctcttctgacctgcatgttgagttctgtattgctggggcttccaacaaaaaccagagtcactgacagagggaacagcagagaccttgttggtattcagctgtgatggatatagagaatcagaggcaccttgttttcacaactaggataaaaatatctgcagggtcctttccattcctatttagagggagtcctggctccatgaccccctcccgagtggactgtccaagcagataggctcacacgagaaacagtgaggctgaaagggggggctatggaagagcggtagggagtccacggagaagatgcagtgaatgcttgcatgcattcacacgtgtgtgtgtcccagctagttcactcctttcgccgtgcgtggtggaggctggcctctctggctgggtgcagtgaatggccagcgggtttcttttctgctgggccaaggcgctttgggggtggagggggtggtgctggtgctgcactgggctgactgcggcgctgacgcagcgtttccccccatccctgttgcctgtgtgttgtgtggatctgttcctagtataggcaacataatgagatactgtgcttcccacctccccttcagttcagagccaaaatgggtctagaatctggcactttactcatttcctttgataaattgtactatgcagagctgtcaggaaccttcagatagcagtagaggactgcagctgtctaggtctgcggccacatcttggggacacactggactgttcccatgtgcagggttcagcagttatgtgggagtgctaggggttaggcttttgagcttgaacgcctgcgtgtgaacagatgaaaaatccttcagtacccaagtcccagtctgtcctatggggagcagtttgggggcggccggcagcaggagcctgggaaagaggccctcgccaggtgatggcagggccagggtggcctggggcacccagcggaatgtgcttagtatttggtcaccagccgtcatcctgagctttatctactgaggcttgttacaaggctcagcaatccacagaactctctctcctttcttccacctgtcagcttctctgcttctgagataagaaaccatttgtgtaacaccaacacttaacttccgaaagacgtgccattatgtgggggaattccaaaccgcatgctttcatatgacctacttacctcttcaaggggggtaagataccgcaccataccccctggtttttttactgctggggcaatccaattgacttttaacatgaaggagaggggattcccaaaactttaaaaacactcctcgttttatgaagcgaaa

SEQ ID NO: 121163 - DNA, 1144 bp, Homo Sapiens
cttgtttgtctttgtcatcacgagctctcctgcttgtgtcgctccttacttcttgtatcttgtgtatactctttgcgttttatagtccttggtttctctctggctgcttttccccggacctttgttcagggaccctggctgtggaaccggccggtaacgccgatgaatgggtactccgtttattgttatcgcccccaccggcttggtgttccctagcccggattcgtgaccctgtgtacgctgacacactcccactgtgttccgtgttgagagcccatgccaggcccaggatgcggctccaggacgcttgcccgggactcaccaggctgtggtccgtgctctaaccccccacgccccattcctctccaaccgcaggctcattcttgctcctttttgaacgacttcctctctaggccctggcacccccgaagatagcagagttgggattggctacttgattgaggggcttcgcgactgttcgaggtttaagctggagtcgtggtctctgtgctctttcctcttctgtgggttctctgaaatccatcgttggatccacggaggggaggcccatctctgaagcggctgcccatgggggggcctgttcgccggtcgcctgggcgactacctcccctgccccctaagaagtcatccctgaagcctctgtcatctggtccaccttttctgaatccaaagccacctttatcttgttttctgccttctgcaatgtccacacgaagtgaccgatcgcccaacagtgcaccatcgtatgtcaaggcttccttaagggaatccacttcatcgaattctacatagcagaatcctttaaatttatctgtgtctttgtctctgactagccgtacactccttatgctgagatccttaaagatagcatctatgtcgccctgaaccgtattgaaaggtagatttcctacgtatgctgtgtaggggggctctgtgggcaactccttctggctacgggaaccatggccaccagcactgccgcgggaccctctgccgccgccgaagctgctgtaggcccgatcgtcgtaggtgtcgaagtccgccatttgccgtctccgctccgagcctcgtgccgaattcgccacccaggcctcgctaccttataaccgttagagtacttgca

SEQ ID NO: 121164 - DNA, 1367 bp, Homo Sapiens
ggtcaagggagcccgacctcccctttaaataggaaatggaaagggaccgtgcagatatttttatcctagttgtgaaaacaaggtggcctcggattctctatatccatcacagctgaataccaacaaggtctctgctgtcccctctgtcagtgactctggtttttgtgggaagccccagcaatacagaactcaacatgcaggtcagaagagaagcactgagggaatgaaaggaaacgcctgggagttgggccagtgtctaaagtaaagagaaagcaaaggaaaaatgacgcagcaccgcagcccaaacgcccccccacggcggccacctctgctcctccgaggaagaaagaaaaaaacgcacaaacaggcactagatagatacagcaaagcccagaatgtactaaaaaccacttgttaacagctgacatgcactcacaagctgtgtttccgctgtgaggaggccaatggcaggcgcaggagtggcggctgcaggacggctgcccggggactcaccaggctgtggtcctgctctaaccccccacgccccattccctcccaaccgcaggctcattcttgctccttttgaacgacttcctctctaggcctggcacccccgaagatagcagagttgggattggctacttgattgaggggcgtcgcgactgttcgaggtttaagctggagtcgtggtctctgtgctctttcctcttctgtgggttctctgaaatccatgttggatccacggaggggagggccatctctgaagcggctgcccatgggggggcctgttcgccggtcgcctgggcgactacctcccctgccccctaagaagtcatccctgaagccagaattgaagtcatcccgggaatcccatccacctctagattctcgagagctacccattcctctgtcatctggtccaccttttctgaatccaaagccacctttatcttgttttctgccttctgcaatgtccacacgaagtgaccgatcgcccaacagtgcaccatcgtatgtcaaggcttccttaagggaatccacttcatcgaattctacatagcagaatcctttaaatttatctgtgtctttgtctctgactagccgtacactccttatgctgagatccttaaagatagcatctatgtcgccctgaaccgtattgaaaggtagatttcctacgtatgctgtgtaggggggctctgtgggcaactccttctggctacgggaaccatggccaccagcactgccgcgggaccctctgccgccgccgaagctgctgtaggcccgatcgtcgtaggtgtcgaagtccgccatttgccgtctccgctcccctcgtgccgaattcggcgcgccgtgacttcatactc

SEQ ID NO: 121165 - DNA, 936 bp, Homo Sapiens
tttaaataggaatggaaaaggacccctgccagatatttttatccctagtggggaaaacaaaggtgcctccggattctctatatccatcaacagctgaataccaacaaggtctctgctgttccctctgtcagtgactctggtttttgttggaggccccagcaatacagaactcaccatgcaggtcagaagagaagcactgggggaatgaaaggaaacgcctggagttgggccagtgtctaaagtaaagagaaagcaaaggaaaaatggacgcagccccgcagcccaaacgcccccccacggcggccacgtctgctcctccgaggaagaaagaaaaaaacgcacaaacaggcactagatagatacagcaaagcccagaatgtactaaaaaccacttgttaacagctgacatgcactcacaagctgtgtttccgctgtgaggaggccaatggcaggcgcaggagtggcggctgcaggacggctgcccggggactcaccaggctgtggtcctgctctaaccccccacgccccattccctcccaaccgcaggctcattcttgctccttttgaacgacttcctctctaggcctggcacccccgaagatagcagagttgggattggctacttgattgaggggcgtcgcgactgttcgaggtttaagctggagtcgtggtctctgtgctctttcctcttctgtgggttctctgaaatccatgttggatccacggaggggagggccatctctgaagcggctgcccatgggggggcctgttcgccggtcgcctgggcgactacctcccctgccccctaagaagtcatccctgaagccagaattgaagtcatcccgggaatcccatccacctctagattctcgagagctacccattcctctgtcatctcctcgtgccgagaatacgccacccaggcctcgctaccta

SEQ ID NO: 121166 - DNA, 2041 bp, Homo Sapiens
  misc_feature (33)..(33): n is a, c, g, or t
  misc_feature (70)..(124): n is a, c, g, or t
  misc_feature (270)..(415): n is a, c, g, or t
ggtagtcgtggcgcttgcgcgagatgactgaanccggtgtggcggcgcaagcggtggcgtgaatacaaannnnnnnnnnnnnnnnnnnnnnnnnnnnnnnnnnnnnnnnnnnnnnnnnnnnnnncagcgcgcggcaacccggccagcgatcgcaggcgaggagaaatacgcgttcggagggggggcacgcgatcacagatgagcggggtgggggctacacatcgcgccgggatacgcgggggcagcgggcatccggtcggcactttagannnnnnnnnnnnnnnnnnnnnnnnnnnnnnnnnnnnnnnnnnnnnnnnnnnnnnnnnnnnnnnnnnnnnnnnnnnnnnnnnnnnnnnnnnnnnnnnnnnnnnnnnnnnnnnnnnnnnnnnnnnnnnnnnnnnnnnnnnnnnnnnnnaccaccccctccgcccccaaagcgccttggcccagcagaaaagaaacccgctggccattcactgcacccagccagagaggccagcctccaccacgcagggggaaaggagtgaactagttgggacacacacacgtgtgaatgcatgcaagcattcactgcatcttctccgtggactccctaccgctcttccatagccccccctttcagcctcactgtttctcgtgtgagcctatctgcttggacagtccactcgggagggggtcatggagccaggactccctctaaataggaatggaaaggaccctgcagatatttttatcctagttgtgaaaacaaggtgcctctgattctctatatccatcacagctgaataccaacaaggtctctgctgttccctctgtcagtgactctggtttttgttggaagccccagcaatacagaactcaacatgcaggtcagaagagaagcactgagggaatgaaaggaaacgcctggagttgggccagtgtctaaagtaaagagaaagcaaaggaaaaatgacgcagcaccgcagcccaaacgcccccccacggcggccacctctgctcctccgaggaaccccatgtgctgctgggaaaacaaggagcaggagaaaaaggacagaaggaaaatggggaagcagcggaagaaagaaaaaaacgcacaaacaggcactagatagatacagcaaagcccagaatgtactaaaaaccacttgttaacagctgacatgcactcacaagctgtgtttccgctgtgaggaggccaatggcaggcgcaggagtggcggctgcaggacggctgcccggggactcaccaggctgtggtcctgctctaaccccccacgccccattccctcccaaccgcaggctcattcttgctccttttgaacgacttcctctctaggcctggcacccccgaagatagcagagttgggattggctacttgattgaggggcgtcgcgactgttcgaggtttaagctggagtcgtggtctctgtgctctttcctcttctgtgggttctctgaaatccatgttggatccacggaggggagggccatctctgaagcggctgcccatgggggggcctgttcgccggtcgcctgggcgactacctcccctgccccctaagaagtcatccctgaagcctctgtcatctggtccaccttttctgaatccaaagccacctttatcttgttttctgccttctgcaatgtccacacgaagtgaccgatcgcccaacagtgcaccatcgtatgtcaaggcttccttaagggaatccacttcatcgaattctacatagcagaatcctttaaatttatctgtgtctttgtctctgactagccgtacactccttatgctgagatccttaaagatagcatctatgtcgccctgaaccgtattgaaaggtagatttcctacgtatgctgtgtaggggggctctgtgggcaactccttctggctacgggaaccatggccaccagcactgccgcgggaccctctgccgccgccgaagctgctgtaggcccgatcgtcgtaggtgtcgaagtccgccatttgccgtctccgcctcgtgcggaattcgccacccaggctcgctccttgac

SEQ ID NO: 121167 - DNA, 2172 bp, Homo Sapiens
  misc_feature (315)..(324): n is a, c, g, or t
  misc_feature (522)..(557): n is a, c, g, or t
  misc_feature (587)..(649): n is a, c, g, or t
tttttctcctgtagcgcccccgcggtgtttataaataatttttgtgccgcaaggcggtggtagtgtcccgccgcgtgaggggccgtcagagagggttttttcggtcgcggccggcggcggcgacgtttaattgtgtcgctccgtttttgtgggtgtccgcccacgctgcgatgtaggcagggggctctgtggtggagaggggtgtcggttgtgatagattggggccgcgcccctgtgagaggggcgtgttataagatagttttctcttcggctgggggggatgggtgttgtctccgcaccctagtgtgtgtcctnnnnnnnnnntcgcgatgtttagtgaggtgtctctctttttcctcacaaggtggtgccccacgcttgtgcctgcgcgctgtgttttgctcccctgggcagcgacggtgttgtttttataaaagcgcgcgcgcccctcttgctcgctctgctggttttatataatagcgcgctcccctatatgtggggcgcccccgttgtgcaaaaaannnnnnnnnnnnnnnnnnnnnnnnnnnnnnnnnnnnagtttcttggggggcggcggcgccctctcnnnnnnnnnnnnnnnnnnnnnnnnnnnnnnnnnnnnnnnnnnnnnnnnnnnnnnnnnnnnnnnaaaatccttctacagtgattttattataaatatgttcttttggaataaacaaatattgcattcaagactatgggcaaacttgctctaaagtaacaaacgaggaagaaaggaaccaggaaccatttagaagtggagaaaaacacagcaaagacacctgcatgccacgctcagcgcctttctcccagggagtaacagaaggttaacagggaacatcacattgcccatgagcccattctactcaaataagctttgagtttggtaatttgcacttgttttgtaaactgaactgctcctctcctcagccgcaagaagcagataggaagacagtcttcagaccccgagcatcagcaagaacactcttgattgtgtatctgtaactctgttccagggcaaaactgttccctatttgctggaagtaatgtcagagtaatccttcagcactccagccaagtgttcgttatgagtcttaaagcgtcgctttttctgtgaagcaggctttttccttctctgaataggggccactttctttggtccagattcctgcatggaagaaataccctgtcgcttcagatattcttcaattttctcctcgtccatggaatctacagtgacactcctccacagtttctgaaattcttcatccacagaaaactgacagctcttatcattgaagaaaagtattttcttcttatcgggacgatttacaaatagtatctggtcccccaaaagccttgacagctttctgggaattgggcagtgcttcttctatgtcttctaaaagaattcctcctaatcctcgctggtcatgctgatctaagagcctaagtagggccttcttatctctcacgttgtacttgggcttgaaagcatacttcccatctattacttcaattttgggattgttgactaaagcctcagtcattagccattgtttctgcttgagtccaatatctaaatgttgtgtttcatccaaaatttcatctaaggttagaggatgcgtatctcctcgctgatgccgtgtcttcatgtaattcacaatcttagcaagaacaccaaacttatatccagagcttcctgacaaagctttcaagttaaatgatccattgctatgatcagaattttgtttagagcctgacgatcctccatgttctacctttgttttcttcttctttgacgatgatgatgatgactcagaagatgctgaacgtttttctactacaggagtagaaagagctcgttttttgaacagctccctttctctcaacaggcttggatccataatgctgagtgagaagggcagcctcgcacgactcgccgcccccttcctgcgcctccgcctcggccggccgcccacgccggcactgcaccctcttcctgcttctcgtcagcgcccccgcctgcccgcacgcacgcccagcgctgacccgccaggtcggggtctcaccactggcggtgcggcggcggcgcgcagcgcgtagctgagcggcgactgacccgggaccctcgtgccataacacgcgcgg

SEQ ID NO: 121168 - DNA, 905 bp, Homo Sapiens
  misc_feature (663)..(663): n is a, c, g, or t
  misc_feature (718)..(861): n is a, c, g, or t
gaacaggaaaattaaagatcaattttattcataaactagaagtaagcatcctatgaaaaaatgattaactaggtccagtgttatgtaactcaaataacacatgatgaatacattagttttattccaggaatgaaagagaatgtttacattttaaaatccatggcaacatttaccacattaaaatattaatggagaaaacagtctcagaagcagaaaatacaatacttattcatgataaaataaaatcttaaaacttaaacatgataaaattaccaatcacttatggtcaaaaaaattaatatactcatggtaaaacacaaactttaaatatcaaaggaaaacaaattttttcaacttgataaagaataaccaccaaagacaataaatatcattccttgtgttgaaacatcagatgcatcacctttaaaatcacaaatagtataaccaccactatttaaccacttctatttaactttctggaggacctagacaaagcacaaatataagaaatacaaataaaaatttttagaattgaaaaatgaaagtcacaactattatttttcacagatgatactacttacaaagaaaattcccaaaaagcctatagacaaattatagaaacagggggtttagcagaaacactctatttctgatcaacttgtnagtaatcaatgcatatctatacaatagcaactaacaaaacacattttttaatttnnnnnnnnnnnnnnnnnnnnnnnnnnnnnnnnnnnnnnnnnnnnnnnnnnnnnnnnnnnnnnnnnnnnnnnnnnnnnnnnnnnnnnnnnnnnnnnnnnnnnnnnnnnnnnnnnnnnnnnnnnnnnnnnnnnnnnnnnnnnnnnngttaataagtacaacatagcatatgagagatatgtaagataggc

SEQ ID NO: 121169 - DNA, 603 bp, Homo Sapiens
  misc_feature (51)..(51): n is a, c, g, or t
  misc_feature (62)..(62): n is a, c, g, or t
  misc_feature (169)..(169): n is a, c, g, or t
  misc_feature (365)..(377): n is a, c, g, or t
ttatgtcgtccttccttcctctcacacttattggtaaacaccacaacaggnttctccaaatnctcccatgctgggtttggtagattttatgcccacataaccaaacttgtggtatgctatttggccctgccataacatttgacataatacaaaatataaagtcataggngaaacttccggatgctgtcccaaaccgtggaatattcaatttagatctcctgaacctcaagaggacagatgacacacaacctgtatggatccagctcttgagcagcagcagcacatagctacactgattaaaagattaaaaaaactgtctcaagttgtctgtgtcggtatcccaatgtttgtttaacttcactagnnnnnnnnnnnnngccagtttggttaaattgaacagaatgtggtaactgccaatgctgaatagccactccatgaaaacaagttaataattagaaaggtgaaggggagtatttactggcacagcgctcttcattctctccattttcattacaaaagcaggccttacaatattgatttcattatatgcattatttgccaaattttaaatgtgtcctaattacataataacatgtactgctg

SEQ ID NO: 121170 - DNA, 2708 bp, Homo Sapiens
  misc_feature (52)..(98): n is a, c, g, or t
  misc_feature (191)..(257): n is a, c, g, or t
  misc_feature (803)..(814): n is a, c, g, or t
  misc_feature (2607)..(2641): n is a, c, g, or t
ttatgtccccccccagaagtaaggttcctttacaaagattccaaggtagcannnnnnnnnnnnnnnnnnnnnnnnnnnnnnnnnnnnnnnnnnnnnnntaattcgactccctttaggggcccctttgttcaagaaagctgggtaaaaaataaacttgggccccttgagggattttttagagcggccgcccnnnnnnnnnnnnnnnnnnnnnnnnnnnnnnnnnnnnnnnnnnnnnnnnnnnnnnnnnnnnnnnnnnnagtttccagaatttggctttattttgcagtacagaaatcatttggagccattttgagacagaagtagaggctctgtcaagtcaatactgcattgcagcttggtccactgaagaagccacgcctgagatacaaaagatgcactacacttgacccgctttatgttcgcttcctctccccttctctctcatcaactttattaggttaaaacaccacatacaggctttctccaaatgactccctatgtctggggtttggttagaattttatgcccacataaaccaaacttgtggctatgctatttgggccctgccataacatttgacataatacaaaatataaagtcatagggaaaacttccggatgctgtcccaaaccgtggaatattcaatttagaatctcctgaacctcaagaggacagatgacacacaacctgtatggatccagctcttgagcagcagcagcacatagctacactgattaaaagattaaaaaaactgtctcaagttgtctgtgtcggtatcccaatgtttgtttaacttcactagnnnnnnnnnnnngccagtttggttaaattgaacagaatgtggtaactgccaatgctgaatagccactccatgaaaacaagttaataattagaaaggtgaaggggagtatttactggcacagcgctcttcattctctccattttcattacaaaagcaggccttacaatattgatttcattatatgcattatttgccaaattttaaatgtgtcctaattacataataacatgtactgctgttagtcttccccatagatgtcattcttcttgcgcttcatttcctcaaagtcaaactctgatcctgtcatcctcttatagatgtttttaatgtcatcacacgttgtctcaaaatgagtggtggcatcatatgtgcgggaaataaagatctggctttctgttcccaagtcttttggtaccaggaggtcactgatgctaacaaatttctgttcaattggttccaagagctccaaagctggtctgatttccttctcaggctccttggtttccacagttgtactaactatagcaatgtacttcccttgtgctgctacattgtgcgcaaaggagatcatgcagacgtagatatctgactttcgattgacttggttctgtggaataatgatctggcaggagttggcatcattggtgttcttgatggggtggctgaggatgcaaataactctgatcacctggcccactttttctacccgatcttttacgtagctggggtcacagatgagctgcttacagcgagcaatttctccttcagattttacaccaattacttttccattctgtacaatgatttcttcaatgggtttattcagcatataggtacctccataaatagcacttagccttgcaaatccttggggcagttctccaaggccatagagtggataaaggtatgggcttttgccatatcttgccaaagattcactgtaaagtttaattctattaatggtttcataacacggttgatctaagtaatcatcagttctgtaaagtgcaagagcatgaccagtaaaatctataacgtcttgacccaaatcaaatttcttatacacatctcgcattgtggtcttcttaggatcaatgccttcaaaagttcttggatctttttcatcgaagttggcaacatacactaggaatttcctgaagcgacgtttttcaaacaatcccattaggctagatgccagggcttctgcttcagtggaaggaaccttgtagatttttccacccttatagacaaagctcccttcagtcactttaaaatccagatagcgagttacctctgtataaagcagcatcttaaccagctgaccattagccataaggaacttgggaatcaagtcaacattccagtctcttcctctccccattgactcgggtggtgatcctggtattttaaatcttttgtataaatcttccaatggtgttatagatgcactctctcctccgtagtaagggtttcgatccatatgaagaactttcttgccattcactgacattatacctgacaggatacattccgtcaggccggtgcccagcacgatcacgtcgtactcctcattcatggcggggcaggcgcggacgcaggacccgagcaaggaaaaggcgcaggggctccgtgaccaccctacgaggctgggaggcgctcttgggcgcgaaggaaaggggaagagaaagagaggaaaatggagctggcgacaaggcgagaccgaccgccacctcagacgggaagagaagaactgccccggccgtaatggccgaattcccgggcatatgtccggtaccgtcgactgnnnnnnnnnnnnnnnnnnnnnnnnnnnnnnnnnnncgccgccttcctcgctcaatgactcgctgcgctcgtcgttcgcaatacagcgggacgccctatatga

SEQ ID NO: 121171 - DNA, 1004 bp, Homo Sapiens
gtaccaatggatttttttcaaatgggttttatttccaccatatagggtaccctcccaaaaatagccattttaagccttggcaaatcccttggggccagttctcccaaggcccaatagagtggataaagggtatggggcttttgcccatatcttgccaaaagattcactgtaaaagtttaattctattaatggtttcataacacggttgatctaagtaatcatcagttctgtaaagtgcaagagcatgaccagtaaaatctataacgtcttgacccaaatcaaatttcttatacacatctcgcattgtggtcttcttaggatcaatgccttcaaaagttcttggatctttttcatcgaagttggcaacatacactaggaatttcctgaagcgacgtttttcaaacaatcccattaggctagatgccagggcttctgcttcagtggaaggaaccttgtagatttttccacccttatagacaaagctcccttcagtcactttaaaatccagatagcgagttacctctgtataaagcagcatcttaaccagctgaccattagccataaggaacttgggaatcaagtcaacattccagtctcttcctctccccattgactcgggtggtgatcctggtattttaaatcttttgtataaatcttccaatggtgttatagatgcactctctcctccgtagtaagggtttcgatccatatgaagaactttcttgccattcactgacattatacctgacaggatacattccgtcaggccggtgcccagcacgatcacgtcgtactcctcattcatggcggggcaggcgcggacgcaggacccgagcaaggaaaaggcgcaggggctccgtgaccaccctacgaggctgggaggcgctcttgggcgcgaaggaaaggggaagagaaagagaggaaaatggagctggcgacaaggcgagaccgaccgccgcggacgcgtgggtcgacgatatcccgggaattccggaccggtccac

SEQ ID NO: 121172 - DNA, 441 bp, Homo Sapiens
gttaaagtctgtttcttcatagaaatagatattttagatatcttcatagatatttttaagacatgaaatgctgtaacactttactatgtctatgcaaatacacatttaaacaatataggaagatttcaataaccaaactaactgtacaaaaaataaacaaattaactttattacattgctacttcaacttcagtccttacattgatttgttttttaaaaaataccagtttgaaacacattactgaaagtgagtgtacacaataaatagaaaatagggatgcatagtgctggagacattcaaccaacttatcttcatctgttgcctactgttgtagacaaaatttgacacacaattagcattactgaaagagcagccaaactacctcggagaaagtggcaaactactggaaaagtagcttaaagctctggaccactcaccaa

SEQ ID NO: 121173 - DNA, 839 bp, Homo Sapiens
  misc_feature (758)..(758): n is a, c, g, or t
ttttttttgtaaaaatacatcttttaataaacattaagaagtacagcgcacttttattgaggttttacattgtagtttacagcaaatatactatccattgtagtgtatatgtacaagtaaagtaaacttaggtttgttttctctcccatggctggataaaccaaatctgatacatccacatttaaggttgttttccaagttggtttccataaaaggcctttaacaataataggcttttaacaacaaaaaggtatccctcccatcacaatgagagcttgatgagggctcaaaagtgacttcaaaaactgtaaataattattttccttggatggctttaaaaacagctactgatagcaaatcagaaacactaaagaaaaaagacaataaggaaacagctgtttgtctagtgaatccataataaataccaatttgaggctatagattacaaagccaaaatattcttataggaaagttaatgtttatatttacaatcccatggactaaaaaaactgtctaatatcttaaagactgagtctacctttatttaacattgtttatacacaaagacccaagggatggtagaattcttgatccttctggacaaaagcatagtgagaggggactgaaattaacaaaaagggaaaattaacattaatctcaaaattctacccatcgttgtcttaaaatgatcaagactcagctacatctgagaaaaaggaaaaggatcagaagtgaaagaatcagaagccagtattaanaaatcataacttgtgtgcttctactgacggcatttaaaattatacactagatttatcgctataatataactagtgttggat

SEQ ID NO: 121174 - DNA, 824 bp, Homo Sapiens
gggtgttgtttttggtttgttgtgtgtttttctagtgaaatccattgtagttgcatctggattgaagagctttaatcaaaaagtgtattgcaccacagatgaatttgctacagcagttttcaagaatacaatccctatttacaacatggaaggagagctcaagatccatcgctcgtataaagggctatagataccgtcgctaacacagaaagttttatacaagtcaaagtgcattaaatcacttagaatatttattccactcttcctcttaaagctgaaggaaattcaacatgcaggaggaaagcctagtcagtgaagcctccctaaagtgagtacagacctaggaacgggccccacagctacacctgaaactgccgaggagtggggcctggggtgcgtgtgggaccagttcaatggctggagaagccacggaggcagcggacgggcttctgtggaaatgtagctgcctttggctggctgtgagctacccagtcttagagattctttcctggaacagttgaaaaaggaaatcctactttgaaaaaaggctacctcttacccatcaaacttgcagaacagaagagactcctgtttcgtgttcccaccaggtaaatggaaattcgtgttctaaacaagggataactgtctgcaaggaggagccagaggaggaggttagtcactggagaagcggcctctggaaggcagagagcctgagctgggactaaggagatgctgccctgacttggttcttcatggaaatttcgttaggttaaccccggccgtaatggccgaattcccgggcatatgtccggtaccgtcgactg

SEQ ID NO: 121175 - DNA, 2138 bp, Homo Sapiens
  misc_feature (68)..(76): n is a, c, g, or t
ggtgggatatccgtcctttatttcatgtgcaggtgtttgtttggtgggtttccaaaaaccaaccaccnnnnnnnnncccagtttattcatcttttagttcttccaaaattgaaaatatcaagtcctactgctaaggagaaaaaacaaacaaacataaaatccgggacccctccccccttcttctcttaaagtcacagagcacggaaggaactgcagtgggacaggtgggtgcagagaaccagaaggggaggatggcaagataaactccccaaatacttgaaaagctgttcaacagaaactgtgataaatacaggacaatgcaagacaaagttaaaataaggagcagcagtgccgagaggctgtgttgtagatatggcctcccttcctcttctcttttctcatcagggtattctaggcccaaggcatgacttgtcccttccagatctaaatgttgactcctttgagccttcctctacatttcactagaagcggtacatgaggcacaacctgatatatcttccttagatatatgagaaaaaaaagaagacagtggcaattttgccttctatcattgtaccatgtgtgcattgtatggagaaaataaccgagccagggagtatcactgcttcttatgtcttccaaggcagcagatatacctcagaatctgcacgaggcaggaaagcaggaaaactcagacgaaggcaccagcccaatctgcctcactggctcaagctgtatggtttatcacaaccattagcaaatttccgagaaccttgagtattgcaaagataaaacttagagatgtgcggaaggtcatggcagtagggtaggttggaggattgaatgtgctggtcaagaaccatgatacgggtaattaagggtcaccttgtaccactgtcttggaaatacagctttgagacaccaaataagatgtcagaagccatcaatgtcttggcagaaggtgacaggaagagagaagaatgaaacaatatttattaacagcgggagcctcctcctgtcttcaagaacacctcctcccttgccatctgaatggggccattggcacgtgtcctggtgggcctggaattccccgagtagattggtccacacaaatggccccctaaacccataaacacaaatggcaaaacttcaaatgaaaacgaaaggaaaaatacagtttctatgtcatgtaaaattttcaggggttggctggaggaagaatggagctcagggccaaagttcagaagttacttcctctttttcttggggggtgcagagctgtgtctggaaccacggttagagccacggcccgaactgtgcacagatgccttcctcttccggctcatacttcgactttgttcttcttcttcctcgtaacgactttctcggtccgcttttcgggcttcttcctccagttcatcccaatcctttccactctcttcttcactacccaatgactccttagaatagtctgactcttctgcttctgcagtcatttcatttcttgttctttctgtaagtaatgctgcccgagaacctcttcccaaaaggtcctctgcctcatctttctcctcctcctcttcttcctcatcttcattctttaggaaaatccccacattcttcactttcttcttcacagaagtgagaacagtagctgggccatcctcatccacaagcactgtgtcaccaatgaacagggcataggttttctcttctggctttttcccctccttgttagtcaggtctgagaatcctaaattgatgctgaaaaccattcctttcttcagtttgtattgatttttgctattgattactagggagccttcacggaattcaattcccatcccaaaccctaggtttttggtaattttgttcagcagttctggcttctgctttttaaccacgtccatgacagcgttatacacgtcacatatcttcacaccatgtcttaattccttcagcagctcctcttgaagctggagcaaaaagttataattttcttgaacttcttgagaaggatcaaccatcaaagtgcgaacaaggttggagcagtaagacttgaagcgaatacccatggcacaagtgatagccccaaagtgcatatgattcttgtcactcaccacctcgtgccgaattct

SEQ ID NO: 121176 - DNA, 1743 bp, Homo Sapiens
  misc_feature (1665)..(1699): n is a, c, g, or t
aatgtgttaagaaatattagttttatttaaccagttttcacagctgaatatttattctataaaaactttacagattgtacagtttatatatagttcaaactactgaacgaaaaggtaggtcccacagatgcaaaaatactgtaccaatcaatccaagataaaggcagatttacacactgtacagctctccgcgtggccggggaggtggtcagttctaagtataaacttcaaaactgtacaaaaataagaatttgatttcgctcttcatacattcaatatgattgcaagctcagaagcctaactaataataggcatctggagtctggaatcagtacccactcctggaaggagtgcacatgtctatccacacagggcactcttggacaccatactgaactcagtatattgtatagacataaaagcagaggccaagaacattaaatgttgaatataaggtagttcttttttgttttgaaaggagtttttgcatttaatagtgtgccaaaagaattttaacttattaaataaaatatattctaagtgaacctaaaaattacactttataaacataaaaatattttattttggtgaaatacatcaatcatatctgcaaacagaaaaccacaactgtctataaagtagtatttctcacccagcaacaagaagcacttatgtagttatttttcagaaagggtcagaaaaaattatttaaaacccccctaaagggcttacttataacttagatagtcatacttaagctattcagtgattcactaatactgccaaaacaagcttttcttctagagacagtggtttcttcatgttaactgggtatagaactggacgtattttaaaaagaaggaggaaaccaattgatatctcagctatgtatcctaagcatatgtctggtttggggtatgctcctcagcggatttttcatcagaagtatttatcctagaagctaagtcttttgattttgagtttcccgaatctgaggtatctgtacctttcttggagaaaaagccaacgcctcacatcactctgtgtctctacgtggggcagggaggcgaggctggctaatacccctttagattctgtgttctagaaggaagaaatgaggaaaacaaacattattccagacttttctgtcatccaaaaccaataaaacacaattctgttttttatacagtactagccaaagaaaacaaaaattagagcttctaagagcagtctagtgctcacctttatacttttacacctgcgtgtatataagtataaaataatgacgtttggacaaagaagctttgtagttatttattttaaagttacagtactttaaaactcctcgataataaatagcgtggatgttcccagtcctgcttccaagcgtaagctacgggtgagcttgtttcaggctgtgagaatggatcaggggaactggagccggtgatgttctcctgctcagcccgatcccggtgtcaccagtgggcagcccgacactcagaactcatcgatcttcctctgcaagtactttaacatggagtccatcccctgggccgagccccagattttctttagcaccttacactccctttcgttggcctgcttcagctccccggccgtaatggccgaattcccgggcatatgtccggtaccgtcgactgnnnnnnnnnnnnnnnnnnnnnnnnnnnnnnnnnnncgccgcttcctcgctcacttgactcgctgcgctcgtcgttcgac

SEQ ID NO: 121177 - DNA, 582 bp, Homo Sapiens
caagaattcggcacgaggcagcaacctcggctgtatttattgatacaaggaagatcacccgagagtcagggacgtggcggcgaggggccctggaaatctccagataccaaagctggaagggcgtggagtcttctccagttctcctagtttacagatgttgtgacctaggcttacaatgggcctggggtctgaaagcgggacgtgggctgcgggggtcaaagagccggtttggtggaggtcagcgccacagcgcgccgtgccaggaagactttattctgcgcctccgtctgtctctgacgtttgagctcagagatgaggcgtccgtaggagttagccagagccacagtgtacgccatcaggatgctggagatcagcagaaggggcacagcaaaagcctgggtccccaggaagaagaggaaattctgggtggtctcagggaggctggaaatagactcagggatctgggcccagatggacgactgcccccggaatggaccacacagcttagaaggcgggatcaggaagatgctgtaaagcaggggaacgctggagatggccagacccaggagaaggaccaagggg

SEQ ID NO: 121178 - DNA, 1025 bp, Homo Sapiens
ttttgctggagctatgcaagcctttattggggtccgcggggtgtggggtgagtggccaagactggcctctgtctagaaccctggagtctcactggagatccaggttgggggccacctggctgaggaaccatgagacaccaaagatgacgccgagggtcttggggatgtccgggtcgtctgcaaaggcctgggcgccttccaggggcaggtgcaccacctcaatgagctcaccctcctccaccaggcccccacctggaccgctacgctgggcatctgtcacctctgtgtagaacatggtctgtctggagccagtcagtcccactccagacctacgggttgagacagggtctgctgagtcacccacgctggccccgctggccccctggcccttctaccaccctccaacccaccctctccactctgctccctccagccctccagtaggcaggactctgggatgccctctcccacccggattcccacctggtgtgcacgcccgtggcccctcccgcagcagggcatcccttccctgatcacgttgtactcgccaggtggggtgggtgttgtcgatgtgattaaggaccctaaccggtgacttgagctcatcagaagggagagcatcctaggcgggcatggcccgatcacgaagccctccagagggtgtttcaacgccagaaagggagaaattcaggccagtcctgctggccctgaaggggaagcaaccgccatgctgggaagggtcaacagccagcagggaggtgggacccagtccccagccaccaggagctgatttctgccataacctcgtgagccgggtcgtgccgattctggctcgagggcaatcctatatgagtcgataatcgtatcagtcagtgttctgtgtaatgtatcgccacatcaacacatacagcgagataatgtagctggggctatgatgacaccaatatgctgcgccacgcgctcatcggactgttgcatgatatgatcgcacccggaagcgtgcatgggctcgtctctcgaccggg

SEQ ID NO: 121179 - DNA, 711 bp, Homo Sapiens
ccaatctgaagtgggagctatgcaagcctttattggggtccgcggggtgtggggtgagtggccaagactggcctctgtctagaaccctgggagtctcactggagatccaggttgggggccacctggctgaggaaccatgagacaccaaagatgacgccgagggtcttggggatgtccgggtcgtctgcaaaggcctgggcgccttccaggggcaggtgcaccacctcaatgagctcaccctcctccaccaggcccccacctggaccgctacgctgggcatctgtcacctctgtgtagaacatggtctgtctggagccagtcagtcccactccagaccagtatgtggcgacccggcgcagatcagagggggccaagtggtagccacactcctcccaagcctccttgcaagccacttcctccagcgagagcccaggctggtccacgaggccggcacacagctcaactgtcacccccgctgagccgggcagggctggctgtagctcccgaggcccgtcctggtctacagctgctagggaccctgggaagcggcgctccacctcacccgcatacacagctggccggaactgcttcaccaacaccaggctcctccgagaagagttgaataagagaacggtcacgctgtcatgcgtcttcatgaagtcccaggacttctgggcaccattctggcggtaatgcagcgtgagcgggcgc

SEQ ID NO: 121180 - DNA, 361 bp, Homo Sapiens
attgcaggcatgagcgcctagccaggaagctatcttttcttgagttatgaaactttgcaacagttgttcaaattggtgtttgtccttcctatagctttcatattttcaaattaattctgtatggctatataatttatgttttaaaaggcaattctcttgactttggaaatatggaagtctctcctttaacctattcttgttcccattcccagtctcatttgaaatcattccttttattgttagtgtgtgtatttttgttggtgtgcttttaatgcatccaagtatgcatcattttggataaaaaatacatccaaattaagatgttttaacacataggacaaacttgtgcactttttatgcc

SEQ ID NO: 121181 - DNA, 886 bp, Homo Sapiens
  misc_feature (836)..(836): n is a, c, g, or t
  misc_feature (849)..(849): n is a, c, g, or t
ggagaggccaacagatgagggaagccatttttctgcaatggaattaaatggccaagcccaaggactcacagttggaagactggagaagactttttaaaaagatctggatttttccttatgacttggaatccatctttgtcttgtataactaggtcatagcacaccattcatgtcagcagttaacagttttgaattccaaaaaaacctaagtaaatgacatactttttttcctctttttgttctatgggtgggtggggggagcttggagctgtcttaatctgtattctcttgactgaacaataaatttttaaatatatctagtttcctctattaaacacttaaacctggccatcttattaactccttctctctttttaacaaggtaatgttttaaatgtatatagctttaggactagcgaaatggcagcaacaaaaaattgtgagcagttgttactcttttagtttttaaaaaaccttttacattgtaagtacccaatccattctgtcctgacgcagtacagttttgatgttaatgttgctgagatgtccttaattttccgaaccttcatctgcatgtatgtctttgtctctcttgtctaatataagccagttaagatgcttgagacgatcttgctttataaagctaaggttctagctttatgcttttgaaaatgtttacagcactaaatgctagtcagctttcttccccgtagcttgtacactttctttgaaaatcgatctatttgaagaaaaacagccctgtttttctcgtctttggtgttgggggttggggggagcttgttggtgagggaaaggaagaccttttctttgtgtanagagactaaagcncgtcacaggaaactagattaaaactggaaaacaagtc

SEQ ID NO: 121182 - DNA, 1281 bp, Homo Sapiens
tttttccttttttgcaacacgtttattgagaggcagttgtgctccagccttccaggaggtcacagtcttaggggaagcagtgcaatggaggttggaagcaggggaaccctttactgaaggctgagcgctggctggcacactaggcctggcagcactggagggcaggcagggaaagtagggtgggtaacccagcctggcaaatgcacggcagctagaaaacctcttcaggttctggggtggctgggccatgagaggggaggccaggcagggctgtcaaggtaaccggggtcagatcatggagttgcctgccaggctccacaggagtcggggacagaagcagagcaacccagctaccagccgggccctgagctccctcagggtgaccagggaggagctgtgactggctggggaggcagggctggggccgaggttccccaggacgacaggagggagccaaggcactctaagaggtggaagaagaggaccagaagctggtgagtgcatcactggagcccataggagggctcctgactgtcctcaaaagcctcagacctcagtgtccactttctccatccaagaaatggggctgtgatctctgcttatgacagcacaagcttgcacagaagtggaggcgggaaataagcacaagtgtgccttcccagcccggcctgggtccaggcagaacagctgatactggccccagtctgcccacccacccctgctggccaggaggctggcagaaccccagccccacctgcctggagcgcgtttgatttggactcgactgttgtggtgatggaggggggctggatctgtagctaaaaatacctcggagccaagccagctgctcagagcttcctcggaggctgggccgcgctgggcccactgaggaactgggcatgcccacccaggaggtagcacccttacctgctagaggttgagggcctgagtcactcccccttccagtcaccaggaattccttagtgggaggactgtcagagtcaaactaggcctgcccctgccgttgacagaaggaaagattgtccattcggggggtgcccgaacgtcgccccttctccggcccagaacctttttgtaagttacaccctcacgttctgctccttccacttctgcaaactttccagggttgggtaggcaaaaaggcggcttcgctgaggactgtttactgctttggccatttaattccattgcagaaaaatggcttccctcatctgtgcctctcctcgtgccgatttaacaccgaggcctcgtactaagcca

SEQ ID NO: 121183 - DNA, 904 bp, Homo Sapiens
gtcctcaaagcctcagacctcaggcgcacgtttgccatgccagaaatggggctgtgatctctgcctaaggacagcacaagctcgcacagaagtggaggcgggaaataaagcacaagtgtgccttcccagcccggcttggggtccaggcagaacagctgatactggccccaagtctgcccacccacccctgctggccaggaggctggcagaaccccagccccacctgcctggagcgcgtttgatttggactcgactgttgtggtgatggaggggggctggatctgtagctaaaaatacctcggagccaagccagctgctcagagcttcctcggaggctgggccgcgctgggcccactgaggaactgggcatgcccacccaggaggtagcacccttacctgctagaggttgagggcctgagtcactcccccttccagtcaccaggaattccttagtgggaggactgtcagagtcaaactaggcctgcccctgccgttgacagaaggaaagattgtccattcggggggtgcccgaacgtcgccccttctccggcccagaacctttttgtaagttacaccctcacgttctgctccttccacttctgcaaactttccagggttgggtaggcaaaaaggcggcttcgctgaggactgtttactgctttaggtttttttggaattcaaaactgttaactgctgacatgaatggtgtgctatgacctagttatacaagacaaagatggattccaagtcataaggaaaaatccagatctttttaaaaagtcttctccagtcttccaactgtgagtccttgggcttggccatttaattccattgcagaaaaatggcttccctcatctgtgcccctcgtgccgaaattcgacaccccagccttcgtactagccta

SEQ ID NO: 121184 - DNA, 712 bp, Homo Sapiens
gcaaagctcactgctgctttattggaggcaacagcccctactggagcctgtgtcttagcgttcctgggggtcccagggccagccccggcccccacccagctgccctggccctgcctggctcccagcccacttaggggtgagtgtgatggggggaccagtgttcctgtccttggagcccaggcacagcttggtcctgggtttctgggattgggacagggcaagttagtgtggggcaacagagtcccttcgtcctctggagcctggcgcctggttcagccctagaacccaacctgctggatgagactggctgggtcctacgagatgtccatcacagaggccctaggcaagcacagccttgctcctgctcaccctcccatgtgggcccatgtccgtctgtgtggcctggggtcagggcccctgtgactgccttggcctggcagccacatggactgccatcacctaggcccagtgtagccgtaggggtgccgcagcagcaggctctggtggctgggcagcacgtgggtgtggtagtgctccaccatgctgcccacactcacaaacaggacctcgccctccaggtagaacttagagtccttctcaaaaatgcgatagttcctcactttgttagaggtttcgtcccacacaaccaggaccttccccgacttggtagaggagttccgatgcagtagagtccatcctggggctctccccg

SEQ ID NO: 121185 - DNA, 1178 bp, Homo Sapiens
  misc_feature (45)..(45): n is a, c, g, or t
  misc_feature (59)..(59): n is a, c, g, or t
  misc_feature (116)..(116): n is a, c, g, or t
  misc_feature (139)..(139): n is a, c, g, or t
  misc_feature (186)..(186): n is a, c, g, or t
  misc_feature (1055)..(1083): n is a, c, g, or t
ttctccctgtttttgatgtgcgtacattcaccggacgttgactgntcgattatcgctcnttagattgcctgggccagatcgcagagtggagagactagcacttatgccatgcacantccgtagaccccgtcacctgagntgtgtcctgctgtcagttgcttctcatggaaaggtgatgcagatcanggaatacgagagatacagggctcagtccagtggcagggattgctacccaactcaactgagcggccatcactattgctggcatccacaaatccatcattgagtgtgtcaaacagatctgcgtggtcatgttggagactctctcccagtcccccccggaagggcgtgaccatcccgtaccggcccaagccgtccagctctccggtcatctttgcaggtggtcaggcctataccattcaaggacagtatgccattccacagccagatttgaccaagctgcaccagttggcaatgcaacagtctcattttcccatgacgcatggcaacaccggattcagtggcattgaatccagctctccagaggtgaaaggctattgggcaggtttggatgcatctgctcagactacttctcatgaactcaccattccaaacgatttgattggctgcataatcgggcgtcaaggcgccaaaatcaatgagatccgtcagatgtctggggcgcagatcaaaattgcgaacccagtggaaggatctactgataggcaggttaccatcactggatctgctgccagcattagcctggctcaatatctaatcaatgtcaggctttcctcggagacgggtggcatggggagcagctagaacaatgcagattcatccataatccctttctgctgttcaccaccacccatgatccatctgtgtagtttctgaacagtcagcgattccaggttttaaatagtttgtaaattttcagtttctacacactttatcatccactcgtgattttttaattaaagcgttttaattcctttctctgttcagctgttgatgctgagatccatatttagttttataagcttctccctggnnnnnnnnnnnnnnnnnnnnnnnnnnnnnggctcaagaatttttctggattgtcctggacatgtccaaaggggaatattaataccttttcagttcagctccgtaaaaggccggggaatttttcc

SEQ ID NO: 121186 - DNA, 2184 bp, Homo Sapiens
  misc_feature (69)..(69): n is a, c, g, or t
  misc_feature (129)..(129): n is a, c, g, or t
  misc_feature (157)..(157): n is a, c, g, or t
  misc_feature (202)..(203): n is a, c, g, or t
  misc_feature (218)..(218): n is a, c, g, or t
  misc_feature (230)..(230): n is a, c, g, or t
  misc_feature (1008)..(1008): n is a, c, g, or t
  misc_feature (1010)..(1038): n is a, c, g, or t
gtcgatatcgcccttagatgcctggccagatcgcgggagattcttggtgaccatatcatttcagctttnttatctgcaatggagagactagagtttgacatagcaagtgcagtgaccccgtccctgagntgtgtcctgtgtcagttgcttctcatgnaaaggtgatgcagatcaaggaatacgagaggtacagggctcagtnncagtgccaggggatngctacccaactnaaactgagcggcccatcactattgctggcatccaccaatccatcattgagtgtgtcaaacagatctgcgtggtcatgttggagactctctcccagtcccccccgaagggcgtgaccatcccgtaccggcccaagccgtccagctctccggtcatctttgcaggtggtcaggcctataccattcaaggacagtatgccattccacagccagatttgaccaagctgcaccagttggcaatgcaacagtctcattttcccatgacgcatggcaacaccggattcagtgcaggtttggatgcatctgctcagactacttctcatgaactcaccattccaaacgatttgattggctgcataatcgggcgtcaaggcgccaaaatcaatgagatccgtcagatgtctggggcgcagatcaaaattgcgaacccagtggaaggatctactgataggcaggttaccatcactggatctgctgccagcattagcctggctcaatatctaatcaatgtcaggctttcctcggagacgggtggcatggggagcagctagaacaatgcagattcatccataatccctttctgctgttcaccaccacccatgatccatctgtgtagtttctgaacagtcagcgattccaggttttaaatagtttgtaaattttcagtttctacacactttatcatccactcgtgattttttaattaaagcgttttaattcctttctctgttcagctgttgatgctgagatccatatttagttttataagcttctccctggngnnnnnnnnnnnnnnnnnnnnnnnnnnnnnggctcatgaatttttctgtttgtcatggaaatgtaagagtggaatattaatacatttcagtttagttctgtaatgtcaggaatttttcaaaaaaattaaaagatggactggagctttttctttgtgaatagaaactggatgccacagtgattcatgtgggttttattcctcttgtcttgctgttatttttgtaccttttatccctcaaaggacccttcttgggttttgaatggaagcctttattccggttaagatgttttcttctattttaccacttccatctttttttgtggccctcgatcctatttttccctgactccatgcttggttggcccttataaaacttgtgcccaaaagattgaggattagactttcccaggacttacctgtcctaggggagtaggcaagcacttccactagggagggggtgggggaaaggaatgacacatgacatacatggcatacacattaagcagttgatcatatgtctgactgggttccagtttcttgggaatgttggtccccttgttcaggcttgcatattttaaactaaaaatttcagtctattgtttttagtaacttcatttatagtcctccataacaagttagaaggatgtatctgctaccatttattcctataattttagaaagttggggcttgacattatactcatttagtgagagtagatgcaaaaaagtggaggggcaggagaacttctccagacacctcagataaagtccggagcccaaggctttatcttaaccatgtatggtaccccattcattcatcaagaaaaccctcaacagctgggcctgcatggagtgttatatttcaaggtttttcacaggggttacagtaggacagtccccaccccaatcaggcaccaggataaaagcagggacttaaacagcaccccggttcttcagcctgagccatcacatgctatcagtctcctaacctccccctgggccttaagacagggcttgggcagagaagataaatggtgggacaaaaaaatgagttacattgccacctgagaaacctcagaggggaggacccagccttagcctccctcctcccaagtgcaaaatgtgtaaacagagtaaacggaacagaaaagtgcagtctaagtggttttctctcct

SEQ ID NO: 121187 - DNA, 448 bp, Homo Sapiens
  misc_feature (138)..(138): n is a, c, g, or t
  misc_feature (171)..(200): n is a, c, g, or t
ggcacgagggcagagaagataaatgtgggacaaaaaaatgagttacattgccacttgagaaaccttcagaggtgaggacccagccttagcctccctcctcccaagtgcaaaatgtgtaacgagtaaacgaacgaaagntttggccaggtctaagctggttttctctcctgnnnnnnnnnnnnnnnnnnnnnnnnnnnnnnattatttggggataaagaatataaagacaaccctggcttttctattgccttgttgcttgctgaatataaggaatggggtggggcaggaaggggcttgcccttagccacagctctacggctgtgcctcattcatttccacagctgccagtgtccctagagtttatcaggtgaattggtcaggggatcagtctccctcgagcctgacttacggctgggacagccccatctttctgttgattatgtggcgc

SEQ ID NO: 121188 - DNA, 1218 bp, Homo Sapiens
ggaccggtccggaattcccgggatatcgtcgacccacgcgtccgccggcctcccgcccttccccttcccgcccgctccccttttcccctcagtcgcctcgcgcctgcagtttttggctttcacccccaaccagtgaccaaagacttgaccactcaaagtccagctccccagaacactgctcgacatggacaccggtgtgattgaaggtggattaaatgtcactctcaccatccggctacttatgcatggaaaggaagttggcagtatcatcggaaagaaaggagaatcagttaagaagatgcgcgaggagagtggtgcacgtatcaacatctcagaagggaattgtcctgagagaattatcactttggctggacccactaatgccatcttcaaagcctttgctatgatcattgacaaactggaagaggacataagcagctctatgaccaatagcacagctgccagtagacccccggtcaccctgaggctggtggtccctgctagtcagtgtggctctctcattggaaaaggtggatgcgagatcaaggaaatacgagagagtacaggggctcaggtccaggtggcaggggatatgctacccaactcaactgagcgggccatcactattgctggcattccacaatccatcattgagtgtgtcaaacagatctgcgtggtcatgttggagtcccccccgaagggcgtgaccatcccgtaccggcccaagccgtccagctctccggtcatctttgcaggtggtcaggcctataccattcaaggacagtatgccattccacagccagatttgaccaagctgcaccagttggcaatgcaacagtctcattttcccatgacgcatggcaacaccggattcagtggcattgaatccagctctccagaggtgaaaggctattgggcaggttaggatgcatctgctcagactacttctcatgaactcaccattccaaacgatccgatcggctgcataatcgggcgtcaaggcgccaaaatcaatgagatccgtcagatgtctggggcgcagatcaaaattgcgaacccagtggaaggatctactgataggcaggttaccatcactggatctgctgccagcattagcctggctcaatatctaatcaatgtcaggctttcctcggagacgggtggcatggccgagcagctagaacaatgcagaattcatccataatccctttctgcttg

SEQ ID NO: 121189 - DNA, 1379 bp, Homo Sapiens
ggtccggaattctcgggatatcgtcgacccacgcgtccgcgcccgctccccttttcccctcagtcgcctcgcgcctgcagtttttggctttcacccccaaccagtgaccaaagacttgaccactcaaagtccagctccccagaacactgctcgacatggacaccggtgtgattgaaggtggattaaatgtcactctcaccatccggctacttatgcatggaaaggaagttggcagtatcatcggaaagaaaggagaatcagttaagaagatgcgcgaggagagtggtgcacgtatcaacatctcagaagggaattgtcctgagagaattatcactttggctggacccactaatgccatcttcaaagcctttgctatgatcattgacaaactggaagaggacataagcagctctatgaccaatagcacagctgccagtagacccccggtcaccctgaggctggtggtccctgctagtcagtgtggctctctcattggaaaaggtggatgcaagatcaaggaaatacgagagagtacaggggctcaggtccaggtggcaggggatatgctacccaactcaactgagcgggccatcactattgctggcattccacaatccatcattgagtgtgtcaaacagatctgcgtggtcatgttggagtcccccccgaagggcgtgaccatcccgtaccggcccaagccgtccagctctccggtcatctttgcaggtggtcaggacaggtacagcacaggcagcgacagtgcgagctttccccacaccaccccgtccatgtgcctcaaccctgacctggagggaccacctctagaggcctataccattcaaggacagtatgccattccacagccagatttgaccaagctgcaccagttggcaatgcaacagtctcattttcccatgacgcatggcaacaccggattcagtgcaggtttggatgcatctgctcagactacttctcatgaactcaccattccaaacgatttgattggctgcataatcgggcgtcaaggcgccaaaatcaatgagatccgtcagatgtctggggcgcagatcaaaattgcgaacccagtggaaggatctactgataggcaggttaccatcactggatctgctgccagcattagcctggctcaatatctaatcaatgtcaggctttcctcggagacgggtggcatggggagcagctagaacaatgcagattcatccataatccctttctgctgttcaccaccacccatgatccatctgtgtagtttctgaacagtcagcgattccaggttttaaatagtttgtaaattttcagtttctacacactttatcatccactcgtgattttttaattaaagcgttttaattccttaa

SEQ ID NO: 121190 - DNA, 1053 bp, Homo Sapiens
  misc_feature (26)..(27): n is a, c, g, or t
  misc_feature (81)..(81): n is a, c, g, or t
tggaaaaatttacaaactatttaaanncctggattcgctggctgtccagaaactacacagatggatcatgggtgtggtgancagcagaaaaggattatggatgaatctgcattgttctagctgctccccatgccacccgtctccgaggaaagcctgacattgattagatattgagccaggctaatgctggcagcagatccagtgatggtaacctgcctatcagtagatccttccactgggttcgcaattttgatctgcgccccagacatctgacggatcctcattgattttggcgccttgacgcccgattatgcagccaatcaaatcgtttggaatggtgagttcatgagaagtagtctgagcagatgcatccaaacctgcccaatagcctttcacctctggagagctggattcaatgccactgaatccggtgttgccatgcgtcatgggaaaatgagactgttgcattgccaactggtgcagcttggtcaaatctggctgtggaatggcatactgtccttgaatggtataggcctctagaggtggtccctccaggtcagggttgaggcacatggacggggtggtgtggggaaagctcgcactgtcgctgcctgtgctgtacctgtcctgaccacctgcaaagatgaccggagagctggacggcttgggccggtacgggatggtcacgcccttcgggggggactccaacatgaccacgcagatctgtttgacacactcaatgatggattgtggaatgccagcaatagtgatggcccgctcagttgagttgggtagcatatcccctgccacctggacctgagcccctgtactctctcgtatttccttgatcttgcatccaccttttccaatgagagagccacactgactagcagggaccaccagcctcagggtgaccgggggtctactggcagctgtgctattggtcatagagctgcttatgtcctcttccagtttgtcaatgatcatagcaaaggctttgaagatggcattagtgcggacgcgtgggtcgacgatatcccgggaattccggac

SEQ ID NO: 121191 - DNA, 908 bp, Homo Sapiens
  misc_feature (53)..(53): n is a, c, g, or t
  misc_feature (280)..(293): n is a, c, g, or t
  misc_feature (470)..(504): n is a, c, g, or t
  misc_feature (642)..(653): n is a, c, g, or t
cactctagagtgaccaagctgcaccagttggcaatgcaacagtctcattctcncatgacgcatggcaacaccggattcagtggtatggatacctcagtgtttatttctgtaaggtgtagtgcaagagagaggccagtcccaaggtctcagcttgacatctgtttaaaacaaacttcgttatccagcatcctgctggtttaaacttgcctgtctactatggctaagcccaaggaggtaatgtgtttgttaacgtggttttcatttggggtcagttattctnnnnnnnnnnnnnngccctggaaggtttgggggtgaggtttggggatgcttgtcaggcaaagggtaggctgatatttctttgagcccatcctgactgttgcccccttgatatgatcagcaccccctttctatccaccagcaattcacaggcttgggtagagaccatccatttgtgccaaattgtgtagtgnnnnnnnnnnnnnnnnnnnnnnnnnnnnnnnnnnncgtctttggggcttttctgtataaggaataacttgtccgatagggttaggatgagaccaccaaactcattttcacttgtatcttaacaggcattgaatccagctctccagaggtgaaaggctattggggtaatgattnnnnnnnnnnnntctgtagtattctactgttatattaataaactggtgggagtcttgtttcactgcccatgaaccataccagcaacatgcacatggcagagaggagctgagagagcaaaggggtgggcctggagcccccgagggtcccttgatggatctggccaacccccttctaaaaatgatgagacagcagcatagctgagatcaggactaagcttgagtgttagccagctggcctggttcagtccaggtgttgttaaagatggg

SEQ ID NO: 121192 - DNA, 1124 bp, Homo Sapiens
cagactaatgaaaattttaatttatatttttgttaaaatataaaagtagcattaaattatcaaagtctaaattagactaaatataaatgttatacaacccactgaatggatttatagtttgacagtgttccttgcaagtgtctactcatcttccatctttttcctttttttaaatcattctgccccagtcttcacttaatcatcacatgcactttattccatcaaacatcacttctcaggatcattctacctgaagaatcattaagcctgtttagagcttttccagtcttaaaatttgtcatcttgactacacatcccaaggtactacttttctcactttttctggttagccagaatgttccattaagaaacaataaaagttgtatagttctctaagatgaaagattagtatattcaatggctattatattaaccacttagtgaacatacaacaaaaactatccttatattaattgactgaagttataacataagaaataagttacactactactttgtcattcacttaatgcttacaagattactcaagaaatcaaaatggcttcccattgcttgacgtttgttgtccaaatacttcacatttcaatctcatatacctacaaagaggaaaaaatccaaacatactttccttacctaaaaatattaaagaaggctaaaaggcattaggaatttttttaaaccttgaaaaacagtgttacacttccaacatgtatttaagttgtaattcattttctatcctgtggcatagcttcaatttaagtgcatcatagttatattaaatgggtacgtcttcatcttgtcaagtcagacggtggttcttttgcatcaaggctcttattcaaaatgtcttcttcctttaaattaggtagttctccaagactacatgctattgtggttctcaatctttgttccactggagaaaacttaattagtggtgaaagagaccgttttctttcaccgatggacgtgcgtaaagatggctttatatgctcagtatgcaaatcacaggtgtccaaaaagttaagcgtatcatctgtttgtacattttggggagtagctcattctggtttgtgtcttgctggtgggaaggtaccgagctgata

SEQ ID NO: 121193 - DNA, 418 bp, Homo Sapiens
aagagtgagagccagaacggaagtcttggttttatttatagttgataacttacatccggcctgctcctcaggaagcacagcagggaggagacagagcccaaaggagacggcgacaaaaatgcccaaacccctgagctaatgtggtgactgagagcaagcctaaagctcccttctgagctccccagcagccaaagcaaagagagaaacagggtcctgcagcatgatgtcacagaaaaccagggaccctggagcctgggttccaataagaaccttacattctgacgccttagatttctccctggaaaatggggagaaaaatactgaattggttgggagggccatgcaacacacccagcacagtgtctggatgcatttcagaggccccaccagtctagggtctacagaaagacagtacagg

SEQ ID NO: 121194 - DNA, 710 bp, Homo Sapiens
tttatgtcataaaatgggctttaatgttccctcttacaacatggtattactgcttacactggaactggcacacagctcccaaggttggtttactctgaggaatgaagctggtatcccccctggctgcagtgcagctggagcggtcccaggcactgagctcagtataaactttggagtctaaatacccacatctcctgtagttcaccaactttgcagttctggaaccggcagtgcagattctgtgtatgccaagtaaaccagacactgttctgcctctttgtactaactgctctccaaccaccccctactctgcctccagtattactctgctttgtgagatactaaggaatggtctgcctctgcagggcctaaatctcccatacttgcggtttgaatcctctgttctgttttgtatttgctttaaatatcttggaagtgtgacccacgctaacatgacttgccctgtccaggcaactcttggaattcacatctcccacgtttcttcctagctgatggctccctactacgcccaccacagtagggtgattccaaagaactgcatttaggagtgaagacaggagtctgtcttccttctatacccagtcagtccttgtctcgatcactttatctctttaacatgcacatctgcatgtacatagagctctggaaggatcatcttatctgaaggctatgagaacattttctgattc

SEQ ID NO: 121195 - DNA, 877 bp, Homo Sapiens
  misc_feature (757)..(791): n is a, c, g, or t
  misc_feature (794)..(832): n is a, c, g, or t
ttcttttttagaaaaacaagttttctatttatttaaaaataagtttgtagttactacattgcagggacaggtattcttacacatacattctagtttgtataaaaggattcaaagaattatgcatcaaaactaacatagaaagtgtccacgtaacagtaaagaaaggtccaatcagtatgtacaaaaagaaagggcactgctattctggtgtgaaactgctgtttataatatgatactccaggttcggaaggaaaaaaacaaacttcaataaagctaaataattaatttgttttaaaactctgtgttacttattacatacaacagatctgcttgtgtttaaacattgttttctgtacaaaataagcataatcttaatttgaaaatgtgtcagtttcaactttcaccctctaggtcagttactttttaaaaattgagctacattctacacatgtctaaatatcctgtgacaggatttaagttttctaaaagatcttcagtaagacccctgtcttcttgcagttttaatatggtccaaaaatgtaactttgtattgtctcatgttatagtctatcattgtgactaatcaacacacacaatcttaaagtaaccagcatgtgtgcatctgccttatatgcatgtactatattccatcttgaacctattttcttggctccttgaattgtagaaactcagccatgcactaagtcccggccgtaatggccgaattcccgggcatatgtccggtaccgtcgactgnnnnnnnnnnnnnnnnnnnnnnnnnnnnnnnnnnncgnnnnnnnnnnnnnnnnnnnnnnnnnnnnnnnnnnnnnnntatcagcgagtagcgccctatatgatctatcatgctggtcttttt

SEQ ID NO: 121196 - DNA, 444 bp, Homo Sapiens
acagagcaagactctgcctcaaaaataaaaagataaaataaattcctatttgcatttggataacttaggagaacctgtcttccccggtttgctgacggaaagtcaattgtctgaagtactaagctgacattctcagtttttgctttaggtttgggtattcatttaaataataatctcacaaataatgaaatagtttctgggggaaaaattattataaccttatgcccatatctaaccccattcccttgagccctggtcagtgccaagtgccagtagcttggcacaaacattagtgccctgccaaaccccaattcctctcccactcttttctcacatagctcagctggccgcaccttcatggctaaacaacctgagctcttggagatgccctggctcccctctctctgctccttatcacacaaggttctaggcagctgatgaggc

SEQ ID NO: 121197 - DNA, 1502 bp, Homo Sapiens
  misc_feature (1242)..(1242): n is a, c, g, or t
  misc_feature (1251)..(1251): n is a, c, g, or t
  misc_feature (1266)..(1266): n is a, c, g, or t
  misc_feature (1284)..(1284): n is a, c, g, or t
  misc_feature (1291)..(1291): n is a, c, g, or t
  misc_feature (1298)..(1299): n is a, c, g, or t
ttttcaaattttaggatgatttttatttacaaaacagattggtacttttgttttacaaaaattacaaaaaatgactcttaaaaatagaaatagcttctcagactcttgggaactacttttaagcaaccaaggagttagaactcagatggttttcttctttgtaacagcaacaatgaccacggctctgtgccatggcaatcactgctgagtgtcttctcctacaattacacaggcccgagctgtgtctggtggaaaggtctccactcaggtcagagtctgaaggagcaagatcttctcattaatgcagaacctgtgcagaaccaccatcagattctctccacagcgggagacctggcgctccatggccaggcgaaagtcctccttcacgcctttggtgatgcctcgagttacagtgtggtgcctgaggtcagcaatagggaaacagacaaagaccaggggttagcaccagcatcgctgatcgctgctacttgggtaggaataaagcctgccccatatctaagtataatttcagatattttaaaaagaacacaagaatagctgcaacccaccatacattccagcccatttctgcttcagaaagacttaaaactagaccgacatctttctcactctatataagggtacggcaaacatgtaattggtcagtaaaatgccaccttcgttgcctttgaatccatgaagctctggtgttatgcatccctacggctggactggtacaccattcattgacttagggcccaatgggtccagtccacactggctacacagagctcatgtccagcccggccagcagaccctccagaggcagcagcaaggagggaggagacctgaatgagccaagtcaccacaagtgagctcccaccatggcccccgcagctggtgctcccagaaaggttcagggctcctgcacagccggggtcacaagcacgtctctctccccaggacaccagaatagggcagctcctctaaatgctgtgcccatctagactctcatatgttgaagaaaacgcagcgggaggtggggtcctgacacaagaatgtggcacaggtcaggagagagaggcagaatctctgaggggcagagggagtggactgcgtggtcctgcgctgtctgggcactcaggggagacctgcacatgtgtggaaggggtggtggggacacagggaaaaatgtctcttaacctacaccccaaaggttgtgctttagaaaaaggaatcccncctggaatncccgggaaccgaagnaacccaaatggaggaacncgaaagngaaaatnntgcgcaaaatcagtcagctcagttaagaggaagggggagttttacctactagttcagcaatttggtagacttagacaaataaaagtcacctctgtttcccaccctgatgcctaatttccctcacacaaagttataaggattgaaaatgaagatttttttatgttctgggcaagataaaagtgttaaaattactctaaaatgtt

SEQ ID NO: 121198 - DNA, 1792 bp, Homo Sapiens
  misc_feature (211)..(212): n is a, c, g, or t
  misc_feature (215)..(218): n is a, c, g, or t
gtggggggagaaaatccccaaaggccgcttaagtccattggtcccagggagtcttctccttaggggtaaaccaggcttatggccccaagtgttccccttttcccttagtgggggccccgcgcggcccaaagcgaaatagtttttaggaaagcgttcttggagggcccggagggcggcccgaacaaggggggtgtgtttgttggttggtttnntgnnnnggaatttttaggatgatttttatttacaaaacagattggtacttttgttttacaaaaattacaaaaaatgactcttaaaaatagaaatagcttctcagactcttgggaactacttttaagcaaccaaggagttagaactcagatggttttcttctttgtaacagcaacaatgaccacggctctgtgccatggcaatcactgctgagtgtcttctcctacaattacacaggcccgagctgtgtctggtggaaaggtctccactcaggtcagagtctgaaggagcaagatcttctcattaatgcagaacctgtgcagaaccaccatcagattctctccacagcgggagacctggcgctccatggccaggcgaaagtcctccttcacgcctttggtgatgcctcgagttacagtgtggtgcttgatcagcattccttgattgggtagtaattccagatgaattttcccaccttcctgagttctcaagtaggcaaattcctccagcatatcaatatttgtaacgtaattgaaaaaattctcatattggaaatttccttgttggcaaattttattgacagctttcaggaaaagattctcgccccgtggccactcttgctgaagcaacacaatcacatgccccaatgccatgtcgtctctgttgtctgtgaaagctctaagcttaaaacaggctaacattaaatggaggcagtatggcatgatagccttgctggtacaaggcaggagcttcagatccgaaccttttctaaatttgggctttactttcgagggttcctcctgggatttgcctccatcttgaatggggagtaccatgtagcacatcaaatcaaggactttttcacatgtcattctgtactcccctagcgcaaagtggcacgtcgccagctggatgagcgccctctgatgctccagggtcccctgccctgtgatctgtggctgagaaatggatccctggagagctgctaagtgatgcaggctggctatcgcctttttatattgaccctgatagatgatcatatcagtgaggaagattcttaaccaaagccaagtatccgtcttccaggccaagcaaatccttgtaaattctttgtcaaggaattctagggaatagagcaactcccagctctccctggccaatttaaagctttctaacacttcagtggagttagcaagttcggctttattgactacaatgtgacgatttcttcctttcgccgaacagtcttcatcgtctgaactcatggttttttctcttccttcagctagtttcctctttttatggatgtgtttattacgatcaatttctacatcaccatacacattcgatacatcttcaagaagaaccagtggaacttggctcggggcattaggaccttggaagagagatggctgtatgctgttgacatactggaatgcattcttaaagaagaccagcatggtggaatacaccacttggtttttatattttgcatgtgcttcactatcaaagttgttcatgtatctgcagagatccttcattctatgcaaaatatctccatagcttcgtcttcctttatccc

SEQ ID NO: 121199 - DNA, 429 bp, Homo Sapiens
aatatagaatttttggaaattcctcctttcaacaagcagtatacagaatcccagcttcgagcaggagctggctatatccttgaagatttcaatgaagcccaggtgaggagtttctttgtgtaacctaatatagtggcaatgataagagccaacttgctgtgttgagaagaggcctgggaggggttggggaacctggataaagtagccagagatttcaggaactgagaaactgccaaaatgtttttgcatgaaatagaatttttgttgtgtatagggaagagaaggtaggaccttgggttagttaatggctatggttctgttgctgggacaaaagaagattgatgtttatgtttagtagtagaaacccctattagggttgctgatttttagcctgaaaggctgagttcataggttttggttgtccgttga

SEQ ID NO: 121200 - DNA, 1438 bp, Homo Sapiens
  misc_feature (43)..(68): n is a, c, g, or t
aaggtagcgaggcctgggtggcgaattcggcacgaggccgagnnnnnnnnnnnnnnnnnnnnnnnnnnactacaaccaaagagattcaacatttattttatcataaaagttcagcaaataaaactatatacaagatccatgcaaggaatccagttacacacaagacacatttaaaacctggttaaaacacaatctccacgatagcagggaataaaaccagtaagaccaagtatctttagtgagaaacataatcgtgtttatattttggatgctgcttgaatccaattctctccccaacaatgaggcactggatcacccactcttgtgacaccacaggcagctgcaatgcttcagcacacttcagcaccgaggctgggcatgaggggtccgtcaccaccacatcaaatacccctaaagcaatatctttgttatgggcacttgaatggtgctgcttcacagaggctgcaccaccagtcatgaggatctcagaccagagctccaggaagttctgctgttggtctgataccaagagtaccttcagattctggaaaggattttcacggggttgccagtccagaattctttgctcctcaaggctgtacccagctggcaacagataattacggtagttctggagctggttggcatggcaactatcatggacccagacatgagacacacaaggaatcccactggcaaggcacaggaagtacttccgggttcgacaatgctgatccgcaattagaagacactggtaagctgtgttacactgggcttcattgaaatcttcaaggatatagccagctcctgctcgaagctgggattctgtatactgcttgttgaaaggaggaatttccaaaaattcctcctcttcttcactgcttcctgtaggaccatctggcagtttggagcggctggccaacttgtcactggttgtggccatggtaaggagaaatgcgtagcccagaaacaaggtcttgttgagaggcaaaggccctctctgctcttccagggcagagggttcaccggtgttgtctccactctcacaggggctcacaaactctcctgcccctactgcaccaggttttactgtggcagacttgcgacctcgcttggcaggggaccgttcctcttcagaagtgataagttttcttttgcctgagagaactcccatggaggcacgaggactttctgtgatctttcgggtaggggttgtgctgctgctactggaggcagtaggggtggctggggagctgacgttactgcgccgtttccgcttcccttccaccaaattgtctaagctgatatctgctgcctttgtaagaggtgttactgcttcataggggccaagcccatactgctctctcagtctgtttccttgctccaaggacaggatgacagccatcctcgtgccgaattcgccacccaggcctcgctt

SEQ ID NO: 121201 - DNA, 1753 bp, Homo Sapiens
  misc_feature (57)..(65): n is a, c, g, or t
ctgatggcaatgtttttaatgagtctgaattcgttaatgaaggggaaaatttattannnnnnnnncccaatgactcccaagtcctactcgcaaacaaatacattgtagaaaaaagtttaattgctggttattgtttgaatcttgaaatacaattcttcactgatgatactggtataaaatggtggttattaattcatgctagcacaaccaaaactaatttaacattattggtaaaaatgagtcatttttgaatctctattaaaatctgaacacataaacaaatctgtgctaaaactggaactgccttctcactctacatataattaaacttccagcttcaaccatctgatgttgaaatctaaagcacctccatgagttaaatgtccccgacaaaccatgtagatggacaaacaagattggtggtctttaattgctggcgacagaaaaggctgcagtttagtacttaaacctgcagttagtggtcaactttctatccaggcagagtaaactaaggagagctatgaaatatcaaaagaaaactagaggccaggacaaagaggcaatgtcagccaagccactgcaagctggtatgcacccctgtatttcagccaagggcaggcaatccaaaattacacactgctttccttaacttgaccaaacagtgtatttttcctctgaaaatcttgtcaaaggttgtattccattgtacctagtgaaatacaaagtccactctcataaaaatattatatttttcaaaagaaatataatacattgaaaatcactgattgctgcttcttcgtctttttttccgtgaatgtgtaggtgtttgagtctcttgtatttcttcttttacacaggatatgggctgtttgaaaactatttcatcatctttatcatcatcattcagttcagccacttgagattttcgcctctccaaaaatgttggtgtacaaactggtgtggggccctggctatccacagtcttctcaggagtgtcaagagtacctgaaacttttttcttcttcttacgtaaaacctggccttttgtagacgtctgacgattagtttttgaaatactttccgttttctgtaaaatcaaagaaggaaaatcatagtcaattccttttttagctaatttcttcctgagtaatctttctttctttttaaatcgctcctccatccgtagcttttgtgttagtgtccgattccgattataccgtttcactgatggatatgatggctgcttaaatggaatattccagtctttaaagagttctttatgtactttttcaggtggcataaaatgacactccaagagtctttcaccaaacaggtagttgttcattgtttcagcaactattttggcaacatcctcagactcaaactccacaaatgcatagcctttgctatttccagtccttttacttctggacagcctgaaccgtgtcacagtgccaaactgggagaaatatgaaaagatctgggtttcgtcaagtaggttaggtaggtggcgcacatagactactccaggagtaagttgttcttgtttttttcgctgggttatgcgcttgcgaacctgcgccacctccttttgaaactcgacatcttcctgcggattaagcgacaggattggcccagccgggccagaaaaagtcgccatgccaaaagccgccgacgctaaccacgcggcgctcccggaaacccccggccgtaatggccgaattcccgggcatatgtccggtaccgtcgactg

SEQ ID NO: 121202 - DNA, 1259 bp, Homo Sapiens
ttcagattcactacatttgcctggtttttattgagtggatctctcacgacaaaatcatgaatattacactgaaaggcttattacattatctttgtgtagttactctccagtataaaccctgtgatgttccggttttgatgcctgggtaaaagcttaagcatgcacgttacatttgtatggtttcatcaaaaaagtttttgatgcctagtgagactttggcctgcggaaaatctctatcacatataattattataaatgctctttagtatggattctctgatgttgatgaatgtttgaagtcataatggtttcccactctcagtgtttttgtttctctcaagcatgaatttttgcaatattgtacaatgtgagaattgtgccagaagaccttgccacattcattacatttgttaggtttctcaccagcaagaattctttgaagaatcctggtctcagattttaccttaagaccttgccacattcagtacattagtaaagtttctgtcctctatggtctagctaacggttattaagccttgaacaaaaactaaaggctctgctacattcattatacttgcaaagtttttctccagtataaattattgtatgtcttacaaggctttaatgctaactgaacactctgccacattaattacatgtgttagatttctttccggcatgaaatctctgatgacgtacacgatatgaattgtcgcggaagagtttgccacattcattacatttgaaatgtttctctccagtgtggatcgcatgatgattagtgaggcttgaacgcatactaaaagctttgccacattcattacatttgaaaggtttctctccagtgtgaattttccgatgatgtgctagggatgagtttagaccgaagaccttcccacattcattacatttataagctttttctccagtatgaattctccaatgatatgcaaggtatgaattttgactgaagactttgccacattcatcacatttgtaaggtttctctccagtatggattctgtgatgttgtacaagatgtgaattttgactgaatgctttgtcacattcatcacacttataaggtttctcaccggcatgaattatcagatgttgggcaaggtatgaattgcgactgaagaccttgccacattcattacatttgtaaggtttctctccagtgtggattctccagtgatttactaaggatgacttgtgactgaagacttgccacactcattacatttgtaaggttctct

SEQ ID NO: 121203 - DNA, 1080 bp, Homo Sapiens
  misc_feature (915)..(915): n is a, c, g, or t
agcccttggaaattgacactttatttttaagctctattacatataatttccctccccattcccagagatactcaactattatagattattagctaacaaaacaaaaaccagtgaatgttgtaaaaatgttcaagttcagtaagaagctatgttttctagagacaattctagagttcaatttccattgactttgttagattcattggatagagaaatctttagatctgaaggttccacgttccagatgttttgggcatattctttaattgttcggtcactggagaatttccccgaggcagctatgtttttgagtaccattgtgttccaggcctttggattcatgtacagctgactcactttatcttgacacttgacataggcttcgtagtctgcaaagactttaaacctgtcatgataaaatagcatgttgatgatatctttgaagaggtcaggctgcttgggagaaaaaaagccattgtcaatttgatcaatgaccagcttcagctctggaagtgcctcatagtattcttttgcctcgtaccctttcttgtccaaagcagccacatcatctatcctcatgccaaagatgaacaggttctcttccccagcttcttctgccatttccacattggccccatccatggtcccgatagttagggccccatttagcatgaacttcatattgcctgtccccgaggcttcggtgcctgcagtggaaatctgctctgacagatctgtggctggaatgactttttcagcaagagatactctgtagttctccaagaagatgactttcaacttgcttccaaccatagggtcattgttcaccacatctgccactgaagtcgatcagctttatgatcattttggccatgtgatatcctggggcagctttaccaccaatgataactgtcncttggcacggaataacttcttagggtctttcttaatgcggttgtacatcgtgatcacatgcagacagttcagagctgtcgcttgtactcatgtatcctcttcacctggaccggacgcgtgggtcgacgatatcccgggaattccggaccggtaccagcctgcttt

SEQ ID NO: 121204 - DNA, 1055 bp, Homo Sapiens
  misc_feature (700)..(714): n is a, c, g, or t
ttttgctaaatagtattgtttattaaggcttgtattctcctagaggaaaaacccaatgtcgtccaggactccattcaggcagtaacagttcagaggaagtgacacgctctaaatacaagtctaatgatacagctgaaacgttaactcagagggtcttttggagcaagtagttttcagaaagcgtctgctctctaggacggtaaggatcctctacaagggcacgtgcagatccaggcgctggagcgtcaggcatgggcaccattttcatgcttcaactcaaactccaggtggtagtgagctcaacggtccctcattccacaaaacatgacagcaaattcatcttctaaaaaaagttttgttttgtttttacccattcaacaggaaaaaaaattagacacacacgatgaaatttacaaccagcagcatcatccatcacactgtctgtactaccagatcctacacttaaagctcagcattattggtataaaaacttaagacggcattagaattcttaagaaaaggtgtaaaatttaaaaagatgtgcaaacaacaaagaatgcccgaccctgaaccagacctaaagcaccttccagttcctccacacatcatgccccaacaccatccagcccaatcggacaccaggacagtgagggacgggtggctgttcagtgggcaacagatctggaaggaaagattttcnnnnnnnnnnnnnnngtgtctgccaaatttgaaaaattaaaagttatctgtctagcagaaaaatcaaatgggtaaattagcactttagaccgataacagataataaaatgacaaatcagaatgaacaaaaaatcattaaccttttgatttcagtattttcaagagattttatcagaatactctaaatgacaaaatgactcatggtttcttatgtttgctaaaaagcaataaagggatgagaaatatgaagtctcaccgaatatcaaatgactgaatttaagaacacaatttctgccaaaatagatgctttgtttttaaggatacttacatttcacattagatcagtctgattgata

SEQ ID NO: 121205 - DNA, 950 bp, Homo Sapiens
  misc_feature (826)..(860): n is a, c, g, or t
ttcacgtctaatattacaagtagaagtttcaatgatttacttaagtacatctatccagtaaagatttaacactgagatgcgaatctaacaatccgtaataatctgatattaatgtagatggcaatgcaggaaagatgtcttttaatcgcttttgcatgtaagtgaccgtatgtaaaagataaataatttagcagttccaagtatcccaagggcatttgtcaaatgtacataaaagaaatggttacagagatttttaaggagcatcttccatgtccacatcctcttgtaactgctgtaccattttctcttccaactgtttccctttgccttgcaagaggggctcggataagatggatgttttgcttgacttctttgatatcctgaactttctgtagctctttatttttcttcaatctgttcattataaatttagcttggcgcttctgtttgatttcttcaactctcttcatcgcatcaatagttttattccatagctctcgctggtatttgataggttcatttctacgtttttcaaattcaaatgaattatccactgtaagctctttaccagctgctttccggaatgctttggtccacctaactttgcgaggattgcgcttctttttaaagtttttatgacatttagatttgcaaaatctgaacaccttgcaatcgttgcggacgaacatcatgccgtgtccaggatagatgggccccgaacagaaataacacttttcgatacgcatgttgaacccgcgtgtaaccccaccatacccccggccgtaatggccgaattcccgggcatatgtccggtaccgtcgactgnnnnnnnnnnnnnnnnnnnnnnnnnnnnnnnnnnncggccgcttcctcgctcactacttcgctgcgctcggtcgttcgcattacaggcgagctaggcgccctatagttattccaaagttctcttt

SEQ ID NO: 121206 - DNA, 935 bp, Homo Sapiens
  misc_feature (813)..(847): n is a, c, g, or t
  misc_feature (851)..(893): n is a, c, g, or t
tcatgatttactcaaatacaatctatcagtacagatttaacatctgagattcagtctgacatccgtaataatctgaaattatgtagatggcaatgcaggaaagatttcttttaatcgcttttcatttaagtgaccttatgttaaatatcaaataatgtagcagttccaagtatccaaagggcattttcaaatgtacataaaagaaatggttacagaagatttttaaggagcatctttccatgtgccacatcgctcttgtaactgctgtaccattttgctctgtccaactgtttccctttgcctgcaagaggggctcggataagatggatgttttgccttgactttcgtttgatattcctgacctttctgtaggctctttgaatttttcttcaatctgttcattataaatttagcttggcgcttctgtttgaatttcgttcaactctcttcatcgcatcaatagttttattccatagctctcgctggtatttgataggttcatttctacgtttttcaaattcaaatgaattatccactgtaagctctttaccagctgctttccggaatgctttggtccacctaactttgcgaggattgcgcttctttgttaaagtttttatgacatttagatttgcaaaatctgaacaccttgcaatcgttgcggacgaacatcatgccgtgtccaggatagatgggccccgaacagaaataacacttttcgatacgcatgttgaacccgcgtgtaaccccaccgaaaaaacccccggccgtaatggccgaattcccgggcatatgtccggtaccgtcgactgnnnnnnnnnnnnnnnnnnnnnnnnnnnnnnnnnnncggnnnnnnnnnnnnnnnnnnnnnnnnnnnnnnnnnnnnnnnnnnnataaaggcgctagcgccctatagtgagtttatacgatcctcc

SEQ ID NO: 121207 - DNA, 1700 bp, Homo Sapiens
  misc_feature (21)..(21): n is a, c, g, or t
  misc_feature (110)..(111): n is a, c, g, or t
  misc_feature (119)..(120): n is a, c, g, or t
  misc_feature (122)..(122): n is a, c, g, or t
  misc_feature (127)..(135): n is a, c, g, or t
  misc_feature (137)..(137): n is a, c, g, or t
  misc_feature (1563)..(1597): n is a, c, g, or t
  misc_feature (1601)..(1639): n is a, c, g, or t
tttaagaaccccaaggttccncttacccttactgggggcccgccgcgcccaaaacgaattggtctaggaaaagcttctcggagggccgaaggcgggcccgacaaggtttnntttttttnntnttttnnnnnnnnnanttttttaaatggttttattttatgtacaaataatgaacatacgttgtacccataaattctactttccaaaaacaggagctttttaaaagaaaaccacataacaacttttaaaaggcgctgggattcctctgcttctagatcaatgctgggctagaaaagtaaagtctgttctatcaggaatcacaagttggaactgagtattctccaaagtggaaattctagagtgtagtgtcactccaggcaaagattattcagttctcatccccagcatccacaactacctatcagaagggttaaaccaggtcaaaacagtccagcataattaggcttcatcaaacaatgtcattatgctcttctaagatgcaaataaaccaaaacaggaaatactaaaataaaaatatctgacactgccatacaaattgttagttcctttttgtatccccccttctataacattaacaaagggaatattttactgcaaagaatattttattttatacatcactagccatgaatttttgccattagttactatacaaatgctgcctagtgccattatccaaatagcacaaccattttacgtccacaattcacttctatagttacaagtagaattttcatgatttacttaagtacatctatcagtaaagatttaacactgagatgcaatctaacatccgtaatatctgatattatgtagatggcaatgcaggaaagatgtcttttaatcgcttttcatttaagtgaccttatgtaaaaaataaaataatttagcagttccaagtatccaaagggcattttcaaatgtacataaaagaaatggttacagagatttttaaggagcatcttccatgtccacatcctcttgtaactgctgtaccattttctcttccaactgtttccctttgcctgcaagaggggctcggataagatggatgttttgcttgacttctttgatatcctgaactttctgtagctctttatttttcttcaatctgttcattataaatttagcttggcgcttctgtttgatttcttcaactctcttcatcgcatcaatagttttattccatagctctcgctggtatttgataggttcatttctacgtttttcaaattcaaatgaattatccactgtaagctctttaccagctgctttccggaatgctttggtccacctaactttgcgaggattgcgcttctttttaaagtttttatgacatttagatttgcaaaatctgaacaccttgcaatcgttgcggacgaacatcatgccgtgtccaggatagatgggccccgaacagaaataacacttttcgatacgcatgttgaacccgcgtgtaaccccaccaaacaaacgccaagcttgagaggccccggccgtaatggccgaattcccgggcatatgtccggtaccgtcgactgnnnnnnnnnnnnnnnnnnnnnnnnnnnnnnnnnnncggnnnnnnnnnnnnnnnnnnnnnnnnnnnnnnnnnnnnnnncttcagcgcagcttaagggccgggcccccgccttatttaaggtttgaagtttcgtattatt

SEQ ID NO: 121208 - DNA, 642 bp, Homo Sapiens
  misc_feature (527)..(561): n is a, c, g, or t
agaattcggcacgaggttttttttgatgctcaacaggatctcacgtttattgagaagtgattaatggtaaaaagaaaggcaatgccctttcctcattggctgaacaagaaactgaagaaacattcacgacacgttttacagtatttttctcttccaaaatgcatttctgtaaacgagtttttaccactgttctcagctttgaaatcaaattaatcctgacttaatcagtataatgtacaagaacagaacatttcttaggactcctagtactttactttgagtaacaaaaggtcagagaaaatgaaccacccttaaagacacaaccttgggtaacactgttatattctcctagacaaaaattcttcataaaaatgttcttccagttcggaaggataaaatcaaattcccactttctggggtggatgcccaaaaccttcacaactcaagtgttctccaagtgcaaatgtcaaaatgggaggaggaaagggtttaaaaattagagaaaactgtatgcacttacggacttnnnnnnnnnnnnnnnnnnnnnnnnnnnnnnnnnnncatagcattatgctctgaaatcacaaccaaagccaaaataaaagggacatttttcacctaaactacctagagggatttttt

SEQ ID NO: 121209 - DNA, 654 bp, Homo Sapiens
agttttcttttaatacctttgacagactgtgattttcatcagaagtgctaatctttcctcaggatggagagttcaggcatcttttcatgttgttttctcacagttttaaatgacatatctacagaagttcttttatcagtgacttttcccttcctggccccacactatctgagggcatactctgtagctcatttattttattttatttttgtgggcatcagatatattctgaagtcaatactaaagctgttagagtatgacatttactaagaatcctgccattttaggcccttcttcttaaaggacaacaattccattggtatttagtaaaaaacaacatggcttggtaaatttagctctttttcttgacattggcaatgataatacaatgcctgtggtgtataattgtcatggctgacttataaatccctacagatatgtggttacttctctactttccctttctttggcttgggcaactgccacgttgatgcactggagccattcttctgcattcttctcatccttggccttaaagacataggttttattgtctgtgaagatttcgaaagcccgggggagagagcggtccctgcgtttcttggccacagccttcacactctgtactttgctgagttctattgggcagtcgtc

SEQ ID NO: 121210 - DNA, 743 bp, Homo Sapiens
ttgtgagtgatctagaggatcccggctcgcgagcagatacccagactgagctggaactggaatttgtcttcctattgactctacttctttaaaagcggctgcccattacattcctcagctgtccttgcagttaggtgtacatgtgactgagtgttggccagtgagatgaagtctcctcaaaggaaggcagcatgtgtcctttttcatcccttcatcttgctgctgggattgtggatataacaggagccctggcagctgtctccagaggatcaaagccacacccaaagagtaaggcagattagagaccagaaagaccttgactacttccctacttccactgctttttcctgcatttaagccattgtaaatctgggtgtgttacatgaagtgaaaattaattctttctgcccttcagttctttatcctgataccatttaacactgtctgaattaactagactgcaataattctttcttttgaaagcttttaaaggataatgtgcaattcacattaaaattgattttccattgtcaattagttatactcattttcctgccttgatctttcattagatattttgtatctgcttggaatatattatcttctttttaactgtgtaattggtaattactaaaactctgtaatctccaaaatattgctatcaaattacacaccatgttttctatcattctcatagatctgccttataaacatttaaataaaaagagctaatttaatgattt

SEQ ID NO: 121211 - DNA, 675 bp, Homo Sapiens
ttttttttaatttataaatcagtttatttacagattttatctttcttaaagtatatttcagttaacaaatctatttacacaggtatacatgggaattcatcccagttattttacagatcgtacttacaaaccacacccttaagtgttcggtgcaaaattgcactggatgtgactattggctgaaaatggcctgatgaccaggctatttacacgcacacagtaaacgggtttattttttcatgtctgcacagtacagtacacacaaggaggctgaacctcccagagaatgctttgcaatgtgtttgccaagaaggctttgcaaagtccagaaggaaaagctattaaacataggttaattaaaatgacagtacctcctttacatcagtttacattttttcttcacatttttataatacaaagatattttattgaattgctgcacaaccagttgaagatgatttgtaaacatgtaaattcctacaatttgcattaaatgtcattgtagtttctataatttgctctttgaattaatgttttattcactagtattcttaaggtagtaaaaggaagatgtaagtttgtatttcttgcagaaaagttatgagtctctaatgctgtgctacagaaattcttttgcgagtacacactttattcaagtattgcaacaagctaagg

SEQ ID NO: 121212 - DNA, 733 bp, Homo Sapiens
tttgcttttaattttaaaacatttattttgcttcacatatagaaccaggaaagaaatcacctccccaagtcgacagggcttagacagactggatgaagcgccccattttgccacattgtctccaggctggtctctccagccacacattaagccagcaagatggcccttttagtcacattcatctccagcatagcagggagcaagacaaggaagtgaaagggactgcctatgagcccaggatcttgccctcaggatgggacggaactggggttggtgaggagccaaccccacctgtctcaagcctcaggctaggaacagcacttggctgcaggccaggaccaagagccaggataggtgctgctgggctgagaaccaagaaaaccagttccctctttttggaactcggaaggggtggaacaacccagacccattcccttctcagatcacactctatccagactgctgtacagtgcggcccaaagctggaattctcagaacacccccatttttgccatgagcagatctggattctagttcgttttgaccttgagaaagtcaaattgtgttgatctttttaaaaacaaaggggcggttttcagaaatctataagcttccttctggctgttagaacttagcactctgggctccctgcttccctttaaactcactgggagatctgggaaagggaggctgagcctctctcctaagggctgatttacttcctgtcctcatg

SEQ ID NO: 121213 - DNA, 719 bp, Homo Sapiens
atcggcacgaggttaaaaattctgctgctaagaaagtgggaacacagtgatattcccttacattgtacccgaagagaaactagacctgcagaggagtacctttctgtttctatataagcagaggaattctgcacaacccaaatcacgcagaaacctcctggtaaggactccacgggtagttattgccggcattgtattctgagagatgagctgcatatcacttttggaaatgccttaaattaaaactcgtcttgaaacaacatgacgtctcaaagaagctcccttctcaccttggaacatcagcttttaaaataaaggtgtcatcagaagtgtgtagacacccactgcatcacaactggaactgatctctggttatgccaatctaggtctgcctggcagggtgagtctaccgctcgaaagctgcacagaggaaatcctccctcctccaggttcaggcccggagttacgagcggagattcgcggcggcgggtcagagcccagagcaaaccaggctggggaacgcacctcgcccgcggctccggaagcggctgcggccccgaccggaaagcccccagcatcgcccgaaggaatcgcggctggcctgcggctccggcccggcctcgggtaccacgcgcctagtgggaagccgcactgacgcctgcagcatctcgcgagatttcgggctcagcccaagtactgcgagttcaccaaaggggggg

SEQ ID NO: 121214 - DNA, 1057 bp, Homo Sapiens
  misc_feature (353)..(353): n is a, c, g, or t
  misc_feature (355)..(400): n is a, c, g, or t
  misc_feature (429)..(511): n is a, c, g, or t
cggagctgggttgtacccgctagttcctctagaaaattgttatatttcccctggagcgtctaaaattcctgaggggagggttgcccaagtatggccaccccccccaaaaataaggtttccttcacaaaaagtccccaaattcggcggtttttcccaatcccgacgttgtaaaaacgccggcccagtccctagctttatataaggccccgctataggggacccctttgttcaaaaaagttgggtacgcgtaagcttggggcccttgagggattctttagagcgcccccccctgttggtccacgtcggagctgtctctggcccttcttcctcttctcgcttcctctttctttttngnnnnnnnnnnnnnnnnnnnnnnnnnnnnnnnnnnnnnnnnnnnnnncaggatggatggggagctggaagggtggnnnnnnnnnnnnnnnnnnnnnnnnnnnnnnnnnnnnnnnnnnnnnnnnnnnnnnnnnnnnnnnnnnnnnnnnnnnnnnnnnnncatctctcggtgtccagacgtccctcctcttctctctttctctgctacgtcgttttgccgtcagtcggcttgcctcgtatctcctcacctgctggtatgctctggaggttggggtttggggtttatatgggggcaggatagggggcgtggtgggtcaaaaggcaactttttgggccccaaacagaaacgcctcttctcatttagggccgcgggtatccaggcttgagggtggggccttagccagggaaccgccctcttctactcagtatttccgtctcctgttcgtgtcagcaatacacagaagaaaatccattccttatctcactaaatgcagaaactactgggagtgaggctgccataaatctcttctggagaattttactggccataaagaagacagagaagaccgcttgcacctcgcccgcggctccggaagcggctgcggccccgaccggaaagcccccagcatcgcccgaaggaatcgcggctggcctgcggctaccggcccggcctcgggtaccacgcgcctaggggaagatcccggga

SEQ ID NO: 121215 - DNA, 1381 bp, Homo Sapiens
  misc_feature (476)..(490): n is a, c, g, or t
  misc_feature (586)..(595): n is a, c, g, or t
tgagcggattggccatttggagtggcactagagctgacgaaggtgccttgtggagagcatgcccgtgtgatagcttgtacgtagtggtttgtgatgacgtttgcttgtaagcggtgacttagttctgtctttcccattttaggcacttacagactgagatacgcacctcccctccccccttctaatgatacgttggattctgcagactgaaacgagtaaagcttgcctacttaatacactcaagtgtggggagtcatggggtgtggaggggaggaaaggaaaggtattttgtttctttgtctatacatttcctagatttctatgcagttgggatttttcatttttcttgtaccaatgtccaaaacaagaaagaatgcaatgcttttgagcctctggtctcctggttcaacaacaggcttatatgtatgatacatgtaatttaaaccttcagacaaacttaaatgttggtgcgtgcnnnnnnnnnnnnnnnacactgaatacttgctgtgtgcaatgtttactgaatctttaaaactgtgtatttgaccttttttttacaacactggtgacagtcatatggttttgnnnnnnnnnngaaattttgcttcttcccagcttttctcactttcaccctaaacgacacttcctccccagccagcctcactctgtctccggcccgcagcaggagcagccagcagtgcattcaccccacttttgtaaactgctctgcatataaaccaagggcagaatgtttcaccctgatcttatgggaggaatcaaactcccaaaatagtgtgtatatatgtaataaacagcgtcacgtaaatacatatatgcagtgcttgttgtccaaatagaaatgaaaataagtggaagagagaggaagaagtcaaaccatatgaaactgaaaaaatatgacgtacgaaatggacaaaaagctttttctgaaaccaactttttacttccatcatccttttttagcctgttgcttcagagagacacaaagtgaacacactggtgtgaatgtcgctctctgtgtgcttgtgtttgtaatgaaagtctacagccaattttacttgtctaccaccgtgttgtgctcaaagagacactacttgagtgaagatttcttctttccctgtaccagctgttacagtgttacgttgtgtttaaaatgtgtatggtttattgcaatctgaacagagctatgggtttctaccataagtcaggttgtttgttccctaacctgtctctcgtagcaaagtcacttttataacagtttaccactatgcttgattataatgtgaaaggcggaattctgagtgtgttaagatggtattaatcatgtcggtgtcatgtcactaagtttaatgctgctgttttt

SEQ ID NO: 121216 - DNA, 630 bp, Homo Sapiens
  misc_feature (540)..(556): n is a, c, g, or t
ctgcactactgtttaatgctaccgacatttttgccttaagagaacaagcttaaaaggcatgctcaccctgcgattaagacgcatctacacaacacaaacggatgctgagcagaaatgacccagaggcaccatcgtcttttcaagcagtttatttccattttcagttctaatgttgactttttcataaatattcacctggaatctccactaaggctcctcatgagcagggcccaattcctagaatgtgcttggtgagttagcccctggtatacagtagaggctcggcaaatattctacagcctcctttctaatgatttcccagtggccagcgtttcccaacatgtgagatgtacagttcaaaaggccacagggaaactgacacagcagggccatttcaaaaggggaggatcttccaattcttctgattttaggaaattctgttgcgtgctaaccttgaacacatgctagcctccctttctcagatttggaaagatctaaagtaatagttatttctctaaaatgaaacatatatttcatttnnnnnnnnnnnnnnnnntacagataccttctatctatggcaatttatgttggattattccacctatggcaatcacatcaagttttctttcc

SEQ ID NO: 121217 - DNA, 1109 bp, Homo Sapiens
aattttgaaaagactgttgatgtcactgtggtttattaggtaaatacaaagtataggctcttgcattttttaaaaagcaaaaccaaagagattagaaaccaagtacacatatcctctttagaagagaaacataaatcagttttaacaattaggcacttaaaaatgtaaatgtaagacaacattatagaagtataaactatagttacactcctaaattcctcctgaaatgtttacaaacacaaaatcacaagcatggaaaacaaatttcctctttatcaaaaaaggaacctgaatttgaatccaatgtgataaaccaatgattaaggtactggtgggtaggaaaaaagagcttctgaaatttacatatttgattaaaatgtaagcatttcataaaactatcacaatagcatacagtagatatcataatgaaaaatatatgtcaggaaaataatgaatctagacttaaaattttactttacaacaaggcacttaacacattgaaacagtacagtaaatttccaaaagaatgcaattggctacctctgaaaccttgtaataatatttcttttgtgaatatacggtaacataaccatacattttgcagcattaatcattgcataggaggtaaattaaataatgaattctaacttggcaattagattagtttttgttcatcgtttcctctttttcttttaaaggacagttttaaataatttcacaataaagcactcttctcattcatgatttatttagaacacagcataatgagtaagaaaataaatcagaacttataaggtgtgtatctgtataaaaacttatctttgggtaacattgacatgattttcagtgtttgggtgttgaagtcaagagcacttcttaatagaagaaatattttcagcaactgagtcaaaggagttaaattattgcaacacaaggacactaaaaacaaatactaaaaatctttatatatataaatagaaaagccttcaacacatggcatataacttataatatgcttgatttaaacgtgtaaactcattaagaaactccttctcacaccccggccgtaatggccgaattcccgggcatatgtccggtaccgtcgactg

SEQ ID NO: 121218 - DNA, 540 bp, Homo Sapiens
tctcataaacaggaactttattaaactacatgttacataaaagaacatataaatggaccattaaatacattcagtttattttaaacaaatttacatagatacttatttacatttctccattgtattcttaaattatttttccaagcttactaccgataaaaggtaatacaatgatcatctgctcacacagatgcatagagaagttgtccacagggctaagtaaagcaccacttcccaggaaacacagcttattagatcttccagcaacaactcatgctgaaggtgctctcttctgagcagcccttgaggtgaggcttttgctttagagatgctgggggttggttctgaggagctgacccagggcagagatgggtccttgctgattgacctgacttggactcacagaggtggaaagacctgtggagaccatcatcgaggccatggccccacatctgtgatatgggaaacaggcttgggaagaggtggtgacttcccaaagtcacccagcatccatgatagaggaagggcctgggagcttgg

SEQ ID NO: 121219 - DNA, 899 bp, Homo Sapiens
  misc_feature (298)..(329): n is a, c, g, or t
tttgcatacagaattattttatttaacttaaaccatgtagtactttactagaaaaaagcagagtaagagaaactaacgttgccttagcttcagccattcaaaatagacagtttcttttttccattatgtaaagaatccagagtatatcgcaataacaggaataaattcttacaacagaatatacaaaaacattttgaaatttttttcatctactgattttttatataaacaggattttttaggaataatttatacacagaaagtcattttatgtaacaaattggccatgttattaccnnnnnnnnnnnnnnnnnnnnnnnnnnnnnnnnaacaagaaaactcagaaaatgcattatttgtggtgcatccattccatcccgccttctggtttgattttttttatcccagacaaagggatacccagaggtagacaaactctggcaaacctctcacctcaacctcactggcttagaaagcagacaggtgttttcaccgggcgtctcttccaccggtggatgtgtgtgtgcaacgccaaacatccaaatgaaaagttgaaaacaaaacccaaatagtttccagatctttctcctatgtagcgcaaaaaccccaggtgtttcccatgatagagatattgtggagttggggagacatggccaacaatccactggagttagaggaagtggagtcaactttaaaaccaatttttgtgtatgttatagtttttattaaaaattcttttctgtattggaaatacgtatcttcggggttctgccttaaataaaatagggtctcttctgtgttctaacaaagcagtaatcaatcatgatacgaggcatgtaagcaaatggcctgtgtgccccatagctgtcatcgtttatgtgatcactgtgtatgctgcc

SEQ ID NO: 121220 - DNA, 1658 bp, Homo Sapiens
  misc_feature (61)..(82): n is a, c, g, or t
  misc_feature (801)..(831): n is a, c, g, or t
gtgccatgctcaaattaaccctcaactaaagggaataagcttgcggccgcggctgtaggcnnnnnnnnnnnnnnnnnnnnnncaaattctgtaagtattttatttatcactgaagaaaaaacacagcagcaagttctgtgttggcttcaatgagaccaaatagttcatctttaacatagctactgcgctccaaaattgaagtcaacacagtcattactacaaattacttgttgaaagaatctatcttcaaaagaaagaaaattaggaaagagaatttaaacgattcctccaaaccatacatttataaatattgtcatatttaaaatgcttgaaaggcatgaattctccattaatggaaaagcagtttgctattggcaacagaaaaaaactcagcgataatttaccaaatgctttaaaatttaaaagctatactgtttggattcacacttgcgcagtaatcttgtcattacaacaactgcaaattgctttgtactcaccttctctcaagtaaaatctaaagaaaaccccaccgtatccaatgtttgtaatgtttacttcaagtgaatctaaaaaatttctaaatttagtttatggtaaatacctcaaaatacctaaaataggtacgtatcaaccacttaagggtgtgaaaattgtttcagattcactgctttaaagggtcttcaaatatattttaacagaaccttacttcattccaaattattatcagatatttcaaaatcaaaaaaaagtatcagttctataccaagataaaggtgttactcaatacctgaaggttcacannnnnnnnnnnnnnnnnnnnnnnnnnnnnnngtcaacaaatgattgatgaaataatgcaacacccttaaattccagaaaatggcatggtttttccaacctcctgtggatatggtgcatgatcaatctattatataggattaatacaagttcatgctttttgtgttatggtgaaacaacattaaagaatccaatttagattggttgaagcacaagtataataatccttgaatgtgatcaaacctatttaagacaccagtttaaatccattatcttgagacttaacgtcgtactgtggtccatccatcttcatcagtctcatttttagtacgacggagagattccctatctttctcagctctccatgaggccttctctttttcaccttctctttctcggtctcggtctctttctcggtctcttgaaagagctgggggaggaactcgacgaggagggtcccgctcttccacccggtcatctttcctgtcatcagcacgtctccaagaacttacttcttcacgttctgatctgagtggaggtcctcttcggtccctgtcgtctcttagatctcgtctttctcttagatcacgccggtcatccctctcacggcgacggtcatccctatccctatcgtcccggcgacttgagtctctccagcttgaagattcctcagctggtcctcttctccagccaccttcatccctaggtcattctgaagcgatcctcttcgatccacatctctctctctgtccctttctctctcagggtaccttgtcatcgacgcgtgggtcgacgatatcccgggaaatccggacgggtacagcctgctttcttaacccacggtctatattcacacgcgc

SEQ ID NO: 121221 - DNA, 630 bp, Homo Sapiens
  misc_feature (123)..(174): n is a, c, g, or t
  misc_feature (513)..(544): n is a, c, g, or t
aggagggctccattcagatcagaacgtgaggaagtaagttcttggagacgtgctgatgacaggaaagatgacggggtggaagagcgggaccctcctcgtcgagttcctcccccagctctttcnnnnnnnnnnnnnnnnnnnnnnnnnnnnnnnnnnnnnnnnnnnnnnnnnnnngcctcatggagagctgagaaagatagggaatctctccgtcgtactaaaaatgagactgatgaagatggatggaccacagtacgacgttaagtctcaagataatggatttaaactggtgtcttaaataggtttgatcacattcaaggattattatacttgtgcttcaaccaatctaaattggattctttaatgttgtttcaccataacacaaaaagcatgaacttgtattaatcctatataatagattgatcatgcaccatatccacaggaggttggaaaaaccatgccattttctggaatttaagggtgttgcattatttcatcaatcatttgttgacnnnnnnnnnnnnnnnnnnnnnnnnnnnnnnnngtgaaccttcaggtattgagtaacacctttatcttggtatacaactgatacttttttttgattttgaaatatctgataataatttc

SEQ ID NO: 121222 - DNA, 832 bp, Homo Sapiens
  misc_feature (66)..(88): n is a, c, g, or t
  misc_feature (427)..(478): n is a, c, g, or t
cggccagtgccatgccgaaattaaccctcactaaagggaaaaagcttgcggccgcattcgcggtcnnnnnnnnnnnnnnnnnnnnnnngtcaacaaatgattgatgaaataatgcaacacccttaaattccagaaaatggcatggtttttccaacctcctgtggatatggtgcatgatcaatctattatataggattaatacaagttcatgctttttgtgttatggtgaaacaacattaaagaatccaatttagattggttgaagcacaagtataataatccttgaatgtgatcaaacctatttaagacaccagtttaaatccattatcttgagacttaacgtcgtactgtggtccatccatcttcatcagtctcatttttagtacgacggagagattccctatctttctcagctctccatgaggcnnnnnnnnnnnnnnnnnnnnnnnnnnnnnnnnnnnnnnnnnnnnnnnnnnnngaaagagctgggggaggaactcgacgaggagggtcccgctcttccacccggtcatctttcctgtcatcagcacgtctccaagaacttacttcttcacgttctgatctgagtggaggtcctcttcggtccctgtcgtctcttagatctcgtctttctcttagatcacgccggtcatccctctcacggcgacggtcatccctatccctatcgtcccggcgacttgagtctctccagcttgaagattcctcagctggtcctcttctccagccaccttcatccctaggtcttctgaagcgatcctctcgatccacatctctctctctgtccctttctctctcagggtccttgtcattc

SEQ ID NO: 121223 - DNA, 519 bp, Homo Sapiens
  misc_feature (22)..(22): n is a, c, g, or t
  misc_feature (365)..(416): n is a, c, g, or t
tggttttttgttggtgggtggnggtggtcaacaaatgattgatgaaataatgcaacacccttaaattccagaaaatggcatggtttttccaacctcctgtggatatggtgcatgatcaatctattatataggattaatacaagttcatgctttttgtgttatggtgaaacaacattaaagaatccaatttagattggttgaagcacaagtataataatccttgaatgtgatcaaacctatttaagacaccagtttaaatccattatcttgagacttaacgtcgtactgtggtccatccatcttcatcagtctcatttttagtacgacggagagattccctatctttctcagctctccatgaggcnnnnnnnnnnnnnnnnnnnnnnnnnnnnnnnnnnnnnnnnnnnnnnnnnnnngaaagagctgggggaggaactcgacgaggagggtcccgctcttccacccggtcatctttcctgtcatcagcacgtctccaagaacttacttcttcacgttccc

SEQ ID NO: 121224 - DNA, 907 bp, Homo Sapiens
tcatggaggaagtgctcctggaaaagtcggacattcaccaccaaggggaccagaaagtggtgctcacaaggccgccggtggcaccgaggccggtcaaaggtcaaggacgtagatgaggaattacctgatgtttccagggcccgaatgcagttgttcaacccacacccagtgatggtcgaaaacggtgcacacaaccagttacacacactgccagtgcttggatcgagctggttttccttaaatcacaagtagagcacctcacgttctttggaaacatccacttcatcaagattcataaacatggaagaaataataattcatttgcttttgttataatgccaggattggttccacaagtcagggtgaaaaaaaacaggtttacacctagcagcagatagggcagaagaaggtaatgcaaggacaactccagctcctgacagtagccaaatacttcccaggtgtactcagtataaaccatcccttgcaagaccaggtgcaggacaatgaaggtgtggtttctcgtatggaaaaggtaatgaagcaatccatgcatggctctctgaagacattctggaattatacaggaaaatatctgtgctcctcccctggccaggcctttcaagctatgggttttcgagcagacgcagataagaacaagacccatcagcaccgaagccaggtagaacaagaagaggaccagaaagtccatcctgcagatttctcttggttgggtaattttcagccggcagctctggcattcctcttcccaacattcacagataattcaaacagcagctcctcttgggcagcagtgtgtgcctggcatgaccagtagctgccggacatggttcttccaggagcctggatctggcgccagccgctgggctccggcgcctcccgggcgccc

SEQ ID NO: 121225 - DNA, 469 bp, Homo Sapiens
tttttgtcatctggattttattttgatgaatgaagtctgcatttattttataaatagctaactggaatagcacatttcctaagtaaactttcccttttccttcagtgtgaacacttcattcatcccacaggaaactcttgtatgtactgggattattctgggctgcttctcagtgctgtttatgttcagtttgtcacatctggacacaagtaggtgggctgaggaagcagcgctggtggctgtggcaggcccagggttggccagtgttcactctcatggatgtcacagtccagctgcctaaagcactaccttttctctgcccctagtacctgttcctgacttttccacggattgtcttcatgctgggctttgtcgtggttctgagcttcctcctgggtggctacctgttgtttgtcctgtatctggcggccaccaaccagactactaacgagtggtacagaggtgactg

SEQ ID NO: 121226 - DNA, 1863 bp, Homo Sapiens
  misc_feature (76)..(93): n is a, c, g, or t
gggtgaggagggtgggcgggggggcggaggtgcgtcggcgaggcggtggcggggtagggtggacaaccggtagacnnnnnnnnnnnnnnnnnnagatggggcccgtgtgagggcggtgagtcgtgctgtgtggcggcaagtggtggcgccggaggagtaaggggtcagcaggcagcatgagaagtgaagaggggtgctcgtgtgagcgtggtggatgcgcagaagtgtagtgcgaggggtcgtggcgcacggtcggcggacgtgtgtgtaagaagcgagcgggcagacggcgcagcgttagagaaaagccgagcggcaagaaaaagggggccacgggtgtggaaccgacggaagcgcggggaagcggtgagaagcgtgggcgcccctgccgaggggagaagctcgtaagagcgggccgcgccggtgtatgagtaggtttggaaaacgaggatccacatgtgtaaataaacgggaactacagctcaaaggcagtcatacacttgtcattcttgtttcttcctctcatgacatggaaaggcaggtagaaagatctcttgaaggttgctccgaagcccatgggagtgaatgttccggtggacttggggctctgctgacggaggccaggccacaaggggacaacgctggcaccaggcccagtcacctctgtaccactcgttagtagtctggttggtggccgccagatacaggacaaacaacaggtagccacccaggaggaagctcagaaccacgacaaagcccagcatgaagacaatccgtggaaaagtcaggaacaggtactgaataagaaagaccgtgtccataacatggaggtgtccaaggtcatcgatgtaagtctcctggtataaatctgacatcaccaccaagtggaccagaaaagtggtgctcacaatggcgacggtggcagccgaggccgtcaaggtcaagacgtagatgaggaagtacctgatgttccaggccccgatgcagttgttcacccaaacacagtgatggtcgaaacggtgcacacaccagttacacacactgcagtgcttggatcgagctggtttccttaaatcacaagtagagcacctcacgttctttggaaacatcacttcatcaaattcataaacatgaagaaataataattcatttgcttttgttataatgccaggattggttccacaagtcagggtgaaaaaaaacaggtttacacctagcagcagatagggcagaagaaggtaatgcaaggacaactccagctcctgacagtagccaaatacttcccaggtgtactcagtataaaccatcccttgcaagaccaggtgcaggacaatgaaggtgtggtttctcgtatggaaaaggtaatgaagcaatccatgcacggctctctgaagacattctggaattatacaggaaaatatctgtgctcctccctggccaggcctttcaagctatgggttttcgagcagacgcagataagaacaagacccatcagcaccgaagccaggtagaacaagaagaggaccagaaagtccatcctgcagatttctcttggttgggtaattttcagccggcagctctggcattcctcttcccaacattcacagataattcaaacagcagctcctcttgggcagcagtgtgtgcctggcatgaccagtagctgccggacatggttcttccaggagcctggatctggctgcagagacagatcaattcaacacccacataagacgaccaagagttgcagtcaaaggcagaaataccgccagccgctgggctccggcgcctcccgggcgcgatacgagacttccagcgggctcgtgaccctctgccgaatttgaacccaggcctcgtactagt

SEQ ID NO: 121227 - DNA, 785 bp, Homo Sapiens
  misc_feature (644)..(668): n is a, c, g, or t
  misc_feature (688)..(715): n is a, c, g, or t
gctcacccccagttgctattagaccgaggaaaaggacttttcttttcttttgccagagtaaggtaaagatcaattgattttctagagggggaaaaaggagttgaaagtagttcttcatttgcagtcatcatctgtacgaattcttcatagttgacttgtccgtctccatcatatctgcttctctgatcatttcatctacttcttcatctgttagtttttctcctaagtttgtcatgacgtgacgtagttctgctgcactgatataaccattgccatccttgtcaaagactcggaatgcctcacggatttcttcttcactatctgtatctttcatttttctagccatcatagtcaaaattcggggaagtcaatggtgccattaccatcagcatccacttcattgatcatatcctgcacttcagcttctgttgggttctgacccagtgacctcatgacagttccaagttcctttgttgtgatggtgccatcgccatctttatcaaatagggagaaggcttccttgaattcagcaatctgttcttcggtcagctgatcagccatggtgcgagcgaagggaggaagagcagagggagcgagggtggctgcaccagcgcgggggctgcgacggcgggggtacctccgannnnnnnnnnnnnnnnnnnnnnnnnaaggcgcgctgtgcgctatnnnnnnnnnnnnnnnnnnnnnnnnnnnngactacgagtaacggcacggcgtccacgcctcgtgccgaattcaccacccaggcctcgctacctagccca

SEQ ID NO: 121228 - DNA, 1843 bp, Homo Sapiens
  misc_feature (124)..(138): n is a, c, g, or t
  misc_feature (149)..(150): n is a, c, g, or t
  misc_feature (154)..(155): n is a, c, g, or t
  misc_feature (157)..(256): n is a, c, g, or t
  misc_feature (279)..(294): n is a, c, g, or t
  misc_feature (762)..(792): n is a, c, g, or t
  misc_feature (1058)..(1079): n is a, c, g, or t
  misc_feature (1680)..(1751): n is a, c, g, or t
ggtggggaatttcaaacccctttttattgccccgggttttcttatggaaacaacgtttgcccccttttcctttcccttttggggccccggccgcccaaaggaaagttttagaaaaattttttannnnnnnnnnnnnnncccccaaaaanntttnntnnnnnnnnnnnnnnnnnnnnnnnnnnnnnnnnnnnnnnnnnnnnnnnnnnnnnnnnnnnnnnnnnnnnnnnnnnnnnnnnnnnnnnnnnnnnnnnnnnnnaagttaatggtctttttattggnnnnnnnnnnnnnnnngactagcatttacaacttggaatggacgtaaactgtaatttctttgaacagcaatgttgatggttgtgctgaagtccacagccacagcctactctgccggctccaagtcatggttcagaaggttttaaaaacagagagtccaaagatgctcccttggtaaatgtttcttattaaaaatttgtgtgaacagtgacagcctgacacctgtttcactctagaacaatgcagacaacgctaaaccaacatacacgggcatgccaccagggtgtgtcatcgtcaccatgggtcggagcacacgaagtacaagaggaccatcctaccagtggggccacgtctcaacggtttatccttcacccatttttctgcacgtcatcctgaggtaaaccaattttaaatgtgtttgttttcagtaaaccagctatgacaatttatactaaacaaattgaactagaacccatttgaataggnnnnnnnnnnnnnnnnnnnnnnnnnnnnnnnaatacaaaggcctgactgtgctcaatcgtcaagctgcatgcatgaaaaactggccagcccaaacagtgtattaatcattagcaaatggaactttaaggagtccttatcattaaggtagtacaagtatttatattgtaaaactgatgtgtagcttgatctttaggggacaggaccaccaaccaatacatgcagattttgtgtgtgtggacagaaggtacttttgacattcagttttgctatatagaaacagaatgaataaatgaacnnnnnnnnnnnnnnnnnnnnnngcaagaggtaagtaaaagattcaatttgattcttctagaggggggaaaaaggagttgaaagtaggtcttcattttgcagtcatcatctgtacgaattcttcatagttgacttgtccgtctccatcaatatctgcttctctgatcatttcatctacttcttcatctgttagtttttctcctaagtttgtcatgacgtgacgtagttctgctgcactgatataaccattgccatccttgtcaaagactcggaatgcctcacggatttcttcttcactatctgtatctttcatttttctagccatcatagtcaaaaattcggggaagtcaatggtgccattaccatcagcatccacttcattgatcatatcctgcaattcagcttctgttgggttctgacccagtgacctcatgacagttccaagttcctttgttgtgatggtgccatcgccatctttatcaaatagggagaaggcttccttgaattcagcaatctgttcttcggtcagctgatcagccatggtgcgagcgaagggaggaagagcagagggagcgagggtggctgcaccagcgcgggggctgcgacggcgggggtacctccgannnnnnnnnnnnnnnnnnnnnnnnnnnnnnnnnnnnnnnnnnnnnnnnnnnnnnnnnnnnnnnnnnnnnnnngactacgagtaacggcacggcgtccacgaccctcgtgccgaattcgccacccaggcctcgctaccttagaaccgttagagttactggccgtt

SEQ ID NO: 121229 - DNA, 423 bp, Homo Sapiens
ctggaaggaaaaagaaatcttttatttcaagttcatcgactatccacaacatacaatttattggttaacaatagttgaaagaatccaacagaatttggaatctatgatgaaagacagctcagtaaaccagctaatgattggaaacacaggtctagcttcattccattagcagtaaaaggtaaggtgcctcctctctctctgatctccgaatggtgttctttcaggcaaagggattggtttctgagggagagagaagaggcctgttttcgtgtacagctccgtttcagggctaattgtgctggtttgattcctctcaagagggtttaaaagttcactggtggttttttcggatcccattacccactatctagagttagcacacattcaggaaactgccagctatgtcccttttcctcctcgtgc

SEQ ID NO: 121230 - DNA, 657 bp, Homo Sapiens
ggcatcagacatggcaagggaaacgatctccgaacctttcatcattgggccctctgagagggttctgaccactgaaaccaggtaggttgatatggtcacggatcagcatgatatctccaacctcaaacttggggttcagccctcctgctgcattggtgactaccagggtgtccacacccagaaggtggaaaaccctcactgggaatgtcaccttccagagtgggtacccttcatacatgtggaacctgccctgcatcatcacacaggccctgccattcaggaacccaaacaccagtcggccagcatgacctggcactgtacttcggggaaagttggggatttcaccgtagtcaaagatctgggcctgagttaatttatcagtcagacctcctaatccagaaccacagattattgcaacttgaggtcggtgcttagtgtgagacagaagccattctgcagtgttcttataatcttcataggtgtatccgttctccatggtctcgcagacgccttctcgatgagcctgctccggtgtgctccgatccgctccgatccgatcggatccgctccgctatgctgaactgagcaaggctgccggtccctcgtgccgattttcacacccaggcctcgctacctagcgtatttttttagggctta

SEQ ID NO: 121231 - DNA, 2007 bp, Homo Sapiens
  misc_feature (226)..(306): n is a, c, g, or t
  misc_feature (322)..(385): n is a, c, g, or t
  misc_feature (397)..(503): n is a, c, g, or t
ggggcgaaaaattttttatcccaaggggggccaaagggtttggattccccgtgcggatttcaggttcttccaaaccgcctttggaaagggttcccccgtgggcgaaaaggtttaaggaatttcacccatcctccgaaagatgcaagggcgggggggaattttaatttggatcccctggggctccctttgaaaaatcccgaaaagccccccaaaccccctttgggtnnnnnnnnnnnnnnnnnnnnnnnnnnnnnnnnnnnnnnnnnnnnnnnnnnnnnnnnnnnnnnnnnnnnnnnnnnnnnnnnnaaaaatattggccctnnnnnnnnnnnnnnnnnnnnnnnnnnnnnnnnnnnnnnnnnnnnnnnnnnnnnnnnnnnnnnnngggcccccaagnnnnnnnnnnnnnnnnnnnnnnnnnnnnnnnnnnnnnnnnnnnnnnnnnnnnnnnnnnnnnnnnnnnnnnnnnnnnnnnnnnnnnnnnnnnnnnnnnnnnnnnnnnnatttcatctttctctttattctgacaacattatgacattaaataaaatccaagaggtattggattagtccttgtttggtctctggtgatttagataaggcagaactgagcccctcggaatgtattatctcaaagagctagtagcagctgctatgcaaagttctaaggcccgagtcaaatcctgggcatctccacagatgtgtggtagggcacgggctccagctcttgtgtaagaaagaacaggaatgagaacagctttattttgtagcgccaaggtctcactatgctcacacctgtaatcccagctttgagaagaggatctggcaccagaagggtctggtagaagaaagtgggaaaggtgaaggacaggaatcttttcctttctgctacaacctaaggacagaggcacatgactccagcaaggggccaaagaaggtagcagctacttgggtcttgtgtgggagatgccagacgactccaaggcaggtcaactggctttgtcagggagtggaatgctggccataagaatggagacaaactgttccaatttctgtgcagcttgtttgccagctgctaagacttcttcatggttggccttctccaggctttcataatccatgatgaccttgttagtgatgagtgagaagccaaagactcgaagtccacagtgccgtgcaacgataacttctggtactgtactcatgccaacagcgtctgctcccagcttctgcagcacacgacattctgccacagtctcaaagctggggcctgccaccatcacataggtgccttcctgtagctcacgttgctcccccatttgtttccaggtactgagagccctctgcctcatagtccggtcgtaggcatcagacatggcagggaaacgatctccaaacctttcatcattgggccctctgagagggttctgaccactgaaaccaggtaggttgatatggtcacggatcagcatgatatctccaacctcaaacttggggttcagccctcctgctgcattggtgactaccagggtgtccacacccagaaggtggaaaaccctcactgggaatgtcaccttccagagtgggtacccttcatacatgtggaacctgccctgcatcatcacacaggccctgccattcaggaacccaaacaccagtcggccagcatgacctggcactgtacttcggggaaagttggggatttcaccgtagtcaaagatctgggcctgagttaatttatcagtcagacctcctaatccagaaccacagattattgcaacttgaggtcggtgcttagtgtgagacagaagccattctgcagtgttcttataatcttcataggtgtatccgttctccatggtctcgcagacgccttctcgatgagcctgctccggtgtgctccgatccgctccgatccgatcggatccgctccgctatgctgaactgagcaaggctgccgggtctggcctcgtgccgattcacaacccagcctcgctacctagccga

SEQ ID NO: 121232 - DNA, 1433 bp, Homo Sapiens
  misc_feature (795)..(812): n is a, c, g, or t
  misc_feature (1207)..(1227): n is a, c, g, or t
tagttacatagcatctaagttttctgatcactaccaggtaattttcaaccaataagaaaaaggaaccaacactcagctctgtagaaatctaccttcttttagaaacctcaggcctctgcacccctttagacaactcatttacaaccacaaccttccatggcttctcacatgccagccagggcagggtaaaaacggcaatttcttacaccgaaaggtcctttttatgtaacaaacagacctccccaaaccacaacttttttgtcctattgatgactcgcatgagatcaaatctctagtgtcccctgactgccccgacagggtctaggacaacacaggttaaaaaggacagcagggtcgttcaactcccacactgcctcaggtgttttctcaaagcacgacaattctgcaatggagacttacacgtggaaaagaatcaaactgtgcaggtaccctcagtcctctgccactaccagctcaatagcttgagctcagaggatcaagtcaagtctctgtctcacttttaatctagcacacaagaggcacaactcaggcagtacacggtattgaagcatgcaacaggtcattggtaacaaaactcagttagattaagagtacattaaataaatctttgtagttgagtagaaatcacaaaacagttggtgaggacaggtctgtaggctcagctttacatccaggtttttatacaccagcagccagattcacaattgatagatattgcaccggaaagatgtgtgcagggaaaagaaatcatcatcacatttaatgttcatgatnnnnnnnnnnnnnnnnnnccagatatgacctccatgtagtacataaagtgccttcagaattggtgcatttacaacaaaaactggttatttagctaccattagcaaacgcatacaaacaggagactaaacagatctggtttccacagttttgaatcaagcagtgccaagtttcattcaaaatgtctctactacaaacagcaaagaggaaatagaataaaagatgactgtacagcgccaggaagggttaagtaatttctcggatgagaaatgggagtccaaccctgtctcaaatgtgttagaacacatgtaattacttctaaggaataatggtgtgattcctttcaagtcaacacaaaatttgtcatgctatgttacaattctctcagcctgtagctattagctaaatttgtacnnnnnnnnnnnnnnnnnnnnncgtaatatccagtttttcattctgagtatggaaaaaattatcattatgtctaatattatattggaaattctctcaaagtacttgtctgtaggtttttggacaaaaatttgccttccaattctaataaagtagagggtggaggtgtcagagtacttcaaaaataaaaatgtcattgacattaagcctggtatgaaagtgaaatacaa

SEQ ID NO: 121233 - DNA, 1127 bp, Homo Sapiens
  misc_feature (575)..(585): n is a, c, g, or t
ggtttaacggtaaacacaaagtctcatttatttttgtctgaagcacacaggagctcactcagcacaataacagtaagcgaatcatacaaatattgagaaaaaatgttcctatgaatacatacatgtatattcttaagagtagcgatcaggagtttaacaacaaatgtaaagtggttttctctaaagaatgctttctgacaggcttttgggttggaaatggacaggtaaatcactgtcacataacaggtaagctaagaataacttctgttacccaagtcatttgaaccctgtggactgtgaaagccctcttggaatttacatttaattccatcattggtctggttgacttccacatttcactaaatttggacaagatccacaaagtaactcctcaactctcagtctttcacactcaggtctgtgggaaggaaaggcagtgagaccaggtgtgaacacatgcacggagaccaatgttaggattttctaacagtatccttctgtttctgcacttccaaagtcatacctaaactggctagtatatctgaaattgctaacatctccttgaagctgtcccnnnnnnnnnnnttttttttcaacaattcttaacaatccatacaatttaaaaaccatttcaagtcattgcctataacacttcttagtttacccattaataactcacaccattgcttttaagcgtgtgaatgtttccagcaatcatcaacttttaaaatggacaacaatgaaaagatgtctaagagtctccagaagcatccaaattttggatctctcctacgtatagcacaaggtagaattgatacaatgtgccttccagcttgcctttaaagctctccatatgtctagttctgaggtgaagagattaaaaataggaagagcctggtagggagtgaagattcaaaatgcattgctagatctcacaccggttatatttcctctctaagatctcagctgcagttgccaatggggatattgaagggtacactttaaagttggctaagcattacggggagagtttcccaccatttctttccccgacgcgtggtcgacgatatcccgggattccgaccggaccagcctgctttttgtacaactgttctatttcacattgc

SEQ ID NO: 121234 - DNA, 1096 bp, Homo Sapiens
gaggaaaagtttccccgcccatttcttttccccttttacccctgaaaaattctttttcgaaaggaaaaaaaggaggttttaatgggggcctccaatgcttcgcagttattaacttaggaaaggccccttggcatgaaggggagcctgttcccaatatctcctcttggggtctgataattcaaggagagaaccagcccaagagaataaattagggaccagtctccttggtctgtttaggacaacctttccccatcctaatcttttacttccccatgtttccctctcgtttgaaaatgaaatttcccttagctgactagcctgcttttgtgttctggttgcaaaaatattttgtgaatttatgataatcgatacttttgcattgtttttacctttcaaagtgtattccgttgcagaaataccatgggacattaaggaaatggtggaggatgggttgcaggaggctgttaagtgtattgtttctttcctgtcagagtagcaagatattaaaacaataagtgactaataagatttggcttggaaaagtgcctctccacaattcagacaagtcaacctacagttacggcataggccacatttcaaagtgcagcaaatctggccccaggtatagataatgcctgtggtacagaaaaataagcatacagtgacatctcaggaacaccgcacttggagaaataaaacacataaagttataagtgatgtggagagatcaaagtacatataaatatttccacacatcctatttttactaggaaagatatgtcaggtcttaacacagctatcagagctaaatttaaatgtttaacaggatggttgtatacggccattcctactgcttctgatgctacacttatttatatttactgcacatgagtcctaagtctacatgataaactgatgttcaacatcaaaatgtacacccttacaagaaggtaacagtgtaggatcttgcaaatgctagaagcagctactgcctgtagagtgaatcttacacatctcatctaaattcctaagcctgctcatttggttatacaccgaacgcgtggtcgacgatatcccggaaatccgagccgtacca

SEQ ID NO: 121235 - DNA, 2347 bp, Homo Sapiens
  misc_feature (2041)..(2042): n is a, c, g, or t
  misc_feature (2053)..(2053): n is a, c, g, or t
  misc_feature (2078)..(2078): n is a, c, g, or t
  misc_feature (2080)..(2081): n is a, c, g, or t
  misc_feature (2085)..(2086): n is a, c, g, or t
  misc_feature (2098)..(2099): n is a, c, g, or t
  misc_feature (2107)..(2107): n is a, c, g, or t
  misc_feature (2257)..(2257): n is a, c, g, or t
  misc_feature (2263)..(2263): n is a, c, g, or t
  misc_feature (2299)..(2299): n is a, c, g, or t
  misc_feature (2304)..(2304): n is a, c, g, or t
  misc_feature (2314)..(2314): n is a, c, g, or t
tttcatcgtaaaataacttttatacaggattagtagatctgtttacatataaaaaacagaaaggacctcattacagttagatttcacataaattacaaattgacttttaaaaactactattcaacttcatttaaagtcccttttaaaaatttcattttgaaggcacagtgcatgaaataaaccaaagactgaagcacttgagatgaatgggtgttgggcacctcacataaacagctgtagattgctctagaactgggagtatcacttggaaaaactggagaggtgaaaagctgatttttaatctgagcataaaaaaatactattgtcatacctccagaaaatctgtagcatggccagcatagaaggtagttagtacactcatgttatgccatttataaaaatcataatcatacatatttacataatttatatccaactgcctcaaaatggtaacctactttcaaatttcataatgtatgctgtcaaatcaaaatcaaccaggacaatattctgaaaatcaagtggaatcattaacgaattattgctaaaaataggataaatgggtattgggagagatttcttcatgaactagaaatccaagttcagctgacattaatcaaagacccaaatcatatccccaaaattttagctaaaacaaatcagaaacccaaagagttaccaaaaaagttgctatagaaaatcactgaacatcaatcatagtggaatttttggtaataacaataaaacaaaaatatattggaaatcctgggttgtcactgttaaaacaattccaccagaaaaccataatgtagggcactattacagaattcattgccaagaagcttttcatacagcagggacaatacctggcacaagtgcatttctggcaacaacaagataaaactatttaatgttgagaataaatggaaatggaggagcaggtcatggttactgagtaacctggtgttagctcaaacacaataagctcagacataaacactaccttttatttatttgtcaactcataattagttttaaattcaatagtcattaattcagcaaatcccattcaagtaaaagttaccaaagataaagcaatcaatcacactgggccaaatatacaatatgtttcctttctggaagatgacaaagtcccaaagcaaatcccttcaatgagcattgcaagcattcctcaactggataggatcccactcactacccaagtgttcagcaaaatgcatcaaaactgaagggtctttctttctgaaatgacttgggcacatcttactgaactacataatcaatacaagtacatgtacacaggcagacactttgaacattacctactcaatcactttgcttttattaaggagctgggaaggaagaaggcttacaaactgatcaccaggacaaagcccatgccttgtgagtaaagaaaggcacaactcagatttaggcaaatttcttaatactatgatacttacttgccgccataactccaaggaaatggaaagtctctcggagaaacactgaagaaatgcattccccatcccatatggcttcaatgccttaagcggttaatatattctaatattagattagacccgcaaataaaagacagggcagggctgagaatatagtcttagtagtcaggtatcctatacattcacgcttctaggtaatacaagctgggaaagtcttgttttccagctaaatgcattatttaaaagttcattgaagatcaagacttatagcagaatttggtttttctttcaggaaatattactaaaataactatgtgtatgttcatttctttaaaaattttacacatgcttaaaaggcatggcctccagccactgagatgtacagttaaagacatatttgatccaagagagaagtacatgtaaaaggtatcctctagtgaagaccaatgataacaaagcaaagcttgtcacattaactttgtttcacttgctgtaatgtcccaagcaggggcagccactcttaggccccttgttggtttcctgactgtactcttaannaataagctganaaagagcaatacaccaccatccttnannagannacataagattanntagaattnaatcatgtatacttcactaaactatagcatcccacaagctctgttccatgtatgaggtggcagatttacagtttgctataccagataccagatggctacccttgacacggattatcacagatacttatacaatgaatgactccatatccntgctangaatctcctttataagcactttgatgcatctcacanactgntgacgactangaggtgtaaccctcactgaggcttggaactgaa

SEQ ID NO: 121236 - DNA, 545 bp, Homo Sapiens
tttggttgtcattcataaaatttattttggaaaaatattttaaaaaggaatttcttcattaacaaaacagtaaaaaactcaaataacatttgcacaatattccataaatacatttatatacaaaaaaatatagtcacatagacccgaagtgcctttgtacatatttaccaaaatttaaattataaaaaacgaacatcacaaaatactcaagctttacagatatcatgaaaaatatttttacaaatccaaaaaataacacacatcttttccatctagaaaaagcacatcttcgtatcaaaaaggacaataaaggcagtgtttgtgtttctaattcaagaaaagactggctcataagaatccaaaatatacactcaggcagtgcatgcttcttatgcgtaattcagttcacccatttaaatatatattctcttaagagcaactgtccatagtgcaacggcgacgtcacggaaggcagtgccgcaggcggccgggccgcgacaggctgtcggcaggcgttgaggacctcaggaggagaacctgctcgg

SEQ ID NO: 121237 - DNA, 785 bp, Homo Sapiens
  misc_feature (746)..(746): n is a, c, g, or t
  misc_feature (758)..(758): n is a, c, g, or t
aagggagtcacacaattatttttattttccagtacctataaaagttatgtttaatctatattatagtctattaagtttgcaatagcattatatctgacaatgtacatactttaatttaaaaatattttattgctaaaagatgctaacgataatctaagtcttcagtgagtctttgttgctggaagacagtcttgcctcactgttgatggctgctgaatgatcggtgtggtggttgctgaaggttagtgtggctctagagatttctttaaatgagacaacaaggaaggctgcaacatcaactgactcttcctttccgaaagatttatctgtagcatgtgttgctgttggatagccttttacccacagtggaacattcttcaaaattgaagtcaatcctctcaaactctgctgctgttttatcaactaagtttatgtaatattctaagtcctttgttgtcatttcaacaatggtcacaggatcttcaccaggagtagtttccatctcaagaaaccacttttgtggctcttatattagaagcaactcctcatttgttcacgttttatcatgagattgcagcaattcagtcacatatgcaggttccacttctaagtctagttatcttgctatttccaccacatctgcagttacttcgtccactgaagtcttgaacccctcaagatcatccatcagggttgaggtcaatgtcttctgaactcctgttaatgttgatattttgaccttctcncatgaatcacanatgtccttaatggcatctcctcgtgcc

SEQ ID NO: 121238 - DNA, 465 bp, Homo Sapiens
ttttttttaaatttaaaaatactttattgctaaaaaatgctgattatcaatctgagccttcggtgagtcgtactctttttgctggtggagggtcttgcctcgaggttgatggttgctgactggtcagggtggtggctgctgaaggttggggtggctgtggcaatttcctaaaataagacatcggtgaagcttttcgcatgagttgactcttcctttcatgaaagatttctctgtagcatgcgatgctgtttgatagcattttgcccacagtagagcttctttcaaaattggagtcaatcctctcaaaccctgctgctgctttatcaactaagtttatgtaatattctaaatcctttgttgtcatttcaacaatgttcacagcatcttcaccaggtgtagattccatctcaagaaaccactttctttgcgcatccataagaaacaactcctcatctgttaaagttt

SEQ ID NO: 121239 - DNA, 587 bp, Homo Sapiens
tttttttagttgcataaacattttatttcccagtgcttataaaagttatgcttaaactatattgtagtctaatgagtatttaataattattaattagtaattaatagcatgtctaaaaaactgtgtacataccttaagttaaaatacgtcagtgctaaaaaatgctaatgaatatctgagccttaccaagtcataatctttttgctggtgagagtcttgcctctatattgatgactgctggctaatcagtgtgggggctgctgaaggttggaagcctgtgtcaattttttaaaacaatgaagtttgttcctttcacaaaagatttccctgtagcatgtgatgctgtttgacagcattttatcaacagtagaacttctttcaaaattggagtaaaccctctcaaaccctgctgctgctttatcaactaggtttatggaatattctaaatcctttgttgtcatttcaacaatgttgatagcatctccacctggattatattccatctcaagaaaatattttctttgctcatccataagaagcaactccctatttgttcaagtttcatcatgagtttacagcaatttcat

SEQ ID NO: 121240 - DNA, 1616 bp, Homo Sapiens
  misc_feature (1125)..(1153): n is a, c, g, or t
  misc_feature (1296)..(1296): n is a, c, g, or t
ttttgcaaagaataaaatatatttattttaaaggtgtgtgggagcttttactacacctttatcttcagtaaagagacagagaacacagttccatttttaatgtttaaatttcatttcaaaaagcaggtctgtagtttgtaaccatgacaattaaaatctgtgctaatgcacggcagtctataacaattctacaagccaatcagacagtacgtgacatttcaatgagtaaaaaagagcataaaactgtatgtgtaagaacaaaatgttaaaaggcctaccacaataataaaaaaccgtcaattacatcatcacattaaaataagccagatgtacaaaagtctgagacagagaagacaaaaggacaacacaagatatttgttgaaaaatgtttgtgctctttgggcacttaattaaacattgcaaaatcaacatcatcttcttcttcatcagactctgcaaaatattttacttctttcctagcccgaccggttcgtggcagagaaggtggctcagtagggaagtctgaggggaagatgtccacatctgaatcctgatcaaaagatgtcttcttcggtttcttgcttgttgttttggatgttttcctgccagggttataatcgccttcattttcagagccagatgctttccttttctttgcccctcggcctttaccttttggtgttgtagtcttctttggaatgccaaattctgaatccgagtcagagtttacagcctctactactttcttctgttttggggctctcttgggcttagggactgtatctgaagacggttttccctttttagcagctaccgttttacttggaactttatctgtctgtttcagaccaaatgatggtgaaaaaacagaagcagaatcttcttcattactgtcaaatttagctgaatcatcttctgacttctgagaatatgaaggaaatgagaagagatttccaaaatcctgactttttttgtcatgcaaagatttttctggagtggcttttgatttgcctggtgaaaatgtatattcatctttatctaacccatctgaaggaacaaattcatcttccccatcatttgttatgggagatgctttaactttcaattcctctaaatcattattgnnnnnnnnnnnnnnnnnnnnnnnnnnnnnctcttcttctgagaaatcaaatgtgtatttaggtctttcggctgctgctctcctaagcaaagaatctcttggaataaccacaggttctgtttcttccaaatcactttctgacttggattcatcatctgaccaaggatctccgntctgcgtgtcacatattctgatgacacgtaggtcttaccagactgactgtatggatgatgatttcatcatactcgtagctatccaggagctccttcttgatccctcttcaggatctgggagcctttacttctagtagcgaacttgaatggaggtcaagtacctcattgctcctagcacacttctacacgtggtgtctccacgtgaacttgttacatgacacacattgccacaattttaacctgctgcacgtacgtcacagatcacccccacggccttaaatggcctgaattaccgggcatatgtccggtaccgtcgactg

SEQ ID NO: 121241 - DNA, 1180 bp, Homo Sapiens
  misc_feature (85)..(95): n is a, c, g, or t
gggggcaagaaccagctctcaaccctcccagagcttcccatcaacagaaaagaagagaaaagaaactcagctcctctgggacttnnnnnnnnnnncggcagataaaaagggagctaggcccttttatctaccttttccatccccatctgagcctgtgtctccatcttgagcctgtgtctcacaggctcaagatggccctgtccttgtagtataaactaatacaccagtcttgtaaaccggagatgaaaacctttttccaaggacaaatcagagaaaaagtctttaactccaccattagcacccaaagctaagattctaatttaaactattctctgttctttcatggggaagcagatttgggtaccacccaagtattgacttacccatcaacaaccgctatgtatttcgtacattactgccagccaccatgaatattgtacggtaccataaatacttgaccacctgtagtacataaaaacccaatccacatcaaaaaccccctccccatgcttacaagcaagtacagcaatcaaccttcaactatcacacatcaactgcaactccaaagccacccctcacccactaggatatcaacaaacctacccacccttaacagtacatagtacataaagccatttaccgtacatagcacattacagtcaaatcccttctcgtccccatggatgacccccctcagataggggtcccttgaccaccatcctccgtgaaatcaatatcccgcacaagagtgctactctcctcgctccgggcccataacacttgggggtagctaaagtgaactgtatccgacatctggttcctacttcagggccataaagcctaaatagcccacacgttccccttaaataagacatcacgatggatcacaggtctatcaccctattaaccactcacgggagctctccatgcatttggtattttcgtctggggggtgtgcacgcgatagcattgcgagacgctggagccggagcaccctatgtcgcagtatctgtctttgattcctgcctcatcctgttatttatcgcacctacgttcaatattacaggcgaacatacctactaaagtgtgttaattaattaatgcttgtaggacataataataacaattgaatgtctgcacagccgctttccacacagacatcataacacttgggggtagc

SEQ ID NO: 121242 - DNA, 435 bp, Homo Sapiens
  misc_feature (341)..(365): n is a, c, g, or t
tcctgtaggtttagatcctaggtctatttcgtcattctaataggtgtgaagtggtatcttcttgtggcgctgatttgcataatgactgatgaggttgagtgctttccatgtgcttgtcggccatttgtatatcttcattagagaaatgtctatttaagtcctttgcccattttaaaattggtttgtctttttgttgtcgagcatcggagttccttatatattctaggtattagttccttaccagatatgtaagatttacaaatattttctcccattctgtgggttgtcttttcactttcttcatagtgtcccttgatatgtagaagcttttaattttgagnnnnnnnnnnnnnnnnnnnnnnnnngcgggtgttgcttgtgcttttggtgccatatctaagaaaccattgccaaatccaaggtcatgcctcgtgc

SEQ ID NO: 121243 - DNA, 1085 bp, Homo Sapiens
  misc_feature (145)..(278): n is a, c, g, or t
  misc_feature (423)..(437): n is a, c, g, or t
  misc_feature (466)..(486): n is a, c, g, or t
  misc_feature (539)..(942): n is a, c, g, or t
  misc_feature (951)..(951): n is a, c, g, or t
  misc_feature (958)..(959): n is a, c, g, or t
  misc_feature (966)..(966): n is a, c, g, or t
  misc_feature (982)..(982): n is a, c, g, or t
  misc_feature (1055)..(1055): n is a, c, g, or t
ttttctctaagataccaaagtattcagtttattaggatagtacactttaacatattacaagttacaaagcctaagaaaaagcaagcaacaagtcaataaaatcacaactcagaattctaacattttcagatggtatatgtgttgnnnnnnnnnnnnnnnnnnnnnnnnnnnnnnnnnnnnnnnnnnnnnnnnnnnnnnnnnnnnnnnnnnnnnnnnnnnnnnnnnnnnnnnnnnnnnnnnnnnnnnnnnnnnnnnnnnnnnnnnnnnnnnnnnnnnnntgaatcaaacattttaaacagactattttagatgtttatttaatactgaaatgttgtcaactatcataaagtatttctctgcatcacaaaaattccatatattaaggatttacacaatccaggaaaaaaaatttttagaaactgnnnnnnnnnnnnnnnagcctgagcagaaaaatctaaaaaggctnnnnnnnnnnnnnnnnnnnnngcctacagccgcgggcgctccaacatcagaatggtcctcgtgccgaattcttnnnnnnnnnnnnnnnnnnnnnnnnnnnnnnnnnnnnnnnnnnnnnnnnnnnnnnnnnnnnnnnnnnnnnnnnnnnnnnnnnnnnnnnnnnnnnnnnnnnnnnnnnnnnnnnnnnnnnnnnnnnnnnnnnnnnnnnnnnnnnnnnnnnnnnnnnnnnnnnnnnnnnnnnnnnnnnnnnnnnnnnnnnnnnnnnnnnnnnnnnnnnnnnnnnnnnnnnnnnnnnnnnnnnnnnnnnnnnnnnnnnnnnnnnnnnnnnnnnnnnnnnnnnnnnnnnnnnnnnnnnnnnnnnnnnnnnnnnnnnnnnnnnnnnnnnnnnnnnnnnnnnnnnnnnnnnnnnnnnnnnnnnnnnnnnnnnnnnnnnnnnnnnnnnnnnnnnnnnnnnnnnnnnnnnnnnnnnnnnnnnnngggcagcanagggcanngacgtanaaggcggcgtgctggngtttttcaaaggtcggccccctgagagcatccaaaatcgagctaaatcaaaggtgggaaccgacagacaatanaatcaaggtttctgtggagtcctcggggcg

SEQ ID NO: 121244 - DNA, 2253 bp, Homo Sapiens
  misc_feature (47)..(47): n is a, c, g, or t
  misc_feature (172)..(172): n is a, c, g, or t
aagtagaagacgggggtttcacccgtgttagccccaggatgggtctnggatccccctaatgtcgtgatccgacccgcctcaggcctccccaaaagtgctggggattaacggggcatgaggccacccacgctgggccatcaactcccattcttgagctcccatcttttcccanagtcaggcaggctttcaagcgaactgtacttgacaaatgcagagcaattaaattctttattataaaaatctcaaaaatgtccacctttactggagaccaatcttctaaaaggtcaaaagcaatcctgctgtttctctctgaaagctaaactcctttaaatgagaatacgagaatacccagaattttattcccagcctttgtgtggaaaaggcagtttgcattcttaggaaacatctaactgttacctaaaccataaatatttctatctactccattcaacccaattaaagaaaacaaaatgatgagaaaaataggagccgaacagaaagaaaattcacatcattttctactattacgaacattcaaatggtgcttcaaattaaatacttttaattatcattctagccaggatcatactaagtaggatctcatgacagtcacatatgcagcgacttcacctaaaccgtggcactgaatgctctgccatgagccacaagcagcacagtgatcatcacccacaaggacaggttgctgggatgaggcaccctttcctttcatgtttaggttcttctcacctgcatttcactttcctaaaggtcccagccacacagcgttcttttagggattaaagtagtaggaaaaaaataaagagaacacaacatccatccttaaagaaaaaaagtaaatccactttatggtggacttcagctatggacaaatttgggatcagtgttctccagtctgaacatagtcttctgttacctgggagagagtggtcaggtactgccagctcagggcagccaaaagcatgacaaacgacaggtagatgggggagtagtggcttcgggaaatcagctgacagttgggaagattctgcgtccggatggtggagatgatctgccttgttttgctagaagatgggtctgagtcggggattctatgataaatctcttccatatactgatatatgatggctttgacagctggcatattggtggcatccatcatcagggtcactgcttgccctttccgaatcttcactgcccctttgaacacctgctggttattataacaggcagccaaagtggcaatggccatcacctgtggaatagcacagaagttaaacacactctggtttctgagtctcgaaaggtaggtgatgacatctgggatgtggtgcagtgcattggttataagttcattcaggcactgcacggccaagtcaatattctccggcttagcaaaatcccctaacttcttaacatacctgctccaaacctcttgaggccagaactctcttcctccttgctggtcttccagatagtcacggatgatgtttgttttctgcagaaacaggcccatagagttggcacgttctgtatcttcaccaactaaggggtcttcaaactctgaggctgagaaaagacgggaaaggccaattccgaccagcccagcaacatagtggcagtacttgtcccactcctgttcagaggtcacatgcttatccaaaaactctgccatcccaatgcccattctccggcaaatgtcggcaatcactgtttggtatttctcagccagatttctaaactcaagggagatcgttgggaagtcctccagcacctggcgatccttctccttgctctccatgaaccgccagtctggttggtaaaggaaagagtgaaagttgtgtaacagcgggaccttcttttccacactgatggtcatgtcatcttccagtgtgtccagagctcggagaaccagataaaatatgcacactgcgttgcgcatttccccatccagcgcctggataacagctgcgaaactgcgactggtctgattgagatacttgtagcaagttttcaggctgctgctgagcgagtcctggtccatcttgggcatcaccttccgcttgcccccgatccggaagcgcaccaggttgtagaactcttcggggtggccaaggcatttcacgaactccatcctggcgcaggcggcggactcccgggcgcgactctcacctctgcggtcccccggacgcgtggtcgacgatatcccgggaataccggaccggtaccagcctg

SEQ ID NO: 121245 - DNA, 914 bp, Homo Sapiens
  misc_feature (807)..(841): n is a, c, g, or t
attcccccatccagcgcctggataaacagttgcgaaactgcgactggtctgattgagatacttgtagcaagttttctgcaggaaacaggcccatagagttggcacgttctgtatcttcaccaactaaggggtcttcaaactctgaggctgagaaaagacgggaaaggccaattccgaccagcccagcaacatagtggcagtacttgtcccactcctgttcagaggtcacatgcttatccaaaaactctgccatcccaatgcccattctccggcaaatgtcggcaatcactgtttggtatttctcagccagatttctaaactcaagggagatcgttgggaagtcctccagcacctggcgatccttctccttgctctccatgaaccgccagtctggttggtaaaggaaagagtgaaagttgtgtaacagcgggaccttcttttccacactgatggtcatgtcatcttccagtgtgtccagagctcggagaaccagataaaatatgcacactgcgttgcgcatttccccatccagcgcctggataacagctgcgaaactgcgactggtctgattgagatacttgtagcaagttttcaggctgctgctgagcgagtcctggtccatcttgggcatcaccttccgcttgcccccgatccggaagcgcaccaggttgtagaactcttcggggtggccaaggcatttcacgaactccatcctggcgcaggcggcgggctcccgggcgcgactctcacctctcccccggccgtaatggccgaattcccgggcatatgtccggtaccgtcgactgnnnnnnnnnnnnnnnnnnnnnnnnnnnnnnnnnnncgccgcttcctcgctcactactcgctgcgctcgtcgttcgctaaacgcccagcccctatatgagtctatcatc

SEQ ID NO: 121246 - DNA, 1024 bp, Homo Sapiens
cgaagccggctgtgccccggggcccttgatgtgcgccctgaccgggtgtgacgcgccagggatgccccgggaatcccggagtacaccctggttgatccaaggagggaaacctcgggatggtcaagtccctggtataagttcatcaggcacgccggccagtcaatatctccggcttagcgaaatcccctaacttctgacatacgtgccccaacctctgaggccagactctcttcctctgctggtcttccagatagtcacggatgatgtttgttttctgcagaaacaggcccatagagttggcacgttctgtatcttcaccactaaggggtcttcaaactctgaggctgagaaaagacgggaaagccaattccgaccagcccagcaacatagtggcagtacttgtcccactcctgttcagaggtcacatgcttatccaaaactctgccatcccaatgcccattctccggcaaatgtcggcaatcactgtttggtatttctcagccagatttctaaactcaagggagatcgttgggaagtcctccagcacctggcgatccttctccttgctctccatgaaccgccagtctggttggtaaaggaaagagtgaaagttgtgtaacagcgggaccttcttttccacactgatggtcatgtcatcttccagtgtgtccagagctcggagaaccagataaaatatgcacactgcattgcgcatttccccatccagcgcctggataacagctgcgaaactgcgactggtctgattgagatacttgtagcaagttttcaggctgctgctgagcgagtcctggtccatcttgggcatcaccttccgcttgcccccgatccggaagcgcaccaggttgtagaactcttcggggtggccaaggcatttcacgaactccatcctggcgcaggcggcggactcccgggcgcgactctcacctctgcggtccccaggcgctcaccggccggccctcgtgccgaattcgcaacccaggcctcgctacctagccgtaagtta

SEQ ID NO: 121247 - DNA, 901 bp, Homo Sapiens
taatccccccctaaacttttttaaaacaataacctggtctcccaaacactttttgaaggcccaagaacttctttttcctcccctgggggggtctttcccaggatagtccgcgggatgaagtttggtttctgccagaaaacaggccccatagaggtggccccgttcggtgtcttccaccaactaagggggtcttcaaactctgaggctgagaaaaagacgggaaaggccaatttccgaccagcccagcaacatagtggcagtacttgtcccactcctgttcagaggtcacatgcttatccaaaaacttctgccatccccaatgcccattctccggcaaatgtcggcaatccctgttttggtatttctcagccagatttctaaactcaagggagatcgttgggaagtcctccagcacctggcgatccttctccttgctctccatgaaccgccagtctggttggtaaaggaaagagtgaaagttgtgtaacagcgggaccttcttttccacactgatggtcatgtcatcttccagtgtgtccagagctcggagaaccagataaaatatgcacactgcgttgcgcatttccccatccagcgcctggataacagctgcgaaactgcgactggtctgattgagatacttgtagcaagttttcaggctgctgctgagcgagtcctggtccatcttgggcatcaccttccgcttgcccccgatccggaagcgcaccaggttgtagaactcttcggggtggccaaggcatttcacgaactccatcctggcgcaggcggcggactcccgggcgcgactctcacctctgcggtccccaggcgctcaccggccggctggaccctcgtgccgaattcgccacccaggcctcgctaccttagaccggtataggga

SEQ ID NO: 121248 - DNA, 1080 bp, Homo Sapiens
acagtaagatattctctaacataagctttgttttcagagtagcatacattttcctctataaattcattacttggactccatgttgatgtttttgttcatttactgttttcttttttcctatttgacagtctttgaatcaggaagaatcctcctggaatcctgatgcttgtcaatacacaggatgggcagattgcctttcaatagcaccatctctatggctgttgcatgaacacacttcttagatctaaagctcaaaggtgggttgatgtgccactgtagaagcagaccaaagtatagttttctgttccgatggagatggacacttgggtttccagtttgggactattgtgaacaccactactataaatatttttgtcatgcctgttggtgcacatactcatgcatttctgttgaatatatatctaggagataaaatcctgagtcatggaatatgcacattttcagccttagtagataatgccaatgtcctgtgaatagtgaaccaaaactacttggaaaaatattccacaacatttccttttgtttgattcaacaaaccagcacatcctcatagttaacaaaatattgaaatgagacataagaaaatgttctctttaagtagggcatctagaagacactgaagagaatgaagctttttcatttgattattattattgaaaatcattttaaattattggatgtttaaggaaaataaatctcctttctcatgaatcacacactggcaagtttatgagcagtgcacaccttgggagaagtgcagactattggaattatttatgatgattcgtacagcttcttttacaaaaaaatcacaatcttagctgttgttctcattttgagtttctttctcaagtaacatggcagcatttgaggcctcatcttgctctccctcagttaatttcttttgaaccatgctttccgtgtaactgtggatgatctgatgggctgcaagaatatgtttccgctgtgcgttcctcactattcaacattgaagcacttcatgtgagttacatttcgtttgatatctagagtgtaagtaacttacaaatataaagacct

SEQ ID NO: 121249 - DNA, 662 bp, Homo Sapiens
  misc_feature (160)..(174): n is a, c, g, or t
gctgctaggtaggcagttttattatgctgttacatagagctctttccatgaaaagtgattttaacatgaactgcccattctgcaaagaggaaaaatatgttgaattagttaaatatccaattcaaaagatgttacagtaaaatacatgtaagacttaacnnnnnnnnnnnnnnnggacagagacacaatttcttatcctcaattctcatctccaaaaagctatgaaaaccagtttatttacaaagcttggtgacaaaacctgaccaaacttgatctgaggctctttatgatctttagttatacttagtggggatgttcataaatcaccacaaaaataggagtatatttgataatgagctgccatcccagacttttttttagtagttttgagtgaaatattttacacagatcctattagtttttgaatagctcaaaaattttgatgcaaaacacagctagacctaagttttcaaataaaggactgcaaagcagtacttccccaaactgttaatgatacagtgattctactaaattcaaagacagtcccaataaatatttttgtccccttgtatgtcatgaggataaatctccagggaaaaaaagggcatgtcagaacgatgtgcaggctgtgtgaaaactcctcgtgccgcctcgtgccgaat

SEQ ID NO: 121250 - DNA, 510 bp, Homo Sapiens
tttttgctgctaggtaggcagttttattatgctgttacatagagctctttccatgaaaagtgattttaacatgaactgcccattcttatttgttgggctgttgaccaccatgccagtgctttcatccaacccagtatactgcattgtagcccctaagtatgagtccacaattgatcctagtaatccagctaaaccaccaaatgcaataattggccactgcggggcagaaatgtctaaatcattcacaaaaatcagctgtgtgaggaagtatgcaatgcccacaaaggtaccaccaaggagactggagacaaggcccaccactgtaactcctccattggtaccaactggaactttctcccaggttgttatcagtcttggagaacttttactcagaactgggccaacttctgaagcccatgtgtctccagcagagcaggccagtgcagccaagagagacaaacacatccaggaagcggagtactgcttggaaaaatcgactgggatttcccc

SEQ ID NO: 121251 - DNA, 1097 bp, Homo Sapiens
  misc_feature (77)..(103): n is a, c, g, or t
  misc_feature (942)..(942): n is a, c, g, or t
  misc_feature (977)..(977): n is a, c, g, or t
  misc_feature (1075)..(1075): n is a, c, g, or t
ggttgtaacgacggccagtgccatgctcgaaattaaccctcactaaagggaaaagcttgcggccgcggctgtaggcnnnnnnnnnnnnnnnnnnnnnnnnnnnccgtgctaccagttaattttattacgtctttgcgacaaattcattacaaatggctgtcataactaattatagaggatacatattttttaattaggttttcctttttcttcccctcgcacgtcttagtttccttcttttcttcccaaacacagatctggcggtcacgaggaccatcttctctttccctccatcgtcatcactatcactagagctgctggtggtcgcacctccattcttcacgggagcttccttcactgagttctgcgaatctgaagcactggtttttggctctttcgcagctgttctcctttgtacattcattaaagatgaactttcagcatcttcacttgaagatccatcagatgattctgagaggcaggtctcccccaaaaatccaccgcatgtattctttcgtttagaatctgaaagcctctttcttttcaggcttgatgactcttctaaggtatttgttatgcctctcttctgggtttttcgttttgccttatcaagtagctcaaattctttctccatggcaacagaaactgcttctatttcgctggctgctgcttctttctctttccttagcatacatgtcacagctctgtttagtctctggctcttaatacgtttagcatcttctttctcctgttgtgctaatctaaagaaggaatcaattcggagctgtgtctgctgggcatcgagttgctttaatacaggaaacagagatcatctgtcttcgttctgttccagccgaaataccgctgacaaattctctaattttgtcgagatcaggtttccccacagaaagatccttcgagtcatcacacgggtttgggtangctcgtgatattgggttatgaagcatggtgattgnatgccgtcattttttcacctggggccgagataggctatcttggtttttgaccctagcacatccccggcgattttgtccaggccagttctatggatctntaatcgatcagcaactgtcggg

SEQ ID NO: 121252 - DNA, 973 bp, Homo Sapiens
  misc_feature (694)..(694): n is a, c, g, or t
  misc_feature (708)..(708): n is a, c, g, or t
  misc_feature (715)..(715): n is a, c, g, or t
  misc_feature (789)..(789): n is a, c, g, or t
  misc_feature (793)..(793): n is a, c, g, or t
  misc_feature (836)..(836): n is a, c, g, or t
  misc_feature (843)..(843): n is a, c, g, or t
tttaaattatttttattttttgatgaaaacaagaaatacggtagtgacactttatttttccttcaagcacatgggagaagacaaaagtactaaatgatcattgagtttgacagagaaattctactggtacttacactgcttaggaacataaatgtcaagtacattactagggcaagaaatatcaagtaagacaacagagtcgtatttttctttttgaggttattttcacaagacatagctataatttgtaaaatattcagactattgaaagatcacattcaaattatatttctaagaatagagccatatatgaacagagagcaaaacaagctaatacattaatgaatattcactgaattcttcatactgcacaggacacaaatttggtatttttgcacatgttgtcaattataagcaaaaagcaggcctgtaaacatcaattttgtcataggctgaaacagagaaaggaaatggattttactcaaaaacagtgacataaggagcatataccattaatcttccacacatataaaggtcactcctaggataattgagagaaaacatcgacttacattttgtttacaaaaatctactggtgaattcaaggacttaggaaaaattgaaggaaaatcttcctccaagcatgctatttaaaccccagcccctcttccctggagagcactcaaggggctcncctccacccctgantctgcanggttcttcctgtgagctttcccaaccacgcacagcaggtcatcctgctctggactttactcagtttccaactanatanctctcacgtgtgtgtcagactcctaacctcaggtactaggcanggctcanacaaaggaaaggtgaggggtgtctacacaacagataatagctgacgacacgccactatgactgtcgtaatcaacaagtgaatcctatcctaaggagtggattcaatgagtgactgtctcatgtagacaga

SEQ ID NO: 121253 - DNA, 902 bp, Homo Sapiens
  misc_feature (223)..(223): n is a, c, g, or t
gcatgctatgctgcatgctttactgccattgctgtatgctttactgtctttgtaaaaatccccctctccccttttctggtaactggaaaagcatgctaaaaatagtcttatattttcaccccataaatgcagaatcagtaattccttggcttaaagctcttatataatcaatattattggtggtaaataccaagtttggtatctcatagctatctttttttanagaaattaagttcttgaaaatttagccaaatcccgttttatgggaatgctctttagaattcattttgttcagcccctttgttctatggttgagaaatctgaggccttacgaaggttaagagaactttccccgtgtctcacaggtaggtagaggcagagctggaactagatatctggtctgttgactctagctcagtgtcttctggtaactgttgaaaattgtcttagtttgagagatggctgaaataatgaacataaaatgctatttataataacaagtatatgtgaaatttcttattgtaagactactaccggcttactgttgaatagtttggttatagtgtttaggctagaaatgcctcccacattggtaataaacattacaaaatacaatgtatttttaggtaggcattttataaaatgcattatgccatggttgcttttgagatagattgtagtctgggtagcatctttaaaatgtatgtgggcttaactgttgttcatatcaggagatgctctgattgtataggtgagactctgtttctgttatttttaattgctgtatgaaatgtgatcagattattttactaccaacagttatagtttgaaagtccaactgtattaattgactgataatatgataatatagagattaaattgtttgtcttcattccttaaaa

SEQ ID NO: 121254 - DNA, 1062 bp, Homo Sapiens
gtttatattaggatattatacaattttcaaagctaataacagaaatctttttgtatgtatatttaaagcataacaaaataaaagtatttcacaaaagatgtccatattacagtactattgaaatatgaggcacagggtaagtatgcatttgtgggttaaaaacataatacattcattttaaagaataaacatttaatgtgagtaacattttggttaaaataaatatcatagtaaatgttaacagcaacacctgaagtatatggatacaagaaaggtgttttgtaatagatactatgttgaatggtaaagcattcatgaaatggctgtaatatcttactaaatttacaatcattgcacattgttgagcactttatttatatagagatacccttcatccaccattcctaaaccttaccatacaaaacaaagttactccatattttcacctgggtaactggtaccaatgtctaaataaggtttagaatagatatagctttcattttactgctcctcaaatcaattcaaaagtttaacttaatcaatataaaatttacttatgaacacatataaagaacattttataggtgactatataaattagagcttcaaatcatcttcatagttctttgaaattattccattcaaaattaaaatttgatttttacacagtggtttcttcaggaaaaatatgaacatttagatttaaaaagatacaatattcgaagcaaaagtttccacatatagaaataatgaatttccctgatcattaaattcttcccagctatttccttctagcagatatattcactgagaagaaaagctttaatctttacttaaaagttactttgaggggtcaagctaatgaattttagatctatgtattcttaaagattgcaagaaaaaaaagagagtatctgttccaaccagagaacatttcatctcaattatattacattaaaatgaacatgacattaatggtcaataagaataattcttctcatacttctaggaatatatctatggatgctcagtataaatgttaaaagtcattaagagtgtgag

SEQ ID NO: 121255 - DNA, 1462 bp, Homo Sapiens
aactatcaaaatatgctttttattcaaagaaataatagatttctttggagacccgtgtccttgggttattggggtcagaaagttaatttgctctttgctagaaagggtgctataactattggtttacgtttattttaaagacagagatttctaaaaccccagagggacttttgaggccaatacttagaggcatggattacaatgtgggctaaagaaatactaagtctgggtttcctttcatcttttaggctgccctgttcatttcttctacaatcataaaacaaccacataaagatgaatgccttttattatgaaaattgctgttacattacagccaacattccaaaacagtattttaataaacacttgtcttgattataaagtagagcaaaaaccatgatcctttttcaaaagtaattaacatcttctcagtcacttaacacaaatcaggacactctgtatgctcaccacggtgtaggagatgagatgaggaagagcacctatgttattcaaaacagctactagtgttacttatacagtataaaccaacaacttacaatagggcattttttaaaaagcaaaacactgaaatgttgaggtgccacaatacttttgagatggaaaaagccaaagcttgtttcctttttcttcccatcctgagttcagtgtgaagtatagggaagaacaacaccaggctggggatcgatgcagttttttgcttatttcccagttgttagtcctgctcgaaaacacagcctgcatgcaaaacttcctcaggctgccattcacaggccttggaatacagcgtttgcacatggacaaatgaggttcctagcagctcagagtcggtgtctgaattccagtgtattcactctctgtagcatgataaagaaaccaaaaacaaaattcctatgttcttttaagttaagaggcagaagactcctatttggatgcattccacattttggggacagaatgtggtagttttgcacgcaggctgtgttttcgagcaggactaacaactgggaaataagcaaaaaactgcatcgatccccagcctggtgttgttcttccctatacttcacactgaactcaggatgggaagaaaaaggaaacaagctttggctttttccatctcaaaagtattgtggcacctcaacatttcagtgttttgctttttaaaaaatgccctattgtaagttgttggtcaatactgtataagtaacactagtagctgttttgaataacataggtgctcttcctcatctcatctcctacaccgtggtgagcatacagagtgtcctgatttgtgttaagtgactgagaagatgttaattacttttgaaaaaggatcatggtttttgctctactttataatcaagacaagtgtttattaaaatactgttttggaatgttggctgtaatgtaacagcaattttcataataaaaggcattcatcttt

SEQ ID NO: 121256 - DNA, 578 bp, Homo Sapiens
  misc_feature (263)..(278): n is a, c, g, or t
  misc_feature (520)..(538): n is a, c, g, or t
ttaattttatttttttatgaaaagaaccagtgtcaatccgcagaccctctgtgaagccaggccggccgggccgagccagcagcccctctccctagactcagaggcgccgcggggaggggtggccccgccgaggcttcaggggccccctccccaccaaagggttcacctcacacttgaatgtacaacccaccccactgtcgggaaggcctccgtcctcggcccctgcctcttgctgctgtcctgtccccgagcccctgcaggtnnnnnnnnnnnnnnnnactcaagagttagagcaggtggctgcaggccttgggcccggagggaaggccactgccggccacttggggcagacacagacacctcaaggatctgtcacggaaggcgtcctttttccttgtagctaacgttaggcctgagtagctcccctccatccttgtagacgctccagtccctactactgtgacggcatttccatccctcccctgcccgggaagggaccttgcagggacctctccctccnnnnnnnnnnnnnnnnnnncctgagcagcggccgcaagcttattccctttagttgaggg

SEQ ID NO: 121257 - DNA, 1622 bp, Homo Sapiens
  misc_feature (159)..(167): n is a, c, g, or t
  misc_feature (203)..(204): n is a, c, g, or t
  misc_feature (212)..(212): n is a, c, g, or t
  misc_feature (214)..(214): n is a, c, g, or t
  misc_feature (217)..(219): n is a, c, g, or t
caggtgacgcagttttcccccgttcccgagggttttaaaacggccggccccggtgcctaggcttataattccgcctccccttttgggggccccccttgtcccaagaaaagctgggtacgcgtaagcctgggcccccctgaggggatacttttaaggcgnnnnnnnnnttttgtgtgtgtgttcgtggccgggggtttggtgtnngtggggtngnttnnnttttaaaaaagcaaagtttgttaatatttattatcttatttttagaacagaaataacattaaaatagatgtttttagaatatcaacatacaatcaaaaacacaaagtccaaggatcctccccatctccaaggcttaaagggcagctatccagctgtagtctattttcctaaattttctcagttctttttcttcagattttgacaactgatgtataatgtcttctcctaaacctgtgttacttgtatcctggactttttcggtaaaatcattttcttcatctgaatcttcactttctttttcttcttccatatctacatcttcaggaatttccttagcactcttagtctctttagacagcagcaatgaatttacaaacatggagcacaggaaagcagcagatggcaggacatgggctggagtgtgaagaagctcactaattgcgggtatgttttctgttaagggtagttgtaccagctcattctctaaagtttcgtttagtttttcatcctgctgttgcctgtgttttcccaatatgaaataaaatggggttgtgggaagactttcttctgctagcagctgtttgcttgttggtgtgagtttttcttctggagactttgtactgaatgtcaataaactctgtgattttgttaggaagtaaaactgggatctatttagccactggtaagcttctgaggtgaaggattcagggacatctcgtggaacaaacactccccactggactttctctctggagatacccttttgaatatacaatggccttggctcactaggtttaaatacaaacaagtctgaccccactgaagactgagagattgcagcaatattctctgaattaggatcgggttccataactctaacatttaattttgcattccactccaatgcacagctcagcagattccaacagcaaagaatgccattttcagtagcaccaagtagatactttgaacacgtcaatctcccaaagcaaaggtgccttattttcccagctcgttggcaaaatgtacatttaagttcccatgttacagaatcccatattgtgactatttcctcaaaactaactgctagtaaagaaccatcttcggagaaacaacagttagttgcttgatacttgtgataactaccaacaaagtcacaggtccagccaacagcttttttgtatatgtcagagtcatctgttaatatccatactttgaagtaaccatctttgctagctgtaaccaaggtgggctgttcagatttttctgcattacagaaacagagagctgtaatgcagtcttcgtgtggcatgttaattttagtgttaagaataaacccttgtgttttcttattatacatccacagtttcatttgcaattcaagctcagtttccttttcttcc

SEQ ID NO: 121258 - DNA, 427 bp, Homo Sapiens
tttcctttaagagaatatcaaactgatgtcaccaaatctaaacccacttgaagaccaatagctattacagttgtactacagaataggtcaaagtcaccgttagaaatattacactttattgaattctggagcagctaatctaccctcccctattgaccaatgacaagaatggaagaaaatatacaatggttaaagaaagagtctataaccactgtttgtttaaaatgttgaaacaactttcactgtactggtgaaacagttttaataccctaacatacacagtaatgattcattcttgtttaaaacaagaggtgatttcgacttgggattgggatttttattttttgagatggagttttgttcttgttgcccaggctggagtgcaatggccaatcctggctcactgcactccagcctggagtcttta

SEQ ID NO: 121259 - DNA, 717 bp, Homo Sapiens
  misc_feature (698)..(698): n is a, c, g, or t
catcatcctaactccattttatttttaaatataagatttataattatcacttaaaagatatatacatcctctacatttcatttttttatccagaaactttaattgcagagatggctggcatgtaaatggacgcaaggggccacagtggcccacggaaagcaaatggaagggactgacctactggtgactttcattctagaatcaggtatgtgttgagtgctttgccccgcaggttcctcatctcctcgagcagcttctctccggccttctctgctggttgtgcttgatctttcacttctttctccttcctgatgtccttgtagttcaacatagggaattccactttgatcatttctggagtcaacataacttctacattctgctcacagagctcacgttctactgtttctagtctgtcctcttctggtaaggcatcaaggatggcagggacgtctatcggaagcataaatgaattgaaggaatcgcagctctttgtggtctccatcttggaggggtccggcagggaggagagaaccagggactggaagcttttccagtgcattattccgggaataatgtccgtgtgatggagaaactgcttttgggtgacaggaatgctggacccgtggcgggactctttggtgaatttgtacttggggtgagagcatagatggtaatctatcaacgtttctgcatangtcagaggatgcattacag

SEQ ID NO: 121260 - DNA, 524 bp, Homo Sapiens
ttttttcttcccagaggtagtttaatagaaacaaggggcaaagttaaaggaatgggtggttcagtaacaggagttcaggaaatagcgggtagggaggaactctgggaccaagagtcttcctaatgtgccggagctcttgtcatgcagggctggtggccttctttgtgctataccccgactctgtcgtcacagatacagcagcagatccaggtgctccgttctactgtttctagtctgtcctcttctggtaaggcatcaaggatggcagggacgtctatcggaagcataaatgaattgaaggaatcgcagctctttgtggtctccatcttggaggggtccggcagggaggagagaaccagggactggaagcttttccagtgcattattccgggaataatgtccgtgtgatggagaaactgcttttgggtgacaggaatgctggacccgtggcgggactctttggtgaatttgtacttggggtgagagcatagatggtaatctatcaacgtttctgcataggtcag

SEQ ID NO: 121261 - DNA, 545 bp, Homo Sapiens
cattttcctaactccattttatttttaaatataagatttataattatcacttaaaagatatatacatcctctacatttcatttttttatccagaaactttaattgcagagatggctggcatgtaaatggacgcaaggggccacagtggcccacagaaagcaaatggaagggactgacctactggtgactttcattctagaatcaggtatgtgttgagtgctttgccccgcaggttcctcatctcctcgagcagcttctctccggccttctctgctggttgtgcttgatctttcacttctcagtgaaaacactcagcttatgaatgattcaaacctggcttctggcctcagctgcatcagtttctgagcatgggcaagttacccaagaatccacagcccctgtttcctgatgtgcgaatggtgtaattcccatctcccagcattgtagcgaaggtgaaatgagatcttattcacagagatcctggtgtgaggtcttctaagtgctcagtcaatgctggctggtttttcatctttatgaatgaggta

SEQ ID NO: 121262 - DNA, 1675 bp, Homo Sapiens
  misc_feature (1565)..(1599): n is a, c, g, or t
atgctttaaaaaatgggatatatattttggataatttgcaacctataatcctaaaagaactgccagaatgcaaagatctttttaatattattatttctggtgaaatcaaactcaaaatataatacctaggactccttgtccaaagaagaaattaaactagataatttcttttctgaaatagtctgcaaattataattcacaagaagtacacaaaatagggtaaataaaagtgtgtatacatgaaaagctacaataattccaatttttgcttccctggcaaggtactgtacatatacatcaacataatagaaatggcacagtctctgaggacacgtttcacattttatttacattttaagactaactttaatctcaaaatcacatatccatacacctatttcctttttgttgacttcacttaaacttaaatgcatggtttgttaaacaaagactgtaaacaaatatttaccatgtctgttacatgtaacacacaagaacagcttttaacaggaattcatcaactccccccaacattttttattataaatacaggtatcaaaacaatcctgaacatatttttgatactactagtagtcagcacccacattgcttcaaaaattaacacatctgtgacaatattcattgtacctgctactttttaaacaatttcaactgcagctctctttcactaagtaagatgggtaaagcatgccatttctgttttcttgagatttttactttttagaaacacacatgcttccactgccatctgacacttctccacacgctttcatcttgtaaacctgaattctatttcgagtactccaggtttatgtttaaatgacagtgcctttcaagagaaaaaaaattgtgctgcatttttcctcctgttacctgaaaacataatgggtgtacatatattaaatatattcttacaaatgtccaggtcatgtttaccagctggaattcttttacttaatgtgtattttgcattgtgatatttaatcaagacattaacatgagtagaaggttgttgatttaagacaagtttgagatccactaaaattaattgttgtatgtttgtccttctggtggctgtggaagcttcatattttctttggacatcattagacgtcttagctcttgaagtacaactttaatgctatatgaattttgccattttgctaacactggtatgctccgggcatccaccatcccactggaattatttattccgttcatattaatttttgttacaaatctaactgacggaggagcttctgggtatttaggtccacattctactttcaggctatatattctgttttcataatttgtccttggtggcccaataatcatgcctgtccaccttgtaagtgtcatatcttcatcatcttcaaggccccagctaactgtaccgtcgcctactcctttttgtccttcttcaagttcttccaacaagcgaaaattacgaggaactttaactcctgtggagaccgccatcttctcctgcccccggccgtaatggccgaattcccgggcatatgtccggtaccgtcgactgnnnnnnnnnnnnnnnnnnnnnnnnnnnnnnnnnnncggccgcttcctcgctcactacttcgctgcgctcgtcgttcgctctgagagctagcgccctatagtgagttataca

SEQ ID NO: 121263 - DNA, 991 bp, Homo Sapiens
  misc_feature (876)..(907): n is a, c, g, or t
tttcttaagattttaacttgttagaacacacatgcttccactgccatcttgaccacttctcccacacgcttttcatcttgttaaacctgaattctatttccggaggaactccaggtttaatgtttaaatgcacagtgccttttcaaggagaaaaaaaattgtgctgcatgtttttcctcctgttaccctgaaaacataaatgggttgtccatattattaaatatattccttaccaactgtccaggtcatgtttaccagctggaattcttttacttaatgtgtatttgcattgtgatatttaatcaagacattaacatgagtagaaggttgttgatttaagacaagtttgagatccactaaaattaattgttgtatgtttgtccttctggtggctgtggaagcttcatattttctttggacatcattagacgtcttagctcttgaagtacaactttaatgctatatgaattttgccattttgctaacactggtatgctccgggcatccaccatcccactggaattatttattccgttcatattaatttttgttacaaatctaactgacggaggagcttctgggtatttaggtccacattctactttcaggctatatattctgttttcataatttgtccttggtggcccaataatcatgcctgtccaccttgtaagtgtcatatcttcatcatcttcaaggccccagctaactgtaccgtcgcctactcctttttgtccttcttcaagttcttccaacaagcgaaaattacgaggaactttaactcctgtggagaccgccatcttctcctgcagcccgacgcagccccccggccgtaatggccgaattcccgggcatatgtccggtaccgtcgactgnnnnnnnnnnnnnnnnnnnnnnnnnnnnnnnntatgcggccgcttcctcgctccactactcgctgcgctcgttcgttcgctacgagcgaagctagcgccctaatagtgatggatca

SEQ ID NO: 121264 - DNA, 413 bp, Homo Sapiens
aagatatgtgagaacttttcatagatgaactttttaacaaatgttttcatttacaggaaattgcaaagaaaattctcaagtgatagtcttttttttaagtgtttcgtaagacaaaaattgaataatgttttttgaagttctggcaagattgaagtctgatattgcagtaatgatatttattaaaaacccataactaccaggaataatgatacctcccaccccttgattcccataacataaaagtgctacttgagagtgggggagaatggcatggtaggctacttttcagggccttgacaagtacatcacccagtggtatcctacatacttctttcaagatcttcaaccatgaggtaaaagagccaagttcaaagaaccctagcacaaatttgctttgggattttcttttcggg

SEQ ID NO: 121265 - DNA, 705 bp, Homo Sapiens
ctatttttgttcatatatttccagtttttacttatttatgtttgcattttatgtttaacatacttaaaactttttttggtattttgtgaagacaaatccatatgctgttttgttaatgtatacagaacacattgtgaaatacagattatagaagattcctctcataggatattactgcttatagaaatgctggacgttttcaatagtgattttgtctttaacttgaattgtagctttggacttgaagctactactaaaggtagcaggaattttaacatgctgacagttaagttctcaaacatttgttaaacaagttacattttaacttttacactggtaattcttaagattactttgttacttgaagtgatagattagttacctgtataacagttttccaaaataattgtcaactgaaaatgtgatatcaccaaatcgatgtcttgttctgtgtcttagcttgatgaagaaatctctggaattgtggaagtggttggaagagtaaccgccaaggccaccatcttgtgtacatcttatgtccagtttaaagaagatagccatccttttgatcttggactttacaatgaagctgtgaaaattatccatgacttccctcagttttatcctttagggattgtgcaacatgattgatcttgatggattttcatacgattgtaaatgagctatattaaagtctattaaagg

SEQ ID NO: 121266 - DNA, 437 bp, Homo Sapiens
  misc_feature (73)..(73): n is a, c, g, or t
gctggccccgcagtcccccgccgcaccaggcaccggagcttcacacccccacttccggggtcaagtcaccgcncgggaatcctgtgatcgcagaaagattcatcccaccggaaaaatgtttattctttcagatggtgaaggaataaatggaaccatcgagttgatggaaccccttgatgaagaaatctctggaattgtggaagtggttggaagagtaaccgccaaggccaccatcttgtgtacatcttatgtccagtttaaagaagatagccatccttttgatcttggactttacaatgaagctgtgaaaattatccatgacttccctcagttttatcctttagggattgtgcaacatgattgatcttgatggattttcatacgattgtaaatgagctatattaaagtctattaaaggaagcccttcttgtttgagg

SEQ ID NO: 121267 - DNA, 470 bp, Homo Sapiens
  misc_feature (368)..(368): n is a, c, g, or t
ttttctccctcaaacaagaagggcttcctttaatagactttaatatagctcatttacaatcgtatgaaaatccatcaagatcaatcatgttgcacaatccctaaaggataaaactgagggaagtcatggataattttcacagcttcattgtaaagtccaagatcaaaaggatggctatcttctttaaactggacataagatgtacacaagatggtggccttggcggttactcttccaaccacttccacaattccagagatttcttcatcaaggggttccatcaactcgatggttccattttttccttctccatcttttccagcctccctacgaagcagacaggcttgtcgatgaattgagctagcatngccggcgttgatgcgcgacctgggcaagtccatcatgtccaccatgattatggtccaagactgcggctggcgggaaacccacggacgactgaaactgtgcgc

SEQ ID NO: 121268 - DNA, 827 bp, Homo Sapiens
  misc_feature (95)..(95): n is a, c, g, or t
  misc_feature (98)..(99): n is a, c, g, or t
  misc_feature (106)..(114): n is a, c, g, or t
  misc_feature (116)..(120): n is a, c, g, or t
aggtatggaccatggtcactttacttactggggcccgcggcgccaaaaggaatggtcttgaaagcttcttgaggggccgaggcggccgacaaggnttnnttttttnnnnnnnnntnnnnntttgccacgtaccattttagtttttattaataaaatagaaacttagactcggacaactgctttattcttgcatctaatctgaccatatattggagtagcaattctttataaaaggacttcggtgagaactgtcaatatatcagttccatcaaaaactctaggttggaatatcttaaaaacagcaaattaaatatgagaaagcacagaaatctctccctcaaacaagaagggcttcctttaatagactttaatatagctcatttacaatcgtatgaaaatccatcaagatcaatcatgttgcacaatccctaaaggataaaactgagggaagtcatggataattttcacagcttcattgtaaagtccaagatcaaaaggatggctatcttctttaaactggacataagatgtacacaagatggtggccttggcggttactcttccaaccacttccacaattccagagatttcttcatcaaggggttccatcaactcgatggttccattttttccttctccatctgaaagaataaacatttttccggtgggatgaatcttttccagcctccctacgaagcagacaggcttgtcgatgaattgagctagcatgccggcgttgatgcgcgacctgggcaagtccatcatgtccaccatgattatggtccaagactgcggctggcgggaaacccacggacgactgaaacccc

SEQ ID NO: 121269 - DNA, 943 bp, Homo Sapiens
ctttcagtttggagtgggatacaacgctatttattctggatgatgctcaattccatacatagtttagggaagaaacatccataagaacatccaaaaacattatgttaccaaatgctaacatgtgattgtgctccgttgaatagtaccattcacatctacaaagtacacaggcagacgattttaggtgtggagaccaatttgcttttgctgctacagtaattcacaaccatcatcttcgagatttccatgctgttctagaatatggagtagtcctttttttatctggtggcttaaagtaggaataaacaggcgctgctggatactctgcatcaggattttccgccatcattttcagttttgcttcaatggcttttatctttgcagtgacacttaggttagactgagtaggctcagtgcttgaggatggctcgagactgattggaagaatcttatcattcttgttatgatcatatctctttacttgagcatgtgcccatcgcaccaccagcttcttggacagggccaacttgccattgagacactggatggcttgctctgcttcctgcttagtttcaaagttaacaaaacagtagcctcgaggctgtccctccaaagcacctgacttgtggaagaggaagtcaaactgctttaccttgccaaacttctggaggagcttgaggaggtggtattcggtaattttggggtccaggttgccaatccataatcggtgtccttcctgcagagagccctctgaaaggatggatgcattctccaggggaagagttttggtttctgcttccatcaatgtctatgaaatactcgtggcctcggcgtggtgctctcagctcatgcccggaaaccaggtcccgacgccgcggtcagacggacctctagacgcgtccgcctcaatgccaccggacgcgtggtcgacgatatcgcataa

SEQ ID NO: 121270 - DNA, 1597 bp, Homo Sapiens
  misc_feature (1586)..(1586): n is a, c, g, or t
aatgtttcttgataattcactactggtgccttgtgaaatgagtctctaaacctgcagacatcctacactgcctctgcaatgtaccaagtgccgagctcagcaatgacatcagaaactaatttccgttgtttttcctaagctgtaaagagatctttcaccagcgaggggagccattgtgttggcaaaggagttgtcctaaatactgttgtgtactgcattccgccacagttctccattttctgaagactgcctttcttaactgctagaagatactcatgtactaagaaaaagagatttaaggtgggttaattatagtagctgtatgtttaatactgctgtaaagatacacttttttcatacaattattgttaataatttgaagatgtttattgcattctatttttggtgggaaaaaaatgtaacatacatttatttagcacgacattgtgaaatacacaaaacatgtaactgagaaagcaggaattttctattcctagtccatttctgaggactaaatcatgaactgctcccaatgtaattaaatatttcttacaatagttgggcaccaagtttaagatttattaattttctcctctcagtataggcagcaattcaccattttctttcagttccttcacaatatccaatcctcccaccagctcccctttcacatacagctgagggtatgttggccaatttgagtaagcttttaatccttgccgaacttcttcatcctccaatatatcgaatgtttcatattcaacaccagtactatttagtatttccagaatttgtttgctgaatccacattttgcttcctgtttgtttcctttcataaagagcatcacagaagctttatttgtcagcactttgagcctttcctctaatttgggagctttgggacaaattgtatctagttcttcagatgcttctagctccttaattatatcaagtcctcctatgagctctccagaaacatagagctgaggataggtaggccaactggaataggctttgagtccctgtcgaacctcttcatctgagaagatatcaaaactgctaaactgaatattatgtttgtgaagaatttccaccatctgcttgctgaaaccacagcgtggttcttgaggagttcctttcataaacagcatgcagggggcagcatgagtcaatttcttcaagcgaaggttgagatcttctttaagatgttcattagcgctgggtaggaaggagccactagatgcatgtcgctgaacttttttggtcaactctggggcatgtgcaccatctaatcggtcgattttctgagaattcttgaaaaacagaaaagtgggaacagagctaatttcatatttttcagatacttcaggaacaccttcagcttccaacttcacaaatgaaacttgagggagttctttagctaactctgccataacttcgttcatctgtgcacactgtggagcccatggtgcccagaaatggaccacaaggagggacttggctttgaggcgcagcagctcctcaaactgcccggctgagccgacctcctccacggccgctacagctgcctcagccgcccccgcccncgtgccgaaat

SEQ ID NO: 121271 - DNA, 693 bp, Homo Sapiens
aagtgaggattttattattaagcagtacctataattgatattgtaaatttcacaagtagaaatcttgaggtggctcatagtcaatgcatgtattgtttttgaattgccttgattttaacaccctgtggtaggaataatttgctttctacttaggaggactgctttctgtttcccatttgtaagaggctttaagaaaagcataaactcaagtcctaaagcaggctgaggcaaccatatccttagaacacttctcaccacagcgtgattcttcacatagcagggcttgcacacgggcttgtcattgaccatcacgtatatctccccagctagaatgctatcacagtcaaagcagcagaagtgtttcaggtgccaattctggttttctgcctgggtatactcattgctgaatatcagctcgtcacagccagcacatcggggtttctcgctgtcacagtaatgtctgccacagtatagcttctcattcttccaaaaataaatcatgtcaaccaggagttcatggcaggtgctgcagacaaaacaagctgggtgccacagtttatcatagccagccctttcggcatagatggctgggtcaccttctttcatactcagtttgcagcaatagcaggaatattgagttctttttgtgctcagcagatttgtcctgcatggcccccactgctgctggggtgc

SEQ ID NO: 121272 - DNA, 698 bp, Homo Sapiens
tgcgttttatttttttcaaattgcattttacagtagaaatgcagaccactttggatagctatggctcgatacttctgggtgccctcctcctaagacatcctcttcttacattccactgaacagaaaaccatcccttctactggcatgaacttctgcccaatgaggcatttgctgcagcaagagcacagaaagcactctgtggatgcatgccagctgaaattgttataggtcacccgctgcacttctgggtcgatggcattgtggcatccttgacacaccacagcgtgattcttcacatagcagggcttgcacacgggcttgtcattgaccatcacgtatatctccccagctagaatgctatcacagtcaaagcagcagaagtgtttcaggtgccaattctggttttctgcctgggtatactcattgctgaatatcagctcgtcacagccagcacatcggggtttctcgctgtcacagtaatgtctgccacagtatagcttctcattcttccaaaaataaatcatgtcaaccaggagttcatggcaggtgctgcagacaaaacaagctgggtgccacagtttatcatagccagccctttcggcatagatggctgggtcaccttctttcatactcagtttgcagcaatagcaggaatattgagttcttttgtgctcagcagatttgtcctccatggcccc

SEQ ID NO: 121273 - DNA, 553 bp, Homo Sapiens
  misc_feature (430)..(440): n is a, c, g, or t
cattggacttttttccaagccatcatctttcacttctccctcttctgatggattatctgaatgcctaggagatgaacgctcaattccatgctcctctttcagcctgggcactttgttttccttctttacccgaggcttccgcttctttaatttggcctcttccccacctgtcacagcccccttcttctccagaccctttctgagcagcttcaacaagtaatccgctcgggtctgtagctgcttcccctgaggctttttatctgtctccaccggtagaattttgtcagttaatttaagctctgggtctgttttaattaactcccagtttccatagccatgttcataaatccccagcaacaggcgagaatcatcttccaccccccactctacatcaaaatgtgcagctttgacacgacaggttaagcagtannnnnnnnnnncttcagggtccacagggatagatttatgcagcatctcaaactcctcattcatgttggataatggatttcacattaacctgaactccggatatcttgattgttggaccctgaag

SEQ ID NO: 121274 - DNA, 379 bp, Homo Sapiens
ctttaaggtgttgtgggtagccagagggaagtgtggaggagggaaaagaggggagagcagaaagaacagaaggaggcaagagggaagaagccaaagaaggtgaggtggcaccggagagcaggagtactggggttgggagatggtgtccaatccctgggtctccatcaactcttgtctgggggcgggtctctgtgcactttgtttttcttcatactgtctaggtattcctgttgggacactgccagcaccgaagctaggatctcatcatcatcccagtcattcagacctgcaaaggcagagggggacatctgctgaatgagggcccggcactccaaagcagggtagagggacacaaggggggaagttgcccggtcggccc

SEQ ID NO: 121275 - DNA, 716 bp, Homo Sapiens
gcagaatctgattcatgagaaggtgagtttattgttttcagtttagacttttgggaagttggactagagaggggagttgttggggtcagtgctggcttaacagaaaacacagcgaatttcccctccagttctccccaagtccactgaacaaggctagttcctgcaccacccaggattcaaaggaaagacgaagggagcagaacttgtggcagcaacaggtaaacttcaagaaggagggcaggagccccaccctacagggctgggaggagcccagaggccccatctgtttctcctccaggagttgtcaaggcagcagaaaggagtcacccagccaaaggaggagatggctcagcggggctgcaccaaggggccaagaggccctacccgtgtctaaaccctcctctcactcccctaagcctggtgaaagagtcagaagccccaggctcctttttctgtttcttaactcaacagctaaaaaatggctccaggtagtgagtcaatgaagttcagacatgttggtgtaaagtttctcctctgctcctgaaaacttcatcttcttggtgtctcatgtcctcattctcccctatatgacatgcaaaaacgatctttctttgaaatccctctgggaagaagcatgtttattgaaactgtccttcagccttaaatacaaaaataaaactgaaactgctccagaaagcagctttctccaaaaatgt

SEQ ID NO: 121276 - DNA, 2818 bp, Homo Sapiens
  misc_feature (1231)..(1248): n is a, c, g, or t
  misc_feature (1853)..(1861): n is a, c, g, or t
  misc_feature (1939)..(1959): n is a, c, g, or t
ttttttttagcaaaggccacagcacaaaatttattgagattatttactaaataattgatatacatccaacatcactgaatggaaataatttaaaaataagcaaggcttaaattggggtctttcaaaaaactcaaaacattcttggtgactgtatctttaacaaatggaatgacaaaactagttaagtcatattatctcaatcaactccaaaactcaatgttgccaacatgtttttctacttaaaagcaaacaaaaagcaaagcctcataatttagtaattaccatgtttcttggtttctgttctcaaatgccacagaaagatacctgatgaaaggaagcaaagcacctagtctcatcagtcttcttcaaaactttaaggttgctttcacaatctcactataaatatttagattcctatctgacagatttcttcacttatgtgagtaggaatgctctcgaaaccttagtctttactcttgcttcatactagagctgtttgattaaaccacctctgtatttgctggcctgcaacactagataagaactcattcctatctcttccaagaaaccaagataatctcaatatgaattttagtggccaatatgttatagtacttagcaatactttgttttctaatggcaagtatgttgaaaaatttatcattaagtgaatttcataacacatagaaataaatgattctattaaaatataaaaacatccattaacttgtcctatttccagtgactttaaatatcaaatctattatacaaagacaaaattatttgccctatttgaccctgtgtaccaaatgatgtaagtgctgaaaataagaaacattttaagattttaaatctcatattaagaacctcggataccacttagcattgtgacagaagaaaaaaaagtaaggcgaaaacaaattcctcagagatttttaaaggaagaattggtgtaaaagaatattcctttggactctatagccttttaaaaatcatttatctttcggtgcttcaacatgatgccaaacaaaaatctactgaataaaaatagcaaggaagggaatcaaacatttataagatatatttattatttttctgaccaaagtgcaatgatttttaaatctttttaaacaaataactatgaaaaaagtattcaagaaaataaaatacaaatgggaaatttaactagattgcttcttctaattaatcctaagcttttattaagtctagnnnnnnnnnnnnnnnnnncctttgaagtgttactaaaatgctaactgagaatcattttagcataaatctagccacatgcatttcaaggttccactgctacgaattttgttaagatcagctgaatcatgaataacactatataatagagtataaggaacacaagcattagatgtgatccttgccccatacccttagattatgtcagactaaagctgacaattctgccaggctctgaacccctagtgcccccaacccaaatcttggaagcaaagaatatgccctgtcatacaactttgtacaagttgtagtaaaacaaagcttaagttttctcatctttctacagcaaatggtcagttatttaataaacactaaaatgctcctaagaatccattttgagtttgtttaccaaacacattgtgcaagaactgactacacaaaaagttcctttgaaatttggtccacaaattcacttaaggttggaaatttaaaacttgcaagaaaaagaggaagcgggtatccctaaatcctaaaatgttgtgattactagagggatatatacgcgtactaaaaagttttgctcacagaaggcacaaactataaaagggatattctttttgaatttnnnnnnnnntagctgatacccttcgtttggtgagcaccataactaaggtgaagttaaacctgaattcactgtctactcctgtgaccnnnnnnnnnnnnnnnnnnnnntttactttgttttaccatgtactttccagccactaattgagatgtagttatgaaagattagaattgccttaaaaaggggtcatgatagcagctatcaaagcaatattcaagcatgatttcaaggatgctttcaggtttagaattagccttccttgtcaaaaatctgcacaacttcatcaaaaacttcatcaacagatttagaagcatctattttcttgactttccccatttcttcatataagtcaataattggctttgttgactgaaggtaggtctgaattctcttttccaagctctctctgttgtcatcactcctaccactactctttcccctctcaagacatcgttcaatacaaatctcattattacagtcaaaaaagagaacgaaagatacatctgcctgtcccatccatggtcttgttccatccttgaaggttgtcttgatttcttggaaacccatcaatcaagaatttattcttctgagcattggcagccattgtctgatccatttccctctttaataaactgatggttatctcaactggtacaatctttccttctttaatgtacttttcaataagttcaccatactgtgaatctgggttcttcctttcatcacgaagcagctctcctgcagaaaggtgtgtgtagccatatttctcgacgatgcgggcgcactgggtccccttgccggcgccggggccgccgaggacgaacacgaccagcggcttcatgagacgtggagagcagaggagaatcggccggcgggtctgcagcaggaagctaaggcccaggacgtggagcagcccgctgcggcagcgcctcgtgccgattcgacacccaggcctcgtacctagcg

SEQ ID NO: 121277 - DNA, 1266 bp, Homo Sapiens
  misc_feature (1190)..(1224): n is a, c, g, or t
ttcttaattatatttattatatgaaatacaaaatgtggaaaatttggaaattacagaaaaaccaaagatgaaaattacagtgactttgttccaccatacaaagataaccactcaacattttttagtatgccttccgtcttttttatctgctctacgtatacaagcatacacccatattttaaaaaacaaaattgaaatcacataacatgcactatttttacaaccttttaatattcaaggagcatttttctttcagtcagatgttcttttacatgacttttaatgtctgcgcggtactccaccatctggatggagatacaataatttacttaagcaatcccctattgcaaactttcgttacagcagaaaaggaataaattcccaaccaaaccattgcttcccatttttctccattgcaatgctgggatgaacatcttatcactaactaaatccttaagtattttcttaggataaattcccaaagatagaattcgtaggtcaaatgacatggaggcttttaggccacatgacacatatcacccaactgtcatccaggaagcctgcaccgatgtatactcccacacgcaatgtatgggaatgttttttcagtagtctctttgccaatattgggtcttatttttttctgttatggtttgctaagggaaaaatgcttccagctctatttgcctttctttaattactaatgaagcatactttttttcatggttttatccattcagatttcttttatgaatttcctgtgtgtgtcctttcgcagatggttcttggtccttgaggctgcttatataaacattacaggctgggcggaggtggaagtagggcggtgaagccacagggcaccgcactatggtgccacatctcggaggcagaaagcctggagagaaatggtgatcaaagtaggagagggctggaggctcgccgtcaatggaggctggctgccctccctcctcttggggtgctcctggcctttaggggctcctctgctggatgcccaggtaggaccctgtgctctccaggcctggtccttcactggtctccatattcccaggctgcctctcctcacctctgctccatgatgggtgaagatggcagaggcacatagcgagggctggagggagcccggccgtaatggccgaattcccgggcatatgtccggtaccgtcgactgnnnnnnnnnnnnnnnnnnnnnnnnnnnnnnnnnnncgccgcttcctcgctcatctagactcgctgcgctcgtcgttt

SEQ ID NO: 121278 - DNA, 741 bp, Homo Sapiens
  misc_feature (61)..(61): n is a, c, g, or t
  misc_feature (79)..(79): n is a, c, g, or t
  misc_feature (626)..(626): n is a, c, g, or t
ctagtcaagattgtttaaaaatacatatttgtacacattttacagcaaaaaaacttttgtnggctcagctgcatacccntgaggacttctgctgagccccagtgcatagcagagcatagttggaaaatcacagctctagcctcatccacagatgtgaagagtgaaacagcacttggttggcaggaaatcctcaatgctgagtagtagtggctccctgaggtactgtagtctgcacttccaagagtggggatgcctctggtcagaagggaaggtagtgagtccaaaggaagctgagaattctccatgagcttgagttctgttcgcaactgctcccttccttcagcaaatccaagtttcccccagagaatcccattcccctagacagagcaggtggttctcccgcgaagagagtcagatacaggccactgagggggtcttcctggctagctgaagcagagcccgccaaaatagcttcttttccaatgaaacatttctgaatataacaccagaagcatctgttatagttgcaagttgtacaggctgacattgcctcgatcgacagtgatgctgtcgttcacccgacaaacactgacttctacatcggtggtgaagtaggtaatgcctanccgggtgctgccgagtgtgtgtgtgcatggtcagtcggccgctgcagacagcttgatcctttgacagctatgcagggctgcattcatttcacacttccagctgtcctgacctgtc

SEQ ID NO: 121279 - DNA, 661 bp, Homo Sapiens
tgaggtcttaaaagcctttgcatcatttttattttcaataaaagtgaattgtcttttacaaaaccatggcgtcctggcaaagttgcatcactggggcggcttctggccaaggaagaggctcttggtggagaggactgtgaagccgtcggcaggtgtgccctcggttgtgctgtcggcgctggctgccttactgacttcaccctgcttcttggatttccgggcccctttcttgcctcctgcttttttagatacaggcttcttctgggatggagacttggcctttttggctgggggtggtgtgatgatggcttccaactttcctttggatccccgcttcttcgctagcaactcggggtggatgttgggtaacacacccccactggctatggtgactccttttagcagctgattcagctcttcatcattggccacagccagcaggatgtgccggggtgtgacccgtcccttcttgttgtctctcgcctgcattgccagccagctccagaatctccgctgtcaggtattccaggacggcggccatgtacacgggtgcccccactccaatcctgtacttggggtggcctttcttgatgtaccgcagcatccgccccacgggaaagatgactcctgctttggcagacctggcctcttgccgaattct

SEQ ID NO: 121280 - DNA, 1091 bp, Homo Sapiens
  misc_feature (126)..(126): n is a, c, g, or t
  misc_feature (216)..(216): n is a, c, g, or t
  misc_feature (329)..(329): n is a, c, g, or t
  misc_feature (555)..(577): n is a, c, g, or t
gtaaggaagtctgctatctggccaaaaaccagcaggaagctgagagctcaagggatacaaaatagatgccagttgagggttagaagggaggctgcatctgtgtgcctatttcccctggcaagcttntacatcgaagagcagcagagcagccctgtcgtgccattgagctgacagtgccacatatgcaaagataaagccatagaggcaggacactgnaggggcacctctcagtctgccctgaaccatctgccatcttgaacagggagacaccatggctctggggcagttttcctccataagaactcacttggagatattgcccttctgtntaataccatcctctagccaaataattcaagaaggtggcattcagtcatatactgttttcagttctaaagaaaagttgaagtgatggtagtaaattgtggactaaagacagcttaatagcatactgatgtggcctgtcttctctttcaagctttgtcatttctaattaaggtttaaatggagaaactatcattttgtagttacctgagatttttcagttctaaagtnnnnnnnnnnnnnnnnnnnnnnnccaacacgtttaaaaatccctccccaagtaaccagcagtcagtttgatcattatggaagagaattcagatggcaatgtatttgcaattgaggagagagtagccaatcacacttaatgaaacagaccgtttacacttggaatggcctggagtaagttgatattcagcgtctacactcaaatatcaatcttggatttggaaatttggcttgaccactgtaaagtctgggaagatgaaatgcctaaattctgggttccataacttttcatctgacagctggtggtgccgaaccccgtccccaattacctaggtcatttttaaggtcaatgtcagcattggtaggattgattatggcctccacctcaaagccggctaaattactgatttcactgtgaataaggttcagctgcaaagaaaagcatgaggtgggaaataacaggagagctgggaagtctcagagaaggagccttgggatacaggtaaaggacagtggacactccaagtgcacgaggcaca

SEQ ID NO: 121281 - DNA, 1113 bp, Homo Sapiens
cacgatctgtctttctagacgtgttcatcacttgtcgcacccacgtggtatatacagggagacacatgctggcagcacaccagtgctgtgtgtgacagcggcgccaatatctaccaggctcgtttttttccgaggtcccggacgtggttccacaaactcgtgcaaccctttgttccccaggcgtgttttcctaggtaatcttaaagggtcaatcgtacaccattggtaggattgattaggcctcccacctcacacccggctaaattacggatttcactgtgaataagttcagcttctggccaagagagaggctcttggtggagaggactgtgaagccgtcggcaggtgtgccctcggttgtgctgtcggcgctggctgccttactgacttcacccttggatttccgggcccctttcttgcctcctgcttttttagatacaggcttcttctgggatggagacttggcctttttggctgggggtggtgtgatgatggcttccaactttcctttggatccccgcttcttcgctagcaactcggggtggatgttgggtaacacacccccactggctatggtgactccttttagcagctgattcagctctgtcatcattgtccgcagccatcaggatgtggcggggtgtgacccgtcccttagttgttgtctctcgctgcattgtcagccaggtccagaatctccgctgtcaggtattccaggacggcggccatgtacacgggtgcccccactccaatcctgtacttggggtggcctttcttgatgtaccgcagcatccgccccacgggaaagatgactcctgctttggcagacctggacgtcttggtggacttcttcttcccaccgcggctcgacatggcggtggccctggaggcggatcagtgagcacagcggcggctcggtggcggcggcggcagctgcaaggtgtctcggcctgagccctcctggccgctcgcgccttttctctccgcgctcctcgctggcccgcccgcctcttcgcttcccgcccgcgcggcccgcgctctccccctccgcccggcgccgctgccgagcctcgtgccgattcaacacccagcctcgtacctgcgctatagtta

SEQ ID NO: 121282 - DNA, 2162 bp, Homo Sapiens
  misc_feature (177)..(277): n is a, c, g, or t
atttgggggagaaatcccaaagccctttattttcgtgccccgggggttttccttttggaacacaaattatgggcgcccaggtttccttttcccttatggggggccgccgggcccccaacagaaatgggttttgaaaaattttttcgagggcgccggagggggccccgcaatgtttannnnnnnnnnnnnnnnnnnnnnnnnnnnnnnnnnnnnnnnnnnnnnnnnnnnnnnnnnnnnnnnnnnnnnnnnnnnnnnnnnnnnnnnnnnnnnnnnnnnnaacggtttaacattttactaaatcaactcacacaaattccaaattgcaaatataattaaggacaacagattctgctttgccttattaaatctttcattttcaaatccatcaataagacaaaaagtaaccaaaaattaggtctgttgcaaattcatgattcttctgaggggggaaaccaaaagaacattagagtaaaaagaacgccactggaggatgtacaataaagcaccacaacacacgcttacaaacggggcttcctggcttcggtgacaggtaaaagacgctgttctccccactgctgtgcgtcaatcagggtttcattaaaataaaactataaaatctcctaggttacactaagtcagacacggtctggaacacagtgcttaacaacagtaatgccaactatcagtgctaacataaaaacattttagaaggtcaaaaacaattaaactggaaaccaaagccttattttccctagatgagcaaaactgaaaatgaaaggggtcccacctcccagtaggagtgaaggggatgtacaggatcttttaaactgaaggtggggtacatggtgcagctggttctgtcattgctcagcctagttggcgtccagcttggccatttcctgcacatagatgcctatactctcgctgtcaaaaagcacgaagtacaccgttttgatggaagaggacattgtagacacgaagtaactggagatggccttcagaatcagctgagctgctgtctgctttggaaaaccgttcctgccgctgccgatggatggaaatgcaatggatttcagcttcttatcatcagccagggccaagcagtttttcactgtcttttccagaagttcttcacacttgtctgcaccccaaactggactattacagtggatcacaaacttggcaggcaggccatggcctgcgctgacagcagctccagctacttccaagggcccgttctttttccggagttccaggacagcttccacaaactccttgccacctttcttctccagcgtgtttcctaggtcatctttaaggtcaatgtcagcattggtaggattgattatggcctccacctcaaagccggctaaattactgatttcactgtgaataaggttcagcttctggccaaggaagaggctcttggtggagaggactgtgaagccgtcggcaggtgtgccctcggttgtgctgtcggcgctggctgccttactgacttcaccctgcttcttggatttccgggcccctttcttgcctcctgcttttttagatacaggcttcttctgggatggagacttggcctttttggctgggggtggtgtgatgatggcttccaactttcctttggatccccgcttcttcgctagcaactcggggtggatgttgggtaacacacccccactggctatggtgactccttttagcagctgattcagctcttcatcattggccacagccagcaggatgtgccggggtgtgacccgtcccttcttgttgtctctcgctgcattgccagccagctccagaatctccgctgtcaggtattccaggacggcggccatgtacacgggtgcccccactccaatcctgtacttggggtggcctttcttgatgtaccgcagcatccgccccacgggaaagatgactcctgctttggcagacctggacgtcttggtggacttcttcttcccaccgcggctcgacatggcggtggccctggaggcggatcagtgagcacagcggcggctcggtggcggcggcggcagctgcaaggtgtctcggcctgagccctcctggccgctcgcgccttttctctccgcctcgtgccgaattcgccacccaggcctcgctaccttagaaccgttagtagtactttggcc

SEQ ID NO: 121283 - DNA, 1209 bp, Homo Sapiens
ccccttcctctcctatgggatggggaaattgccacacggggttttcaaggcttgtttattccaccaagcccggggggccagggcaagttttttcacctgtttttttccaggaaggttctttcaacaaattgtggggcaccccccaagctgggcctaattaccaggggattccccagatttgggcagggcagggcccatggccttggcggtgaacaagcaggcttccaggtactttcccaaggggcccgttcttttttccggagttcccaggacaagttcccccaaactgcgttgccacgtttctttttcccagggtgtttcctaggtcatctttaaaaggtcaatttccagccattggtaggatggattatggccttccaccttcaaaggccgggctaaattcctggattttcactgtgaataaggttcagcttctggccaaggaggaggctcttggtggagaggactgtgaagccgtcggcaggtgtgccctcggttgtgctgtcggcgctggctgccttactgacttcaccctgcttcttggatttccggggcccctttcttgcctcctgcttttttagatacaggcttcttctgggatggagacttggcctttttggctgggggtggtgtgatgatggcttccaactttcctttggatccccgcttcttcgctagcaactcggggtggatgttgggtaacacacccccactggctatggtgactccttttagcagctgattcagctcttcatcattggccacagccagcaggatgtgccggggtgtgacccgtcccttcttgttgtctctcgctgcattgccagccagctccagaatctccgctgtcaggtattccaggacggcggccatgtacacgggtgcccccactccaatcctgtacttggggtggcctttcttgatgtaccgcagcatccgccccacgggaaagatgactcctgctttggcagacctggacgtcttggtggacttcttcttcccaccgcggctcgacatggcggtggccctggaggcggatcagtgagcacagcggcggctcggtggcggcggcggcagctgcaaggtgtctcggcctgagccctcctggccgctcgcgccttttctctccgcgctcctcgctggcccgcccgcctcttcgcttcccgcccgcgcggcccgcgccctcgtgccgagtacgccacccaggcc

SEQ ID NO: 121284 - DNA, 947 bp, Homo Sapiens
tcttttttcgcgaagttcaggaccagctttccacaaacttccttgcccccctttcttttccagaggtgtttcctacttcccccacgaatgtagaagtcagtgttggtcgggtgaacgacagcatcactgtcgatcgaggcaatgtcagccctgtaccaacttgcaatttctgcccaaggaagaggctcttggtggagagggactgtgaagccgtcggcaggtgtgccctcggttgtgctgtcggcgctggctgccttactgacttcaccctgcttcttcttggatttccgggcccctttcttgcctcctgcttttttagatacaggcttcttctgggatggagacttggcctttttggctgggggtggtgtgatgatggcttccaactttcctttggatccccgcttcttcgctagcaactcggggtggatgttgggtaacacacccccactggctatggtgactccttttagcagctgattcagctcttcatcattggccacagccagcaggatgtgccggggtgtgacccgtcccttcttgttgtctctcgctgcattgccagccagctccagaatctccgctgtcaggtattccaggacggcggccatgtacacgggtgcccccactccaatcctgtacttggggtggcctttcttgatgtaccgcagcatccgccccacgggaaagatgactcctgctttggcagacctggacgtcttggtggacttcttcttcccaccgcggctcgacatggcggtggccctggaggcggatcagtgagcacagcggcggctcggtggcggcggcggcagctgcaaggtgtctcggcctgagccctcctggccgctcgcgccttttctctccgcgctcctcgctggcccgcccgcctcttcgcttcccgcccgcgcggcccgcgcatcccgggaattccggaccggtaccag

SEQ ID NO: 121285 - DNA, 574 bp, Homo Sapiens
  misc_feature (500)..(500): n is a, c, g, or t
ttcccaccagcaagacttcccgacagcttccagtggaagtagcctgtgtcccatcctgtcccttgggtgccctcgtagtagactgaggccgcgcatctgcctaccttctggccaaggaagaggctcttggtggagaggactgtgaagccgtcggcaggtgtgccctcgcgttgtgctgtcggcgctggctgccttactgacttcaccctgcttcttcttggatttccgggcccctttcttgcctcctgcttttttagatacaggcttcttctgggatggagacttggcctttttggctgggggtggtgtgatgatggcttccaactttcctttggatccccgcttcttcgctagcaactcggggcggatgttgggtaacacacccccactggctatggtgactccttttagcagctgattcagctcttcatcattggccacagccagcaggatgtgccggggtgtgacccgtcccttcttgttgtctctcgctgcattgncagccagctccagaatctccgctgtcaggtattccaggacggcggccatgtacacgggtgtccccaatccaatc

SEQ ID NO: 121286 - DNA, 673 bp, Homo Sapiens
agcagggtgtttcaaccaatgagtatttattaaaagccagaggtgcaccaggcacagctgtccactaggccaacagatacaaacgatgtaaccaattcgcttattagcttatctgattaaataaaatacatttcatagaaatgattatcaaatgcattgcagatagaaacagaatatcctttgtacttacagatcttatgataccctaaacaattattaataaaaaccagccaacccatatggtaaatagttagcaaaccaccagttattttattttagtcagcaaaggataaaaacatacaaatttcatgctgaaagggattttagcattattgaatgctgaatacagacatcctgcttgaaaactactaacatagtccacctacagtcttaaaaattcagtgtttttcatcctgtattaaatcactattacaccttttggcttaaaaattaggtttggtttcaaaataagtttaatttagtacttcagtcacatgcctcacagattcttgaccagggctgggtaagaatcagtccaattaactattagttacagcaacaaaacaaaacataaacataatgttaaattcaccttgcttgatattcttgccaaaaaggaattgagaaattaagacacacaggtgatttcaaccagaacataacaggagaactg

SEQ ID NO: 121287 - DNA, 1981 bp, Homo Sapiens
aatattcaaaatcctcagccataaaaataaaggccttttatttggtttttctatgccagtacagaaacatctggacaacactcttgagcctgcagaggctcacggccacacccacttctgccgcagggactgtctgttgaggagccgaaccgttgaggcacagtagccaggccctcccgagggctccagaagctctaggtttacggggtcaccttcttgtaggtgacgtgaagatgctgagtcattggctgtgtcgtggttgccatggagaccgtctgctcaagtttgccttcagaattcagcctgaacttccgggtgatctgctctacgtggggctccttggcgaaggagatcctggcgatggagtgggatgcgatgcacagctcctgcccgttcacctcgccctcctccacttccaccacgcctgtgttctgggcgctgacaaaggccaccttgttggtgtcgggcttgaggcgaatgaagccacactctctgtgcatcggcttgcgcgtgtccgggtggaaggagttgaacgagaagttcagcatgggctggcccacgtgggagatgtgaacctcctccaggtactggaagggctgcagtgtggggtaggtcccggctccaggtgggtccgacagccaggtgcccagcatccaggacagtggctccaccactgggttcatcttggggggctcgcggctgggcgacagcaggctacttggataggggacgctcactctcctcagctcatccagcttctcctgtagcttccgcacctggctgtcggagcggctgaccctctgccgcaggctcttcagctcgccgttcttcttctccacctgctcccgcaggcagcacacctggctcttgttctgccgggaggagaagcagtaggagtgcagtgagtcgatgagcttgcaggcccctgacgccgacaggatgacctcgttgatggacatggggctggcgtcgctgtgctcgctctgcacggcttccgtggctggctttggggtgacgtcggcaggaggggcagaggggctctgggaaggcttctgcggtgtcgcggtaagtgatgagctgggagggctctgggccaggcccttgtcgggtcccaggctgctcccactgcagcttggttccacatctttcttcagcctcttgcggtcaatgggctctcgggggacagatggcctttctcgggtgtgcttggaggagaaactgtacgaatgaagtgagccgataaatttgcacgccccagatcctgggggcgtaaagtcatccatagaaatgccactcttatctgtcacgcccccttcgatggaggaagtggcgctctcatcgccagcatctgtggcagacgcttctgcttttccctgactgcctgccaccatggtggccagtccatctcctggagtccgttccagagcttgctgggcctgctcctggctggcggcctcctgggccgccctgggtgtggcttcaccttgcagagcagcttgcttcaacctgcgggactctggcttggccatcgggtttccactcgaggacggtgaccaacctgcagctcctctgctggtggcggcactcgagtgtcccctcacaccccctgtggccttgctggcatcttttctccgggtgcggccatggcctccagcccccctcttcttctcggtcaggtggaagatggatggcacggccgtgggcttcagcaggcgatgctggtcctccagcctcttggagaagctgtctttggtgaaatgctcactacagagaaatgaatacttagtgggagtccagttatccctctgaacagcttttaaccattggattagacgttttgagtcctttagggggaacctgtggaaggagacggcgcgcttctcgccctttccctgccggttggagcagttcacggccgcacagcagatcaccatcgcgggccttggcccagccgcgcagccaggccccggccctagccgcc

SEQ ID NO: 121288 - DNA, 451 bp, Homo Sapiens
  misc_feature (391)..(391): n is a, c, g, or t
ttgacgaggtgtccggagtttagaaaacttagggatggagccccccaagatgaacccagtggtggagccactgtcctggatgctgggcacctggctgtcggacccacctggagccgggacctaccccacactgcagcccttccagtacctggaggaggttcacatctcccacgtgggccagcccatgctgaacttctcgttcaactccttccacccggacacgcgcaagcgaatgcacagagagtgtggcttcattcgcctcaagcccgacaccaacaaggtggcctttgtcagcgcccagaacacaggcgtggtggaaagtggaggagggcgaggtgaaacgggcaaggagcttgtgcattcgcatcccacttccattcgccaggatctnccttccgccaagggaagccccacgtagagcagattcacccggaagttcaggctgaatttc

SEQ ID NO: 121289 - DNA, 590 bp, Homo Sapiens
ccagcatctgtggcagacgcttctgcttttccctgactccctgccaccatggtggccagtccatctcctggagtccgttccagagcttgctgggcctgctcctggctggcggcctcctggtccgccctgggtgtggcttcaccttgcagagcagcttgcttcaacctgcgggactctggcttggccatcgggtttccactcgaggacggtgaccaacctgcagctcctctgctggtgtcggcactcgagtgtcccctcacaccccctgtggccttgctggcatcttttctccgggtgcgtccatggcctccagcccccctcttcttctcggtcagggtggaagatcggatggcacagtccgtgggcttcagcaggcgatgctggtcctccagcctcttggagaagctgtctttggtgaaatgctcactacagagaaatgaatacttagtgggagtccagttatccctctgaacagcttttaaccattgggacttagacgttttagagtcctttagggggaacctgtggaaggagacggcgcgcttctcgccctttcagccggttggagcagttctctctcctgaaacgtc

SEQ ID NO: 121290 - DNA, 1574 bp, Homo Sapiens
  misc_feature (628)..(644): n is a, c, g, or t
cgggaaggcagctgctgtttaccctgcctgtcacagacacagctactgctctatgtcagctgtcagccacagaacaggtctccacacacagaaaaacaaggatgacctctgttgcagaaaaagcaaaacacagtagtgttggggagctttacagtaagttctcttgcagaaaggcaagctatagaacaaaggtgatggacatggtgaaacagccaatcaaacagctttgtgtacaggttacttacctcttatgaccgtttgacccctttctcagttctgtccaatctaaatcttgactttgaatacaaaggccaggactgttcctatttcccagcacaataaacaccacagccatagttcttatcgctagctctcatctacacctgataattatctcacctgtctccaattgctgactactaagcgctaacctgattaatcaccacagcacatatttattgaggaccaaactttaatatttcaagggcaccccaaatgagttactggtggggttacataacctttcattcatgccaccaaaccaagattcatgaattctgaaagttaaagttgattacctctttggatacataaaaaatatatatattaaagcatgtcacaaagtgcnnnnnnnnnnnnnnnnngaggcatccagcagatgaaaaataggctcttggaaaagcccaaagcagcaggctgattgtcctaacaagaggacagagaaactctgtaggaaataaagctgcctcagccaaagagagatccagacatgggttttgatggattcttattacaaccaaagacaagctcaaagaaagtggaagttcagatttcccatgggtgcagttggatcttgcatccaagagaatgcttggttgacttctcatatgcaggctgagcaagaagcaagcagcaagacttagccagtgattctgattccaggatgacatctctgtgcttgagctctgagctcctcgggcaggacagcctggaattgctcctgcaccagcatttccacagtctgctcctttgtgtggatatcaggtctcagccaccaccgtccagcaaggtcctagagatgcctgaggacatccctggggccagctgcatcctcatagcagaacttcctgaacctctgccgggaggctttctagcatggtcttaaagtcttcaacagagtcttcactgagggtctctggtgggagcccagaaggctctcgtggaatctggacctggaaagcaggtagtaggacaatttctggctcctcggcctatcatttcattgggtagtgatctcatttgatcattctggacttctgtatttctttgtgtctctgggtacacttcagtctcaattctggaactctaagaaaaaaacgttccagacttcgtgcggagttttggatacattcttagcagctttttcgctccggagaagttctttatctttctgagccgcagtttgcccaactgcaaaatggaaagagatgaagcaggaattaagatactctaggagctcgcccacagctgattcagggccccattctgaggttacacccttaagcctttgcccc

SEQ ID NO: 121291 - DNA, 747 bp, Homo Sapiens
tttgttatgtctgaaatattcattaaaaagtttattaaacctgacagcctcttcttaatgtttcacaagcaagacaaacttttatttttgtttcttctttaattggcatatggagcttgggaatattagtaggagaacaaggagactatgtgaggcatataaaaggcaccacactggaaagaatccaagagaatgaaaaatcacttctttaaataatatttagacacagactttgtatctatattagatataaatcatgtctaaatacaaatctaaataatatttacaaataattattacacaaaacctatgtaacacacactttatagtacacaactgtaaataagaatacaaatctccactgctgtgggttcaaaacagcaggcttggaccactcaaaaatgacatctgagaggaattaatagtcatcctgaaagttctgcagacagacgctagcggacaaaccactttgacacttttcatgctatcattcagaaaaaaatagaatacatgtaataccaaattaggaacactgataatgaacatatatgcaaattatatcttccaatgatatatctgtgatatatgaaaataattttgaagaaataagcttaaaatatagtttacggaattccagaaaactttttcttccttcactacatcctcaggaataaggcaattgagttgataacagtttgaatcttacttcacagtgtagctacaaagtaagaaaaagcactgggccgc

SEQ ID NO: 121292 - DNA, 647 bp, Homo Sapiens
ttttgcaaagaaaagtgtaaatttatttaataccaaatgtttcctaagtttactttttgcacaatgcacagacacttttgggacaatgtatggttaaaaactaatattctaccaacagctccatgctgctctagatcatcctgaaggaaaaagtaatgcaaaggatgctgggtctccaagtcccaggactggctgatagcctctcccagtggatagcaggtcctaattctcttcttcgagcagattctctgatttcagctgggccttcctgatgctctccaagttcagttgttgatattttcttttaaaaaagccacacttgaacaggatgaccagaatcacgatcaacaccagaagtccaccaacgctgcctttaatgatgataggcaaagaatggtacttctcatctttcaggaagacgacagtgatcttagttctgtggttctctgcattcagtccctcatatagagatttgttgaaagatatttcaccaaggatctgcagttcagttacatcttttagtaactgaaccgaactgtacgcacaagcgcgctcctgactccaggtgcacaccgtggaggcctgaaacgagagccatgaccgcgacgcgctgaacaaaccaagccgccagttttccgtcccgtccc

SEQ ID NO: 121293 - DNA, 1084 bp, Homo Sapiens
  misc_feature (70)..(117): n is a, c, g, or t
  misc_feature (574)..(586): n is a, c, g, or t
  misc_feature (989)..(1023): n is a, c, g, or t
ttttggttggagagaacatggtttaattaaaggcaaagctgattttcagcagatgcaggtcttgcacagnnnnnnnnnnnnnnnnnnnnnnnnnnnnnnnnnnnnnnnnnnnnnnnngaaagtttactacacaaaaccagtttctgataaagattctcctccccctcattactccacagtgaggatgataaggcgaggaatcccgccccaagagtcagaaaacattccaaacaccaaattctcatgcagaatggggctttagataggagctgggtattactgggagtgagatggtaaacctggttagcttgtctagggcgcaagaatcagtgacagttcaaacactggaatgttgcagctgcctgaatgcagagctcaaacacacaaactgggtaaaggtagtaggaaaaaggcttgggaagaggagagaaaggtggacacagggaaggggctgaagagaagcacaaaaggtttcatattgccattgggtagggggcttcaccttttcagacctttcaaaaaaacacaacccaaacaccatgtcaaactaaaagagcaataatgtaagcatacnnnnnnnnnnnnnctccaaccactctctctgaagagcaatgagcgttatctcaccccttttcattgctggggttgcccagactgcagtgacaactggggctcctggatgtgctttgctctacagctgtcttccagctcttaagttccacactaactccatacactcgcacacacaacccctcccctctgggacagcagatgggcacgtgtgtgtacacaacatacagacacacaaaggagagacctcccagaaaataaaccctaccactagcacagcaattgaacattagattgtttccataatttccccttaaaatattacttttccaggaaatgactaacagaaatgctgtccttctgtttctcccggccgtaatggccgaattcccgggcatatgtccggtaccgtcgactgnnnnnnnnnnnnnnnnnnnnnnnnnnnnnnnnnnncggccgcttcctcgctcactactcgctgcgctcgtcgttcggctaaacaggcagcgccata

SEQ ID NO: 121294 - DNA, 1236 bp, Homo Sapiens
agacagaaaacaaaggaagtacctgccttttgaataagatcccgcttttgagtcttacctatgactttaccagggtagattagaaatacacatcctcctgctgaccctctgccttcaatagctatctatcttaaaagctgaagtttgaactgcagcatctgcttgacaggtgccaggttccttcggcagggggacgatcactctatatatcttccgttgcctcagattcctgtggcccaaggatcccaccaatcctcgttccccctaaacatgctaacaaaaatcccttattgtgggtattaaaataataacagttacactgtatgcatatttatgtgctccttttgtctggtttttcttttcatcatgtataagctgaattcagcattagtttctcacatcttcccccaggtatccccaacagaatttttatgtcccagcttgtattaaatagaagtgaaatattaaggaaaataaggaacttgtgcaactttttttatgcattgttctcaaccatttaatttattgaaaggagatgctgcaacagttcttgatttagcagcagttattctcttgtttacatagttatgtttttttgttgttgttttgctctgtactggaaacaaaaataaagttttctacattattttcagccttgggttatggtatagtttctttgtgtttgtcgtaatatgcacattgtccttctaggacctgtcaccccaccatggagaaaagagtcttttggttctttttaacataagtgattagtttaagagtatgctgaggagccactgggcttaaagaaggatgtaaataagacccaaatacatagggaccaggcgctgctttctcatgttcacaaaagcagtcctccaccactgaactccattctctcagggggctcaatgaaggctaaccaatccgatgcatgtgtaggtaacagtcccatggactggcacttgtaaacagccaatgccaaacccatcaggttcccaatgagatagaccaaaccctgaagaaacttctggcttgaactttctaacatcttgaaagtggctgaaatggccataagtgcctgaatgggtcgccaggccatcatacacaccatcatagtagggaagatggagatagtattgcctgccatgtacatgatgaagagattcatgggaatctgtttgaggggacccaaggcgatgtccagcagcgttctccacaggatcggtctgtctcttg

SEQ ID NO: 121295 - DNA, 1299 bp, Homo Sapiens
  misc_feature (1160)..(1194): n is a, c, g, or t
  misc_feature (1198)..(1235): n is a, c, g, or t
aatattctacccaccacggtaaacactctgtatccaggcaagccaccaaggattacacacattattttataaaccatgcacactaagtcttaaaacacgttctgaaaatgaagttagctgttcttgatccaagggaatatcttctaaaagtcagtattgaccatttacaatctctgacctttgtggagacggtaagaatctgcttgtagtgcagctacatacagtacaaattcaggcaattttgttttttcacttgggttcagattgccagttcattgctgtgagaaaaggatggaggcaaattttagcagcaacctccacctgactgcttgactggagtgctctgaattttgaacattggacttctcagcaccaccagctgttgctccgggacccattcgctttttaatctcagctgccatcgtcatgaaagactgttctacattcgttgcattcttagcactggtttccaaaaacggaattccaagggaatcagcaaattccttcgctgttgtgtagtctactactttctttgtggtcagatcacatttgttccctaccaacaatttgttgacattttcactggcataacgatctatttcctgcagccactgtttaacattattgaaggactcctgatctgtcacatcatacacaactatgatgccatgggctcctctgtaataactggaggtgattgttcgaaatctttcctggcctgctgtgtcccatatttgaagcttgattgttttcccgtctaactctatagttcttattttgaaatccacaccaattgtgctgatgtagctttctgtatatgtatcatctgcaaacctaagaagaaggcaagactttccaacccctgagtcgccaatcagaagtaacttgaataaataatcatattcgggattcatgctggacatgtcactgcagctgccgccgccgccaccgccgcccttcgctgccgcagccgccgccctgactctccgcgccacgggtaatcgaaagaaaggaatgagataggctgttccgggagagcaaacgtcttcccctactccgtcccctagaacacactcagcagccgccgccactcagctatcgcttccacccccggccgtaatggccgaattcccgggcatatgtccggtaccgtcgactgnnnnnnnnnnnnnnnnnnnnnnnnnnnnnnnnnnncggnnnnnnnnnnnnnnnnnnnnnnnnnnnnnnnnnnnnnnagaattcgccgcaccttaagccgccccgctaattagttggagtttcgtatctaccaagctcttg

SEQ ID NO: 121296 - DNA, 984 bp, Homo Sapiens
gggtgggttgttttggcttctggtaccgggaaaacaaaaaattaaaggttttcttacattaattttcagcccttggggttatgggaatagtttcctttgtgttggtcgtaatatgcccattgtcctttttagggccctgtcacccccaccatggagaaaagagtcttttggttctttttaacataagtgattagtttaagagtatgctgaggagccactgggcttaaagaaggatgtaaataagacccaaatacatagggaccaggcgctgctttctcatgttcacaaaagcagtcctccaccactgaactccattctctcagggggctcaatgaaggctaaccaatccgatgcatgtgtaggtaacagtcccatggactggcacttgtaaacagccaatgccaaacccatcaggttcccaatgagatagaccaaaccctgaagaaacttctggcttgaactttctaacatcttgaaagtggctgaaatggccataagtgcctgaatgggtcgccaggccatcatacacaccatcatagtagggaagatggagatagtattgcctgccatgtacatgatgaagagattcatgggaatctgtttgaggggacccaaggcgatgtcccagcagcgcttctccaccaggatccggtctgtctcttgcacgctggtatcaggcacttgcttgtccaagtaaccgactgggtagagcgagtctccctggccactgccccggtcacttcgacccctgctgcctcctccaggcccgcttagctcaatggcccacttgaagcgccggcctcggttagccaccaggcccccctgggccgtcatggcaacagctgcgtcctatagcctcgatgcttctcagtccaaagcgtactccacaacaggcccaccagcgttctccgctttgtctcactctgcaaatgcccccggccgtaatggccgaattcccgggcatatgtccggtaccgtcgactg

SEQ ID NO: 121297 - DNA, 2757 bp, Homo Sapiens
  misc_feature (440)..(459): n is a, c, g, or t
  misc_feature (2583)..(2626): n is a, c, g, or t
ctgtaaatatgctcatcttaagttcatgtaatgtttccgctaactcaccaagaataagctgacaatttaaacaacttttactgtgtaaaaatgaagtgcacggcatggcatcacagtatcttgacatttgttttgtgtcatttagctactttagaaaatagtttctgaactctttccccctttatactgtattaaggcaaaaacaaaacttctgaagcattaaagatcttcaccaaaataactattggtaacttcaggaatttgtcagttgccttatgtgaggatgaatagatccaccaagcacgcctataatacaaagtaaactatgatttttattgtgaaattttcatagatggaaaattgaatattctgtccatttcattttacaattatcttaccacttatttttgtaccatgtatttcaattgcctgtttagtgnnnnnnnnnnnnnnnnnnnncctattcatttttggcttgtgtttagcttaaattttatcattaaattaaggagcccacaacaaaatgtgttgccagcagccatatcccaagcccctgcgtgaagaatgttttggctgctatttcaacctaaggaaacaacgtttgacctcagtcaccttaaaatgccagtgtgggcagaagattttttattcctcacaattaaaaaccaaacaaaaccccctaggatcttgaaggtcctatttcagaaaatcttcatatatgcaaaatgtcaccaaaataaatacatttgcctcaattatcattaccacccagtattcatgttttaatttttagggatataatttctaaatttagagcaatcaaatttcctgcttcctatcttaatgcttaaaccctcctccaacaccaagttaagcaactgtggaggataaaatagttgaatctgactgaaagcatggaagaaaaacattagcacacattagtctgatcatttgccaattaggaaaggtgctgctttctacctctaccacagatgcatttatgaaatgttgatcaatgaagctatttcaaatggttttagagaaggatcagagataacgggctagatagcatacattctaaacttgttttacatatagtttgagctccctgaaccactgaagttggttaaatccctacacagcacagaagcccctctaggtcatgttattgggcatattatctagaaagcaaatactggatgctgctctaagataggtctagaataccttagtttgcattgtgcacacacaaatggctgtgttgaatataatgcaaggctctatttccctttaaccataagaatcaaaacaatacttatcaccatacagtttgatattacttccaataagtacaatatttattaaacatatcttcagttgttttgttacatagtgtgcaacaaattacaatattctgcagccacaaattatatgcagagtatgaagaaactattaatcagatagtgtaatctttccatttataactctacaaggaagaactagcaaatcagatcttacatataacatctcactaaactttatgcatggaaagtgacagacactgcttgtgctgtttgatacaaaatggctgaacttcatcttcagaagactaaacctgacatctaaacatgccaatataaacatcaaaacaaaatatattctaaccaaccacgggaaacagtctggtatcaggaaagcaacaaggattacacacattattttataaaccagcacacaaaggtttaaaacagttctgaaaatgaagttagctgtcttgagtcaagggaataacataaaagtcagtattgaccatttacaatctctgacctttgtggagacggtaagaatctgttgtagtgcagctacatacagtacaattcaggcaattttgttttttcacttgggttcagattgcaaattcattgctgtgagaaaaggatggaggcaaattttagcagcaacctccacctgactgcttgactggagtgctctgaattttaacattggacttctcagcaccaccagctgttgctccgggacccattcgctttttaatctcagctgccatcgtcatgaaagactgttctacattcgttgcattcttagcactggtttccaaaaacggaattccaagggaatcagcaaattccttcgctgttgtgtagtctactactttctttgtggtcagatcacatttgttccctaccaacaatttgttgacattttccctgggcatagcgatctatttcgtgcagcccctgtttaccattattgaaggactcctgatctgtcacatcatacacaagtatgatgccatgggctcctctgtaataactggaggtgattgttcgaaatctttcctggcgtgctgtgtcccatatttgaagcttgattgttttcccgtctaactctatagttcttattttgaaatccacaccaattgtgctgatgtagctttctgtatatgtatcatctgcaaacctaagaagaaggcaagactttccaacccctgagtcgccaatcagaagtaacttgaataaataatcatattcgggattcatgctggacatgtcactgcagctnnnnnnnnnnnnnnnnnnnnnnnnnnnnnnnnnnnnnnnnnnnngactctccgcgccacgggtaatcgaaagaaaggaatgagataggctgttccgggagagcaaacgtcttcccctactccgtcccctagaacacaatcagcagccgccgccactcagctatcgcttccacccc

SEQ ID NO: 121298 - DNA, 958 bp, Homo Sapiens
  misc_feature (322)..(330): n is a, c, g, or t
  misc_feature (785)..(797): n is a, c, g, or t
  misc_feature (808)..(808): n is a, c, g, or t
cagtcgacggtaccggacatatgcccgggaattcggccattacggccggggatggcagctgagattaaaaagcgaatgggtcccggagcaacagctggtggtgctgagaagtccaatgttaaaattcagagcactccagtcaagcagtcaggtggaggttgctgctaaaatttgcctccatccttttctcacagcaatgaatttgcaatctgaacccaagtgaaaaaacaaaattgcctgaattgtactgtatgtagctgcactacaacagattcttaccgtctccacaaaggtcagagattgtaaatggtcaatactgacnnnnnnnnnattcccttgactcaagacagctaacttcattttcagaactgttttaaacctttgtgtgctggtttataaaataatgtgtgtaatccttgttgctttcctgataccagactgtttcccgtggttggttagaatatattttgttttgatgtttatattggcatgtttagatgtcaggtttagtcttctgaagatgaagttcagccattttgtatcaaacagcacaagcagtgtctgtcactttccatgcataaagtttagtgagatgttatatgtaagatctgatttgctagttcttccttgcagagttataaatggaaagattacactatctgattaatagtttcttcatactccgcatataatttgtggctgcacaatattgtaatttgttgcacactatgtaccaaaacaactgaagacattgtttaataaatattgcacttattggaaatttnnnnnnnnnnnnnttttttccaancccctccctgtccggccccccttcggccccttaaaaaccttttctaaaccattccttttgggccggcgggccccgttaagttaaagtggaacctgggtcataacctggtttccccagggaaaaccctgggcccggaataagggccttggg

SEQ ID NO: 121299 - DNA, 441 bp, Homo Sapiens
tatgtctcgatcgttatgccagtgaaaatgtcaacaaatggtgggtagggaacaaatgtgatctgaccacaaagaaagtagtagactacacaacagcgaaggtatgtttaaagtttaattttcatactgacatttgaaggtgttgaattatgtatgggttctgcagtaacagtaaggccacagccttttaaaaatatgtgcactagaatactgtgacagtgacaattggtgtagcatctgttgggatccaatgaacttagttcctcacgcttcattatggatggtagaaatgcagtaagaattagtgaaaaagatttttcagtgttaattgtgcctcattattctcttaggaatttgctgattcccttggaattccggtttttggaaaccagtgctaagaatgcaacgaatgtagaacagtctttcatgacgatggcagct

SEQ ID NO: 121300 - DNA, 417 bp, Homo Sapiens
tgccagtgaaaatgtcaaccaattgttggtagggaacaaatgtgatctgaccacaaagaaagtagtagactacacaacagcgaaggtatgtttaaagtttaattttcatactgaatttgaaggtgttgaattatgtatgggttctgcagtaacagtaaggccacagccttttaaaaatatgtgcactagaatactgtgacagtgaccatttgtgtagcatctgtttggatcccatgaacttagttcctcacgcttcattatggatggtagaaatgcagtaagaattagtgaaaaagatttttcagtgttaattgtgcctcattattctcttaggaatttgctgattcccttggaattccgtttttgaccagtgctaagaatgtaacgatcgagacataggtccggctcgattctata

SEQ ID NO: 121301 - DNA, 706 bp, Homo Sapiens
aatatctttatttgacaaaataaaagtcagcaacctatctcgatttccaattttttgctggtgtttgaaattccaaaattgagacctaaagcatagctctggccttggagagatttccaggagagtcagagcccagaagggagcaggatccaggaggccctcatctcccagcactccagctgagccagccgggttatggaacatcactgagcaattaaaatattatcaacagacaaaaaaagtttattgaatacaaaactcaaaggcatcaacagtcctgggcccaagagatccatggcaggaagtcaagagttctgcttcagggtcggtctgggcagccctggaagaagtcattgcacatgacagtgatgagtgccaggaaaacagcatactcctggaagtccacctgctggtcactgttctcatccaggctgcccatcagcttcttcagcccctcctcatccactttctcccccacaaagctgggcagctccttgtgcagaagttccttcatttcccccttactcagcttgaacttgtcgccctcttggcaggagtacttgtggaaggtagtgaccagcacagccagcgcctgctccagagaactgcacatcatggatctgtggcagaccaggtggcagagacagacccaggaaggagagcaaggcagccaggctcccagggtgaggatttatatgtgggcccc

SEQ ID NO: 121302 - DNA, 746 bp, Homo Sapiens
tttattatcaacagacaaaaaaagtttattgaatacaaaactcaaaggcatcaacagtcctgggcccaagagatccatggcaggaagtcaagagttctgcttcagggtcggtctgggcagccctggaagaagtcattgcacatgacagtgatgagtgccaggaaaacagcatactcctggaagtccacctgctggtcactgttctcatccaggctgcccatcagcttcttcagcccctcctcatccactttctcccccacaaagctgggcagctccttgtgcagaagttccttcatttcccccttactcagcttgaacttgtcgccctcttggcaggagtacttgtggaaggtagtgaccagcacagccagcgcctgctccagagaactgcacatcatggatctgtggctgcagaggtgccaggtgatgggtacactgctgaggctcttggggccttagctcagcctgtaggatccacttctgccctatgcccccaagccacctcacaaaacccctctctgaatgggaaggcaggggctgcatctccccctcagactgtggttccctgaggccggaggcgatacctccatctcaccctgagggcagacgctaaagcttcccttgtgtctgggagtcaccaagcctcctctgatggcacttgggacaccccctgagggcaggctcccattttagtgtctgccagaagggaatgacaggtgacagagtccattttgatggatctgcgc

SEQ ID NO: 121303 - DNA, 651 bp, Homo Sapiens
cacattgaaaaaaagtttatttaaaaaagttctagcagcaagaacagtaacaaaagaaaaggagagacaaacaaaacaagagggaggttgtatcccatggaacttgtctcctttcttaatcgagttctttatatcgagcaaacatgactcttcgaacagcatctcggtaagtctcgttggactgtcttttgctggttcttcctgaggctccaacactggggcccctcatccggccttcagcctcctctgatgaagccaatccaggatggccatatcccaggcctgtccctttcctccagccagtagcctgttggacacagcctcctttgctgctagtgtcgatatcttctttatcaacaagtttacgatcactgcaaaagaagcagacaccatcacttcctgtcagtttccctggagtacttaatccgtttcctttctggagagtcaaaagactggagcttttccctgggatcatttcctcttcctttaaactttccctctcgttctctcctttccagataggctagctcctgctcagactgttttatcttccggtggatttccaggttttgcttgtgcaggtctgacagctgctggtgtttgatcagaacttctttattggggaaactgccttctgcaaagcagacaagc

SEQ ID NO: 121304 - DNA, 1569 bp, Homo Sapiens
  misc_feature (36)..(36): n is a, c, g, or t
  misc_feature (56)..(56): n is a, c, g, or t
  misc_feature (82)..(82): n is a, c, g, or t
gcagaatccatatatgtagccagttagattgatganctgtgtcccttgtcgatttngtatctgaagacccagtctgaatttntgccacctcccctcctatctcgggaaatatttttaccctgatagtaatgcatgtggtcagaatgtcccccagaatcatttcttcgttttccagtggccaggtttacagctaccatcttcccatcaatgctaaatggcggatcaaggttctgtaagatcttcaccacacgaagagcttccgcatgggagtcgaggtcaataaagccataggtatgccccatagggcctgttctgttcttgatgatacggacgttggcagtagtaaggcggacatagggctccagcacttccactatcacctcaggtggtgtggaacgatagatacgctttagcatgatagttttgctctctccatcctggcgtgtctctccagaccatgactccctctctcggtctcttcggaaagttggcccttcccttcgagaaggaggcagatacctttctgcttctctcttttgatgtcctaagcgtgactcttggccttcttccctcttcctgggttcaggttccttatcagctggtcttaggggctggttgggctgtttttccaatggtgctggtatggatgttttctgaggctgagggtaggttattaattcttgcttggcctctgtcacttctcttgggttcttgcagaatgaacaggaagatcggtgcccaccaatgtttgccttacatcgtttgcagtaccaaaaatccaggcttgatacatactccagggtaacttctttgtcctggatcattagagttccctgtgttatactccttcaactgcaagttctttacaggcatgccatcaggagtccgaaaagcattaagaatctcttcttttgtggcatcttcaggtaccccacttaatcgaataagcctgctgggtttctcctcacttgggccggtcctataatcttgatcctgaaggtcccgttgggcatctcgggcagttttgccctctggaaaagacttgctctggccatagccaaacatctggcttcctggcagcctatgatccacatcacggtactccatgcttctgtaatcggtgtcttgccgcccaagaaagtccagaccgccttcttctttaaacagaccagcatctgaactctgctcttcacgtccagaaagctgtgacttatcttggtcttgaactggactttggctgttctgaaagtctgctggagactcatgttcaaaggctacaccttgtgtttctccttctcttgtttctgaatgctcaaattctcccttctgaatgccaaagcaggcctttctatcgtatggtcatgtgtggattcttctctcctgttcacattcataccagaatgttctctatcttgtgtagagggctgaatgtaatccaaatatttggatccacagggggcatctccctatctttaaattccatacaagatcccatctctctgcccctaaaatcctgatcagtcctagatcgtgcctcgtgccgaattaacaccaggcctcgacctagcc

SEQ ID NO: 121305 - DNA, 1728 bp, Homo Sapiens
  misc_feature (36)..(36): n is a, c, g, or t
aaaataaaaaatataagtggcccggggggcgggganccaaaaatttggaaatgcgggaggtcccacatggggggcttccagtggggggggagatcccaggtaaatggcccctccagaaaacctcccatggtgggaattttgtttcaggagcccgccttcggtttgcccgcgcgggcgggtttttttatttgggggagaaatccacaagcgcttagggtcatgaacccagggtcattcttggggaaaaccgggtagggacccaaggttccactttgccttactgggggcccggcggcgcccaaacgcaaatggttcaggaaaaccttttccgagggcccgaaagcgggccggcaaggaaaaaagggaaaaggggggatggggtttcgggcatggaaaaaaagtttatttaaaaaagttctagcagcaagaacagtaacaaaagaaaaggagagacaaacaaaacaagagggaggttgtatcccatggaacttgtctcctttcttaatcgagttctttatatcgagcaaacatgactcttcgaacagcatctcgataagtctcgttggactgtcttttgctggttcttcctgaggctccaacactggggcccctcatccggccttcagcctcctctgatgaagccaatccaggatggccatatcccaggcctgtccctttcctccagccagtagcctgttggacacagcctcctttgctgctagtgtcgatatcttctttatcaacaagtttacgatcactgtcagtttccctggagtacttaatccgtttcctttctggagagtcaaaagactggagcttttccctgcgatcatttcctcttcctttaaactttccctctcgttctctcctttccagataggctagctcctgctcagactgttttatcttccggtggatttccaggttttgcttgtgcaggtctgacagctgctggtgtttgatcagaacttctttattgggaaactgccttctgcaaagcagacaagccagtttattccagtcagtgagtttgtcttcttcattctccttcttggtttgctcctctcgcttctggggctgtgctgtgcggggctgtgggggaggggtctgttcctcctcttcttcctcctcatagtcactgtctcctccatattcacccaagaggccgatcagtgggtttaccactttaggtggagggggactctcttccttcttcacagtaggaggcaggggcttcttatagacgtcttctgcaggggccttcccttcactggcattttcctgaaacctcgtcactcctctgtcttttttctccttgccatctcttttagacatttccttcttgctacttgactttccttgactggtgggttttttttccttgatctcttcttcctcaggtaatccaggatcctggggcacatagacttcttgctgggtattggggtcataataagttcctgccaaggggtcataatagtagccagtagcagaatcatatatgtagcagtcagatgatgactgttgtccttgtcgatttgtatctgaagaccagtctgaatttctgccacctcccctcctatctcggaaatattttttaccctgatagtaatgcatgtggtcagaatggtccccagaatcatttctagacagcaagcaggttgggtggtccagacactccttcgttttccagtggccaggtttacagctaccatcttcctacactgc

SEQ ID NO: 121306 - DNA, 1188 bp, Homo Sapiens
ggaactcaaaattaatactttataatagagaaaaagtactactgcttatatgtaggttttaagaaatcagcatcatgtataaacactatacatattttgctatacttaaaattcattactcaataatgccctttaccacacaatgtcctttaccatgcagactacataaaggataattctaactgcatgaatgagttttaagtatctgaacgtgttgcagaacaaaatggaataaaaattaaacacttaatcatcatcttgactataagaggaagttactgtgtcaaggtgggcagagagaaaataagaagagggaacacccaacagttatttcaaacaaaaagtagacacatcatcacatatttcttttgtatacattacttagtattcacgacttctatgaaatctgtaaagaatagtgacgtgacatgtaaacttttaagtagtaaagtcttggactttaaaaggtgtttttcacatccaatataacttactttaaaacaaattatttcagaagattatctaagtgtcacaaacaagcaacatatatatactgcaattttatttcaatcgcacaaacgaagttagcatgtaggaaacttaaatgaaacaaatttaaacgaaatagttacggtaaaaatagcagaaaactgaaaattctaaaaaggaagtacacctaaaagcatgagaattcaacattcattagtgtttcatcttcagttttgattgacacttgatgcttgcaaatttttaaacaaacttttaaatcatgatgactattctgaagagatttcagcaccagcactaagatttgtacattcagtttgtttgcaattgacttgtgagccatttacatagtggatagtacagacttgtcacaggtcagatcacagtgttgaggaaagcagtgccttcctgtcattagaaaggatcccctaaactgtactcagcttaagacatccaacgtacaagagcacaaaaaccatcataataatgtggttccaaggaacgtggttttgataaggtaaataacttaggcttctgtttcccattttaattactgaaatctctaataatgacacaactgtcatgtatgatagcaaatgtatataataattcattcagacttcttggaaagaacatttagcaatctgggatgatgggaaatatagcatgattcaacactgg

SEQ ID NO: 121307 - DNA, 616 bp, Homo Sapiens
  misc_feature (377)..(392): n is a, c, g, or t
  misc_feature (564)..(564): n is a, c, g, or t
gaggagagcttttctactttattacaaagagaagaagcctttatgtggtcagaaaatacaagattgatctttttttctcttcctatgaaacgctgctgttcaaacagccagagtgaattgtctcagttcacttcttttaagtcccatcacattcacttgggtatggatgtccttggctgctgaaaatctggcccttttagtgcacagggcgacaaagtcccctgaccagcagttccagaatgtcccattttcatatattgcatccatgcacacctcctaaaaatgaggtacagcagggcaaacattttccaaaatagatgtcatatatataatatatacacattcgtacatacatacctttattcatgtgatgtccnnnnnnnnnnnnnnnntgtacacatttattacaaaatcgtaacaaagactggacagtgttttgctcattctggaaagatgaagctcagtaataacacaaccctggaaaaccatccagagattgtggcaatatctttcttctaaacagtcagatattcttgcattaagcttggcgaaactgcctttcanaaacagaaggggaagtaaaatgaaggaagcagacccctcgtgccgaattctt

SEQ ID NO: 121308 - DNA, 1106 bp, Homo Sapiens
  misc_feature (1028)..(1062): n is a, c, g, or t
tttcatcttccaaagtttttaattcattggtttctagtatattcacaaagttgtgcaaccatcattccacaatttcatcatcttccaaagaaagcccgtccctgttagctgtcatgcctcttctctcttcctccagtacctggcaaccaccaatgtgctttgtctctgatacacagatttgcctattctggacatttcacataaactcgtgattggcttctttcacttagcgtaatatttgtaggattcactcaggctgtggcatgcgtcagaatttccttcctttttatggccaaataatattccattgtatggacagaacacacttcatgtcttaattcatctgtggatggacatttgggttgttgctaccgtttgacttttgagtaatgctgctatgaacgcgggagcacaggtattgtgtggatggatgttttcaattctcttgggcatagacctgggaaggttatacttttattgatattaatagttctgatattggacatccctgctgtgtggtttcacctctcatggactctgacggctgctgtgccttctctgctcggcaggcggtgccctgaggcacaggtgggcgtctggggctggaactctcgctaggcgctacaacttcctctcctgccctgtggcagagccaagccccttgcagggctgttgccagcatgggatgagtctatgaaaacacgtggcacgcagtaggtccacagttaccactggcagcctggcaagcctggcagggcccggacggcagatgcgcttcggtgctgctgtgagtcttgtgttctgccttaggcagaaagtcctgggtttgtgttttgtgaatgaatgacgcatgagtgtgccaaatatcctttacgtgacagaagaggagagggctggcttgattgagtgtgggggggaagaacctggatcttgtaatgtaatttttgtttaaaaaattagggaaaaaccccaaatatcccggccgtaatggccgaattcccgggcatatgtccggtaccgtcgactgnnnnnnnnnnnnnnnnnnnnnnnnnnnnnnnnnnncggccgcttcctcgctcaatgacgtcgctgcgctcggtccggtt

SEQ ID NO: 121309 - DNA, 576 bp, Homo Sapiens
agaattcggcacgagggggaaatatgatttacgggacagaactcatcaaataaacagagttgagataggagtgtactggtaagaaaggaagtaaagagaagaaagaatgcattaacagaataaaaacaaagtaaaacaaacttttctaggaatttggaaatgacaacagtgccatagtgacatccttaaaatgtctgattcaagtatactcttagagggatagaaaactactcctttctcaataatcaaaatagagttcactttgtctacattttgtttaaaaataggataaccaggtatctatggctcctcccaaaaatatagtgcccttccagatatgggcaaaaattctttaaaagggaataaatccgaagtaaatccaacagggaatctgcttgcaatagagaagcaacacacatctgggaatcaaccccagatattcatggtgagtcccctccgtctgcattctaatgacatgtgtacattaattaaggagacccagtcaataaggacaaatattttgaaggtaaaatgcagcaatcaatgtcgtgcattacctgtgtcttgtctcttgac

SEQ ID NO: 121310 - DNA, 1322 bp, Homo Sapiens
  misc_feature (136)..(155): n is a, c, g, or t
  misc_feature (181)..(181): n is a, c, g, or t
  misc_feature (1102)..(1102): n is a, c, g, or t
  misc_feature (1112)..(1112): n is a, c, g, or t
  misc_feature (1217)..(1217): n is a, c, g, or t
  misc_feature (1255)..(1255): n is a, c, g, or t
  misc_feature (1268)..(1268): n is a, c, g, or t
ttgttgtggggtagatatacacccccacgttttggggtccaacacccgggttttttatttgtcgggaagaaaaaagtctattccccgggggtcatttgtgaaatgcgcgggggcccgggggcactaaaccaaaaannnnnnnnnnnnnnnnnnnnagagggtgcaggggtcggccacaatntggaattttttagtcagaaagatgtggggccattttccaggctgcttgcctgcaaaagatgagcttttgctgttggggggggatgctttctttattcttggatctgggctttcacatcatgatctgtggttttctttttaattatctttagtcttgtgatcacacataattttaaaatttgtgtatatctccgttactttaatccttttaagttggcaaaagcaccattcccaatcaaatacacagttctacagttttgtttctgaatggctgtttaaagacaatcctaaattataacttagtttgacttagattgtaaagaattcaagagtgaagtttaacttgctactattttaaaagcatgtgaccttatagatctgtaagatgtgagaggtgttgaataatctttaatattacacataaaccacactaaaatgcctttcaataagtaaaagaaaccattttaaatacagggaattataattagattggcatagttaaggccaaaactatagacattgctaccttatttatcttcaacccttgcctttaagaggcaaatgaacatgaacacaaaacacaggtgaatcttgcttggttctaagacagtgaagcaatttccccagtatttaaatatattcacataaccagttatataaatctaaatataaaaccaatctccagtaagttttaagatggcactcaccatctttgtgaaaagttgaacattactaacgaagtctaatcatatctttaaaaggggtaaacagtgataccatttactgaattggagttactattaaaattcaaaaactgaacatattcatttaaccacaagccagtcttagttttaaatcaggactgcccaacaaatattctgtcagtcattcatgatctgaattctggcctcgtggcgattcntgggctcganggcaaatccctatagtgagtcgtataattcgtatcatgtacagctgtttctgtgtgaaatgtttccgctcaaatctaacaccatagagcgggagcatagtgtaanctggggtgctatgatgagcactcaataatggcgtgccncatgcgctttcantcggaaacggtggccagtgattatgatccgcaccccggggacagcgttgctttg

SEQ ID NO: 121311 - DNA, 1322 bp, Homo Sapiens
  misc_feature (80)..(80): n is a, c, g, or t
  misc_feature (110)..(110): n is a, c, g, or t
  misc_feature (1202)..(1236): n is a, c, g, or t
  misc_feature (1240)..(1281): n is a, c, g, or t
ctttattttttaaaaaaggcattgtgacctcttattaagattctgtaaagattgttaagaaggttgtttgaattaattcntttaaaattttacaccataaggccaccaantaaaattcgcctttccaataaggtaaaaagaaacccctttttaaattccagggaatttataattaggatttggcataggttaaggcccaaaacttatagaccatttctacctttatttattcttcaaccctttgcttttaagagggcaaatgaacatgaccacaaaaccccaggtgaattcttgcttgtttctaagacagtgaagcaatttccccagtatttaaatatattcacataaccagttatataaatctaaatataaaaccaatctccagtaagttttaagatggcactcaccatctttgtgaaaagttgaacattactaacgaagtctaatcatatctttaaaaggggtaaacagtgataccatttactgaattggagttactattaaaattcaaaaactgaacatattcatttaaccacaagccagtcttagttttaaatcaggactgcccaacaaaatattctgtcagtcattcatgatctgaattctggtgtatgagatctattaaaggatggtacacataaaaaagtcatgagacatttctgttttgtaataaataaggcagtggccaattattactcattagtagcttttttgagataagctattaagtctgccctttcttccttcttcttaatgccgacaaagatcatttttgttccagggatgtacttcttgggattctccaaatactccatcagtgtatcctctccccagatgatgcctttgttcttattggcggctgtgtaagagtatccaggggcctgacctgtcttccgcccaaagagaccatggagatttggcccagtcttgtgcttgcctcccttttcaacggtgtggcactgggaacacttcataataaaaatcttcttgcctttctcaacatcacccatatttaattctctttttagtcgctggcacaacgaacactcccgctccgaagccggacgtccccactctctaagtccaaggacacgccggtccgcgcttaagtaccggtgtaagtgcaaccaaactcgctccgcgctcccgcccccggccgtaatggccgaattcccgggcatatgtccggtaccgtcgactgnnnnnnnnnnnnnnnnnnnnnnnnnnnnnnnnnnncggnnnnnnnnnnnnnnnnnnnnnnnnnnnnnnnnnnnnnnnnnnaaaagcccgcactagcgccctatagtgatgtatagatcttg

SEQ ID NO: 121312 - DNA, 1161 bp, Homo Sapiens
  misc_feature (1047)..(1081): n is a, c, g, or t
tgagaggtgttgaataatctttaatattacacataaaccacactaaaatgcctttcaataagtaaaagaaaccattttaaatacagggaattataattagattggcatagttaaggccaaaactatagacattgctaccttatttatcttcaacccttgcctttaagaggcaaatgaacatgaacacaaaacacaggtgaatcttgcttggttctaagacagtgaagcaatttccccagtatttaaatatattcacataaccagttatataaatctaaatataaaaccaatctccagtaagttttaagatggcactcaccatctttgtgaaaagttgaacattactaacgaagtctaatcatatctttaaaaggggtaaacagtgataccatttactgaattggagttactattaaaattcaaaaactgaacatattcatttaaccacaagccagtcttagttttaaatcaggactgcccaacaaaatattctgtcagtcattcatgatctgaattctggtgtatgagatctattaaaggatggtacacataaaaaagtcatgagacatttctgttttgtaataaataaggcagtggccaattattactcattagtagcttttttgagataagctattaagtctgccctttcttccttcttcttaatgccgacaaagatcatttttgttccagggatgtacttcttgggattctccaaatactccatcagtgtatcctctccccagatgatgcctttgttcttattggcggctgtgtaagagtatccaggggcctgacctgtcttccgcccaaagagaccatggagatttggcccagtcttgtgcttgcctcccttttcaacggtgtggcactgggaacacttcataataaaaatcttcttgcctttctcaacatcacccatatttaattctctttttagtcgctggcacaacgaacactcccgctccgaagccggacgtccccactctctaagtccccggccgtaatggccgaattcccgggcatatgtccggtaccgtcgactgnnnnnnnnnnnnnnnnnnnnnnnnnnnnnnnnnnncggccgcttcctcgctcactacttcctgcgctcggtcgttcggcacggacgagctagcgccctatatgatcatcagtctt

SEQ ID NO: 121313 - DNA, 1048 bp, Homo Sapiens
  misc_feature (892)..(926): n is a, c, g, or t
  misc_feature (929)..(967): n is a, c, g, or t
  misc_feature (998)..(998): n is a, c, g, or t
taatatctccacctgccttaagagccaatgaccgaacccaatccccggtaatcttgcttgtttctaaaccactaagcaatttccgcagtattaaatatacttcacataaccaggttatataaatctaaatataaaccccatctccagtaattttaagatggcactcaccatctttgtgaaaagttgaacattactaacgaagtctaatcatatctttaaaaggggtaaacagtgataccatttactgaattggagttactattaaaattcaaaaactgaacatattcatttaaccacaagccagtcttagttttaaatcaggactgcccaacaaaatattctgtcagtcattcatgatctgaattctggtgtatgagatctattaaaggatggtacacataaaaaagtcatgagacatttctgttttgtaataaataaggcagtggccaattattactcattagtagcttttttgagataagctattaagtctgccctttcttccttcttcttaatgccgacaaagatcatttttgttccagggatgtacttcttgggattctccaaatactccatcagtgtatcctctccccagatgatgcctttgttcttattggcggctgtgtaagagtatccaggggcctgacctgtcttccgcccaaagagaccatggagatttggcccagtcttgtgcttgcctcccttttcaacggtgtggcactgggaacacttcataataaaaatcttcttgcctttctcaacatcacccatatttaattctctttttagtcgctggcacaacgaacactcccgctccgaagccggacgtccccactctctccccggccgtaatggccgaattcccgggcatatgtccggtaccgtcgactgnnnnnnnnnnnnnnnnnnnnnnnnnnnnnnnnnnncgnnnnnnnnnnnnnnnnnnnnnnnnnnnnnnnnnnnnnnncttcgacccgtaacggcctttaaggtccggntccacccctttaattttcaagggttggaggctttcggtatatttccaaag

SEQ ID NO: 121314 - DNA, 901 bp, Homo Sapiens
tcgatagtcaatatagaaccagtttgtacacaaagcaggctggtaccggtccggaattcccgggatatcgtcgaccacgcgtccgggacgtccggcttcggagcgggagtgttcgttgtgccagcgactaaaaagagaattaaatatgggtgatgttgagaaaggcaagaagatttttattatgaagtgttcccagtgccacaccgttgaaaagggaggcaagcacaagactgggccaaatctccatggtctctttgggcggaagacaggtcaggcccctggatactcttacacagccgccaataagaacaaaggcatcatctggggagaggatacactgatggagtatttggagaatcccaagaagtacatccctggaacaaaaatgatctttgtcggcattaagaagaaggaagacagggcagacttaatagcttatctcaaaaaagctactaatgagtaataattggccactgccttatttattacaaaacagaaatgtctcatgacttttttatgtgtaccatcctttaatagatctcatacaccagaattcagatcatgaatgactgacagaatattttgttgggcagtcctgatttaaaactaagactggcttgtggttaaatgaatatgttcagtttttgaattttaatagtaactccaattcagtaaatggtaatcactgtttaccccttttaaagatatgattagacttcgttaggtaatgttccactttttcccaaaggatggtgcagtgccatctttaaacttacctgggagattgggtttttatattttacattttctattacctgggttaatgggcaaataatattttaaattaccggggggggaaattggcttttcccttggcctcttaaacacccaaaggcacggt

SEQ ID NO: 121315 - DNA, 893 bp, Homo Sapiens
  misc_feature (71)..(71): n is a, c, g, or t
cccaaaatggaaccccattggaccccccaaaaacacccccagggtggaaattcctgtgccttggggttcgnttaaggcccaagggagaggccaattcttcccccccaggtattttaaaattatattccaccataaccccaggttaatataagattctaaactattaaaccccaattcttccaggtaaggttttaaagatggccacctcccgcatctttgtggaaaaggttgacccattcctaacgaaggtctcaatcatatctttaaaagggggtaagcagtgataccatttactgaattggagttactattaaaattcaaaaactgaacatattcatttacccacaagccagtcttagttttaaatcaggactgcccaacaaaatattctgtcagtcattcatgatctgaattctggtgtatgagatctattaaaggatggtacacataaaaaagtcatgagacatttctgttttgtaataaataaggcagtggccaattattactcattagtagcttttttgagataagctattaagtctgccctttcttccttcttcttaatgccgacaaagatcatttttgttccagggatgtacttcttgggattctccaaatactccatcagtgtatcctctccccagatgatgcctttgttcttattggcggctgtgtaagagtatccaggggcctgacctgtcttccgcccaaagagaccatggagatttggcccagtcttgtgcttgcctcccttttcaacggtgtggcactgggaacacttcataataaaaatcttcttgcctttctcaacatcacccatatttaattctctttttagtcgctggcacaacgaacactcccgctccgaagccggacgtccccactctctcccc

SEQ ID NO: 121316 - DNA, 827 bp, Homo Sapiens
  misc_feature (686)..(776): n is a, c, g, or t
gaaagtataaaaatcattttactttaatacaaaatcacataaagaaaggcatgttggctaaatcaaatattcactaaatatcagtgaagtcaccactggaatctcaatagcacattttcctgctttcttttctcccttctgctaaccattgaagaccagggtcatccgtgggagcagatgagtaggacacgcgtctgcacactggaggccctgggggttgacatgggagcaggaagtggacccccccaccctgcacatcccttctgtttttcttgatttcagtctcactggcccaggccaaatcttcaagggtgtctagttctgcagccagggagaaagtgatgccaagagaacctcgtctcctccctcctcagtctgctttgaaggggaaataaatacacaggcctagtgtgtctgtgtggcacagggaggtggttttgccaggcatcttggaaggttgtcttctagaatcagagccatagccttacttgtggccttggatctaggtctgtttccccgatcgaaaaaagaacagcttttttatgattgtcttctcctccttgttcctgccagcatttttggcactagtaaccacagcatctttttctcttcttcctcctgggccttctcttggtggaatcaggccactccccgctggccggagggctctgtctccgcagcccctnnnnnnnnnnnnnnnnnnnnnnnnnnnnnnnnnnnnnnnnnnnnnnnnnnnnnnnnnnnnnnnnnnnnnnnnnnnnnnnnnnnnnnnnnnnttattttgtagagatggggttttgccatgttgcccacagtcttgaactcct

SEQ ID NO: 121317 - DNA, 1500 bp, Homo Sapiens
  misc_feature (42)..(59): n is a, c, g, or t
  misc_feature (1131)..(1178): n is a, c, g, or t
ccctcactaaagggaataagcttgcggccgcggctgtaggcnnnnnnnnnnnnnnnnnngaaagtataaaaatcattttactttaatacaaaatcacataaagaaaggcatgttggctaaatcaaatattcactaaatatcagtgaagtcaccactggaatctcaatagcacattttcctgctttcttttctcccttctgctaaccattgaagaccagggtcatccgtgggagcagatgagtaggacacgcgtctgcacgctggaggccctgggggttgacatgggagcaggaagtggacccccccaccctgcacatcccttctgtttttcttgatttcagtctcactggcccaggccaaatcttcaagggtgtctagttctgcagccagggagaaagtgatgccaagagaacctcgtctcctccctcctcagtctgctttgaaggggaaataaatacacaggcctagtgtgtctgtgtggcacagggaggtggttttgccaggcatcttggaaggttgtcttctagaatcagagccatagccttacttgtggccttggatctaggtctgtttccccgatcgaaaaaagaacagcttttttatgattgtcttctcctccttgttcctgccagcatttttggcactagtaaccacagcatctttttctcttcttcctcctgggccttctcttggtggaatcaggccactcttgtagcactgcagctcttcctgcaccaccaggagctgcgacttgagtttgttgcgttcctgcagcacatcccttagctcctgcagagtgaagcggggtcggttgggatctgtcaggtcaaccaccattttgtttgggcccaggttcacctccccgctggccggagggctctgtctccgcagcccctccacctccttcctgaggtggtccctctccatcttcagctcctccagcgccaggctgccctcattcaccagcgcctccagcatctccaggacgcggacgactttgaactgcagctgcgtcacccgggggtcgctgcccagggccataagctcgcggcccaacaggtaggagatgtcatacacgtcctcggcggtcagctggaaggggctcttgcccagcgccccctcgggcccaannnnnnnnnnnnnnnnnnnnnnnnnnnnnnnnnnnnnnnnnnnnnnnngcacagggggctcctccatggccacccagacccccgccgacctcggagctgctgtcttggagtctcccaaaggttagacttcctcccggcacccaaaactttccgctgggcagagtccctacctgcccaatcagcgcggcccgggggtgggcccggggggatggtgcaaggggccgcgcacgcgactcttgggcctgcgccccggcgcaccgtccccgctgccagccacgctggagagtgcgctccaggatgtggtttggggcgcgaagggacaacggaaaaggaggcagccgagaagaggaacggggaagttcatgggtga

SEQ ID NO: 121318 - DNA, 669 bp, Homo Sapiens
  misc_feature (601)..(614): n is a, c, g, or t
gggagcatttttgggatcaatttttatttgggcttctcacagtggttagagccactctgtcttcagaacaatcacagcacaggaaatgcgtcactgagactgcccagaaaagtctgaccagctgaatcttattgcttaaaatacacatattcacaataactgacaaagggtaacgtgcctcacacaggaatgtgttcgcatttgcaaatcttctgactggctgtagcaccaaaccctccaccgaccccgtctcattcacgtggaaagccagcctcagtcacatctccctggccccctaacgattccttcagctccctattaaatctctctctgagcagggcagcatcctgtagcgggggccaaactgtgacctgggaaccaagcccagctccgcaggttgcatttccgtcttctcgtgcctttaggataggacgctgcagtgagtcccacagttaacacttgcccagttccccactctaactggggaaaggaacttgagaggctcagaactcatccatttgatctgttaactgaaaaaggattcattttggtaaaacttgttcgcctttgagacacttcagtgagttatttgggattcttnnnnnnnnnnnnnnggtggaaggaaaggcatctgaggggctgtgacacactccggctacctctggcccc

SEQ ID NO: 121319 - DNA, 1120 bp, Homo Sapiens
  misc_feature (724)..(850): n is a, c, g, or t
  misc_feature (867)..(990): n is a, c, g, or t
  misc_feature (992)..(1015): n is a, c, g, or t
tttttagtcttctctaattttattacagggcatgttggggataggggagggaagtgttagaggagtgacagggcagcccggggccctctcccaccctgagcctcgaggcctggtgggggacatgaactgcagaggcatcagataaggcctcagaaagcccaggccatcattttccatgggaccaggctggctcaatgtggaactggccctcccagagcagcaggagaagggctcgcatgggctgcccccgtcacctgtgcctgacaggatgggggggaggcagagagagagcatcagacgccctccctccccataaggggcatgggggatggggacacttcctcccaggacacagggagcctggctgagctggctggctcatgccccatctggtctggaggtcagaggggagtgagacactctggtttgaaaggccttcctttccactttggggaaaacaggcagggagagaggtgagggtgccatgccaaaaaacacccccaaatccagatgcagactttggagccacatgtgggtttgaatctcaactctacctgagtgaccctgggcaagtcacttcacttccctgagactcaagtttcatcaagatgggaacaatgagcatctgcctcacaggcttgtcgtgaggattaagtgagaaggtgcgtgtaatattagcgatgactggatgatacaaaattaagaacaaggctgggcacgattnnnnnnnnnnnnnnnnnnnnnnnnnnnnnnnnnnnnnnnnnnnnnnnnnnnnnnnnnnnnnnnnnnnnnnnnnnnnnnnnnnnnnnnnnnnnnnnnnnnnnnnnnnnnnnnnnnnnnnnnnnnnnnnccatggtggcatgcacnnnnnnnnnnnnnnnnnnnnnnnnnnnnnnnnnnnnnnnnnnnnnnnnnnnnnnnnnnnnnnnnnnnnnnnnnnnnnnnnnnnnnnnnnnnnnnnnnnnnnnnnnnnnnnnnnnnnnnnnnnnncnnnnnnnnnnnnnnnnnnnnnnnnttgagaacaagactggctggggaaggctcagtggacacgcccaaggcaagtggggtaactcggcacataaaaggcccaggagtggctgcggagatgtctgccttc

SEQ ID NO: 121320 - DNA, 648 bp, Homo Sapiens
  misc_feature (93)..(93): n is a, c, g, or t
  misc_feature (123)..(123): n is a, c, g, or t
  misc_feature (171)..(171): n is a, c, g, or t
  misc_feature (176)..(176): n is a, c, g, or t
cacagaagcacaacccagccaaacaccacagccttctccagagccggcactgtcccggcaaccaggggtgccccaggctagctcttctacctntggggcaccacggactccccttggccactnttgggactttggtccacgtcctgagccactgaccacggccagtttctnttttnatatgtgcagaaaagtgtttttacacaaactttctcatggtttgtaggtatttttttataaccccagtgctgaggagaaaggaggggcagtggcttccccggcagcagccccatgatggctgaatccgaaatcctcgatgggtccagcttgatgtctttgcagctgcaccttctcacttaatcctcacgacaagcctgtgaggcagatgctcattgttcccatcttgatgaaacttgagtctcagggaagtgaagtgacttgcccagggtcactcaggtagagttgagattcaaacccacatgtggctccaaagtctgcattgttttgagaatctggtgctctccctgggcttccagaagtcggatggggctaaacgtggagagcaacaagcagggagacgcgacgaataccaggccgagggatctccaaacgcagccaactcctcccggggacacagaccccgcgggggca

SEQ ID NO: 121321 - DNA, 763 bp, Homo Sapiens
tttttttccctctcatcccatttattaaagaaacagtaagaaaagatacaatgcaggaaaaccaccaaccatccttgcacaccaggccgaacaaagcacagtgatttcttcccttcatcccccacccccaccctaattcccatattcccatccacatcagtttaaattttgaggttctttgattgattgggagtaccagtgaagagggagttggatgagtagaggggccttaaatctggccacctctaagtcccaggagaagggagctgcaggcccagtcagtcaagcagaaactgcattcggtgggtctttctttgaagtggttgtccatctccctgttctgtgttcaagcccccagggaaaggtatggcagtagaggatgaccaggtccaagctgcccaggtcagagctacggaagcatggtccgttcaccaacgccacgtttctagagagcagtgagctgattctccaatggtgagcaggggactacatgtgaactgggacctgcaggccaatgtatccctgaggaaaagtccacaagaacaattcaagaaactagtaagaaacaatgggcagaaagctgtgggacgaaagcacagcaggcttctgggaggctggagatcctttctctcaagggcaggattattcccacctgccacagttcacatgccacaaataacatctcaccttcagtcaagaaaacgcaaaggaaaaagatggctcattttgacttgagcccagctatgttcttcagactgtagct

SEQ ID NO: 121322 - DNA, 1401 bp, Homo Sapiens
ctcaaacaattaaaatataatatatatttataattccgggccctcaaaagcaatcatggtagttaagaaccaagttttgagtcattaggatagaggccaactttaaacatctccagtgagatggaattaggaaactggcattagaaccccacacagttacttgacaatcacctttaaaacgttaagttctttcggacacgcaggaatcaggctagatcatccctcgggctctgtggagtggctggcaccacctgcggctgctggggaaggcggctggcggggagcggcccgttcctccctcgcaggccttgctcctgcctgcccacctggcacagcggggaccggccactcgcccttgctcccatgggctccacccgcctggcttcccgcctgcagctgactagaattccatccgtgagaaacacttgaacgtcactgaaaaagaaatccatgcgatttggtttaagcgccagtttcttctagaacctgatatttcagttacaaatcattgaagctcctttttaaaaagaaaatttgactccctcgtaatcaactactttatgtgaagaaaaaaggcattgttaacaatggctcaaaactgttcttgcaacacgtgaggcagcctcagtcccgcttctagctggcgaaggccttgccggcatcctccttgcctctgtaccttctcttcccatgtgtgaacgggatgtaccggtacttaatcatgtgcttgatttgcctcttcatcgtgatacagaagagcatgatgaagtacatcaccagaatcggccagaacaccgggacgttgaaagcgtcgaagaaagtacagaccatagccacaaggatgcccttggtagccgcatgccaaaatttaaactctgggagccttcgaatgaaggggcggaattcctcgttctgtttggtgggtagcgaaggaccgtcatctgagtcttccattaaggaaggatccactttgggagaaagaaaagctatgaaaagatttagatggtagatccccaaggcataggtcacaatgtaccaaccctgcagcaggtaaactcgaatcatgtagacaaagctcaggcccagtgtcacgacccatcgcacagccgtgtagggtgtggacttgtctagccaggactgataaatctgtccaagtcttgtgaaaaatctgtacaccaccgaaggtttcccatggacggattctcccacactgtccccttcagacattctgtaactcgcagctccgctacggccgagccgcggtctccctcacggccgcgggaaggaggacggcggggcacgggcggccgcaggcgctgcgctccggctccgggaagctgcagcgagcacttccgcctcgtgccgattcgcacacccaggcctcgtacctagccgtaattg

SEQ ID NO: 121323 - DNA, 469 bp, Homo Sapiens
gcggccgcccgtgccccgccgtcctccttcccgcggccgtgagggagaccgcggctcggccgtagcggagctgcgagagcctcattttacagatgaggaaactgaggctggctgcgtgctcagagggtttgctgaaggcctcacagccgcttagcacagttacagaatgtctgaaggggacagtgtgggagaatccgtccatgggaaaccttcggtggtgtacagatttttcacaagacttggacagatttatcagtcctggctagacaagtccacaccctacacggctgtgcgatgggtcgtgacactgggcctgagctttgtctacatgattcgagtttacctgctgcagggttggtacattgtgacctatgccttggggatctaccatctaaatcttttcatagcttttctttctcccaaagtggatccttccttaatggaagactcagatgacggtccttcgcta

SEQ ID NO: 121324 - DNA, 334 bp, Homo Sapiens
  misc_feature (275)..(292): n is a, c, g, or t
tttttttcacttagaaatgtttatctttatttcagaataacctataggaccatatccagataaaggtcctatcagtacttctcatgagttatcactcagttttgcttctagagacccaccagtcaaagcagtaaaactaaatctccttaacaaaactgaagtcttcagaaaagcagtgctaaatgggtgatgaaaccttacttaaccactccctgtatgcaagatgacttattttgcattcctaaaacttctactttgattctcaatatatccgnnnnnnnnnnnnnnnnnncaaaagcatcattttggtgaaaatcccattatatgagtttac

SEQ ID NO: 121325 - DNA, 1142 bp, Homo Sapiens
  misc_feature (52)..(52): n is a, c, g, or t
  misc_feature (62)..(62): n is a, c, g, or t
  misc_feature (66)..(66): n is a, c, g, or t
  misc_feature (75)..(105): n is a, c, g, or t
  misc_feature (107)..(224): n is a, c, g, or t
  misc_feature (226)..(226): n is a, c, g, or t
  misc_feature (825)..(883): n is a, c, g, or t
ctctttgggggggcgggccgccccaaagaaatgtttttaaaaaattttttcnggggcccagngccnccccccaannnnnnnnnnnnnnnnnnnnnnnnnnnnnnntnnnnnnnnnnnnnnnnnnnnnnnnnnnnnnnnnnnnnnnnnnnnnnnnnnnnnnnnnnnnnnnnnnnnnnnnnnnnnnnnnnnnnnnnnnnnnnnnnnnnnnnnnnnnnnnnnnnnnntntgatgtagaaaatgttccagcttccataattctttattaaatatttgacaagttgcatcgcttctttacaatgacttcattttgtcacattagtcttttgctgtcaggaaaacaatctacagtttctctttagatctctcaagaaaaaagaaaagcgaaaggattgttcttcaagaaaacttcctgtgtgtatcaaattcaaccatattttaaagctattctgactgtgaaaatgagcattattcataagttgccttaaaaaaattcaaggtagtttggtttttaccactgtatcaaatagtacttggcttcctattaggaggtgggtttataataaaaagttatgaaacattgataatttatttggaatgcttgaaactcttttcaccttaaaagtcactgtttttttcatgtttcatttgatgatagatcctgaattaggaaatgacagcaaattaacatcatcttcctagggttttcttaggctccaagggttgaaattcacaggacacagcttggagaaaactgcagaagggactaaactctcacctcctttcgaaaccagattactcaataaaggtgtaaaaatgctatacaannnnnnnnnnnnnnnnnnnnnnnnnnnnnnnnnnnnnnnnnnnnnnnnnnnnnnnnnnngagtagtaaaggaagaacaaagtcacgcaaagttaacatgaaggaaaccgtgacaatctaggtgaaatcagtctgagtaaaaggggaaaactggcttacacgggaacacatatctgcagacacagagttatggtcacgaggaaggcttctgatgatgcactggtacggggttgagaatgcagtgcacgcgaggttaggcgccaacagcaatgctactccttacacacagaaaaccaacgaacggaaagacgtgccttcc

SEQ ID NO: 121326 - DNA, 1407 bp, Homo Sapiens
  misc_feature (138)..(138): n is a, c, g, or t
  misc_feature (141)..(141): n is a, c, g, or t
  misc_feature (167)..(167): n is a, c, g, or t
  misc_feature (184)..(184): n is a, c, g, or t
  misc_feature (321)..(321): n is a, c, g, or t
  misc_feature (472)..(472): n is a, c, g, or t
  misc_feature (490)..(490): n is a, c, g, or t
cacgctccccaaccagagctcagagtcccatccaccagattccagccgctcttgtctttcattgatatttagagcaagttcatccatcagagtctggacctgagttgccacgtcacgctgcgggcagcaccctctacntcntggaaagctgggttggagagtgactncagagatccttcatccntatacctctatcacacatgacaactaagtcaatgaacaagacctgttcccagatgggcagtgagcccagcctgaatcaactctgcccccaaagtgaagaatcactctgtggaacctgtgtggtggtggggtggaacntgaggaaagacctgtccaaatgctcagccaaggtaccggctgcaaaggaaaagggggcagcacgttccaactcagtttctctggccagtgccatggtccctcaggccaagatgaaggtgcatccgaagggaccagacatgtccgtcctctntgagaaaaagggccttgngactcctgggaaccaggcaagatggcagcaacagaaatcccagtgagagaccctcatgggatgagaaacactggtcatccccccacccccaccaagagaggttttccaggaagacaaaataaatttttattgcacccataccaaactacagacacaaatctttgaaaggtaagtaccattttatttagtgttgtaggaaatgttgggttacttcttaaaaacgaaaccaaagaaattcaaaagtcccaaagaaagaaagcaggaaataataattctataatccaaaaacgttgggcgatccttcagttggaggaagagggcgtcagttaagtagctcacacagtagatatggagacaccatatggagatacggagttaagtttggtggatactaggaattaagttctccacctaaggcaattaatttttcagccttgagagataattagtagttctagaaaaagaaaaaaagttgactgggagaagggtgggagggaggatggtgcgtcatttaacattaaattgcctctctctacagtatgtggctgagcatcatggaccttcctccctctgccccgttgagctcccactgttagcaaaactgagaagcacatgcctgtgtcttcttcataccggcatgtgcacacacacctgtatctccttcatacaggcatatgcagagccctcaccaatcggggtccacagctgttcagtatggcaaagggcagacttactccttcatccactctgctgccttgatgaggtgaacacactggaataagatggagggcaggatacctgccaaagcctgaggcatgagatgatctgaaacaattgggcaaaggctggacatttcaaaaagctgacttccaactgcagtttatgggtatagaatttgatgcttcccccgtagtccg

SEQ ID NO: 121327 - DNA, 879 bp, Homo Sapiens
  misc_feature (356)..(356): n is a, c, g, or t
  misc_feature (503)..(513): n is a, c, g, or t
tttttggttcttgaatatgtattttttactgaaaaaatcattcataaattaacatacaaaaatgtacaaacacatgagtaaataatgtaatgacaaaggactatttttgtgaaaagtgttttttaaaacatctttagatttcagtgcaaaaatgtacccctggcacctcttaaaacgtaagagcaagctcaaaaacacgtagtgatggaaataagctagctacgctcaatgccatcgtcaatggtgagtggatacaatcaatccatgtggctcctgctcagctattaatgtctgtggtagaggatctctgacaagaggacctattatgtcaaaatgagtattcttgcaaatacccncccaccccccaaaacagcatgaacaaacggggacacctttccctgcacacagcaatcaaagacaagattaaggggccacccatcagtagccttgaagattttcagctaccaatatatgcacaaggtcacatttggttcctgttttgnnnnnnnnnnnaacatgacaatttcacactattaacagcacacgggcctggctgtacgtttttaactatgacatttcccatatgatattcgaggcctggtggacacatgactgacagtgcacatccagagattctacactcatcagacacagacatgaccgcaaaggtatcaaagtgaccccactttaagcagtggaaaaagacctttccttttgttctcaaatcagcattttctaaagtcaggtgttagccttttgccaacagtgtgtacttgatggtaattatggcaacatagagcttcaaacaagatcgcctgacaacactgccgtatgtgtatgcggcagtgttgtcaggcgatcttgtttgaagcctcgtgc

SEQ ID NO: 121328 - DNA, 1676 bp, Homo Sapiens
  misc_feature (214)..(222): n is a, c, g, or t
  misc_feature (270)..(303): n is a, c, g, or t
  misc_feature (382)..(422): n is a, c, g, or t
gtgtgagccattgcgcccagccttgaagtcatgttctaaattgtatttgaatttgtgcctctttgtttttccccaaaccaaagccctcaaattgtagtctctgtcggcttctgcagaattctggaaaatgccagttttcctcccccgcccttgttttccataaaacatatttatatattgtgatgaggagtactttctgaagagtacttcgtannnnnnnnnaattgccttgtttgccttcaacttccttgattttcatagtttacatgnnnnnnnnnnnnnnnnnnnnnnnnnnnnnnnnnnggttagggcttttttcgttgcatgtgatggttctgtggacatatgatccccacaaactgtgggagtgattggccaggcnnnnnnnnnnnnnnnnnnnnnnnnnnnnnnnnnnnnnnnnnaagaatagagtggtatttagaaaataaattgcattgcaaagctcttatcggctcatatgagagagcaggttcctgcccttgaaaatgccggtaagctatagcatatgttttttaagacttaagcatttcatgctttaaaataccttcacaagtgaacattacacacagaagttcatttggttttcctttgttttatggtgcatatagcaataaagacccccctccaccctgcaacccccatcccccaccgggcctttgtccctgccttggcttttctccccttctcattctcctctcccctttcctcactgaaggctgtgagttgctttcaatgtgacaacactatgatgtcatttggaaggatttgccaggacagactgattctgagtcctgggtgccgtatgtgtatgcggcagtgttgtcaggcgatcttgtttgaagctctatgttgccataattaccatcaagtacacactgttggcaaaaggctaacacctgactttagaaaatgctgatttgagaacaaaaggaaaggtcttttttcactgcttaaagtggggtcactttgatacctttgcggtcatgtctgtgtctgatgagtgtagaatctctggatgtgcactgtcagtcatgtgtccaccaggcctcgaatatcatatgggaaatgtcatagttaaaaacgtacagccaggcccgtgtgctgttaatagtggtgaaaatgtcatagtttaaaaaaaacaccgggacccaatgtgaccctgtgcaaatattggtagctgaaaatcttcaaggctactgatgggtggccccctaatcttgtctttgattgctgtgtgcagggaaaggtgtccccctttgttcatgctgttttggggggttggggggtatttgccagaatactccttttgacataaataggtcctcttgtcacgagatctctctaccaccacgacactttatatgctgagcacggagccaccactggagttgattgtagtccacctcaccccttgacgatggcacttgagcgtagctagcttatttccaatcactacgtgtttttgagcttgctcttacgttttaagaggtgcacggggtacaatttttgcatctgtgaattctaaagatgttttaaaaaacacttttcaccaaaatagtcctttgtcattacattatttactcatgtgtttgtacatttttgtatggtaatttatggatgattttttccagttaaaaatacatattcaaggaccc

SEQ ID NO: 121329 - DNA, 1196 bp, Homo Sapiens
  misc_feature (357)..(420): n is a, c, g, or t
  misc_feature (485)..(611): n is a, c, g, or t
  misc_feature (824)..(832): n is a, c, g, or t
  misc_feature (879)..(913): n is a, c, g, or t
gggagcattgtgactatagaacacgtggtgacaaaaagcaggctggtacggtccggaattccgggatatcgtcgacccacgcgtcggattcctctgtgtcccttttggtttctggaaagattcttgtcaacattagtaactgatacatagaaccaaggagcactcaaatagggagccaggagccaggagctggtgacactgtgtgctgtggggcagctgggatccaggtaagagcggatgaagctttgaaattagactaacaaagtctccagacagcaagagcccaggtgctctgctcacacccccacctgcattttgaagtcatattatgtttgtttgttttttaagacggtctgnnnnnnnnnnnnnnnnnnnnnnnnnnnnnnnnnnnnnnnnnnnnnnnnnnnnnnnnnnnnnnnngctcaagccattttcccacctcagtcctcccgagtagctgggactacaggtgcacaccacacacnnnnnnnnnnnnnnnnnnnnnnnnnnnnnnnnnnnnnnnnnnnnnnnnnnnnnnnnnnnnnnnnnnnnnnnnnnnnnnnnnnnnnnnnnnnnnnnnnnnnnnnnnnnnnnnnnnnnnnnnnnnnnnngtgtgagccattgcgcccagccttgaagtcctgttctagattgtatttgaatttgtgcctcttgtttttccccaaaccaaagccctcaaattgtagtctctgtcggcttctgcagaattctggaaaatgccagttttcctcccccggccttgttttccataaaacatatttatatattgtgatgaggagtactttctgaagagtacttcgtannnnnnnnnaattgccttgtttgccttcaacttccttgattttcatagtttacatnnnnnnnnnnnnnnnnnnnnnnnnnnnnnnnnnnnggttagggcttttttcgttgcatgtgatggttctgtggacatatgatccccacaaactgtgggagtgattggccaggccttgtttttggtagtagtaggttggttctttgaagaatagagggtatttagaaaataattgctggcaaagctcttatcggctcatatgagagagcaggttcctggcctggaaatggcggtaagctatagcatatggttttaagacttaagcattcaggtttaaatacttcagggacttccccgagtcttggttcctggtttggta

SEQ ID NO: 121330 - DNA, 698 bp, Homo Sapiens
  misc_feature (276)..(329): n is a, c, g, or t
gggactctatcatcattttttcttccaaacaatacaagaaataaatagaacacttgtcttaaatgcaaatgtaactgaaacgcaaatttaacaaaaacatatgattgtctggtaaacggcagcagggacagcaggattcatgggggggacgggggtatttggcacataaaaaatcgccccactcccacacgacacacaaccttatcacacggttttggtccttcaccagatacttatattaacattatttcttcacaataagaatgtctaatgccnnnnnnnnnnnnnnnnnnnnnnnnnnnnnnnnnnnnnnnnnnnnnnnnnnnnnntacaagttatatacagattaaggtaaattccatcagggaaaaaaattattatttgaaattggcccctatgggaataatttaaagcccatccgagtggggaagaagttgcgtcccaagagagggaggcggctgggcccggggggctgtgctgtctctgctccttgcggcaggttcccccgacgcccttctgttctcaagctgtgtctcgccaagaacccgcaggaagagcgacgtgacgactgtgtcgtccatccggagtctcaggcacaggtgcggcttggtggcccggagcgatccgctgggattgctcccagggcagccacgtggaggacaccggagccgctggggtcaggtgggaggtgggagacc

SEQ ID NO: 121331 - DNA, 1182 bp, Homo Sapiens
  misc_feature (1068)..(1068): n is a, c, g, or t
  misc_feature (1099)..(1099): n is a, c, g, or t
  misc_feature (1130)..(1130): n is a, c, g, or t
  misc_feature (1146)..(1146): n is a, c, g, or t
ttagttttttttgaatatatttacaatataaatactaatttgtttccaaagtacatattcttttaacaatttgagaaaattatctagcatacgacagtaatttaatgtaaagactctatagtagtgattaaggaaaaatagaactgttttggggataaggaatcctggctatgaatgggcatgatgatctgaacttgcaaagggaaagtgaagcagcttagtccacattgcactgctaatacaatatgttaaaggactactatgtgagatagcaacctggatatggtgttataaaaactaaacatgagagatataaaaagtacacatgcttgcatagtgtgttacttttaaagaagctcaacattttattctcattttcaataacttaaatgaacagcacttaacacattacacaaaattaaagacttgtgcatatatttgatttcaacattaatgtcaaaaatacatagtatgattttacataggatttgtgctacattagaacactagagacaaacatcacttgagtattaaggaaaacattaaatattaaataactgagaaaatgtgtaaacactaatctaactgggggttttgctattgcaacatgtccaatgaagtggtttcaacagtacaaaaaggattaggacatgagtttttccagtctacatggaatatatggatttcatttcaggaatcctttcataaaaactggtccaggataacaggagagaatccactctcctgattgttaatttggtacactccattctatgctaatttttacttgcaaacttgggtactgagtaaatactttaaatcatcactccttatcaacatcttggtgaaaactgagggtttgttggtgattcagtgtaagatttgagttcatatgcagcaccgctatcaacctccattgactttctagagaacaggagccgtacgtctctatggaggtagatctttccagatttagaactctggaacctcagatgtatgaggtagcgtaataccgttcttctgtgtgtcggatgttctctttattaacacttctcttcacttcttgtnttacaggtacagaaaaagttctttgtcgtangaatgtctgatgattggctggcatatctcgntaatcatatatcacancaaacatcttcaccacagtcttattaggattaaata

SEQ ID NO: 121332 - DNA, 1110 bp, Homo Sapiens
gtctctgctattaccggcgtggtataccgcagcgacgtgcgagcattacactgttatacgatactctcctctggtctctggtgcccggtgttggtttgtacgatgtagggcaggaggcggcaggacggttatgtaggggttggggcggggcactccgcggattagatgtcccagatccgcgcttctggtagactgcgtagcgtgacgttgatatcagcctgcgcccggttcgccgggcggtgagcgtccacgggaggggcgcccggacatcgtgctggtctgcaagtgtgtctgggtgtaggacggtcgagggccagggctagttgcgctgtgcgtggcgtcgcggcctcctcccggtcaggtttggggattagggagtctttgggggcggggaggcggccggcggggggtgcgcggtggttctgtttttgttttctctggagggaaaagtgttctgtttattggtctggcttggtcttcctgtgcgtctctcagaatgctgctctgcccttgtgggctccaggggtcgcagtggtggtccccctggggcctgcctctgctgcccacctggaagtggcctcagtcagtcttcctgaaccctgtcagcctaaacttctggaagagggggatgaagccttggaggacgctgtggatacggtacactagtccgaagtagatgccaacggtttccagggaggcgaaggtgagcaggccgaccccaagagacatgaaccagtctgcgtaatagtgataacacaccagcaaggccccgatggcaaagcacaggaggacgaaatggaaaaactcatcatctttctttatattcagtcttcttaactgagaggcctccacttctccacttgctgggtcagagcctctccttcggagtcctgattccccagagggtaccacctctccaggagcatctccatagagttgaagctcatccttcaaaacgtcaggctccccatgcccaggaccgggtgagccgttcccgtgggggtatccagcccccaggctccgtcgatgttttccggttgctctgggttgctggtcctcatcattgctctctgaggaggaggaggatgaagaagatgaggaggatgagga

SEQ ID NO: 121333 - DNA, 1119 bp, Homo Sapiens
tattctcatttagcaaagtttttattcaaaagcttctcagcaccatctagttatcagaaagaatggatatcaccttttcctgcccacccaatccccagttccacaggcagaagttaaaccatttggctagagttccccctaatgattatgactgagaccatgataagattttggttgttctcacccaactgtctctaagcctctactcaaacctgactcaagcagagatgtgcacaccccacagttcagaacaggaaggaatcatgtcagatctgatcaacctcccattcttgggctattagaggcacaagaaattaccttgaaaaaatggaattcagtgactgccatctaggaaagacagtgatactgtccagcagcatgcagttccgagagctcaactcttaggccaccctccctccactctactctaggaacaaggagcattaggtctgttttctctccatacacctcaatcgctcgtcctctcgtcttattaaaacacagacacagaaccaaactttttgacagttaaagacaaacaattacatctaattaaaatgctaagagatcctgagctgttagagatgaggagagtagatagtatgacctgatcttcccccctcttttttttcctttaacagtattctgtttcagcataaagcacactttctgaagaggttcctggtggagactggaaatctgactgtgtcctgtggcaacacacagtcccttgcataactttggcttcagtcctggatctgtcctttgcagctacgtcaggttccatggaaggaggaaagagctggagggcagtatcactcagccaaagctcccatggggtcccatgctggcaggataatgggttcctgctctaacacagctagcacctcttcagggacatgcttcctgtccaccaccacttcgtagacatactcagagaaccactcatctgtcatgcacaggtaacctttgtggccatggtcttcaccccatgaattctccactctccattttgtgaaagcaccatcctgatcatccttctctgagacagcagtgaaggtcatggcgtgggtcataagtcctcgtgccgattacacacccagcctcgctacctagccg

SEQ ID NO: 121334 - DNA, 923 bp, Homo Sapiens
  misc_feature (63)..(86): n is a, c, g, or t
aaacaaaaaatgaaatataacaagacaaacttatgataaagtatttgtcttgtacatcaggtnnnnnnnnnnnnnnnnnnnnnnnnaaaatgcaaccctgccccctccccagcaaagtcacagctccatttcagtaaaggttggagtccatatgctctggttggcaggcaaccctgtagtcatggagaaaggtatttcaagatctagtccaatctttttctagagaaaaagataatctgaagctcacaaagatgaagtgacttcctcaaaatcacatggttcaggacagaaacaagattaaaacctggatccacagactgtgcgcctcagaaggaataatcggtaaattaagaattgctactcgaaggtgccagaatgacacaaaggacagaattcctttcccagttgttaccctagcaaggctagggagggcatgaacacaaacataagaactggtcttctacactttctctgaatcatttaggtttaagatgtaagtgaacaattctttctttctgccaagaaacaaagttttggatgagcttttatatatggaacttactccaacaggactgagggaccaaggaaacatgatgggggaggcagagagggcaagagtaaaactgtagcatagcttttgtcacggtcactagctgatccctcaggtctgctgcaaacacagcatggaggacacagatgactctttggtgttggtctttttgtctgcagtgaatgttcaacagtttgcccaggaactgggggatcatatatgtcttagtggacaggggtctgaagtacactggaatttactgagaaacttgtttgtaaaaactatagttaataattattgcattttcttacaaaaatatattttggaaaattgtatactgtcaattaaagtgtttttgtgtaaactggaaaaa

SEQ ID NO: 121335 - DNA, 560 bp, Homo Sapiens
  misc_feature (280)..(303): n is a, c, g, or t
  misc_feature (366)..(376): n is a, c, g, or t
tcgagtagcaattcttaatttaccgattattccttctgaggcgcacagtctgtggatccaggttttaatcttgtttctgtcctgaaccatgtgattttgaggaagtcacttcatctttgtgagcttcagattatctttttctctagaaaaagattggactagatcttgaaatacctttctccatgactacagggttgcctgccaaccagagcatattgactccaacctttactgaaatggagctgtgactttgctggggagggggcagggttgcattttnnnnnnnnnnnnnnnnnnnnnnnnacctgatctacaagacaaatactttatcataagtttgtcttgttatatttcattttttgtttnnnnnnnnnnntcaagcaaaaacttgtcatttcccagtaagacatttacattcctgtccagagaaaaaacttggccatcactcagctaacataatgctttttcaaagtatgttcacttaaagcagtgcagggtaggttaacatggtcactgtatttacattatcaaaaaaatatgtgtatatgtatcagtttgaa

SEQ ID NO: 121336 - DNA, 1589 bp, Homo Sapiens
tttgtgcttcacaaaaatttcttttaatgaataaataatttgatgaaatcaaaaatatttacaatataaacacatggaaaagctctgggtccgtgaatctgatcgttgagttttgcattttgtgaactgagtcctcccccaagcttttcccttggaaacaatacaaatctgacagaaacgacgactcatacaacatatctttgttcattacacatttatctgttagtcctggaaagctacataagcatatattatgcaacatgttaaagtacaaatattacctaaaataatatattaccataatgccagatagcattctccacagaacaaaaacatacactcagctgtaacaataacgagggtcacgggccacaaaataataccccaaaggtacaaattccttcataagaatatagttgtgctcttcagtttaccagctgtctacgctgctctaggaagccggtggcaaggagtacgggatttggcaactgtggctgtgtgtgtgtttctgtcaggcagcagcattactgggattgggcagtgcaagcaattttagaaacactttcttgggctcttaaaaagagccaattatgcaaagcaaaataagcatattgagaagtcttcatctcttttgcacaaataccatggaacgtcttggctttgtggtatgaaagggattgtttgcagagctgtttacaccatcagccagaattcaagtattccagggccacctcgtagcagaacttgtactgatccaggaggtcgaccatgttgggcttgttgttcctcagtgtcttcacagcgtgaaagacatccacggttctctggtgccggagcatctcacatacgatgctgatggcgcagaacgtcccactgcggcctcccccgttcaagcagtgcacaacggtgcggccttccccgccattgtattcctcttgccacttgtcccacctggcgaatgagcttcaagaaggagcgcttagacactggtgtgtccctgtacatcggccagcccaggaactggaattgctgcaccatccgatatccatcttggggtctggcggcattgtaaatgcggaatatcctgctgatgatgtcctcttccaggtcagcagagacaaattccacctggatggggccgtgtctgtgtactccgttttctggccagtactgtggacacaactgggcaggatccacatcatttagcataactacggatgtgcagtgataatccaggaccagtctccaaaagtctttcactgtgtttggcaaaggatgctgggtgactataaaagctgaaggctgtttatagctgtccatgagggcagcattgatgtagttgctgctctccccatcgatggtgatgaggaagggcaggcagcggtctgggggcaggatgtccatgcaccggtttttctcatggttccggggcaacagtgcgatgctgcagtcctctactcgcagcgttggtgtcaccatgtttagcgtccggaattcctctttaatctggcttgagtttgtctgtggatccagtttgttcatgtcataatacagagacctaacttgggaagcaggcacagaggtgtccc

SEQ ID NO: 121337 - DNA, 948 bp, Homo Sapiens
tcttttcccccgtgttctttccccagggcaaggaaaagagatttcttaaggaggggatttttgggtaccccatttggggacctagggggcaggaaacgttgctctgttccaattagcatctttcctaaggagaatgtccatcctcgttgctcctcctttcccttcagtcgttttccaacacaaattccaggaggaagtgcatgacgatacatgcaaatatcaccccctccagggcatacccaaaaccagccatacttgttgttttcaatagcttccaggaaatgcttgcacactatttgagtttttggttttttcttttccgcctcaccgtgcttcttgttcactacttcttccagctttttctcatcccaattatccatagtatctttttcaagttcttcatctcttgcatcaatgtaaacacttcgcttttcacattttctctccagagtcaagtcatgggagaacttacacttatctcctttagtacactgtccttgcttgaagaatgcacatactacagacttgggatctgcacctttacttattttttgagcagcaactacaggtttgaacagctcatttagctcctgcaattctttcttcttgtcatccttcttcaatttcttttcagcttcactctgtgctacctgacgtggattttgttgaccaaatttaacttgatgtgtgacagccttgataaacttctgttgctttgctcctttcttattcttcaaaccgaaagttttgtcttcgataatcttctccttctttttttgctccgcctttttgctgcccccggcctgagcctgtttcttggggggcattgcggagacagatggcaccggccagacttacgcgcagccggacgcgtgggtcgacgatatcccgggattccgaccgtaccagcctgcttttttaaccacgtgttctatagtcacctaatag

SEQ ID NO: 121338 - DNA, 904 bp, Homo Sapiens
  misc_feature (57)..(64): n is a, c, g, or t
  misc_feature (66)..(68): n is a, c, g, or t
  misc_feature (70)..(70): n is a, c, g, or t
  misc_feature (72)..(75): n is a, c, g, or t
  misc_feature (77)..(78): n is a, c, g, or t
  misc_feature (80)..(82): n is a, c, g, or t
  misc_feature (97)..(97): n is a, c, g, or t
  misc_feature (172)..(172): n is a, c, g, or t
caaccggaatggttttggaaaagtttttggagggcccggaggccggccccacaaggnnnnnnnntnnntntnnnntnntnnnttttcaccccaaatncaggaggaaagtgcatggcgatacatgcaaatattcaccccttccagggcatacccaaaaccaggccatactgtntgtttccaatagcttcaaagaaaatgctgccacactatttgagtttttggttttttcttttccgcctcacccgtgcttcttgtttcattacttccttccagctttttctcatccccaattatccatagtatctttttcaagttcttcatctcttgcatcaatgtaaacacttcgcttttcacattttctctccagagtcaagtcatgggagaacttacacttatctcctttagtacactgtccttgcttgaagaatgcacatactacagacttgggatctgcacctttacttattttttgagcagcaactacaggtttgaacagctcatttagctcctgcaattctttcttcttgtcatccttcttcaatttcttttcagcttcactctgtgctacctgacgtggattttgttgaccaaatttaacttgatgtgtgacagccttgataaacttctgttgctttgctcctttcttattcttcaaaccgaaagttttgtcttcgataatcttctccttctttttttgctccgcctttttgctgcccccggcctgagcctgtttcttggggggcattgcggagacagatggcaccggccagacttacgcgcagctgaataccgtcaggggttctggccctgcggcaggacgaggaggaagaccggggcctcactcgccgcaccgcacggaaagcgagtcgctcattggccccgcaaacgcggcctttgcgacccc

SEQ ID NO: 121339 - DNA, 1781 bp, Homo Sapiens
  misc_feature (1660)..(1739): n is a, c, g, or t
acatgtggtatttgtagtttttttgatgcgcgattctctaaaatttagaatcttaaactaaatcctttatttcaaaaacaaacataaaataatttcccaggcagagaaaaggtttgagatggaagcgttcttgttagcagtcccttcctgcataaatggggttggagagagaggagagagggaatggccaagggtatggaaagctttcacaatgcatgccgagtgtgaagtgacacccccagcagatggggtttatcatctttacttagtcacacaacatcaaggactggttagttccagggaagggctccatttcattacctgggtcagttctcttcccccgcatgctccacaatgcagtagaaccaaacaacacattcatttacaatagaatgtttaaataacacctgtccaataactgcccttacttctttgtgctgtcgggaaaagaaaaaacagaaagcaataaaacccaaaccctttggcaagccagccggtgcctattctcctggggcatttttagtggaacttcggctgggccttgccctcctcccaatatcagtgaggaaagtggcagcgggacaggtttggtcatctgcagtggagtagaaagaggaaccaaacacgattcgggccacaggtggattctggcacatttttagattggattggttaaaaatgtcatgttgtacacaggatgcaggcaaaggagtttttttttgagggacataatgcctataggcagcatgaacggtccgatctacccttggggaggagctccctgtgtagggacggagaaactagggggcctcgaggaaggtgttggttcggaagatggaggagacaatctttccggtggcattgatggtgccttcgctgtctgagctggactcggagtcgctgctcccagagtaggcacccaggcctgggaggatgccgatacatactgcagcagaggggcagtggatggaggggccactcagggaggtgtttccgagagacttgcaggatgagggctcttgattcttgtcatctggctcagggtccggtttcagtcttttcacactgttgccactctctgagctcttatgcttcacagctcctgccaacagcttcgcctgggagaacttgttcttggtttctataggcttcacagtcagtttcttttccacttccttcttgttctcttgagaaattccaaccttcttgaggttatttctgtattccttcagttctttcagttcttcttctcttcgttgcttttctattagttcctgctgtcgagaaacctcatcaaggaagttggtctcatcttcatctaagcctcttaccatgtttttgaatttgaactgttcctcgtactcctgctgcttcctgtccttctgttcctgtagcctttcatatagagatcgagggtcataaacctcctctggacattcttctggatcttcaggttttcgaactttctcccattcttcttgcctccttttgcgccgttcatctagttctgcctcagacacaaacctctttttgataataaggttaccatcatcccctccatccataatgaaacaacccatctaccggcgcgcgggaggcgagacgacctcacctcggcggcgcccacccctaaccgccaccgcagagccgctcgctcttnnnnnnnnnnnnnnnnnnnnnnnnnnnnnnnnnnnnnnnnnnnnnnnnnnnnnnnnnnnnnnnnnnnnnnnnnnnnnnnnagcctttgcttttgtatttcttttgacccttcagggcttcct

SEQ ID NO: 121340 - DNA, 1007 bp, Homo Sapiens
tttttacaaaataacacaatttattactattttgaaacaaatcacaaaataacattcagaaactcaacatttctaaataacttaattcacaataagtttagtcataaagtcatgctacaaaactcctgtgtataaaagattattaccaaggtattcatagatgttaaaatgttcttcagaatggagttggttctagaagccaaagattctggaatgatgctcgtaatcatgactgccagcctgggagaggagctggctatgcgcatgtgctcttagcttccaactcaccagtcttttgatgggagtgatccctccaggcagtagcacctcagaggcaggtaccctactgatcacagaggcaaagagcctcccacccatataatgttagacaactctacattcatttaaaatctagaggtgggaatgataattcgcaaagcttctattctgagtaggagaactacttgacacatcccccagagggatgatcttggatgtaacagacatggaagacgactcaagtagggaaaaagggaaatcctgactctgattatgtcaaaagacagttaactactcatgtgggtttagaacgagcaagggtgaggtttgattctctaacatccaagtgcaggctagatatttacccatctgccctatggaagtcctttccaccaacatccagttcctaagtttaaagtgcaaatctactgaaaaatagtttactatccctcttcccctatgttaaatttgctagatcataatttggttggctgggtctcctctaaactgcccaatatgggaaattaactagaatccagttaatgacttctccaaatatcaagtaaaaagttttatcagtttatcttaggtcagagaaaggtaagactcagtctagttcttccctttcagttttcttcctttacagatttataaaatgcaggaatagagatacagatacccggccgtaatggccgaattcccgggcatatgtccggtaccgtcgactg

SEQ ID NO: 121341 - DNA, 1414 bp, Homo Sapiens
  misc_feature (47)..(83): n is a, c, g, or t
  misc_feature (211)..(260): n is a, c, g, or t
  misc_feature (1316)..(1357): n is a, c, g, or t
acaaggaaacttttattttcaattttcatcaagaaatttgctgtggnnnnnnnnnnnnnnnnnnnnnnnnnnnnnnnnnnnnnccactttatttcatttagccgctcagtggctagagccgctgggttcctggtattaaaaagatgccaacagaggtagctgtgtctcgcccaggggcccagcccactctgaataccccccaaaaaggagnnnnnnnnnnnnnnnnnnnnnnnnnnnnnnnnnnnnnnnnnnnnnnnnnnattcagatcattttcttcaagcctggcaggaacccacaacagtttgtgtgtaacaggcgttacagtggggagaagccagggtccagaaggccagcccgccagctcctgcagatggcgccagcgctactgctgcatgtctcttctgcaggaagggcaccactgcccctcactccctcccctcccccagtgcactggggctgttcctttacaacatggaagatgggcagaaggaaggtgagggtctctcaggcccccaggggagaagctgggacaagagaaagtgaggaaggtcactgctcagcggtggaggtggtatcagtctgcatcttcactgctgctgggctacctgctgtggggtaggttcgggtgcccggtttgccaggcggctgagaatgttacgctctgacatctgtaacctcacagcaactgggggaattcgggcaatggtagctgggagtcgagtcacatcagctttcatgtcactcagcagttcttccagctgtttcagaactttgtgcaggactgcattggctggcttgtttcctgccattgactccttggacaggtgctgatgactttccgccaaacactccacctcagcaaagcgggtgttgagggccatggaagggtgagaagggtcttctgacatgttcaagtaagcagcccggcgcagctgttcctcaatcaccagagcttgttctaagagcttaaaccttcgagctagaaatttattcttgatctctaagaaattgccacggttcatttcacccttgaaaggctcattgaggatggcatagcgtgggtcattctggatgtcttgccaccgggcatagccatggtttataatgccggctagcagccagtagtcatgccgtcgatgccagatctcataagtcttcttggtaactgtggctgcccgctcttcattctgccaaagggagtgcaactcagtaaaaccaccatctgcaatgttaaacatgaaacgttgtttaatatttttcttctgtttctcatcattcaggtccttgggggtctctccattctgaagcatcaccnnnnnnnnnnnnnnnnnnnnnnnnnnnnnnnnnnnnnnnnnnaccacaataggggtcagatctattgctgacttttcctccaccttctctacatcagca

SEQ ID NO: 121342 - DNA, 1020 bp, Homo Sapiens
  misc_feature (55)..(91): n is a, c, g, or t
  misc_feature (219)..(269): n is a, c, g, or t
  misc_feature (771)..(771): n is a, c, g, or t
  misc_feature (775)..(775): n is a, c, g, or t
  misc_feature (854)..(854): n is a, c, g, or t
  misc_feature (901)..(901): n is a, c, g, or t
  misc_feature (980)..(980): n is a, c, g, or t
tttaaaatacaaggaaacttttattttcaattttcatcaagaaatttgctgtggnnnnnnnnnnnnnnnnnnnnnnnnnnnnnnnnnnnnnccactttatttcatttagccgctcagtggctagagccgctgggttcctggtattaaaaagatgccaacagaggtagctgtgtctcgcccaggggcccagcccactctgaataccccccaaaaaggagnnnnnnnnnnnnnnnnnnnnnnnnnnnnnnnnnnnnnnnnnnnnnnnnnnnttcagatcattttcttcaagcctggcaggaacccacaacagtttgtgtgtaacaggcgttacagtggggagaagccagggtccagaaggccagcccgccagctcctgcagatggcgccagcgctactgctgcatgtctcttctgcaggaagggcaccactgcccctcactccctcccctcccccagtgcactggggctgttcctttacaacatggaagatgggcagaaggaaggtgagggtctctcaggcccccaggggagaagctgggacaagagaaagtgaggaaggtcactgctcagcggtggaggtggtatcagtctgcatcttcactgctgctgggctacctgctgtggggtaggttcgggtgcccggtttgccaggcggctgagaatgttacgctctgacatctgtaacctcacagcaactgggggaattcgggcaatggtagctgggagtcgagtcacatcagctttcatgtcactcagcagttctccagctgtntcanactttgtgcaggatgcattggtggctgtttcctgcatgactcctggacaggtgtgatgcttcccgcaacactcactcancaagcggtgttgaggcatggaggtgaaaggtctctgacagtcaatancagcggcgactgtctcatcacaagctgtctagagtaactcgagtagattatctgtcctagaatgcacgtcatcacctgnaggcatgagatgaactggtctcggatctgcaccgaacagg

SEQ ID NO: 121343 - DNA, 342 bp, Homo Sapiens
  misc_feature (46)..(82): n is a, c, g, or t
  misc_feature (200)..(249): n is a, c, g, or t
caaggaaacttttattttcaattttcatcaagaaatttgctgtggnnnnnnnnnnnnnnnnnnnnnnnnnnnnnnnnnnnnnccactttatttcatttagccgctcagtggctagagccgctgggttcctggtattaaaaagatgccaacagaggtagctgtgtctcgcccaggggcccagcccactctgaatacccccnnnnnnnnnnnnnnnnnnnnnnnnnnnnnnnnnnnnnnnnnnnnnnnnnnggaggaaaaaattcagatcattttcttcaagcctggcaggaacccacaacagtttgtgtgtaacaggcgttacagtggggagaagccagggtc

SEQ ID NO: 121344 - DNA, 480 bp, Homo Sapiens
cagaaagcacgaaaaattatttataatagtctggagaaaaaacacactgtaatatttcaagtgtatgcagtagaatgtactgtaactgagccctttcccacatgtctaggctccaatgtctcctgtaggtccacctaactgtgtgttttcagggacaatgccatccatgtttgtgctgtagacttgctgctgctgaatcctttctggggactttctcatcgggcagggagcagagggcttctcgttcatgcaccctttgcctgaacacccatgtagctgctgtgttgtgtatatattactcttaagaggagtgtgtgtgtctgtgtttgttttaaaagtcacttatttcttacagtgatttcaattgcaccatgacttcttcactaaaaccacaaagtcctgcttaaaactatggaaaacctaacctgattagagccttgactattttgaagattaaatgcacactttttatataatgtg

SEQ ID NO: 121345 - DNA, 1620 bp, Homo Sapiens
cacctttttccccttaattttctctaggcaacactttttcttttgggttgatccagttgaactcaaaaagttttggtacctaaaatgagtatcaactgttattgcaatagcacttgggaaatgcaatcctagaaaagggcgaatgtgtaactgaggtgcttgacaaagtgaagcatccatcctccatatggtaatgtctcccatattaatcactaggttaatggctgctcctggctagatcacaggaccctgcatgatactggaatgctccctggtgaggtactgcagaggtatgtgcagaaacacccacccatttaagctttcaataaatacaaggcatcattttaaaccatttcagtagaataaattaaaaatattgcatttctattggcctgctttgcttcttgagctggcctggagtgctgtttgtgacacagaagacacagtagttaattagtggctaccccaagctctttagacttcagcacttctcgctcttcaagcctcagcaccttttttgcagcaataatggtattcttcattagcattgccactgtcatggggccaacacctccaggaactggagtgatatacccagctttttgtctgactccttcaaaatccacatctccaaccaacttgggtttggcagttacaggatcgtgaactctatttattcccacatcaatgactgctgctccttccttgatcatatctgctgtgatcagatttggaatacctgcagcagatattacaatatctgcaagaattgtatgtttcttcaactgctctttgggagtatatcgatgagatattgtaacagtggcatcacctccgggacgttcatgcgccccatctgtgtgcagtaacattgcaatgggcattccaacgttttttgaccttccagccacaaccacattcttccctagggttggaatgccagttcgcttgattatttcccacacaccccatggagtagccggtaacatggaatactgatccaaacacattcgtcctacattaattacatgaaagccatcaacatccttgtctggagaaacagcattgcagatccttctctcatcaatatgctctggaagaggcaactgaacaaggaggccatctacattatcatcattattcagtttattgattaaattcaacaattcttcctctgaaattgaagctggtttcataattgtctcactgttgattcccacaactgcagctgccctggttttgttgaggacataggagtgacttgcaggattctcgccaaccaggatcacactcaggtgtggccgtttgttgcctgaggccacccactcttctacctcctgccgcacttcctgcttgatctgctgggccagtttccttccagaaatgacaacagcttcatttcgaactgccgcgaggtggaaagggcgaaggcgaagggagcagctgtgcgcgggctgcagcagccgggcagccaaagcagacattagagaagtcgcagccatagaccgcgccggtgaccggacgcgtggtcgacgatatcccgggattccggaccgtaccagcctgcttaatgacaataggtcatacacacaaacataaggggggtgtgtctcttttatt

SEQ ID NO: 121346 - DNA, 778 bp, Homo Sapiens
ttttcataccataccagacagatgtgttttattaaaaaagaaagaaaaccctttaatcagaaagtctgattaaattcaatagtaactcaaactcttaaaaaatttctggaaaagtcaacaggatacatacatcacagaaaagcaggcagctgctgacagttctttggtggaaaagtaagttgcgtacttacccaagctgcccaaatgattatcaagccaagtttgtttttcaaaaataggttttaagatacaccaaagaaactatacaatacaaaaatttaacaatgaagttaaagtatatagcaaaagccaaatatgacaacacacatgtataatgtagaaaagaatcctttcagtcctagaaaactaaaatggggagaacttactgaagggtaacatacataaaatgagtactaatagcaaggaataatcctaaacattttcccaataaactgactaagcctcaaaaggacagcttaggaaaatgattaacatgcagtttttcttttttcctagccaattcagttctacttagataaatctggttgccaatcaatacatatataaattaatttttttctgctcaattactaccattttttctttttcaccttttccctaatttctctagcaaacactttgctttggtttgtcagttgaactcagagggtcggacctagaagagtatcaactgtattgcatagcacttggaaatgcgttcttgaaaaggcgatgtgtactgagtgctgacaaatgagcatcctcctccatatggatg

SEQ ID NO: 121347 - DNA, 652 bp, Homo Sapiens
cataggtaattagagaaaataatttgatatgttgttgtaaagagtcatgaccgctggaagtattttcaggacgtagacctggtgggtcactacgtggggggagagaggtgtgaagcggaggtacatgctggaaacgtgtgaatgttgttacgagattggagcgtttgcgatgaccttcctgcaggtggaagcattgtgcacaggtggttgggtttgtttgactcccggatatgagaatatcaagctcaaaatttatgttgtgatgatgaatttctcccacttgtactttaggtggccaactgacgaactgtgttcacctgataaggagtcgtggctgcttggacaggctcaaaccaagagagcctttcgttttgtctcccctgtttttctgcctgcgttttctccacattagccactcaatttccagtaccatcctggcggatgacttcagcattagatggtcaggtgtatttttttattaataggcgcattcagtttggaaaagacagcttttcattaatgtcccacgtaaaggaatatggcctatacagtacgtacgctgctgcgtggtcatatttgttcctgtgatcttattgtattttcacagtttggaagtatactcgtgtgctttgctgtttttttatgcttcctg

SEQ ID NO: 121348 - DNA, 1087 bp, Homo Sapiens
aagtaggctaagtacgaggcctggggttaattggcacgaggcgcaggtgtcgtataagggcgcagtggcagcgccctggccgacggctagtagcccattttggataccgtcctcgctgcggaaagttggggcaacctgttgctagtctggtcgttggtgacagcgaggcttccgcgctcgctgctggtgagcagccccggcgtgccccgcgggctggaagaggcggcggcgtgatgcggcccgtggacgcggacgaggcgcgggagccccgcgaggagccgggcagcccgctgagccccgcgccccgcgccggccgcgagaacctggcctccctggagcgcgagcgcgcccgggcgcactggcgggcccgcaggaagctgctggagatccagagcctgctcgacgccatcaagagtgaggtggaggcagaggagcggggcgcccgggccccagcaccccgcccgcgtgcggaggctgaggagcgggtggctcggctgtgcgccgaagcagagaggaaggctgcggaggcggcgcggatgggcaggcggatcgtggagctgcaccagcggatcgccggctgcgagtgctgctgagccggcgaggccgcgcgggtctggagcggagcgcggcggggagtgtcccgcgtggaaggcgctgggtaggcagggaggggagcgcagagccgtgccacgctctccgcggagtggtttcattctttttcataggtacttccggagaacataatttgatatgtgtggcaagagtcctgaccactgcaagtattttcaggacgtagacctggtggggtcactacgtggggggcgagacgtgtgaacgggagtaccctgctgcaaccgttttactgttgggtccgacaatgggagcgttggatagccttctgcaggtgaacctgtccacgtgttggttggtggaccccggatgaagaatagtcaaatatgtgggtgtgatttacactgtgttgtgtcaggcaggtcttaggcgcggcgtgcggaccagagactgtccggttggtcactaacacaccacggagcggggtcaggggagacataacgggttcatcctcact

SEQ ID NO: 121349 - DNA, 452 bp, Homo Sapiens
ttcattttgaaaaatgtttatttaccttaccttttcttggccaagtcaattgctttggtcatctgcacaaagattctaaacactggctttcagcatttctttttccaagcaaatgaaatttatcataacaagacagagctctgattttagtctctgtggagtctgggctctgatgacctaggctagtcatcatctaagcctggaatgactgtttgggacccccatggccagcttgaagctttccttcctcagccactctgggcccctgaagaggtcacatgcatctgtggcagagactgtattataacaaagttgtttaccccaaagtcagcaaacacatgtacctagaactcatcccaattgtaggttgctcaccagacaggttacacgatgtgcaccagttaacatgccataggaaaattacattccaagaaaaagcaaaatgctataaa

SEQ ID NO: 121350 - DNA, 1013 bp, Homo Sapiens
  misc_feature (950)..(950): n is a, c, g, or t
  misc_feature (966)..(966): n is a, c, g, or t
ggattttaatgtatgatggtctttatttacaactttattggcaaaaaagaaaagggaaacttttaaacaatttaacacagggcattgtagctgatcctgtcagataaaagaagttccattttaaatgtccatctaattgtccaaagatacacaatactgaatctgcatacgcagtttcctttatgaagtacagtgctcatgttttaggcagtcttctaaacatacaaatacagaggaaattaaatcactcattaaaaactgtgtcaaatgaagggtattttaaatataagtttgttgtttctggtaatagcacatgcccaaatgaaaaccaaaagatggaaaggcagatacacttcttacttgggtggacagttacaacatcaatcattttctgcaatgaccattatattttcaatttatcatgaactactctgaacttactatgagatgtagccaaagtcagaagagaagatgtagggacaagatgccttttttgcaggaggttaactcctccagaatcagcataggaaataaacatcctgttgattctaggtggaaagaaattaatgtagtcaatttcaactcgtgctgagctgacttaattttttcagcgatgtgtttggtgtcattcttctaaatcaagtgtatttaattcttcttctagttcatccaaatcctctccagtgaaaagattttcatcaacaggaacagcatcaatggctccattttccgttccctccctctcgttgtcctcttccaagtcacttctttcaccattttcagccgctacctccagaagctttcacttaatttggtttcatctttatctgaagtacatgtgctgattctttcaagactgggtacagttatacttggttcatctacatctccttgtgatgtacaggcttaattctatgtcatttacactcactgaatcatcaacctcatcnaccacctgttccctgnggtgtagcgggtacatctgctcctcatcacatcattgcagtttaggg

SEQ ID NO: 121351 - DNA, 1014 bp, Homo Sapiens
  misc_feature (276)..(326): n is a, c, g, or t
  misc_feature (500)..(517): n is a, c, g, or t
  misc_feature (539)..(759): n is a, c, g, or t
  misc_feature (765)..(766): n is a, c, g, or t
  misc_feature (849)..(849): n is a, c, g, or t
tttctatggaaagtatgaatatttatttcaggctttcgatcccaatcgatttcaaaaaacaaagtctgatttctctcctcagagcagctgaggcctccatgttacgatggtttcatggagattgaaggagcacatttcatcaggcttagcacaaagtccctgatgcccaccatgtcccagccttaggaaaggaaagaaacagaattcaccaccatggggctgaacgaatgcacacacactaatgtaaatgagcagctaaaccttggcaaatttgcnnnnnnnnnnnnnnnnnnnnnnnnnnnnnnnnnnnnnnnnnnnnnnnnnnngctacccagtatatgcagcacttgtgaactcccaacaggttcccagctttaaacacattaaacatcttgaaagactattgaattcttcaagaatctaaaaacagaccaaacgtgttttgctgtgaacattctgtagagacgaagtgaggcgggagtttgggttcatattttttnnnnnnnnnnnnnnnnnngcccctccgtgccgaattcttnnnnnnnnnnnnnnnnnnnnnnnnnnnnnnnnnnnnnnnnnnnnnnnnnnnnnnnnnnnnnnnnnnnnnnnnnnnnnnnnnnnnnnnnnnnnnnnnnnnnnnnnnnnnnnnnnnnnnnnnnnnnnnnnnnnnnnnnnnnnnnnnnnnnnnnnnnnnnnnnnnnnnnnnnnnnnnnnnnnnnnnnnnnnnnnnnnnnnnnnnnnnnnnnnnnnnnnnnnnnntgatcnngcacgccggggagggcgggttgcgtatgggggtcttcgcttctcctcacgatcgctggccggtcgtcggtgcgggacgtatantcatcaaagggtaacggttcacaaatctgggaaccagaaaacattgggaagggcacaaggcagacgaaaagcggtgcgggtttcaaagtcgcccggaagaaaaatcagtcataagggggaccgagcaaaaacaggtccctgatctctggtccgtcactcgtacgg

SEQ ID NO: 121352 - DNA, 622 bp, Homo Sapiens
  misc_feature (19)..(19): n is a, c, g, or t
  misc_feature (24)..(24): n is a, c, g, or t
  misc_feature (45)..(45): n is a, c, g, or t
  misc_feature (56)..(56): n is a, c, g, or t
  misc_feature (66)..(66): n is a, c, g, or t
aaaaaaatctgtggaaggntaacnctctcccccaataaaggtccnaaaaaaagggnacaaactganaaccaaaaagggaaattcaacaggaactgtgtgtgtttcccccaacccggctggtgaaaaaaggtttttgcctgaagggggccatggccccgggtcccccaacttggctcccccctcccctttgggccctgaagaagggccagggcaagtaacagggggccactgaaaggaagccacgtcaacgaactccctcaattccccagaatccatccatccatccataacagtcggcatcttccctccctccctcatcttcatcatcaatgtcgtcatcatacaagtcgtcgtaaagcaaatctgagctgttgtcattggaaggcactttagttttgatgcagtattccgcccagggttgtggggaccttcactccatccttttctgcttcggccttagtggctgaaacttgtttcctgaagggaggttgacacagaaatggtttacggtaagtctttttttaagacagatttataattggccttaaataatcaatattacttatgactcagctctccaaacttcagtacctgcctgaaagcatctgacagataccctgcg

SEQ ID NO: 121353 - DNA, 1095 bp, Homo Sapiens
tttaaagtttgttttgtgggtttttttccattttcttttgctacccagtatatgcagcacttgtgaactcccaacaggttcccagctttaaacacattaaacatcttgaaagactattgaattcttcaagaatctaaaaacagaccaaacgtgttttgctgtgaacattctgtagagacgaagtgaggcgggagtttgggttcatgttttttaaaaaagaatcaatatagtgatggaagggtaaagaatgcaagaattcagacattctgtgggagggttactctctctccattaaaggtcccataaaaaggagcaaactgaggatcccataagggggagtcagcagggagctgtgtgtgtttccccacccgctgtggaatagggtttttgctgagggggccatggccggggtccccacttgctcccctccctttggcctgagatggcagggcagtacaggggcactgaaggagcacgtcacgactcctcattcccagaatcatcatcatcataacagtcggcatcttcctcctcctcatcttcatcatcaatgtcgtcatcatacaagtcgtcgtaaagcaaatctgagctgttgtcattggaaggcactttagttttgatgcagtattccgccagggttgtggggaccttcactccatccttttctgcttcggccttagtggctgaaacttgtttcctaataatttcagcatattctttgtcttttcctttactgtctctccatttcctgaacataactgaagcatcgacattggctggggagaaggtgttgggctcattaagcagtgagattacacttaataggatagtcctcacattctgagtaggattccacctttcagaaggcagttctccactctgtgggtcatctacaggcggatgaagaatcgaaatgcatacatctccattctcataaatgttggggtgccacattttggtcaagaatctgaaggtaggtggtgaataggggtagtcaataggaaatttaatatgcgccttgaagtagccgccttcgtagagggtgttggggggtccgaagatggccacctcccagttgtagaggtcggactcgtc

SEQ ID NO: 121354 - DNA, 1217 bp, Homo Sapiens
  misc_feature (1106)..(1140): n is a, c, g, or t
agccctatttaataataaaatttattagcagatctcttgtaagacagttgaagaattcatacattttccagccccaaaaaggccacacagaatcacaaacattcaacgtgttccacgataatgatatgtatgagatgctcttccttataaactttattacgaagcaaataaaataatacattcataatatatgaacaaagaaatcatacattaagaatcctgttgtgatttgctcttaagagcaaagagctgcagaatctctaatataaaaaagaggacattttcaatgtgtccattttcctaagaaacgtgtgtatgaaatgcctccaagtttctcatactatatatacttgctttaaagaaggaaattatttctcatttcattttccaaatgagaaacattgcctaaattcatgacatccctaggattattcttagtctcaacttccacacagagatgtctgaaatagaaaactcttaagtatcagaattcagggatataagctttcacattcaaaagtgcagagaatcccaacattaacaaacaatggttccacaaaaatcaaaattacaacttagacatctctaaaataatagtaatgtcactttagagtttacaaactacagaaataactgaattgtaacacatgcagagattaagaatatttcaagtgcttctaaatacctattagaaaaatgtgtatctatttgacaatattatgttctctggagaaagatatataaggattacagcagagacttcagtattgacaaagtaaaatttttaccttcaagttgcattctaaaattactatgaagtctcaacttcactgaattaatgaaaataaaatatattccacgacagatttttgtggcacaaatgaaaactttaaaaaatacatgaaacaaaaacaagatgagagatttcctgatacatataatactatttatattcccttatctcaatacttggaaactcaatgtcctattttgtaaactagtcatataaaatgacactagaagtataaatgaggtttaatcaattgactctgacacccggccgtaatggccgaattcccgggcatatgtccggtaccgtcgactgnnnnnnnnnnnnnnnnnnnnnnnnnnnnnnnnnnncggccgcttcctcgctcactacttcgctgcgctcggtcgttcgctcaggcgagctagcgccctatagtgagtgatcc

SEQ ID NO: 121355 - DNA, 1036 bp, Homo Sapiens
  misc_feature (915)..(949): n is a, c, g, or t
tttaattagggatataaataaaatttccagcagatttgggaacaacttacaaacatgttcacaaaatcaaatacaactagcatctctaaaaaatagtaatgcacttagagttacaaactacagaaataactgaatgtaacacatgcagagattaggatatttcaagtgcttctaaatacctattagaaaaatgtgtatctatgttgacgaatattatgttctctggagaaagatatataaggattacagcagagacttcagtattgaccaaagtaaaatttttaccttcaagttgcattctaaaattactatgaagtctcaacttcactgaattaatgaaaataaaatatattccacgacagatttttgtggcacaaatgaaaactttaaaaaatacatgaaacaaaaacaagatgagagatttcctgatacatataatactatttatattcccttatctcaatacttggaaactcaatgtcctattttgtaaactagtcatataaaatgacactagaagtataaatgaggtttaatcaattgactctgacaatctgccatctcaccattcatcactgacagcatccaaaacatgttatcatctgcccacgaggtagggtgcagagtggagaagactaaggcacgggtaactgccacacagtggcaaagtgccgaccagtggcatggggagcacacatcgtgtgccctccaaacccctgcacagccattctgcctgcatcaacgcacccagtcccttggatggcgtagaacttccagaatttcagcttctttggaattctctgagggtgaatgcatgtactcccatcgggcagttagaggtaaagacatcaagatactttcaatcccggccgtaatggccgaattcccgggcatatgtccggtaccgtcgactgnnnnnnnnnnnnnnnnnnnnnnnnnnnnnnnnnnncggccgcttcctcgctcactacttcgctgcgctcgtcgttcggctacaacggacgctagcgccctatagtgagtctatcagtttctt

SEQ ID NO: 121356 - DNA, 1782 bp, Homo Sapiens
taaatgtatattgggttttcgcatcatcagagggttttactgaacttacaaccgacttgcccgctcagtatgcagttcagatgtgagaggcgcttctctgtacagcagcctgtactgtcttcaatcctatgcgtgcaggtgtctaccacaggcaaacagttttctccccattttgtagtaatgtgattttcctattagcaaaaagaggtcaccagcccctgtagacttaagggactcaagtcacaggatggggatttcctcttaatattttttattttgttgtttgaactcttgatgcaacattgtagagcagggtgttcaggacctgctgtgcccaagggactgataaaggaaaaagctctatttattctttttgtgatttgatgcacagatgaaaaacttaacacacaataacagaagttggtcgttaataaatcacatcctagtctttcagcgcttccgtaagcagacgacatcttcagttttctagctcttgtagtttcaacactgcaacatcaatgatgcatatgtccagaatcagttacaaagaccatccgattctttttctcttagttcatctatttttcactgtctcttggtcccaagtgtatctgagtgattaccttctggcattctctgctattgctcgttggggtgctctcgattgtccccgtgttttgtgggctggttgggagagggcgcttgggaaggatgtgccactgtcgggaggttgtgagtcactgggatgcctccagggatgatcccttccatggctgcaggaagtcctcctggagccacacccacgatgcctggcggatatctgtatgtggcaccattgagctcaggatgaattgcttgctggtctattactgaccaaggcgctgatgtgacaaagaattccttgttcacacaatttcttaagctttctgggatgcgacctgtgatggctcggcggatctcggtggcagctgcctccctcatctccagtgacgcctgctcactgtaccaggcagtgtgaggagtgcagatgagattcggggcatctttcaacggaccctgagcaaagctgaagggctctgactcatgcacgtcgagggctgcccctcgtatcctgccctccttgagggcttgtgctaaggctttctcgtccaccaggccgccacgggctgcgttcacaaggaatgctccctgcctcatctgctttatggtaaagtcattgatgaggtggtggttatgttcgttgagattgcagtgcaaggagacgcaagtcgctctgatacagcaaatcctgcagggtgtagaccctctgcacgcccagggaccgctcgatcccatcctgcaagtaggggtcataaaatatgacgctgaatccaaaggccttggctcgaactgcaaccgcctgccccgtgcgaccaaagccaatgaggcccagcgtctccccacggatgcgggccgctcccgaggccacctcgcggatctgctccacgctctgaacccgcgtgccttcccgcagtgcctggtacagccacgtgttcctccggtacaggttgaggatgtgcgcagatggtagagtccgactgtctcttccacggctgcagacgggattttgcacacggcaattccgagctcgccggcagccttgatgtccacgttgtcatagccactgcctatccgcacgatcactctcagggccttgaacttctcccaggtcctccctggtgagggtgatggtgtggtacatcatggcgccctcgtgccgaattcgccacccaggcctcgcta

SEQ ID NO: 121357 - DNA, 810 bp, Homo Sapiens
  misc_feature (61)..(113): n is a, c, g, or t
  misc_feature (694)..(694): n is a, c, g, or t
  misc_feature (749)..(749): n is a, c, g, or t
  misc_feature (754)..(754): n is a, c, g, or t
  misc_feature (759)..(759): n is a, c, g, or t
  misc_feature (766)..(766): n is a, c, g, or t
  misc_feature (789)..(789): n is a, c, g, or t
ccctttaaataaatgtttatatatttcaccaacaacacgggcctgtggcacacagcatgtnnnnnnnnnnnnnnnnnnnnnnnnnnnnnnnnnnnnnnnnnnnnnnnnnnnnnccctctagtttcaacagaaaaacttacatccagagattcttttcccattatttcttaggacagccacagaactatttcaacctgtacccttaatccagcagatacatcttaataaaagaactctaattgctaagtactgaaataaaacattacttacaataatttcctagttatccacaactttcttcttgtagcaattgtgaacttaagatgacttgtttttataagctcctcagtgtcaatatatctcaacaatacatttattacttgtacaatatattacttcacacataataacataaaacatcatttcactaaagaaaaatacacattcaatatagccaagttctagttttaaaaagaagcacctgatgaattttcttctgaattcatttctccagaagaccagtccttaaagacttctggagtctagctatgttggcatctaatgccgcaaggccatttctgaagtcttgttcatcacgagaagtgaacgttgaaaacgaagagatgctccagtcagacatcaagtcagaagtgaaaacactaccatcacagacagtattgcctttcacttgaanggctgttgctaagacaacctgatggggccatggacatggaagtttggttcccccngggcnccctnggtgggnagcagggattttaccaatggctnccttaattttcctgagggggc

SEQ ID NO: 121358 - DNA, 2202 bp, Homo Sapiens
atatggctgacaaattttctttacttatgcttgtgtccacatgattgtaaaaaagcaaacagtgccaatggccactttggtaaaaacacacagtgttcaaacctatgaaggattacatcctttggacaggttttattcccaggatatcaaaccccttggccatgacagcagctactgcttcacatagcagcatacgccacatgttcaccttcaatatttttccagtctgtctatctttctccacacagtagcagctatcatagaactctgtgaaagcagttgccagctcatatatataatcacagagagtgtggagaaataagtcatctaaaatcttttgcagaatctcagggaaccgtaaaatgcaccggcctagtttccattccttctcatgatccaaaagaatcttggtttctcgagcagctttttggagcatttcttcatcaatattggccagacgtgcaatagacctgattctagtgaaggcatacaacaagtaagcagctgtatttcctctgtcatctagcattttgtcaaaggagaagatgtagtcattcaaccggttatgggaaaggtcagcatatttgatgcagccatatgcaacggatgtctgagcagcattcaattcctctgcagttaagaccttgtctctttctttttccttcaacttgtccatggatcgttttagtccttctcccagaagattcatgaggcgcactgtttcacccgaacgtgttttaaactttttcttgtcttcccctagcaccacaccaaatccagcatggaagactcgagttactttagggtcatcccaaccaatccatttgagcagcagcaaaatattgtctggaagtgcacagattgtccattgtccacaacatagataatcatatctgctttttcctcaaatagtctttgtttaatagcagccaggtcagatgtatcataggtataacctccatctgattttactatggttaatggtatggaacaccctgggacaaatacaatctttctgccatcatccacctgcacaaatcctctatcttcaaattcctttacaatatcattcatcctatcttgatagaaggattcccctctctctattaaagagacgtccaatgcatcatagattttatttaactcttggcgggagacatcacagataagcttccaagcttttgtaatatctgggtttttaccctggagcagaactacacactgatatgctcgcttcttaaattcctcctcagtatcaaacctcttcttagattccttataaaagacctgaagatccccaataggaggtgaaactgttagataatctggaaatttgtcttgcaggtgagcgatgagcatgccaaactgggtcccccagtctcctacatgatttaacctgagcacgtcataccctgcaaattcaaagaggcggcttatactctctcctatgatagttgacctcaggtggcctacatgcatctctttagctatattaggggaggaaaagtcaactataacctttttattctctcccagagcaggtagttgaactccattcactagaagactggtcaattgttctgatacaaaatcctttcttaagtggacattaataaaaccaggaccagcaatttcaactttttcaatacattcattgtctgggaggtgtttggtaatgttttcagcaatttctcttggattaactttctgttccttggttttgagcatctgagaaatacccatagcactattacactgatagtccccaaacttggcctgctgacttggtgtcactagcagaggaggattttccaaatctggatatgcagccttaattgcatgaccaaagacctcttgtaggcggctaataatgttaatcatatttttagttggtttgttcctttctgcctgaagactctttcgaagaatattcagtcgatactttaattttaaattttcttcttgtaactgctccaaatttggagaagctcctaaacagccacagtttttcaaccggtcaatttcagcagtcagagatttaatctcttcttcctgctgcagcagccgcgcggagcactcagacaccagtacgtccatcctcccatcagcgtctccggacgcgtgggtcgacgatatcccgggaattccggaccggtaccagcctgcttttttgtcaccactggttctataggtcaccatgca

SEQ ID NO: 121359 - DNA, 1053 bp, Homo Sapiens
  misc_feature (617)..(617): n is a, c, g, or t
  misc_feature (655)..(655): n is a, c, g, or t
  misc_feature (744)..(744): n is a, c, g, or t
  misc_feature (748)..(748): n is a, c, g, or t
  misc_feature (852)..(852): n is a, c, g, or t
  misc_feature (854)..(854): n is a, c, g, or t
  misc_feature (862)..(862): n is a, c, g, or t
  misc_feature (868)..(868): n is a, c, g, or t
  misc_feature (870)..(870): n is a, c, g, or t
  misc_feature (902)..(902): n is a, c, g, or t
aaagaaataaatcctttttattttataacattcctgtttctttttaaagatgcatacagtacttgtaagcccatgaattctgaaaaaagctatagaagacctggcactatttttgagaattacaaaactgggcagcagaataacacctttataaaggtcaaaacataaagcaataaaatttagtgtttgcacacaaaaataggggggttacattcaacacgttttttaaacgtgcatttaaaatgtttaatgttttctaaaactttggttgtcatgctttattataacttgttaaatttcacaattatgtagataattgaacccaaaaggtaagcaaatatatgacattaacacagcagcaaaagcaagctaatactgcacaatcatattagcggactgattcagaaatacatgtttttcacaaataatatacaaacttagtttctgataacatagttcaatgacttccacgttataaaataaggctgagaaatgagacataccagaacatgattacataataaaatgtgtatttttaattacaattctaattttacatatagggcaacaaattgtagtttctatagaatagtgcaaatgagcaggacttttctcanaaatattaaaattgaattcatcccatgtgactcagatntcatgaattattcatgaatattttaggtttttatgtgatgaatatagtggtaggggtgatatagacagatgtgtactcataggctgcanatanaatagcattgacttatttgctggatgtgaagtgcaagactgatacataactttagaaagttcatttgtatcatgtaacacttttgtcatctacagtatttacgnangatcatantcattnanatgtctatcgagtattctccaactcttttgangtggggggtgaaagcacctgataaaagatctgaccatctgtgaagaggctttgaaattactggggggtcgaattctcagtcaagaggagccattgtcaatctaaaaagcaaacacaacttcgcccgggagggtcctgttaatcgtacaacg

SEQ ID NO: 121360 - DNA, 395 bp, Homo Sapiens
gtaaacagattctatttagttaatagaagtattccttccatcaaccaatgcagtccttatggagcaaattaagcttctcaaaagtgaaataagaagattggaaaggaatcaagagcgagagaagtctgcagctaacctggaatacttgaagaacgtcttgctgcagttcattttcttgaaaccaggtagtgaaagagagagacttcttcctgttataaatacgatgttgcagctcagccctgaagaaaagggaaaacttgctgcggttgctcaagatgaggaagaaaatgcttcccgttcttctggatgagcatcctatcttcgtagttggtttggacttcgataggttgatggaaggaatacttctattaaccaaatagaatctgtttacaaaa

SEQ ID NO: 121361 - DNA, 620 bp, Homo Sapiens
  misc_feature (607)..(607): n is a, c, g, or t
tttttttggtttttaaaaagtagaatttaaaacaaaaccacattcagctgaacaccagaactcaacaccaggataaaaatccaattttcaaagagctagaagatcaagctaagcacttattgtattttgctgaacgttaaaattatataaatgtactacagttgcctcaagatgttaaaaagtcagcttttcaaatctagtcacggcctactcatctgacagacccaattcaaatgagcaaaattgaaaagttacacatacagacaacttctcaaccaccaggctgtttagtttaagttagaagtcagaagttctgagactctccttttacccaccttggagcaacccgcagcaagttttcccttttccttcagggctgagctgcaacatcgtattttataacaggaagaagtctctctctttcactacctggcttcaagaaaatgaactgcagcaagacgttcttcaagtattccaggttagctgcagacttctctcgctcttgattcctttccaatcttcttatttcacttttgagaagctggtgttagagaaatgagttaaaaatgggctttaggagcttctgattaaatatggcagactgaantcatgtatttttc

SEQ ID NO: 121362 - DNA, 1206 bp, Homo Sapiens
  misc_feature (1106)..(1140): n is a, c, g, or t
gttcattttatataatttttaattttcttaagaatttttaacatgttatagatatatatagatacatcagtgtagttgttaaaaactaaaaacactttttattaaatggagtcactactaagcacagtgaatagggacttagggacttgcaattctactgtatcaaattgaacattatgataagtatgataatatgattctagctctatgtttatattcagtattacaaaaggaatattttctaaaatattaatatatgctggcaaatagccttgtgtacccatatgatatactttttcagtttcaccaagttatgtaatgatgattcttaatcgttgaaaaatgtgcccgtcccttaatcttttctgtctttcttaatctaatccagtaatatgcatcatggaatgaactgatttcaaaatgtaatccaagttaactcataacaagtgtttaaaaaatacatttatattcaaatctaaaaaataatagtttcaatgtgttaagtgaatattactctaggagatgcatttactatatctttatacgctatatctgttttgagttatatatctgcagcagctggttaaaactcttaaaaatctccatttcaacatagaaatccaagtgtatgttttcttaaaagatacaattgtagccttacaaaatgtaaatcaaaaatattaacattgttattatactaattcccaggtgctcacaagactttaaatgtttataaaggttaataattctttataagggttctatgtcttcaacaaatcttctacttatgcttgtatttgtgagacagatacatgatttcagatgagggaactctcacaagagaaactccagttcaccatgacacacagacctcctggcactttggatctcaaaacgtcagggccgttcgaatgctttgtcctgaattgagcagctcaaatccttcactgatttttttaaatggtaaaacatgagttatcaactggtccaggtcaaatttctttgccaggaactcagtcactagttttgggacatcatctctgcttttcaaacctcccggccgtaatggccgaattcccgggcatatgtccggtaccgtcgactgnnnnnnnnnnnnnnnnnnnnnnnnnnnnnnnnnnncggccgcttcctcgctcactactcgctgcgctcgtcgttcgctgcgacacgcatgcgcccaatagt

SEQ ID NO: 121363 - DNA, 646 bp, Homo Sapiens
  misc_feature (310)..(320): n is a, c, g, or t
tttttttaaagcccaggccaagggtacttttaactggaaactggggaggagggaagaacactagcagggagctaagaggcaggttgctgggtaagccatcctgctcctacctggtgcctgtatctacattgctgagtgctgtgcgccagtgcctttccttcatctgcagatggagcccatctctttccacctgggtgaggagaccctctgctactccaggggtaaaccttaaagaaggtgtcttgaagagcccaaaggacactcacgtgctaaggtgtccattttatgcatctttaaaatattttatttnnnnnnnnnnntagccctgccctgtcttagtgccactaacggcccagttccatccattctgaatggaaaagcggagactgccagcactttccttggtcttccctttgtctcccatgatgtgttgttccctcatccctcccatccatttcactgtgtgtggatggatagcagagggtaccacgcagtccttgaggcagtcctgtgtgattccatgatcagttgtttttgtattttaactattcttccaaaccagcagatgtttggaaattaaggaaaaaattaaattctcatcaatggttgctgttatagttaaatcagtaaagatcttgagtatcaa

SEQ ID NO: 121364 - DNA, 962 bp, Homo Sapiens
ttttagattagaataaaaatttatttttgtaaagaattatattttgtatttgcaaaagctgaaaatgctcataaaaattaccagcccagagcttggatttccaccggatccaccacgtgagacaaaagagtctgtcacttcttcttgccaggtttgagggccttttctagaccttggatgtgttttcgagggagctgatactcttcaagcaatagccagccgaggtggtggacctggtttccctggatctgcacctgaaggctgtccttggccccaggggcaggattgacggtggtgctagcctggcatcgctgctgaaggatggcagccactgagtatgggtccagaccataggcctccaagttccggaccacggtcacctttttattagacgctctttgtgctagggtgatgtcaattggacagattctccctttcttcacaatgggctcttgtccgggaagggtcacttgataggcaggctgtaatttttccaaacacctggtcagaagactgtcccatggaagcttcatgactgtatgctgttcatttttctctaagatgcagtcacataggatgggatccaatctcacaagatttttgttgtctgcatcaaccaggtcatttttcttggcgtagttaatgacgatcgttcggacctcactgccctccagaaagctcccttcttgtggccagactcctggaagagcagggtcatgctggctgggacacagtagaggggttttatatctggagggtgatagggctgttccctgctaccctcctggatagtctgggaggtcggggagggctcgggtatgacgaaagatgtaatcctcgggtgtttccagtccacagccacaatgctctccacccctttgctcagctccttcacctgtataatctgctcctgctgcatttgctgcaggaacttagagagctttttgtagcttgcctcgtgc

SEQ ID NO: 121365 - DNA, 1882 bp, Homo Sapiens
  misc_feature (62)..(62): n is a, c, g, or t
taaaagaggagttcttgtcccactattttttcttggccagggtttgggaggggctctttttntagagcctttgggaatgtgttttccgaagggagctggatttctctttcaaggcaaatagcccagccggagggtggttggaccctggttttcctgggatttgccacctgaagggctgtccttggcccccaggggcaggattgacggtggtgctagcctggcatcgctgctgaaggatggcagccactgagtatgggtccagaccataggcctccaagttccggaccacggtcacctttttattagacgctctttgtgctagggtgatgtcaattggacagattctccctttcttcacaatgggctcttgtccgggaagggtcacttgataggcaggctgtaatttttccaaacacctggtcagaagactgtcccatggaagcttcatgactgtatgctgttcatttttctctaagatgcagtcacataggatgggatccaatctcacaagatttttgttgtctgcatcaaccaggtcatttttcttggcgtagttaatgacgatcgttcggacctcactgccctccagaaagctccccttccttgggtgtttcccagtccacagccacaatgctcttccacccctttgctcagctccttcacctgtataatctgctcctgctgcatttgctgcaggaacttagagagctttttgtagcttgacttctttatgtccagttgtcgtccttcggggcagcaggagaacatgtggctgccaaggaaagtgctggtgagtaaagggaggtcagcctttttgactcggcacttcaaggcatgtaagaagcattgctgtaacagctcatccatttgttcttgaagcgttttgctatctgtggagtcttggttcaggcccctggtgctggtgtcttctggggcttctgagagagacttgtcttcacgtgcctggtgaacctccccattctcctcttccccctccagggtcatgtgcctcatgtctccctgcagggtggagtccatctggacagaccccttctcttcactgagatctgctgaatccagggccagtggagcaatggaaggtggagaggacttgtttccagaccgccacaagtggtcctggtaagtgtggagcacagagaagccccttcccttcaggcctgacgtgagcatctcagctgtggacatggctgcaactccaatggctacaggggctctgttccccaccaaagaaatggcacagaggtcgcccttctgtacctgaggcagaccagcagggggcatcaccagtccaggcagcatcaaatctgctccccctaccagtttctcgagcaccagaggccatgttgtaaaggttggcagaagatcaggataggaccacagcgtgtacactgttggatacagatttttctccagttcaaagaggatggggttaccaccactcacgtacacagtcactgcatcccctttgtgagcatacaacttcacaatgttgagctcctcctttccaggtactaactcagagacttgatcagttccaagggtggggaaagcagttgtcacatcagctcgaagctttctcctgtccgaccccattgatggccgtgttggacttgacccgaaaggccttggcaaacatgtctgctggggtggcctggggaagagagcacagaagccagggaatgtcaagaaagcgagggcgcagcagctgccaggccctcagcctgtgggggcagccatgctggggcccggccgcgaaaagggcccggctggaaaccagggccgcgcagcttcgtggccgttgccgctggggaggccggacgcgtggtcgacgatatcccgggaattccggaccggtaccagc

SEQ ID NO: 121366 - DNA, 1826 bp, Homo Sapiens
  misc_feature (140)..(190): n is a, c, g, or t
atggggcaattttattttaggtattcccgggagtaaaagcccctgggcttagggttaaccaggaagtggagaaattccggtaaaaaggaaaactgggtagggccagaaggcccacaaggttcataggagaaaggggctcnnnnnnnnnnnnnnnnnnnnnnnnnnnnnnnnnnnnnnnnnnnnnnnnnnnttggagcttttaaggagaaaataggtgccactgaaagccccatgactatatcaccaagtattccctgtattttttccatctctggcagaacagagacgttttaccattcagatctgggctctttccatgctctggtaaggtataggagttggaatttcccaaatagcttgagactttgagaacatttctttcctcaccaataccataaaacatgtaaggtcttcaaggggtgaaaagttttaacctcggggcaagtgacatgtcagaagctcaaagcgactcataatgcatgtgaatttgctttggagagacttatcttctgagtgaaccaggacagccagctgagctgaccagagtacctaccaacatatgtcagccaaggtccgtagacccactgggagccacagaaaaaaagccacgtcagcttaaagaaaaataatttagaaaacataacaatatattactaacattaataacaataatgtaaaaggttaaaatataataccacttgaagggctttctacattgaaatactcaagggaacatgaggaaagatggccatccagtctcctttgccaactgaggtgcagactgagttgtggaaggtgggtgttgatggaacccagcattacaatattgtgtagaactagtctcctaatatacctcactctgcaacttacggaagctgaggaagatcagaaaaagaccacactcctcactcagaatatttattatattctgccccatggggccttgcaggaaaagggacccaagctatacccctactccttttccaagctactttcctgaaccaagggacaggattctaagagaatcatgtatctcaaataagccagaatgtatctggggaagaatagccattaatttcctagacctgacactgggtttatttgtgtctgccaggaagacggggagtcagtgagaatcgtaaatggactagatgaggggaaataggatgggcccttctttatcacagcttgagctcaaaaaggttgggataaacaggtgtttaaaaaagagaggaggtaaaagggaggatgggcaggggatagaggaaggtcaggggctgggttcacccatatcacacagcattgtaggaagaagcagggtaaccatttgagttctcagcctggaacagggaggtgagggctcagcacctagagagaggagaatcctaaggcctctctttcaactctattgtgattagatgcaaaagccctttccctttagagaattcagaatggtctgtctgaaggcaagagagcatagtgacagacctgtagccccagcccaggctgtttctccccattctcaaaggctctgccaggagaactatagaaatacagagtcccaggtctctgcccctcctccccagatccaaagagagggagtagagacaaggcggaaagaaccctgggacatagagaggttgaacaatcagtgttggtccaacctttttacattcattttgacgaaaggaaaagacaagtgcactgccgcaaataagggatgcctttccattcaacgttgacggtagcttgagactttgaatagttggagaaaacaccacagggagtagggttcgccaaaattggcctgtgaaaacaagaaccta

SEQ ID NO: 121367 - DNA, 1695 bp, Homo Sapiens
  misc_feature (1061)..(1061): n is a, c, g, or t
  misc_feature (1159)..(1175): n is a, c, g, or t
  misc_feature (1220)..(1592): n is a, c, g, or t
  misc_feature (1655)..(1656): n is a, c, g, or t
  misc_feature (1667)..(1667): n is a, c, g, or t
ctcgtgcattgtaaacaccatgctgtcagtgaaggactgttgggaaagatcctgatggctatccgagatgcagtttttgaaatctcagctatgcagatgttcaatatggatcgggttaatgttgaggaattctatgaagtttataaaggagtagtgaccgaatatcatgacatggtgacagaaatgtattctggcccttgtgtagcaatggagattcaacagaataatgctacaaagacatttcgagaattttgtggacctgctgatcctgaaattgcccggcatttacgccctggaactctcagagcaatctttggtaaaactaagatccagaatgctgttcactgtactgatctgccagaggatggcctattagaggttcaatacttcttcaagatcttggataattagtggtgtggaaagtaaagaagtcacaggttgggacatttagacaagagtgaatcacacacgaggaatgtgttcattcttttattgtccgttgttttaacctgactgaatacaagatcaacaagagcactgtactcctggcaattattacatatgttagaacatggattttgcactgtagacaacatttaacaccagtctatggggtactgcattgctttttataaagttcaaaataaagatttattttcaaacaagtgactttggtttatttcatacattacactttttcttgcagaaaaaaataaaattgtacaactgcataaatataaaattcttccaccatgaaaatggttaaaacattcataaagacacagcaccagcatgtgatgcctccagaaaggaaaaaaggaaagtaaaagaaaatgtataaagcaaattaattagccctgtcactagccaaagtgatgggcagatccagatctcagacacagctttagaacataccggaggacaaggcaagagatgtcaagacagcattcaatacaagcataacacaacccatcacctttttgtgtttttctgtagtgtcacttaaaatttaaagggcagttcccccatgacaaacccccaccccagcccccaggaaaaanataaaaataaagacctaacaccacaggaaaagactatggagtatgttaaaaatgctcatcgatgggccattacctttgaaagagccaaaaaacaaaannnnnnnnnnnnnnnnngcctacagccgcggccgctccaacatccctcgtgccgaattcttnnnnnnnnnnnnnnnnnnnnnnnnnnnnnnnnnnnnnnnnnnnnnnnnnnnnnnnnnnnnnnnnnnnnnnnnnnnnnnnnnnnnnnnnnnnnnnnnnnnnnnnnnnnnnnnnnnnnnnnnnnnnnnnnnnnnnnnnnnnnnnnnnnnnnnnnnnnnnnnnnnnnnnnnnnnnnnnnnnnnnnnnnnnnnnnnnnnnnnnnnnnnnnnnnnnnnnnnnnnnnnnnnnnnnnnnnnnnnnnnnnnnnnnnnnnnnnnnnnnnnnnnnnnnnnnnnnnnnnnnnnnnnnnnnnnnnnnnnnnnnnnnnnnnnnnnnnnnnnnnnnnnnnnnnnnnnnnnnnnnnnnnnnnnnnnnnnnnnnnnnnnnnnnnnnnnnatacgcaggaaagacatgtgagcaaaaggcaacaaaggggcagacgtaaaaggcgcgtgctgnngttttccatangtccgccccctgacagcacaaaaatcga

SEQ ID NO: 121368 - DNA, 733 bp, Homo Sapiens
ttttttttccttcagaataccaaacacacctttattcaagtggaagtacaaaagcacattcctaaaccaaacgcatacatgtgatttttacatattctgctttttagggattacataatcctgtttcagtcaccatacgtgactactggtctctatacataagggtatacatgtttgacaggaaaaaacacatgcatttttcatttgcttttacatttagatcaattcatttatatatcaatttcatttagattcctaccttgccttgatgaaatcctactcttgctgatggcaaagaagtaaaatatagtggcagaactatcctagaggttagccataggaggattatagagtgagcaacatatttttatatatttgttgagggtccctactgaatattataacactgaactatgaaagcctcaattgctggactgacaacaagaattttaaataacatttgtcttactcacaaaatgttataaagcttaagatggaaaaatacaaaatgttttgacattacctaaagaatcatgaactcttgttaggtatatgatggtggccctgaacttgagccaacatctgtaatcacttttatcagtcaaaaagccatgttcttttatatagcctgtagactattaaaatacaaaaatgtggtaatggataaacaactatacacaaagccctcacacttcaaatactgtcctggattgatgagagaggagcagaattc

SEQ ID NO: 121369 - DNA, 1514 bp, Homo Sapiens
  misc_feature (309)..(333): n is a, c, g, or t
cacgagtttttttggccgccaccaccggctgatgcaagttttattgagacaatatacaaacaggccatggaaacaagggttttgatgctgggaccagtaacgtaaaacggaatacaaaaataaaaaggcactaatctgttaagaaaagacactcgatgtattctaagaatataagtcatttaatactgttaattttatagcacaaaataaaacaagctatgatccccaaaaataattttaaaagcttacacagaaaatattattgcctgaagtttatgatctttaagttacaggtcaaaagagttttannnnnnnnnnnnnnnnnnnnnnnnnttaaaacacacagtgaagaccgtctaagaagcaaggccactgttcctcctgtagggacaacgatcctgtctcagagacctgtccttctgctcctttagaaaacagaaccagcacagcgtccacaccgacagcagttactaggggcatagtcctccggtcgcagagggtggagttgaggcagagctcagtggtgtccacagaaagcattagtcttaggtactgtgttaaaacaatcaagaattcattcatgtttaagaggttaataaccataatattaaaggattaattataaacacctggcaaaaaaccacatcatcccttttcaaaaataaaatgttcatattcctctgagcaaacatcacaagagcagtggccatctgcctcaggcctgccttgtctgtaaacagctgtaaaggaaagctagcacagcgccagggacacatgagctcccaggagggcacagctgtccttccctttcagctttccaaacatgagcacagaaggtgtctagtctgggtgaccaaagtcctcaaacggcagccggtcaacacatcgtcttcctcgttaaccatgtcatcaggtggttccacacagcacagacatggctgactcctgtaccgcaggtccttcccgggatacacaagtttttaaccaatcaatgccctctagtacgtaatttgtttccttcccaggtgaaaaaccatagtgagttaatttaacatccaaatatttctttaaacatggtagagcagagcaagtagcagttatgaacacccaccctctgggtcagatgtgcactgctctatggagcacaacagtcttcccagaccagtggggaacccaggcacgaagctgagctgaggcagcagtgctgcattcatatgtttagtgtgaaaaacagagtatccctgcctcattaaaaaaactgacaaggttgtaagtccgttaagttttactagttttggcacacatctggagtgcagaactcaagctcgccttgttttgagctctgaatctcctggcagcctggatgccattttcatgggctgaagtaacgagctgattaattataaaaccaaccacaggtatactctaggtcgacgcgtggtcgacgatatcccgggaattccggccggaccagcctgctttttttacccactgttctatagtcactatagcct

SEQ ID NO: 121370 - DNA, 1121 bp, Homo Sapiens
  misc_feature (772)..(789): n is a, c, g, or t
tttatttttaaatggttataatcatatattttacatgtactgtcaaaaagcttaaataaaagctgaaataaatgctaattgaaagaaaatgtatatgtgcaacaaaaaagtcagcgagaggtagagcagctgagcagctctgcggtgtactgacttcatgtccccatggaactccagtctcacagcaaggatgaggtgagcccaacatatctggaatgtcactgccctgggtggcccctctggctctacagggatgccagcccctgccatgcccctcccagccatgaccccccagtgctctaaggacaaggccctgttgtgcccatgtgccatctgcccttctcctgccctggtccatggtgtctatgactgctctgtgacccctgcccccaccagctctgcctgccgcagagggacagcagcccttgtgcaagctggcttcagccgtttcaggtgtggtctctaggctgggagattttgcgacctgccctggccactgctgatgcgtccagcctcctctccaaggtggaaggcagggaggacagcaggctctcttagacccatacactccacgttaggaaacacggagtttgaaaaataaaaacacgttaatctactggcaaaagcagctggcagaagctaaaatcactggcctaggaagcacttcaaaatcaacaacagggcttaggtgaaggagttattgggtatcacagagcaagaaaaaaatcatgggtacgtggtctcaggacctcttgagattgtgccttaggcnnnnnnnnnnnnnnnnnngagagagaaatcacatttccccaaaaatggatgtgcaaaatgagccgagaggaaatattggactgttcatttacaaattctcaaagacagaccccacatgtcaagattcctggtagcaaaggttctgccttcgccagttttccagctaattagcagcacgtgggctacaggtgctgctagacacagctcccgcctggctgctgcctctcatcctgccaatggcacaagaactggtccaaacaggaagaaccaggagttgcaggccttgacttcctaactctctgggactggcccagcaggggcacttggcacctctgcagagtcggagcatt

SEQ ID NO: 121371 - DNA, 792 bp, Homo Sapiens
  misc_feature (21)..(21): n is a, c, g, or t
  misc_feature (62)..(62): n is a, c, g, or t
  misc_feature (73)..(73): n is a, c, g, or t
  misc_feature (423)..(460): n is a, c, g, or t
cagacaccggggctgggtttntttttcctctttttggagaaaaggaacagggcagtggaatnaaaattttttntttgtttgtttttaagaaacaagaaaacagaactgcctttgcactaaattagtgacttggacttttgcccagtgaagacaggctgtgacactctggatgtcttggtgtgtgtagacacacattgcagactcttaacgcaggaaggacttcaaacttctgctgagaccttggggtcaaggaacatttcattggttttttttgtccacccccatctcccttgctcatttggatgcgtcaccttaattctcctgctgccaccgtctttgattcaccgggatgtacagtttacagttgaagagcaaacagaaaggttttctcttggtgggatatgcagaacttgggatgtgtgnnnnnnnnnnnnnnnnnnnnnnnnnnnnnnnnnnnnnnctgacttaaaaaatcaaatcccccgacatacgttttttttaatctgtgccaaaaatgtgttttcagaggaaatcttattttcatattcagactttgtattgcccactcatttgtataagtgcgcttcggtacagcacgggtcctgctcccgcgatgtggaagtgtcacacggcacctgtacaaaaagactggctaacccctcttcctattaccttgatctcttcccccaacttcctaacacttattaatttatgaaactgtttttctcagcgcagttttgttttgtgtgtccattggattacaaactttattaaaaaatataaaacacaaaa

SEQ ID NO: 121372 - DNA, 1335 bp, Homo Sapiens
  misc_feature (44)..(44): n is a, c, g, or t
  misc_feature (60)..(60): n is a, c, g, or t
  misc_feature (78)..(78): n is a, c, g, or t
  misc_feature (91)..(91): n is a, c, g, or t
  misc_feature (168)..(168): n is a, c, g, or t
  misc_feature (1201)..(1238): n is a, c, g, or t
acggatcttgcacttagtttacagtcacctgtctgggttgtcantatatcacaaatatcnccattcccataaaaatgnacaccatcctgantgtctgggtaccatcgtcttgaagatgataagctctagcagtattcttcttagcccattcaatatgctcttcttggnttcccatgtcccggacaaccacagaggttttcccactatccttgtcctcatggtattgatgtacatgtttgccatagcagaattcatatttccaccaaccgacaccctctttatttctcctaaaaggcacccttagtatttcttcctgctgctccagctgcctcagggtgaggggcttaaatggagatcctggcagtgattgacaaaatatgtcattcacaggagatgctctgaacctatatttaggatgactgcacaagagtggtgtcaaaatgacaacttcatattcacaagttgtaacttcagctactgaaagaatttcatgcttagattcaggatgacatatgtacatcacagtacttgatctgggccggttctgtttcaaactacaaggtgtaccatttcccattcccacaggatagtatggtgtcatctgaccttcgatatttttagtgggaatctcatttgatttttccttttcttctgcttctcgttctttttcaaatagaaggttcttggccaacatattcccaaggtagtactcgtgaatatttattttctgaccagtttctttctcttcatggtactgccgaatgtgttttccatgacatacttcgtaagtccaataagactcaattctgtaggaacaagtgctttgtttaaatagtggctccacaagctctcttggattagggcctttataatccttttgttcttcctcatccccacttgtcacaaggggaagtatgcatttatatttttctttatgtgcagttgtcatgatgacataattatcttctttatataaaactccacttgtgggcagagagaactcggtgccgggccagttgactcggaaagggatgtcatcgctgagttgaggaagggctcgtccgccgccggacgcctccaggaggccgcagaggaccagtaacaccggcccgcccgggaccagactccgtacgccgccgcctccttcctccatcctccgccgccgctttctccagccaccgccacaacctcctctgctccnnnnnnnnnnnnnnnnnnnnnnnnnnnnnnnnnnnnnncggcgggactataaagcgcccgggtatcaccggcccaaccgccgccacgtctccttccggagagcccggcaacgccgcctccgcccccttgagcctc

SEQ ID NO: 121373 - DNA, 1782 bp, Homo Sapiens
ttacatgacaacactgcttgtggacattttattcactttaaaataaatattgtgctgtaaactgttcagaagtgaaatccatattacagtaggcaagtacaagggatagacagcacagtgttttgttagagtaaaccattctgagtctcagaagcatcaccaactgtctacatcagatagatactctgagagtaaacatactcataagaagaaaaaagtaatagataaaagttctgagagagaagcaacctattataaataagagtttcttgagattaacaagggtgaggacaactcccatgtgagcctctaccatgtgcccagtttctagtttaactacttgcagagagcagttgctatataaaaatctgttgaaaggatttcaggtactagaatttacatattttacatggtctctcatttacacctatcaatttctttcttcatgatctttacttcattagctacttacatatactataatttacataataaatctattatttaaaaactttcaataggtacaacaattatgacatttgattaggctggactctaacttgcttggatgagatttattttggaatcacagtatccaagcaaagaaaaacagtcagtttataagacacaacaaaaatgaaaaaaagcgagacaaatgtctgcctcagaagtttatcaataacctcttatatacacatatgtattcacaaagtggttgagagtcattttataccatcctttagaagaggtccaatggctgagaactctataatgagacacagtgggacagaaattatcatgactttcaatgatcttttctttcccctaactttaatatcctttagttggggagagaaagaagtccattttcatctgctgtatctaagattttacagatcactggagattcaaccccaagaatatattgacaggagtgaggctctagcatatatacagtaacagcatgaggtgaatctgattctttgcactttagttttacagtcacctgtcttggtttgtcagttatatcacaaatatctccatttccataaaaatgtgacaccatcctgactgtctgggtaccatcgtcttgaagatgataagctctagcagtattcttcttagcccattcaatatgctcttcttggttccatgtcccgacaaccacagaggttttcccactatccttgtcctcatggtattgatgtacatgtttgccatagcagaattcatatttccaccaaccgacacccccacgaaagcagtaagaaccactaagaaactcttttatgagttggtcatctgtcaatttggatatgtgggttgtcccaacagtgagcactggctgagagccaatagcaatcgacttgtggatcgctggaaatctctcttctttagttgattgcaaatcttcctctttatttctcctaaaaggcacccttagtatttcttcctgctgctccagctgcctcagggtgaggggcttaaatggagatcctggcagtgattgacaaaatatgtcattcacaggagatgctctgaacctatatttaggatgactgcacaagagtggtgtcaaaatgacaacttcatattcacaagttgtaacttcagctactgaaagaatttcatgcttagattcaggatgacatatgtacatcacagtacttgatctgggccggttctgtttcaaactacaaggtgtaccatttcccattcccacaggatagtatggtgtcatctgaccttagatatttttagtgggaatctcatttgattttt

SEQ ID NO: 121374 - DNA, 1788 bp, Homo Sapiens
  misc_feature (1483)..(1483): n is a, c, g, or t
  misc_feature (1635)..(1635): n is a, c, g, or t
  misc_feature (1639)..(1639): n is a, c, g, or t
ttttttgttttatccaaatttattctcagggaaaaagaaagtagtggctctacgcaactttttcattcaccaaccacctttccatgcatcagaacctatgctgtgattgttagctgaacttcaatagtttccacctacttaagagagatgcctcaaacaaattaactttattttcagacaacaggtccaagaagacttcacagctcaatcatgacgaacatgtggctgtttcctcacagccaggaaccctcggtattagaagaaaactccaaccccccacaccatcatctagcctcttttctcactgtgaagaactgatgagacagaattcctgagaagggaacatttaggtaatctgggatagaagggcatggaaggactggacaaactaagcctccccatgaaggaagggaaaagaatattacaaaacagactaacagaaaacaagacccatcagtatcttcaggataaacaagaggccactctagatgctctgattaaaggttgtccatgcctacagaggcggaggataaatctaagaaacagaaatgtataaccagcccaatgcttccatactctgcattaggtcagtgtgaacatggctttgctcccaatggtcagacctgacatgggtccttctgaagatggtgggtcaggtatatcccagccaccctcaccagagaatacatctatgacaaacccaaattcctaatcctgaagtactttgagccactctacattgtggccactcaataatagaataaatttgtgaaaaagctgcatgttttaatttaggaaatgagtagaagttcacaagcaacccagaataggtgccagcagtttgctccagtgggccacaccacagcagcagctcaggctctgcagaatcactgtgtccagtgcttcctgagatgttctttcagctgaggaatggaaggcagcagctgctggcactcatgacaacgaaggggcagcttcaagagctcaggcatcccatctcggacagttactctaccagcctcttgtaccatctcgatcacagcttgtgattctaggaagtattctgtattgaaagaattccaatgttttttgtttttaaggcaaggagaatcaaaatcctggctgatcacatgaagatgtacatggctcatactcggaatggcgtggtagcccaatcggaagcggagtttgctggacccagcaaaatctacaatcaccttttcccccacagtgtgcatatgcttaaggagttcaaggtgttccctggccacagccttcagactggaaatggaggtccacggtaagaccagccaatggtaacgggcctttgggtatttatcctttatcaccaccacctgctcatctttgtaaacctgcattttggggtcctgcatagaaatcttcaagccttgactccagtggcccagggattcctttttgataggtgcatcttttccctttctttaggggcacagagcatggncagaggtgctcccaggttccagccctgtcccagcctcagcttcctgagcagcaccctttctatagaacactgttgcctgattctttctctcctgtgtgtttccaagcaagggtctccctcctgccgaatcttggctcccaggggcaatcctnaaangaggtcgtattaattcggtaccagtctaacttttcccggtggaatttttttcgccaacattcaaacacaaacagcgggagcaaaatgtgaagcggggggctaggagtgagcaacaccataatgggtgcgccactgcgctccatccggaa

SEQ ID NO: 121375 - DNA, 866 bp, Homo Sapiens
  misc_feature (391)..(434): n is a, c, g, or t
caaggagaatcaaaatcctggctgatcacatgaagatgtacatggctcatactcggattggcgtggtagcccaatcggaagcggagtttgctggacccagcaaattctacgatcaccttttcccccacagtgtgcatatgcttaaggagttcaaggtgttccctggccacagccttcagactggaaatggaggtccacggtaagaccagccaatggtaacgggcctttgggtatttatcctttatcaccaccacctgctcatctttgtaaacctgcattttggggtcctgcatagaaatcttcaagccttgactccagtggcccagggattcctttttgataggtgcatcttttcccttctttaggggcacagagcattggccagagttgnnnnnnnnnnnnnnnnnnnnnnnnnnnnnnnnnnnnnnnnnnnnatccctttctatagaatcactgttgcctgatctctttctcttcctgtgtgtttccaggccagggttctttgcctcttcctcaaactctacaatatatggataaagttcattcaccatgtggagaacctggccaggctgcagcttcacctcttggtccttcccaattacgactgagtcaatgctggtgggattgactcctacctgctttaccttgacatatcccttgttacactctgctttcaactgtacttgctgtcgagaacatttcttatcagtgatcttggtctctgggccacgcccaatcacaactgcttccaaatgtggaagtctgattcgctggtgccggctgtcctgtctcaccaaccagcacacccgcatcatcactctccagaagtcggagacggacaaattcacgtcctcgtccgattcaca

SEQ ID NO: 121376 - DNA, 1785 bp, Homo Sapiens
  misc_feature (247)..(293): n is a, c, g, or t
  misc_feature (1676)..(1710): n is a, c, g, or t
ccccccccacgagagggtgaaaggtgttcctctttcccacacaaaagatttctccccaagttaaggcacgtgtttttcccccatttcccccgagggtgttgtaaaaaacggaggcggcgcaaggtgccctaggcttattaataacggccttccctattgggggcccccttttgttccaagaaaagctggggtatcggggtaaagcttggggccccttcaagggatactttaagagcggccgcccccnnnnnnnnnnnnnnnnnnnnnnnnnnnnnnnnnnnnnnnnnnnnnnngagttgtccattcatctttattcctttatttaatcctccccatgtattatataagcttaggtatataacttctattacataaagaagtagtaaaggcacaatgtttacttacacaattacatgtagtgaattagcacttttgtaactcagagacatgaatgtcaacaattttagagcagagctcatttgcacggtcataaggttttcatggctgctgtgactctgcagacaagcatttcaaagcaggccccccagccagtggcatcggaaccagtggcatcaggggaagtataaacaaagaaaattacagattattgtgcccacaccccagaaattttgattcaagtttgagatagggctgacaaatctttatttttccaaagctccctgagtgatctatatgtataaccaggctctgaaccactgatgcagagcaccatcatttcttgattggaatggatgcctgaggatagtaaaacaacaaagttaaaacatgctgactttttttagaccctgaaattaccgatttggtgatgggtgttaaggttgacaataaaaaccatttctccagtgtggtcatggcttgagagagccatgcgctttccccaggtcatggatggccttgttctccagcagttccatctgcttgtctcttggtctcaccacattgttcagcattgctctaaccacggtcaccacaggcacagaatgccccctggcccaagagtctggtaaggagccaaagaactttctaaccagccattcacctgggcgagattcttgcctatcacataacagaactccaggcctaaatacagagtaacgatcaaattttaattcttcaaccttggcttctacttctcccttaacttgtagatataaaaaattgcttgatttatcagctcctttagaggatagcaagttgaaatgtttgcaccctccagcttttgccagctctgcagacttcagcacataatctcggtcaacacgaacaaatccctccgccccagctttccctctggtggtacccaggcaacagaatccaacatcatgaccttgaaaggcagaggcgtagtcatccaacttttcaaagtccaccacttcttgattcacatttttataagcttcctcgtcgaaggtgagcttcctccggccaatgagcgtgactttggaaaacaggccctgctccaggatttcctttaagagcactctgccggtttctccgctggcgcccaaaataaagacggatttattctgcatcctgaagtcttcccgaagcttcgacagggcttctgtttcggccatgccggcttggtcttccgggtggcctcccccggccgtaatggccgaattcccgggcatatgtccggtaccgtcgactgnnnnnnnnnnnnnnnnnnnnnnnnnnnnnnnnnnncgccgcttcctcgctcactactcgctgcgctcgtcgttcggctatgacgccgctagcgccctatagtgagtcttt

SEQ ID NO: 121377 - DNA, 951 bp, Homo Sapiens
tgatgggtttaaggtgacaatgaaaccatttgctccaatggtgtcatggcttgagagagccatgcgcttttccccaggtcatggatgcccttgttctccagcagttccatctgctttgtctcttggttctcaccaccattggttcagcatttgctctaacccacggtcaaccacaggcacagaatgcccactggcccaagagtctggtaaggaagccaaagaactttctaaccagccattcaccctgggcgagattcttgcctatcacataacagaactccaggcctaaatacagagtaacgatcaaattttaattcttcaaccttggcttctacttctcccttaacttgtagatataaaaaattgcttgatttatcagctcctttagaggatagcaagttgaaatgtttgcaccctccagcttttgccagctctgcagacttcagcacataatctcggtcaacacgaacaaatccctccgccccagctttccctctggtggtacccaggcaacagaatccaacatcatgaccttgaaaggcagaggcgtagtcatccaacttttcaaagtccaccacttcttgattcacatttttataagcttcctcgtcgaaggtgagcttcctccggccaatgagcgtgactttggaaaacaggccctgctccaggatttcctttaagagcactctgccggtttctccgctggcgcccaaaataaagacggatttattctgcatcctgaagtcttcccgaagcttcgacagggcttctgtttcggccatgctggggccagcccccggccccgggtcctcacgacgcagcaggagcagggcggccgccagagcagccgccgccgccgcgctcagcgccgcaggcccggccatcagagcatcccaccttccctggtcggaccgggggggttggaggcgacggagacagcgcctacccccc

SEQ ID NO: 121378 - DNA, 593 bp, Homo Sapiens
tatttacgacgtctccagcactggggcctgaactcaaggattactttgaaagacgaacttatcagtactattaaaaggataccaaaggttagtgcagcatatagaatcttaaacaataaaggcttattcacatttaagcattgcaacaggcacaaagaaaaagagtgagcaagaaaagaatccttgatattactggccagcaaaaagggaaaagagcatatgccttccttaccgccccagctttccctctggtggtacccaggcaacagaatccaacatcatgaccttgaaaggcagaggcgtagtcatccaacttttcaaagtccaccacttcttgattcacatttttataagcttcctcgtcgaaggtgagcttcctccggccaatgagcgtgactttggaaaacaggccctgctccaggatttcctttaagagcactctgccggtttctccgctggcgcccaaaataaagacggatttattctgcatcctgaagtcttcccgaagcttcgacagggcttctgtttcggccatgctggggccagcccccggccccgggtcctcacgacgcagcaggagcagggcggccgca

SEQ ID NO: 121379 - DNA, 1447 bp, Homo Sapiens
  misc_feature (83)..(83): n is a, c, g, or t
  misc_feature (92)..(92): n is a, c, g, or t
  misc_feature (146)..(722): n is a, c, g, or t
  misc_feature (750)..(770): n is a, c, g, or t
ttcccgtaagccagcgtcggctaacgggttcgtcaacagccagctgacgaacgactacacgaattgaatcctacgctgagctntgagaagcncacgctcccgaaggagaaagccgacagtatccgtaaagcgccaggtcgaaccannnnnnnnnnnnnnnnnnnnnnnnnnnnnnnnnnnnnnnnnnnnnnnnnnnnnnnnnnnnnnnnnnnnnnnnnnnnnnnnnnnnnnnnnnnnnnnnnnnnnnnnnnnnnnnnnnnnnnnnnnnnnnnnnnnnnnnnnnnnnnnnnnnnnnnnnnnnnnnnnnnnnnnnnnnnnnnnnnnnnnnnnnnnnnnnnnnnnnnnnnnnnnnnnnnnnnnnnnnnnnnnnnnnnnnnnnnnnnnnnnnnnnnnnnnnnnnnnnnnnnnnnnnnnnnnnnnnnnnnnnnnnnnnnnnnnnnnnnnnnnnnnnnnnnnnnnnnnnnnnnnnnnnnnnnnnnnnnnnnnnnnnnnnnnnnnnnnnnnnnnnnnnnnnnnnnnnnnnnnnnnnnnnnnnnnnnnnnnnnnnnnnnnnnnnnnnnnnnnnnnnnnnnnnnnnnnnnnnnnnnnnnnnnnnnnnnnnnnnnnnnnnnnnnnnnnnnnnnnnnnnnnnnnnnnnnnnnnnnnnnnnnnnnnnnnnnnnnnnnnnnnnnnnnnnnnnnnnnnnnnnnnnnnnnnnnnnnnnnnnnnnnnnnnnnnnnnnnaagaattcggcacgaggcggcacgaggnnnnnnnnnnnnnnnnnnnnncatcaagtttgagaaatgtagttttattaatagaagggcatgtcttaccatacacactgtccccagataaataaaatcccaacatctttgaaagcacacaaacacacagttttacagggtacaatacaaagtgaactttgatgatgttcttacttgcatttactaaaaatctgagaaagactgtaatcagtctctaaataattatcttgcgtaaagagaaaagtagagcacaatatatatatatcacaaaccaaatcacactctctgtaacattacaacatggaatttacttaatcaaaaataaaagcaaactggctgaagaaggctgtatcatttttttctcaatattacgctaatttctatttttggcatgaattattaaccttttccattagtaggcaaatgtgctctgcaaattctcggatggcaccacggccaccattacatttgcaaatgtatccaacagccttctgggcagtagaacaggcatcagcaggagcgccacttaggcccactctcttcaagcactcttcatcagacacttcatttccaagatatgccacttctttccagcacaggcccatttcttttctccattcatctacaactgctagcttgtctgatacactgacttccattttgcaatccagttttatagaagactgttcctgctttga

SEQ ID NO: 121380 - DNA, 1119 bp, Homo Sapiens
gagtttataaatatataactatatttattttgaatattaaatagtttttaaattacaagcaatttattgaatcacactatgcatcaatatacagtaaaaatcttacaatttaaaaatgtacacaatttaaactgaaagttcattgactattatattgccatgaacctcttctgcctgtgttaaagcacagcagggaggcctggtgggtgtgacggccccctacgtcctcctctgcagacggaatccgacggtggatccatacaccagccccatgatcaagatcccgctcggcccacgtaggcctgagtgcttaaccagcacgtgtccacaccggtcaaactgatcttcacaggctgttggtaattcaacactgtcaatgcatctttaagaatttctttatagatgaaagagaatgttctttgttaataaagacttgagccaaccccattgctacttaggaatattgttttggagatttccatcggaagtcactgcgtatacccattctttttttaaggctacttcccataaggctcatgttttgaagccactctaacagaagcccaacctctggcgtctaacccttggttcacttctgaattttcagatgatgggctgagtcaaggaagagcaggcgctgccttccttccaccggggccctggggacaggcatgcagtaggtccttaactctacaaataccttatttcgggaaacaggaataaaaggaggggtttggaaaggccttttacagcagcaagacaaccaagacttttcttagataaaccccatttctatagaaccgatcgaacctgtacattttaaaaatagaacgaacgttgtttgcaattcggcttggtcgagctttctgcacccttacggtgaatggcttctcgtccacacacacaggccaagtctcagaaggatgtggggagcactttttctgggttgccctttctggcttattgacagggtcattcaaaaagacaaattcgcatctagctagtaaggaaatgaaaactagattatttttgttataggatttaaaatgtacaaactccaccaaaacaggactaattcagattgattctgggttgctaccccatagaaggccagaaaat

SEQ ID NO: 121381 - DNA, 563 bp, Homo Sapiens
cagcttccttttcccttcctcttttatcataaataagtattataactttattaaaatgaaaagacaatattcaaaataatgcaacaaaatgaataaaatcctttgtccaatactgtacacataatgcagaaatcagtgcatttttcttaagcatgttttaaccttcatttagttcatactaaaatataataagctttaaatagctcaaataatattcagcagtttaaactgtaaacagcttgtttaactgttaagagaacattgcagtaatgtacctctgttagtgagcaccttctcttctgtgcttatctcttcaagataaatacatggaaggatgtgaaaatcggaacaccaactatgtgtctcactgcatctaagtgaagcagccacagctgtgagagttttcaaagcagaaagatgctgatgtgacctctggaattcagacatactgagctatgggtcagaagtgttttacttaaaaagcaaacaatccccaggaaatactgaataggaaccagcaacacaaggccagcttgtgttgtatgtttattaatacagtctaa

SEQ ID NO: 121382 - DNA, 690 bp, Homo Sapiens
  misc_feature (193)..(206): n is a, c, g, or t
actcacttggtataaagtttatttgcatgtgtaaaaagtgtatataacaggaaacctcttaaaataaaaacatagtaaagttttaggaaaaatatgaatttagaaaatgggttgctttttcagatcacaaaaatactgatatatgtgtactaaattaccttaaactgttgaggtgttagagaaacatttttcnnnnnnnnnnnnnngttggaggttggaggagacacaaaatatagaagaatgaaggtactgatatatgtcacacatgttttaaaatgaccacacaggcagaatctacaaaataatcatattctttaaaaatacagaaatgcgtggagattcccctaatagtgttaatggcatacataacattccaaatcaaataactaataaaaatttaattcacattcaattaaaacaaaaacaatatgagtaatgtgaaattgagtttttgttaagcactgacaaatatttagcattaaaaagtctcttgtacgtctaggaagagtacacacacataaattatctgagaagtagaaaaatatggattagaattttagaggcaaacttgaaacctaagacatggaggacactgttgctctgcaggttttaattgttctgagagttttctctatgtatttgttcagagggcaataaagatgcaaacttggggccaggcacagtggatat

SEQ ID NO: 121383 - DNA, 1163 bp, Homo Sapiens
  misc_feature (183)..(183): n is a, c, g, or t
  misc_feature (320)..(320): n is a, c, g, or t
gaggtgccccggtggaattaactccggggctccttaattattggggaggaattccttgggaaattacctgtcccatattctcctggaggcttaaaagagcccatttaatggggatgggatttccattccctcctaaatccagcccatgggaaccatctgaccccagggacccattggaaaaancaggtctgttagggtcccaggaggttcctgcattcattaaaggtatcacatgttatcccccagagttggttgaaatctgctgggactagggcatgatgggtgttccctggtggccctccaccctcctgggaggaccntacataattccccaggagatgctgaggagtatggtattgaattggcatttgttgggtttggcccaaggtctaccaccacctggacccatgttcattccaggcattccagggccacctaaagcattcagtgggggtctcattgcacctccatagttctgtggtcctaagggcaccattcctcttggaggagtcattctctgcattggcccacccatatttggatgtccttgttgtcgagttggatccattccactggggagtaatggctgacttcctgggacacctccaagtgcctgattaggtatcctcaatgggggccttggacctccagggtaccgaggtgacataaaaggctgaaagaaccctggtggtacaggacctactggcatgccatctcctgggggaatgtttcctagcactggactgggagctgctgcagcactgtaatcatggaaggcttttgcttcacttgagtgttcacatgtttcacgtctctctggagctgcacagtagagatccccaaatacacaccaccaagaatgtaagaatcctggtggttcccccaatgtgatgtttttttcccatcttatctctgataaaaatgtttgagctgatttctgagctcctacatggagcagatattcatatacgtagagtgctaacttctcccgggcctggctgtcggacgggacggcgctgctgttactcttgcctttgccgtacatgcttgtgccgagagcagctcccactgtcacgcacctgtcaacccatcacagcctccccgggaacagcccccggccgtaatggccgaattcccgggcatatgtccggtaccgtcgactg

SEQ ID NO: 121384 - DNA, 1465 bp, Homo Sapiens
  misc_feature (952)..(952): n is a, c, g, or t
aacttgcatcagacgcaatttaatgaaagctctcaaataagcgattttattcctatccatgattgcagacatttacaaaaccataacatctgagttcaccttaaaaaataacttatataaagcagtgatatacacagcacaaaatagttcagggagggggcaggagcaacttgtaataattaaaatgtaaacgtgaaaaaaaggatggaataaaagtccctacttatttctacttaagatgtcatgtgataatattttacaatgtcctgtgggtcaatgtatgtatgtgtatatgtctgtataacatacacatatacagtacattctctttcccacacatatacatacacacataattatttgcagttcagtttagggcaattctaatatgccactccgtacagttgtttgaatcacatttggacccgctttcttcacaaaagaggggagagagcaggaaataaaaaggttggtttggtgtgactgagattcctttgtttaactgtacactgtgatgaataattttcttccgtagtagttctgtgaagggctgactcactgtggttttcatgaggagacttggtaatggatcacacgctcattgtcatgctaggggagtaactctcactctgaaaaggatttaagaaatttccccccatttcgccatcatcccttgggagtgcccggttgattactcaggctcatattattgggagaatccttggaaatactgtccatatctcctgagcctaaagagcattcatgtgatgtgactccattcctcctaatccacccatgggaccatctgacccaggacccattggaaaattaggtctgttaggtccagggggtactgcattcattaaagtatacatgttatcaccagagtggttgaatctgctggactaggcatgatgggtgttcctggtggccctccacctcctggaggacntacataattcccaggagatgctgaggagtatggtattgaattggcatttgttgggtttggccaaggtctaccaccacctggacccatgttcattccaggcattccagggccacctaaagcattcagtgggggtctcattgcacctccatagttctgtggtcctaagggcaccattcctcttggaggagtcattctctgcattggcccacccatatttggatgtccttgttgtcgaagttggatccattccactggggagtaatggctgacttcctgggacacctccaagtgcctgattaggtatcctcaatgggggccttggacctccagggtaccgaggtgacataaaaggctgaaagaaccctggtggtacaggacctactggcatgccatctcctgggggaatgtttcctagcactggactgggagctgctgcagcactcaccaccaagaatgtaagaatcctggtggttcccccaatgtgatgtttttttcccatcttatctctgatcc

SEQ ID NO: 121385 - DNA, 1447 bp, Homo Sapiens
  misc_feature (721)..(721): n is a, c, g, or t
ggggggggatccaagccattattgaggaccgcggtttgcctggggaacagctatgggcgcttgttcactttccttatggggccggcacgccgaaggggaggggtctaaaaagtttctccagggccgggcggtccgacagggtgcgctcggaatgtgcgggggcgagtttaaaatgacaccataagatgaactttattttaaagctcataaaagtgttcacaatcagttacaacaggatcgacatttcttccattccacactttcacatgacaatatactgtatagtgagagagaaagtttaaagtttttgttctgcatgctgctaacacatttgactagcttttgttttactcattgaatttttaatatcaaagcaaaaagtcattttctcttggacagaaatggttttagaaagcccttatgaagtcagacttagtcttgtttataaacatccacacccacacacatgctgaatggagagcaaaatgcaagaaaactaccttggcaggaacaaatgcttaaagattttaatcacagccctcttgaacaagcagtacagttttttttctccaaaagacaaaagtcagtttcatcctcagtgatgcaaatggtgagactgcacagaaagcttagtatgaattcacaattccacaggaatctgaaagttaccaaggcaattttcccttttaggatcataaagactacagacttaagcttttgntctttttccatataatacacaaaatttctaaatatccttaaaaaagaaaatataaatagtttcagtatgttatgtagagtcacatactatggcaaaaatattttattaattgaaggaataggccaatttaaggttatctagtccaagtccatattaacagaatttttctcattagggtaacattcaccattctgatgtggaggttcagcaccaaaattgtttttgtcttctaaatcttcttcctttttatcaatatttgggccatttggagttctttccagtttgggtgattcaatttttggtttcggttgtgttacaacgggttcacatgtgttgttcaattccttgatttttgttttaatttcctgagcacgtacaactggatcctgatcaagactctttttagcctgagcattcatgacattattcatccattccatcacttcattaacagacttctccacttttttcatttcagactcatcaatatggttgtatttctcatccttatttctgaagtcagctgctatcttggcataatgctgcagcctctgtcctagttcttcaaacatttttggccgttcttcagcttcctgaaaccgaactttaactggagtgccaattttcattaattcttccaacttgtcaacatatgcttgtttagcttggtcctctccttcttcatacagccaagtcttcaggtttctgtgaggagtctcaaaaaat

SEQ ID NO: 121386 - DNA, 1176 bp, Homo Sapiens
gccaatctccatgtaatagattatgatgaaaaagaagacgttctttatctagttcatataaagacaatgcactgtatgacttttagaactcctcaactagaaacagaaccacttaaccaaacgaagtaaataaagtgtgtacagtcccacacagactagtacagtttacaattagatacacagaactttaaactgctaaagggaaaggaatctgacattctgggtaaatcttactcaatctaaatcaaagcttggttttcaggaggaggaaggtgcgagcgcaggcagaggtgctgaatactcctcttctgattcacttccatcatcctctttctcttggtcactgccctcagtgctaagccggtcaaacccttttcgactgtagcccttacggcttgcaaagaaattaccaaggtttaagcctccaccttccctttcgtctaaatcttcccagtactcttcctgaactcgtctcgagtttgtgttcagaatctttgatttcctggacctcaatgccagcctttttaactgatcgatgttccaatttctcagtcaaggtgaacttccacacggtgttggtatgagcatctccaatgtacacagtcccatcttcagatgcaacaatatcatgaggcatatcaaagtgcttgcgcactggcttgaagatgtcgataatttccccattggaaaagttcatcacaatccttgtacaggttcttggtccccaaatgaggcttcccattcactgcaaagagcaagcctggtatatatgaaattgcaaatacatttcttccaaatgatgaatgcttaatctctctcacaaattctttggtgtcagttttaaaacactggatccgaccattttccccggtctgccacacataattggcccaaaagaggcacaagagccaagctgtgaggaacagtgaactggcctggcagaggactgctccctgaagactcttctccccactgtgtgatgaactttccacttggtgaaaactgcacaatcctgctgttgcagtaaccatctgatacataaatggctccagtgcctggatccacagccacatcagtgggttgacagaagtgattctggcgacgcgtggtcgacgatatcccgggaattccggaccgtaccagcctgcttttgtaccactgttatagtgtacatag

SEQ ID NO: 121387 - DNA, 1044 bp, Homo Sapiens
ttttttttaatgctctgaaaacactttattacacaaattacattcagattctgaaaatagtgttctaacagtgtaaccatctaaaaataagacatcccaaaaacacaccaactgaagaaaatttaaaaaagaatttaaatagagacttttttatttccttcattgcaatataatgttagtgattttaaaaaaataggagatttagcagctttgtcgtcatgtagcacaaagtttctctttattgccacaggctaagaatgctgaacaggaaaggcaccaaagaaagacactggcaatgaaagtgctattgggaaaatactgtgttcaagcaaagaatggggttatttacatccaccaaaaagtctcaaaagtgtaaatgggcaaatcttccattgttagattagaattatgatggaaaaagaggacggtttctctagtctatgttcatataaagacaatggcactgttatgaacttttaggaaactcctcaactagaaacagaagccaacttaaccaaaacgaagtaaataaagtgtgtacagtcccacacagactagtacagtttacaattaaatacacagaactttaaacgtgctaaagggaaaggaatctgacattctgggtaaatcttactcaatctaaatcaaagcttggttttcaggaggaggaaggtgcgagcgcaggcagaggtgctgaatactcctcttctgattcacttccatcatcctctttctcttggtcactgccctcagtgctaagccggtcaaacccttttcgactgtagcccttacggcttgcaaagaaattaccaaggtttaagcctccacttccctttcctctaaatcttcccagtactcttcctgaactcgtctcgagtttgtgttcagaatctccaaaggcccttgattttttccaccgaataaatatggcaatggccagcaggacaaccaccggaataaccagaagggttgtaatgagaacaacaggcactcccgagcctggctcctcgtgccgattcgccacccagcctcgtacctagccgt

SEQ ID NO: 121388 - DNA, 792 bp, Homo Sapiens
  misc_feature (534)..(534): n is a, c, g, or t
  misc_feature (662)..(662): n is a, c, g, or t
  misc_feature (693)..(693): n is a, c, g, or t
tttttttagggtggacacaacttgctttacttgaaccatctgggtgctgaccaggccctggtgaggagacaccccagcccctagtcagccacagggtgcctgggaacaagggggccaaagtcaagggcctgagactcagtgtcagatcctaggctgggcttagagcctcagaagtggaatttggaattctgagagaacaatctagaattctaggaatagaccatagaatctcagaaatggaatttgaaagtctaccaacactcccggggtgggggtggcgggtactgagtgggaatgattagaataaaattgaggactctagcagcggacttagaatggtatcagcgggttctcatcctacaacctgactttggaagttggagataaggggtgtctaggggttgggtcagactccagttttggagtctgactcacagttgggcggagccaaggccccctgaggctgagccagaacctctgagagtgaacctggagactcagagggcagctggcagggctcacagtgtggggtcncaccctgcagaggctgggtcaggccctcaagggctgggttgctggcttcaagaggctgggccaggatgtcaaggggcggagttccgggtttcacagctgggacagtgttgcccagagctgattcctgngacttgcagaaacgtgcgaaggtctctgaanggctggccccggtctgtggagcaatccagctgcctgagctagtccctgaccgggtgtttgatcctgcagtgctcctgcgcacgtccacaggtacgggct

SEQ ID NO: 121389 - DNA, 1708 bp, Homo Sapiens
ctattaagtacttgaaatggtttttattataccctaaattttggtaaatattgggtttgtttctagcttccctactggttcacccatccctttcccttgtccttgtcccaggactgcaccagaagtagaggatggaacaatgatcttcccaccttctgaaggcaactttctcatatggtacagaactggtaccagcctgggggatgggaggagtcccatgggtcagtcatcatctgtgtcactagggcccatgtactggcagatggcatcgtagtgaagctccaccacctgattttctcttggcagttgcaccaaagcccggctccgtgctctgtcccggctcagcaaatgtcccacccttccagtctgtgggcccagcaccaccatcacacggtcaccctctgccttgggaaccagggtctccagcatgtcttccctcaggccttccaggactcggccttcatctgtccgacatacacaggtatctgggcttaggacatcttcaattatcatcttggtgttgtaatattggcctccttgtgtacatgttgtccacaaaccgcacacgcaggttcctgtgcaaccagtgctgacttctgggggctgctttctcactcttggctgcaggcccatcctgtcggtctggaaggtgtttccgcttcctctctgagttgtcctgctggatgtagagttcttgattcccagagggtcttccgtgatgaggccagttcctttctgttgcctgagatcccaaggtgttctggtcaaactcctgctgggagacaggccgcaggtagtactcactaacagtcaccacccggctccccacagccagacgaaccatggcccgaacattgtcaggatcaaggccttccaccttcccatagaggcctcggtgagggccagaaagaaccaccacagctcctccaggcaccagcccttgaggctgatcttccttatctttctcttgctcctcatctggtcttggcatgcgggaggggccagtgggggtcaaggcctgggcctcggtcaggttggcacccagccctaaccccttgggcctcagtgagttgacacggggcttcactacttgattgaaggtgcggccgatgccctcgccaggtttccagcccatgccccgcagcatggccagcccataggcctccacggggaccgcctcataattagcctcctctggcactgtctctgcccggggttcgctgtctgccccttccccgctgggggtgcatcctttctggatcatggggatagcgagcgtggggtcgacacccgcattctctctctcttccagagacttcttggattccgcaatgagctccttcacagcctgggacaccaccccatccgccaaggccccagtatctgtggatggcccagggggccgggctggtggctgcctgcgatggccattctggatcaaagggatgacgagttccttgggggcctcctggggcttcacactctgcagctccctcccttccacggttttcaagaaatccttctcctccggagatggccccgcgccgtctcccgagtcggccagccgcctccgtgcggacgtgcgagtgaagccgaatgaaattggggcagtggaagcagccgtcagcggcaaaacaccctctttggagtcagccatcttgctccctcgtgccgaattcacacacccagcctcgcacctagccgtgac

SEQ ID NO: 121390 - DNA, 964 bp, Homo Sapiens
tttactagtgtcaaatctcttttattacagaggggttgtggtaaaagatcctgggcatccactggttatctcggagtggcaggggcactcagtccctccgcaggttcttaagccgttcctccaggtctgcatcagcatcagctagggctgaggctgcggcctctgcttttttcccaccagcagccacactaagcgagcccccagttgaggggaggttcgacagctcatctgttaggctaagtcccagctcatccagaacctgggacaccacagcatcactctcctcttcatcttcctcatcacccatggcatcatcaatggcatcattcatcatctcctccttcatatccatgatctctgcctgccgctcaaactccatcatgatcttctggatctggggcaacttcagctgtctgttcatggtgcccatggccttggtgacacccttcatggcttgtgccatcgagttgttggacttgagtgtctggatcttgagggacacagcctggatgttggcccgcatcaatacaaacttgcgcacatagcgccgggtgcgcaccaagtcttttgccatgatgcgaacagcatccatctggccttgcttggccatcttcttaatgtctgcaatgattttcttctcctgggtctctagtttctgtcgctcgcggtccagctcccgcatggcacggttcagggccctctggttctgccgcagtagctcctctggcgtcttccggcgcccgaacaataggtccatgatggtagaagctcactggcaggccggagctgggacggacacccgtttccgcttccgggtcacgcttctctttctgggatccccgacttgcccaccaactaaggcccctcggtcctgtcgccgccgccgccgtttccggattaaacgacgtgacgtccccggccgtaatggccgaattcccgggcatatgtccggtaccgtcgactg

SEQ ID NO: 121391 - DNA, 763 bp, Homo Sapiens
  misc_feature (59)..(59): n is a, c, g, or t
attagcgagagaatcagtctagttctgatatctgttgatatcccatcacgtgacagtanctttcatgacataggattctgcggcacatatatatcattaccaatgtgtgcctttttgcaagacttgtaatttacgtattatgtctgaactaaaatgattgaattttacagtatttctaagaatggaattgtggtatttttttctgtattgattttaacagaaaatttcaatttatagaggttaggaattccaaactacagaaaatgtttgtttttagtgtcaaatttttagctgtatttgtagcaattatcaggtttgctagaaatataacttttaatacagtagcctgtaaataaaacactcttccatatgatattcaacattttacaactgcagtattcacctaaagtagaaataatctgttacttattgtaaatactgccctagtgtctccatggaccaaatttatatttataattgtagatttttatattttactactgagtcaagttttctagttctgtgtaattgtttagtttaatgacgtagttcattagctggtcttactctaccagttttctgacattgtattgtgttacctaagtcattaactttgtttcagcatgtaattttaacttttgtggaaaatagaaataccttcattttgaaagaagtttttatgagaataacaccttaccaaacattgttcaaatggtttttatccaaggaattgcaaaaataaatataaatattgccattaaaa

SEQ ID NO: 121392 - DNA, 883 bp, Homo Sapiens
  misc_feature (59)..(59): n is a, c, g, or t
  misc_feature (75)..(75): n is a, c, g, or t
  misc_feature (862)..(871): n is a, c, g, or t
tgtatcaacgtacccaaatacattaaagtgtgttgaatatacaaaaattaatgtaattntgcgtctgagatgttnaaataagaacttcttaatcagggtatccctttggactgcaagagcagttatatcatagcttgcagcatatcttttactctcagctcttcaagcattttatcttctttgaaattctatctaaacaaaaatagtattaaaaaagataacagaaggggttagattctgccaattgaactgtggacatcagtatctcattcttctatttgcctccttattctagtttgaaaaagctttggaacacattattacctatcattattacatatttcttgtagctttagtgttactcccccgactggaaatagaagttgctctttaataaggcctagggtgcttagggagcaatgcgagatttttcttacatctcttgggccaaccctatacaactaattctgggaaagggattgttataatacactgtccttgaaaagtttctttcagtccatttggagaaatgttggataaagataacttagtgcttacaagtgctctattattagtagtataataacaataattattattaaactaaaagttatctattactttatcaccctttctcaatttatgttttctcactctttaaaacatttaccccaacagggtgaaaataatggtttaaaaattgtaccttcatttacctttattatactacctaattgcccataggacatctagctctcacagttttgtcattagaagcaaaggacctgccaaatttctgaaccttttaaaaagagaaaataaatgccacaagcattttctattttagttttggaaatgttcnnnnnnnnnngtataaaggggg

SEQ ID NO: 121393 - DNA, 598 bp, Homo Sapiens
  misc_feature (540)..(540): n is a, c, g, or t
taagtttaaaaattctttatttgaattttagagaaataacaggtagtataaagacttgcttgaaagtatgaaatagtctgttgttattatttctttaggttttgcaaaccaacatcattattaagggagagaatggtacatctctcctcctcatctttaacacgttcttcaattggcatgggtacaacctgagcaaaaagatcctggtgaaatggcatctctaacactcccccctcagttctaatggctccatggatgaagccctactggacttagaccatccatacttgccaaagtggtaacaggaaaccagtgcctctaaggctagtagtgcatagtagttttcatctaaagctctgtttccccatcatctcctctgtcctggtgactggcctggaaattatggcaaggatgagttaaaatggatcaatatacaattgctgtgaaagtcaacctactaatctctagctggggattaccataaaggggatatgccaagcctcctggtttattccacttcattgagagcacacagcacantagtgttgtttgttggccttggcaaatgataaattatgatttatttactccttagtta

SEQ ID NO: 121394 - DNA, 690 bp, Homo Sapiens
  misc_feature (39)..(39): n is a, c, g, or t
acagagacgtgaggaagaaaaagctcaggagaaagaatntgacagaatattagaggaagacaaggcaaagaagttggctgagaaggacaaggagctgagacttgaaaaggaggcaaggagacagcttgtggatgaggtcatgtgtacaagaaaacttcaagttcaagaaaagttgcaacgagaagctaaagaacaggaagaacgtgctatggaacagaaacacataaatgaaagtcttaaagaacttaactgtgaagagaaggagaattttgcaagacgccaacgtttagcccaggagtacaggaagcaacttcagatgcaaatcgcctaccagcagcagtcccaagaagcagagaaggaagagaaacgccgagagtttgaagcaggtgtagcagcaaacaagatgtgtttggacaaggtccaggaggtcctgtccacccatcaagtgctgcctcaaaacattcatcccatgcgcaaggcatgccccagtaagcttccaccgtagttccgtgagcatcaatatatcttttcttggtcttttaatatttttaactacagtatgcttgtatgcttcttttaactcctggataaacttttcttttttccctgagtttgtgtaattaattgaacataattttcttcctttgaataaacctgtgcctattttggagttcacagacttacaaatcc

SEQ ID NO: 121395 - DNA, 2143 bp, Homo Sapiens
  misc_feature (190)..(202): n is a, c, g, or t
tttatgatttatgaagagtgtttaatgtttacaaagagcttttaatgatgtggaagatggtggtataataagtaggaaaaaactggttataaatgatatcacaatatgatgtcaacgatgaaaaaatgcacaaaaaaagacttttttaaaacgtcgaaacatcagagtggtctctagttggaggaataannnnnnnnnnnnnaagacaaacttcttcatactttttgtacttttaaaatgatttactatgtacatggattacttccataatcaagaaaaaaagtaaaaacttttaaaatgctgtgaacgtggtttccatttttattttctctgatgggtgactgcacatcagcatcttgagttatgctaactacttaggctggtcacgacacacacacacatacagagaagtcacacaggctgtaccgggctggctgttgcaaatgtacatgaattacacgggttgaagttgtttggcagctagttaacatatgccacccaatgacgggacacaatctggtcacacgctgcctctcctgcctgttgctgttctttacaaaggtccgtgtgtcgggctggcaaagtggcatcctgctggcatctctgtggtggccccggaatggtggagtgcccaggtcagcatctactctgggtcccattctcaactgctctggccttgacatcagagcttccggttccctgctggctcttctgcacactggatccatgccagtccaggccccctccaggcacacacctgaggcagactgagagcacaatggacgctgtcctgatgtgaactgtgcccagacacaggatggggggaagcgggagatgtgaccacgacaccacacacaagctcgatctttacagatgggccctctgggactgctatatgggtggtgcccgagagacacgggggccattgtggagccctccagggcacagttgctgggagaggacagacgggaggggacctgtgcccactgtgcctagctctgagagcaggagctaagggaaggtgcgttggaaattggggggaaaaccgtgttctcggaccaatcggtagctaaggatttcgtattgagcagaagtcacgactacaacacagcttggggagcatgcccctctccccagtttcattcacacggtggggttagatacagctagagagaaagtggagatatgcttttttgagggaggacctttcctggtgtttggataaacagtgagacagactcctggggttcggcatgctctggggaggaccatgcgacggtgagagactccctactgctacactctgtacagggtggccaggcccgcctgccgtgcccatggcctctggtgacagtcacgggcttgccttcaaccccttctgccttggagagctcttgggccccggtgaaatgggggctataaagacaagagggtggcggggggtccccatggcccagggcaccccacgtgggggctacatgatgttgcactgggtggccccgcaacaatccttgatcaatgccagccccgtcttggccaccgtgggcttgctaggtgggggctctgctttcttctctgcccgggagctggctggagatttggttactttgtctagaggttttaacttgattctcaggaaatcagccatttccttgtcttcttcttgctcccttaaccgctcgacctccgcatcgtccaccaggaagtctctcttctgcaccagtttgtggatcttctggattagctcatcctctctctgcttctgcagtttggttttttctttttctgggatggcgaccaagttctgcagctcctgcttcaagtccatgatgtccttgcagagctggatgtcatccatcatgaacctgagctcagactcccggcggaccaagacttcccggagacgctgaatttttgccatctccagctcaatctcctctggcatcatggttgtctccgccatggagatgatgtccagctgatttctccccagtctctccgttttccaagccgtctcctccaccgccccatagcgcctcagaggcttctcggcttccagatgggtggacaaagattgctttaattccatcgctgatccccgtggccaggtcgacgggtctccctttactccattcccgttgcg

SEQ ID NO: 121396 - DNA, 1022 bp, Homo Sapiens
  misc_feature (195)..(205): n is a, c, g, or t
cccctgccccgcgggaggaagactcccctactgcgtcacccctcgtttaaaggggtggccagggccccccctggcgggggcccaggggccttttggggaccagtccacggggtttgcccttcaacccctttttgcccttgggagagcttcttgggcccccgggggaaatgggggctaataaaggacaagagggtnnnnnnnnnnntcccccatggcccaggggcaccccacgtggggggctacatgatgttgcactggggtggccccgcaacaatccttgatcaatgccagcccccgtcttggcccaccgtgggcttgctaggtgggggctctgctttcttctctgcccgggagctggctggagatttggttactttgtctagaggttttaacttgattctcaggaaatcagccatttccttgtcttcttcttgctcccttaaccgctcgacctccgcatcgtccaccaggaagtctctcttctgcaccagtttgtggatcttctggattagctcatcctctctctgcttctgcagtttggttttttctttttctgggatggcgaccaagttctgcagctcctgcttcaagtccatgatgtccttgcagagctggatgtcatccatcatgaacctgagctcagactcccggcggaccaagacttcccggagacgctgaatttttgccatctccagctcaatctcctctggcatcatggttgtctccgccatggagatgatgtccagctgatttctccccagtctctccgttttccaagccgtctcctccaccgccccatagcgcctcagaggcttctcggcttccagatgggtggacaaagattgctttaattccatcgctgatccccgtggccaggtcgacgggtctccctttactccattcccgttgcgggctgcagggagggaggtggctccagccagcagcgtttttaacgggccgggcgcccgtgacgctgctccctctcctccgccgccgcctcgtccgaattcgccacccaggcc

SEQ ID NO: 121397 - DNA, 709 bp, Homo Sapiens
  misc_feature (65)..(99): n is a, c, g, or t
atatgggcgctcccgtagcagcgaacgacgagcgcagcggagtcagtgagcgaggaagcggccgnnnnnnnnnnnnnnnnnnnnnnnnnnnnnnnnnnncagtcgacggtaccggacatatgcccgggaattcggccattacggccgggggctgctgtgtcccgcggcttgcgctccgtagtggactccgcgggccttcggcagatgcaggcctggggtagtctcctttctggactgagaagagaagaatggagaagcccctcttcccattagtgcctttgcattggtttggctttggctacacagcactggttgtttctggtgggatcgttggctatgtaaaaacaggcagcgtgccgtccctggctgcagggctgctcttcggcagtctagccggcctgggtgcttaccagctgtatcaggatccaaggaacgtttggggtttcctagccgctacatctgttacttttgttggtgttatgggaatgagatcctactactatggaaaattcatgcctgtaggtttaattgcaggtgccacgtttgctgatggccgccacagttggagttcgtatgttgatgacctctgattagcagaagtccatgttccacgcttggactcatgaaggattaaaaatctgcatcttcccactattttcactgtatttcgagacataagtgcagcatttttgcatctgacattttacct

SEQ ID NO: 121398 - DNA, 775 bp, Homo Sapiens
  misc_feature (658)..(692): n is a, c, g, or t
aggacgaataaaatgtgcgacgaagcccgacaatggctgtgccccgtagtttgtcgtccgtctaaaaattagttgcaaaataagtgggcacaaagtgccagaaaattggtaaagtctgtcaacagtttagcttgggaccacgaccttctgctaaatggggtcttttgaaacaatactaacttcccactttggcgaccatcaagccaacttggggcacctgcagattataacctccaaggcataaattttccccagagtggtagaacctcatgcccataatgcccagccaaggtaccagatgtagctaggaaaacccaaacgttccttggatcctgagacagctggtaagcacccaggccggctagactgccaaagagcagaccctgcagccagggacggcacgctgccatgcttttacatagccaatgatcccaccagaagcaaccagtgctgcgtagccaaagccaaaccaatgcaaaggcactactgagccagtgtcctgcatttttctcttctctgtccagacaggagactaccccaggcctgcaccggtctcacgaaggccccggctgtctacaagggcgcgctagccgcaggaatgactgcccccggccgtaatggccgaattcccgggcatatgtccggtaccgtcgactgnnnnnnnnnnnnnnnnnnnnnnnnnnnnnnnnnnncggccgcttcctcgctcactacgtcgctgcgctcggttcgttcgctgcaaacgagtagcgccctataagtgatcgatacactt

SEQ ID NO: 121399 - DNA, 1037 bp, Homo Sapiens
  misc_feature (42)..(56): n is a, c, g, or t
  misc_feature (397)..(407): n is a, c, g, or t
ggagcatacctctcttctcggagccgacatagatgctcgagnnnnnnnnnnnnnnnaattatttatagtaaactttattttcattgatatttcacttaacataatttcaaagtcagtctgtggtctaagatgagcaaaagaaaagatattctaaatctctcaagagattttttttcacactgttcctctgagcagggaatggggtttcagggttctcaatgtcaacacctaacattttacccttgagatttacctatagatacagaaagagataaaatcaatatacaagaatcgatctctatgatggtctcaataagctcatgttacatgctcaccacctctgtagggttataatggtaacaactgattttccacccctccgccaaatttggtgtcnnnnnnnnnnnaggtaaaatgtcagatgcaaaaatgctgcacttatttctcttaatacattgaaaatagtggaagatgcagatttttaatccttcatgagtccaagctggaacatgacttctgctaatcagatgtcatcaacatacgaactccaactttggcggccatcagcaaactggcacctgcaattaaacctacaggcatgaattttccatagtagtaggatctcattcccataacaccaacaaaagtaacagatgtagcggctaggaaaccccaaacgttccttggatcctgatacagctggtaagcacccaggccggctagactgccgaagagcagccctgcagccagggacggcacgctgcctgtttttacatagccaacgatcccaccagaaacaaccagtgctgtgtagccaaagccaaaccaatgcaaaggcactaatgggaagaggggcttctccattcttctcttctcagtccagaaaggagactaccccaggcctgcatctgccgaaggcccgcggagtccactacggagcgcaagccgcgggacacagcagccaggtctctccggaaacgcgattgccccggccgtaatggccgaattcccgggcatatgtccggtaccgtcgactg

SEQ ID NO: 121400 - DNA, 679 bp, Homo Sapiens
tatggtgacatattgaacagtgtggttaaaaaaagcaggctggtacggtccggaattcccgggatatcgtcgaccacgcgtccgcggggcgcagcgcgcacgcaatcgcgtttccggagagacctggctgctgtgtcccgcggcttgcgctccgtagtggactccgcgggccttcggcagatgcaggcctggggtagtctcctttctggactgagaagagaagaatggagaagcccctcttcccattagtgcctttgcattggttggctttggctacacagcactggttgtttctggtgggatcgttggctatgtaaaaacaggcagcgtgccgtccctggctgcagggctgctcttcggcagtctagccggcctgggtgcttaccagctgtatcaggatccaaggaacgtttggggtttcctagccgctacatctgttactttggtggtgttatgggaatgagatcctactactatggaaaattcatgcctgtaggtttaattgcaggtgccagtttgctgatggccgccaaagttggagttcgtatgttgatgacatctgattagcagaagtcatgttccagcttggactcatgaaggattaaaaatctgcatcttccactattttcaatgtattaagagaaataagtgcagcatttttgatctgacatttttacct

SEQ ID NO: 121401 - DNA, 1404 bp, Homo Sapiens
acccccgtctggtatagagggttcccccccataacatagcccccctcagagagggcccgccctcgcggggaaatttgtgtgccaagaaacaccccccggggttcgccccccccagggcctggtttttattttggtggtgggggaaagtcccagcgccccctgatttcccacggacccacgaaggtatctccctgggggaaccaccgcctttggggcgcgcgggtcccccgggtagcctcccaggggcccccgccgcgcccccaagcaaagaggggggtttagaaaaagtttctttggagggcgccaggggcggcgccgcacaaagacccttatatttttggggggagagtcacacggagggcaggtggaggagggatggtagaagacggcggggaccgcttgtgttccagcggctggtagtatgtatagtaaactttattttcattgatatttcacttaacataatttcaaagtcagtctgtggtctaagatgagcaaaagaacagatattgtaaatctcctaaaagactttttttcacactgttcctcagagcagggaatagggtttcagagccctgaaagctgacacctaacattttacccttgagatttacctacagatacagaaagaaaagacaacatcaatatacaagaatcaagctctatgagggtcttattaagctcttgtgttacatactcgccacctctgtaggtttgtaatcatgactgattttccacctctctgccaagtttggtgtctttttttttaggtaaaatgtcagatgcaaaaatgctgcacttatttctcttaatatattgaaaatagtggaagatgcagatttttaattcttcatcagtctaagctggaacatgacttctgctaatggggtctgttgaacatactaactccaactttggcgaccatcagcaaactggcacctgcaattaaacctgcaggcatgaattttccagagtggtagaacctcattcccataatgccagccaaggtaccagatgtagctaggaaaacccaaacgttccttggatcctgagacagctggtaagcacccaggccggctagactgccaaagagcagccctgcagccagggacggcacgctgcctgcttttacatagccaatgatcccaccagaagcaaccagtgctgcgtagccaaagccaaaccaatgcaaaggcactactgagccagtgtcctgcatttttctcttctctgtccagacaggagactaccccaggcctgcaccggtctcacgaaggccccggctgtcgacaagggcgcgcaagccgcaggaatgactgcgaggtgtcgccggaaatgcagcggcgggcgctctccgtcccggtggcggggcgaggagaggggagaggctctgttgtgcctgcg

SEQ ID NO: 121402 - DNA, 654 bp, Homo Sapiens
tagttagttaaaaaatttaattgtaaggatcaagcagtggttattggtgaaaccaatacacactgacagctttgaagtgttcagatgctaattttaaaataaatgtgacaaataccaatcagatgttcataacacttttcaggatccacatcaacttgattatggacatagttcaatacacaagggtaagagaaagagtgtgtaatcaccaataattaaaccagaggcataattttttcaaataatttttagttacagaataaattctaactttttaaagtctaaagctacataaaactcaaagcaatctatttttctacctgaggtcaaaatgactttcctttttcctaactaaacataattcttagcattgaggtaaatctgaattcatgtggtatgctttgtcaaacttttccaaaaaattttaagccctgctttagagagaaattctcatgttacacatatatatttacatatttttttcttcaaagactaatgacaatgtatgatgtggatcctgaaaagtgttatgaacatctgattggtatttgtcacatttattttaaaattagcatctgaacacttcaaagctgtcagtgtgtattggtttcaccaataaccactgcttgatccttacaattaaattttttagct

SEQ ID NO: 121403 - DNA, 783 bp, Homo Sapiens
  misc_feature (468)..(550): n is a, c, g, or t
  misc_feature (658)..(692): n is a, c, g, or t
  misc_feature (696)..(738): n is a, c, g, or t
ataattttttcaaataatttttagttacagaataaattctaactttttaaagtctaaagctacataaaactcaaagcaatctatttttctacctgaggtcaaaatgactttcctttttcctaactaaacataattcttagcattgaggtaaatctgaattcatgtggtatgctttgtcaaacttttccaaaaaattttaagccctgctttagagagaaattctcatgttacacatatatatttacatattttttcttcaaagactaatgacaatgtatgatgttaataggcctgtaatggaaccatgatactactaataatatgaaataaaaagccactcatttatataaagtgttcctgaatggtgcaataagaaatgggatcacagatttatgtacatatatgaatcactaagagttcagaaattaagctcactttaagaaaactcagccaggcacagtggctcannnnnnnnnnnnnnnnnnnnnnnnnnnnnnnnnnnnnnnnnnnnnnnnnnnnnnnnnnnnnnnnnnnnnnnnnnnnnnnnnnncctgtctctactaaaaatacaaaaattagccgagcgtggtgacacacgcctgtaatccccggccgtaatggccgaattcccgggcatatgtccggtaccgtcgactgnnnnnnnnnnnnnnnnnnnnnnnnnnnnnnnnnnncggnnnnnnnnnnnnnnnnnnnnnnnnnnnnnnnnnnnnnnnnnnntcaaccgagctagcgccctatagtgagttatatcaagtttcttta

SEQ ID NO: 121404 - DNA, 1005 bp, Homo Sapiens
gtttgaatgagaaaaagtcttttatttgtcttgaacaccgcactggggcagacagggtgagctggaggcacctgaggaggggtgggggctctgtgagcacacttcccctcagtacgtgaggctgtcctgcacattgttctccaggccctcgatgacctcgatgccattgtggctaaggtacagctcccgcagtttcaccaggttctgcagaccctcgatcttggtcagccggttgctctgcatactgaggactgtcaggttggtgagcgcatccaggttctgaagtttagtaattttgtttttccccaaaaacaaactctccaggttggttaaggtgtcgatattttcgattgcccggatgcggttagatcccagctctagcatctgtagttgatgtaagttgcttaagttctcaattttactgattttattgttgaccaagaagagttttttcagtcgtgtcaacttgtcaaccccttcgatgtttctcagcagattaaaagaaatatctagaatctccagctctgttagcgcctccagattctcaatcttcttgatctggttgtcgtaaagatccagctctcgaagactctgtagctcctccagattctcaatgcatttaattaaattttggcggaggcagagagtcttcactttcttcagtacctcaaatccttcaatcttccctatgcgatagtgattcaaatcaacatcctctgcatctctgtccaggttgatggtttccatgtccacaggcagctcatgttcttcttctgggtcctcctccccccgctcctccccatccttcaggctctgttcactgaggtcggccacgatgccactgctgtgtttcttcccttcttcatcgccggattcttcagactcgacccgcctgtcaacctccatcatctcctgcgactgttgctgccccgcgccgcgttccgccgccatgttggctgctcttcccctcggccgaattcacaacccagcctcgtacctaccgtt

SEQ ID NO: 121405 - DNA, 1204 bp, Homo Sapiens
ttttttgacagtgtggcaagatttaattgcaacggcatctgaaaatggtgtgtggcgtcgcgcgcgccagctatcgtcagtgcctttattgccattgggtttgtgactgttgatatagtgacgacctcaggagcaacaggtgggttaaaaacccgtggctgggcagttcttccgaggagagggaccacatgaggagccaagaaggactcagaacctgacgaacgtggcatcgatctgccgcacggaggggagggcgagcatgaccttccgccggtactgggggtccttctgcaaggggttccgctccaggtacactgtctccaggctcctggctcccttcagctcgtcgaggtcgctccagctctcaaggagattgtcgttcatccagaactcttgcagctctgttagatggctgatattttcaatctttttgattctatttgatgcaatgtccaacatcgtgagtttgttattgttctccaggccctcgatgacctcgatgccattgtggctaaggtacagctcccgcaggttcaccaggttctgcagaccctcgatcttggtcagccggttgctctgcatactgaggactgtcaggttggtgagcgcatccaggttctgaagtttagtaattttgtttttccccaaaaacaaactctccaggttggttaaggtgtcgatattttcgattgcccggatgcggttagatcccagctctagcatctgtagttgatgtaagttgcttaagttctcaattttactgattttattgttgaccaagaagagttttttcagtcgtgtcaacttgtcaaccccttcgatgtttctcagcagattaaaagaaatatctagaatctccagctctgttagcgcctccagattctcaatcttcttgatctggttgtcgtaaagatccagctctcgaagactctgtagctcctccagattctcaatgcatttaattaaattttggcggaggcagagagtcttcactttcttcagtacctcaaatccttcaatcttccctatgcgatagtgattcaaatcaacatcctctgcatctctgtccaggttgatggtttccatgtccacaggcagctcatttcttccattttgatcgcgagtcgggaggaaaccgcatctgcccggcccgggggcggaggcgccctcgtgccgaaatcgccacccaggcctcgctaccttg

SEQ ID NO: 121406 - DNA, 368 bp, Homo Sapiens
acagtgtggcaagatttaattgcaacggcatctgaaaatggtgtgtgacgtcgcgcgcgccagctatcgtcagtgcctttattgccattgggtttgtgactgttgatatagtgacgacctcaggagcaacaggtgggttaaaaacccgtggctgggcagttcttccgaggagagggaccacatgaggagccaagaaggactcagaacctgacgaacgtggcatcgatctgccgcacggaggggagggcgagcatgaccttccgccggtactgggggtccttctgcaaggggttccgctccaggtacactgtctccaggctcctggctcccttctgtcgtcttctcgcagccgtatagtagtagtaggc

SEQ ID NO: 121407 - DNA, 686 bp, Homo Sapiens
  misc_feature (43)..(55): n is a, c, g, or t
  misc_feature (216)..(216): n is a, c, g, or t
aaattcgacccccttaccaacctggagagttggtttttggggnnnnnnnnnnnnnttactaactttcagaaccctggatgcgcttcaccaaacttgacagtcctcagtatgcagagcaaccggctgaccaagatcgagggtctgcagaaccctggtgaacttgcgggagctgtactttagccacaatggcatcgaggtcatcgagggcctggaganacaataacaaactcacgatgttggacattgcatcaaatagaatcaaaaagattgaaaatatcagccatctaacagagctgcaagagttctggatgaacgacaatctccttgagagctggagcgacctcgacgagctgaagggagccaggagcctggagacagtgtacctggagcggaaccccttgcagaaggacccccagtaccggcggaaggtcatgctcgccctcccctccgtgcggcagatcgatgccacgttcgtcaggttttgagtccttcttggctcctcatgtggtccctctcctcggaagaactgcccagccacgggtttttaacccacctgttgctcctgaggtcgtcactatatcaacagtcacaaacccaatggcaataaaggcactgacgatagctggcgcgcgcgacgccacacaccattttcagatgccgttgcaattaaatcttgccacactgtc

SEQ ID NO: 121408 - DNA, 1568 bp, Homo Sapiens
  misc_feature (403)..(411): n is a, c, g, or t
gtgttttggaacatttatgtaagattgtcatatgaaatgtattttgggaactacattaaacttttaactaaaaccctggcctctgcatgccccaggggcctcaggaagcccctgaccaggaacggcctccacctccccgggcgaggacctccagcagcctggggcctcatgctcccacccagcgtgtcaccagtgctggggtccagccacagccctgttctctccaccaccacccgcactttacccccacccctgctgcaaggccccgccggtctgcccccgcccagagctcccagcctcgggccgctcaccagaatgtagatactgggcccgctggacatgttacctgctatttttattccccatttgccatcttctgattgggggttgatgttttacagannnnnnnnncaaaggctttatttcagtttctgaggttaggatgcccctgtgcccctcgctccacacctgggcaggtctaaacttccttccaggatggcctccacacacagcctcccacctggggtcacctggcttcctgggggacccgcaagggaggggcagggagcagcagtccgggtgcggggatcgggggacctcggcgggggcatccacaggggctgcaagacctctggtcagcatggcgtgggtggggagagcgtttctccctggggtcctgagccagtgactcctgttaggacctttgtcccacctccgcctggtggaccggcagggacctggtctagccagtcctgcagcctccattcccccacctgcccctccccgctctgtggtgtggctgcccaggagagaaggggcccagggaagggaggtctccggcaggggtggggagtgacaggccagggcagcagggctgagccggagctgctcacagctgccaggcactggtcatcatggccacgaactcctcatccgtgttcatggaggcactcacgccgctgtagtagtcctggaattccgccagtgtgacctgcccgtccttctcagaggagtcgaagttgtccaggaagcggcgcagcacctcgtcctcggtccactccccactgcgcaccttggggtgggcacggccactgtacaccccgcggaggtcgtccaccgtcacgacgccgtccccactgcggtccagcttggcaaatgcagctgcgatgacagcctcccgggcctgggacatggggggccgcagcgcccgaaggaactcctccagatccagcgtcccgctgccattgcggtcccacttcctgcacacaccctctgcctccgcctggtccagcaccagcccgagtttggccagaccctgccggaactcatcagcgtccagggatctgctcccgtcccggtctagttggcggaaaaacctggccaggccctggatgcccgaggccccgcgggacaggcactgtgcccggagtttctccatggtggcatccacggcgtccatgcttggtctgggctctgggcagctggcctgcgtctgtcccagagtcctgcctgcgggccccgtccgtaatggccgaattcccgggcatatgtccggtaccgtctgactg

SEQ ID NO: 121409 - DNA, 1082 bp, Homo Sapiens
gaactttaatgattttaatccattaagaactttaatggattaaaggactttaatgattccataatttttaattaatatgaacaacttcattcaagcattacatttatgggtaaggtgaaaaataagaaatctagcagaacaacatgcttttattttaccatcatgcataaaaaggaagacaaatatgccaatggtacacttccaatttgtcagagcaatttcacagtatttaagcaatttaggaaaaaagatatatcacttactaagttgttaccagggaaaattatcatgtaagacaatcaattaaaccatacttttgtagattatttttccatgaaggcaatttgacaagcctaacaaagaccaagttgttcaaactatgtttctaggaatatagtttaacagaaacaagaacaagttgaaaactgttatgactattcatatgtctctatattgtacaggcaagtaagactgttgttcttccaaatgttcccaattgaaatcaaaagaatatctgtacagctcaattttcacaataagtttagaatcagataaaaaaattttactaaatcctaatgaaataacaatcttccacataaattaggtcacaaaacaagtaagaaagcattcaaagttgcgctgtctttctttaaagaacccttgtctaggcaacatatttaacactttaaccccttcaattctccctgaaaagtatttttccattcatcatcattggggagtaagtactccttcctcgaaagctcttaacgacagcacagtcttcactctaggcccaatttttacctggcccatgcctctagccttttgttcagtttctcctgcttagggcacctttcatcccatctagatgtgtctctctttaactattctaggagttgataaaagggctaggaagtaggaagttgggaagaaggggaggggcgtaagagctctagcactctattttacaggccaacttctttgcctctgaaaatgacagagccaaaatgaaataaaaaccttgcttttacaaatatttctgagctatcacttttttaagagaggattgggaggctaaggag

SEQ ID NO: 121410 - DNA, 1248 bp, Homo Sapiens
  misc_feature (1115)..(1149): n is a, c, g, or t
gatgcagaagaagagccattttattacggtgaggcacatgggatgttacacacgcctgggtgggaaaggagagggggcaggttcctcggagagaaggcaactgtgtcatcttccagcacatgggccagccatctgtgagcactgggaagctgggccagaggaaatggattgagcagcaagaaatagttcagctcagcagaggccagccccttcctggaaggcttagaccttgatgacaaactgtagtccgtggatcagcatgttaacaatgtcatgcaccagggtgatgtccaagcctctgagaacctcattgaccagagggcacacgttgccctgaaccaactcaggcaggactttattcaagatccctgtgaggctgtccagaagaccttgaatggggagggggccaagtccatcaagcagagaaatttgcaggcttccaggggaatgggtgcagtcaccaaggaccaggtggatcctctcctgcttatctctcacagctaagatttctgcagtgatgtccagcttcacagccagcctcaacagacttgcaccgaccaggggcgtattcacttggagctttatgccgagagggatggtgacatagagacggtggccatcagggctctgcacaaggccaagttccagcagctgggggtcagtgacctttatgtcaatgatgttgttcaggccaggaatcactgacgtcacttttccaagcagtcccccaaggaggccaccagaagtacctcctccaggcttcaggatgtccaggagcggaaggttttccagaatgcccaacaggcccccagacagcaggccattgctgagggcatttgtcaagcttcctgcaagacctgtgggactcaagggcagggctggattcacattcaagggcagggtctggtccaggggcacgggcaggcctccaaactgggccatggtctgggctaacagcccgtagaagacaatgaggcccccagtttgaaacatctttgctcttagtatctggacttcttagaggtctcagcagctgtcctggtctcctctctctcccccactcccccggccgtaatggccgaattcccgggcatatgtccggtaccgtcgactgnnnnnnnnnnnnnnnnnnnnnnnnnnnnnnnnnnncggccgcttcctcgcatcactgactcgctgcgctcgtcgttcggatagacggaggcttagcggccccctatatgtagagttttcacaaaaaggggttcc

SEQ ID NO: 121411 - DNA, 731 bp, Homo Sapiens
cctgatgcagaagaagagccattttattaggtgaggcacatgggatgttacacacgcctgggtgggaaaggagagggggcaggttcctcggagagaaggcaactgtgtcatcttccagcacatgggccagccatctgtgagcactgggaagctgggccagaggaaatggattgagcagcaagaaatagttctgttgggggaagacccagctcagcagaggccagccccttcctggaaggcttagaccttgatgacaaactgtagtccgtggatcagcatgttaacaatgtcatgcaccagggtgatgtccaagcctctgagaacctcattgaccagagggcacacgttgccctgaaccaactcaggcaggactttattcaagatccctgtgaggctgtccagaagaccttgaatggggagggggccaagtccatcaagcagagaaatttgcaggcttccaggggaatgggtgcagtcaccaaggaccaggtggatcctctcctgcttatctctcacagctaagatttctgcagtgatgtccagcttcacagccagcctcaacagacttgcaccgaccaggggcgtattcacttggagctttatgccgagagggatggtgacatagagacggtggccatcagggctctgcacaaggccaagttccagcagctgggggtcagtgacctttatgtcatgatgttgttcaggccaggatcactgacgtcactttt

SEQ ID NO: 121412 - DNA, 682 bp, Homo Sapiens
tttgcagaagaagagccattttattaggtgaggcacatgggatgttacacacgcctggtgggaaaggagagggggcaggttcctcggagagaaggcaactgtgtcatcttccagcacatgggccagccatctgtgagcactgggaagcagctcagcagaggccagccccttcctggaaggcttagaccttgatgacaaactgtagtccgtggatcagcatgttaacaatgtcatgcaccagggtgatgtccaagcctctgagaacctcattgaccagagggcacacgttgccctgaaccaactcaggcaggactttattcaagatccctgtgaggctgtccagaagaccttgaatggggagggggccaagtccatcaagcagagaaatttgcaggcttccaggggaatgggtgcagtcaccaaggaccaggtggatcctctcctgcttatctctcacagctaagatttctgcagtgatgtccagcttcacagccagcctcaacagacttgcaccgaccaggggcgtattcacttggagctttatgccgagagggatggtgacatagagacggtggccatcagggctctgcacaaggccaagttccagcagctgggggtcagtgacctttatgtcaatgatgttgttcaggccaggaatcactgacgtcacttttccaagcag

SEQ ID NO: 121413 - DNA, 837 bp, Homo Sapiens
  misc_feature (403)..(419): n is a, c, g, or t
  misc_feature (487)..(487): n is a, c, g, or t
  misc_feature (695)..(695): n is a, c, g, or t
  misc_feature (708)..(708): n is a, c, g, or t
  misc_feature (729)..(729): n is a, c, g, or t
  misc_feature (731)..(731): n is a, c, g, or t
  misc_feature (734)..(734): n is a, c, g, or t
  misc_feature (768)..(768): n is a, c, g, or t
aataagcatactagaagttatttatgtttaatgcttaaaagtctgaattcacaaacaatctaccattatagaagtactggtggtcaatacaatgcattagaactatgtacaacgcacagtttagtatcaaaatctttctacactgtagagttttacgaaactgttaatgacatcaaacactaagcacttaagacaccatttttttctgctaccacattaggaacgtcaatggacagtccatttcaacttgcagcatccatccatttctagtatgaaattaagtaattttctacttatacaataaagtatatctacacggttcttttgattttgatccatagcagcaaaggcactgtacatcagcagatccacagacttaaaagatttttaaagcattcaaacnnnnnnnnnnnnnnnnngaagtcacatattatagtttaacagcaacaacaacaacataaaagataacacaatgtttctggcacanatggcacagcctgtgtccatttcagggacatccaactaagacatggaaagaaccggaggtaaagaaagcaagtcctcatcccaggagagagtccattctttgtgtttttcagagggaggtctctgcaaaccctcctctgctgtccttgttttgtaaaagacttaacttgcacagcagtgggagtcctcccataactgtgcagctccanagagcatgcacanaatacccataatttctcatancncanaactgactaaagatatatatatctccttttgcanacgaatgtggcataaatatccagaagggagtaagttctctctttgaggccacattcatttgttcatctg

SEQ ID NO: 121414 - DNA, 1190 bp, Homo Sapiens
ttttttttatgttttctgattatatttctcaagccaaatatctgcaacaataacatgtattgaaaggtatagaaataaacagatggatagacagaaaaagactcagactgtctaagtagtgaagtttgtgcagaactagaaacaaaaatccacctgggtcagaggtatagggttaatttctcttgctgaggctcagatttctccttcatgcatgtttaatggtccacctaagttcaactggaggagcatctttcttctttgttaaccaaacatgcccaggtagagctgcttctcttttctatggtagctgctgagttctgactgtgtcagctggaggtaccgccggacgttggcatctttaggctgcctattcacggcagccaggaggtagtggcgggcctggtcatagtcctgcagatggaaaaaggccactccggcccgatacaaggccttggcattatcaggctgtcgttccaggactttctgactatattctctcactcgttcgtagttcacgggctccatctgaaggagacaagcagctagattgttatagcagtctgtctgggtggtatgcaatatgttttcttgttcaggcgtgagggccgggccctgaggtccgagattaggtaacggagagggcagactcggatccagaccccgcagctgaagcagagctcgatggtacctactcacagcatctcggtacttcccttcccggtagcgctggttcccttcctccttgtacagctgagcctcctgcagacgcttctccataactgtcgcccacggttcttgcggaactgggaagtgaaggagcaagtgaagctctggggttgggagcaaaataactgacagtagcagccaatttaaggaggcaggaaattacccttcttcctggagagtccccccacagggacctgcggtttgcttgtttctactgaaagccccacctctcctttctgcagtctttttctcaagaagtgcaggcaagtagtaaggaaagggatgtgggaataatgaagcccaacattaagtgacttcctaaagaggcgatgtgggggtggatgagactttccgaagaactcaagcaaggccctactcaggaacgacgcgtgggtcgacgatatcccgggattccggaccgtaccagcctgctttttttaacacactgttctatatgtccagtt

SEQ ID NO: 121415 - DNA, 2402 bp, Homo Sapiens
  misc_feature (72)..(72): n is a, c, g, or t
  misc_feature (81)..(81): n is a, c, g, or t
aaattactatcataagcccaaagattttatcataatcatgaatagcatttaatcatgaatatcattatttancttttaaanccatacttacagttttagattaaaatcccatattgagtcaacaagactttactccaaattatagtcacatatggaagaaaggttttaattcaatattttattatagtccacgtataaagataattttcatgagggttacatgatggatagctagcaaaagaaatatgctagcacagggtggtaactgccaactaagcatgcactgaaccaacagactacttcagtaagtccttgattattgccagcttttctataatgttcaggttctcaaaggtcactgaattttataattatctccaaacaattttcttcatggtcatttaagctttgtctaaacagctgggtgtgttgccaagcgacatcaccatctcctctgcttaattctgcttccaaaataacttcagtggcaccagaaaaatcagcataggagtgaagactgttatcgcctgtcagttctacttgtgctgtatcagatcgcaatttccattctactgttccagtctgaaaagtttgactacttgttctaatagaaatgctatctacttttaggccaactgacccacactcaaacttccaggaaatataagcaaaagatgatccttcctttcgggccaaatataccatgtgccagtctgtttcaacttttctgaatatagattccattttccacacgccattctcccatccagaaatggtttgattgttatttgaaactcgaacataacgatctttcacaatattgtaacaaaggtggagctgtttagaaatcttctcattttcacagggaataaacaaggtttcttttctctgtagacccatttcacctcgggctactctccaagccactgacccagatattcttcccccaagttctccaggtttaggggttttgggagatataaattcaacaagctccacaattatcctctggagaagttctttccttctgttttctgacaaaaacagttgcctctgcttattaagcccattaatagtgtctcgaagtaatgcttctttaaccttagttcttctggcaatcacctcttcatgtttgcaggaatatcgccaagtgacatcaactacctcatcttttgaaaatgctatgacataggaaagcttcttgccccatcctatttcataaaggagtggcttggtcacagacatcttcacatgcatcacagtgcagccaccgctgctgagaaggagaatagacttctgtccagacatggtctgctgtaatcccaaacatagcgagcttcaaaccctacagctcggcagcacagtgtaaaacaattggcccactcgccacaccgtccacatcttgtttccaaaagtttctcagggttattatatcttgggaatcgattgctgaactggcaggcatcacagtaatgatcttccacttcctttgcaccccacttcagctcatcatcactgggcagtaatgatctatctctagacctagtctgtccaccacatttgctgcacaaaacgttattcacccagtgaaaaaattcttccttaaaccagtgcaaaagctccagcaaaagaaaatcctcatcacttatattgatacctttatccatttttctagctctcgataacttttcttgtgatttccgtttttagttcttggaccggaatacaagccaacgctttctcctgaagagcaggattttcatagaccagcacatgctgaatgttggactgaagaacttctagaatggctgagtcacagcaaccgttgaacagatggtggatctgatgactgcccttgacggttccttgtgtgctggtttaacccactgggatttgaagatggtgttgtaggaagctgggtactggctgcaggttgctgagatgactttactttgtggctcttatttgagccatccagtctgctacttctctctatggcaatcaggtcacgaattttttgcagctgctccactgaagcttttttaggaaagatgagatgtgtttctccctcttcaaagcccatttcaaataaacattcaacagctcctctgacaggcaagagtctagtagaaaaggctgtgtttccatccggatggatctatatttttcatcattagggtttctgaggatgttgtcagcataggtgagcagcagcttggaggcctccaaaaaggtctccggggtgttctggcagagctcagccacgccgggacgccgagcctgaggagctgcccaatgccgccgccgccatgcttgagcgccagcgggcgccccgccgcccctcgctctcccgacgcgtggtcgacgatatcccggaattccggaccggtaccaagcctctt

SEQ ID NO: 121416 - DNA, 825 bp, Homo Sapiens
gatagtgtcaggagccacagagccaatcttgatgagtccgttgtgctggatgaagatggtgtcacaggtcaggttcccatggatattggggggtcacaggagtgcagttagcttaggcagagaggatttgtgtgcaccaacgcttccatgccttttcattcatcgtcttgtggttctttttggtcttcttcagaaattgcttcagactcccagatgacatgtattctgtgataaaaatgaccctggccttgttctctttaatgtcagcccaatatttgtgaaacttaacaatgttaagatgctccaattgaatcagattatcaaacacagcacgaaccttttcctcctgcagcttgtagttcttgcgttcagagaactgtacctcattccacacaacctctacaccttcctctgtatccatggccaggtatgcactgtcaatacctggtacattccgttgattcacctcttctcgcctcttctgccagcgcccacagggcgactcttccaaaatctcagactcatcttcactttcttcttcttcctctggggaagcagctgaggttgtggaggtcacaggaggtgacactgatgtcaggccaggagctgaagatgaggattctacctttgggtctgagccactgctaagtactgtctgggactccccctccgacatgctggaaggaacactcaggcctgcactcccgactccgcgccccgcagcctgcgcttcagctccagctcgggttccggggccccggatcacagcgactccctcacagctgcgctccctcgtgccgattcacacccagcctcgtacctagg

SEQ ID NO: 121417 - DNA, 2761 bp, Homo Sapiens
  misc_feature (147)..(160): n is a, c, g, or t
  misc_feature (276)..(306): n is a, c, g, or t
  misc_feature (364)..(372): n is a, c, g, or t
  misc_feature (468)..(559): n is a, c, g, or t
tttttctcccccggggcgcaaatattgtttttcaaaaccgggcagggggttgtgattttctcccccgcctgttgggggggagtccctcccccgcggggagggggttttcaaggtgtcccaaaaacccttttagagaaggttaccccnnnnnnnnnnnnnnattttgttaagacggggcccccctattttacttctgggggtgggagtgcgggggaaagtcccctaaaacccccctatggggtgttgtaaaaccctctgggtttttctcccggccgnnnnnnnnnnnnnnnnnnnnnnnnnnnnnnnagcccccgaactcttttgaaaaaccggttgtccctttggacccctttttggccgcggnnnnnnnnnaagggggttttaaaacaattttagggggtggaggggcccccagggcgccaaagggccccccaaagtttttttaaaaatttgttgtgtgtgttttgnnnnnnnnnnnnnnnnnnnnnnnnnnnnnnnnnnnnnnnnnnnnnnnnnnnnnnnnnnnnnnnnnnnnnnnnnnnnnnnnnnnnnnnnnnnngtgggaacaaatctaattttctcttttattttcatgggtgttgtcttttctagtagcaaaaagtagacttttattacagcagcaactgaggcgaatcgaatggccccccagggccaccactgcagcaccacctttctctcccgccccggccgccccagcgggattgtagaattcggctcccctagtgcccgtgggcctcctttccacacaggctgggcgggagccggcagatcagcgactagcccccaactagaaggcggctgctgagaaggcccaggcccacgtctgtgcaaaacaagtaaacaaagtgcagaggggaggaagagaggggaggggaaaggatgatgctcagaaccagggagcccccccagccctcctgaataataaaggagggaaggggcttcacagggtaatactgactggggggaagggacaggagggctgcagcacgtccagggacagccacagcgcagatcagggcctggcccgagtgagctctaagaggagacggtgacagcggctgagttgagggtactgttcctggcaaaattgaacttgttcaaggtctcttctagcagagaagtcaaccggctctggtcagcctcactaatgaagcccagctgcaccagctcagccgccaactcggggatattctcatttggcatcaggtcacagctcaggtgccggttcagtttgtcctccaacttcagcagaagtgtcaggtggtgtttgactccctcctccaccgactcaatgttgcactgcatcagcaccaccttgcgagtctccacctcagctggttcaggtgtcggagtcttgacagaggggggcacgacaggtgatgtcacctcctcctgctgtggctgctggggccgaggcagcccaaaggctgtcagaggatagatcccattcctgacatcttcaaggaatttatctaattccagagctggtgactgagagtacaaagtctgaactggttctcttcctggtcctgcagggatttcagccagtacggcactagtatccatgtttttggtgatctcctctagagcgttctctgggatcatgtgttggtgtcccacaatgcagtgggccgcaaggagtttgagcgagggcacttcaaacaatgctgggtggaacagaagttctctggctgttggtctgcgagcaggctcagactgcaggcacttttgaatgaactccctctgtaatgggtcttctagaagctggatggcactgctgatggcttcctgtggcacatatgaggactctccattgccctgaatctccagcactgccatctccagtgcacacatgccaaaggagtagatgtccactgctgttgtcacattagtgacttctccatactctggtgcaaagaagtgtagattcttctgctcttctcgacaagtcttcacatgattgttgatagtgtcaggagccacagagccaatcttgatgagtccgttgtgctggatgaagatggtgtcacaggtcaggttcccatggatgatgggggggtcacaggagtgcaggtagcttagggcagagaggatttgtgtgcaccaacgcttccatgccttttcattcatcgtcttgtggttctttttggtcttcttcagaaattgcttcagactcccagatgacatgtattctgtgataaaaatgaccctggccttgttctctttaatgtcagcccaatatttgtgaaacttaacaatgttaagatgctccaattgaatcagattatcaaacacagcacgaaccttttcctcctgcagcttgtagttcttgcgttcagagaactgtacctcattccacacaacctctacaccttcctctgtatccatggccaggtatgcactgtcaatacctggtacattccgttgattcacctcttctcgcctcttctgccagcgcccacagggcgactcttccaaaatctcagactcatcttcactttcttcttcttcctctggggaagcagctgaggttgtggaggtcacaggaggtgacactgatgtcaggccaggagctgaagatgaggattctacctttgggtctgagccactgctaagtactgtctgggactccccctccgacatgctggaaggaacactcaggcctgcactcccgactccgcgccccgcagcctgcgcttcagcctcgtgccgaattcgccacccaggcctcgctaccttg

SEQ ID NO: 121418 - DNA, 820 bp, Homo Sapiens
tcttggggagtagatggttatgcccatgtcaaaatgggaagtaatgtttgtggtattgcagattccgtttcttctatatttgtgtgacatgttgggcagatcaagagacagctacaaaaatgaaggttttcataatgcaatgtaacatagtacttcaaagtattattcaacttcaagtttcagcaactacctacaaaagattctaaggcctagtagtatttaaactaagtttcagaatgttcccttcttgtagagagatggacaaccaaagtcagtgggacaaactccagcacagaagcctgcgaggaagcctatggaatagtttcctgtcctgagacgaaattcagattaggagatattttaggcccctgcaactggggaaggctactgtttgttttgtttgcttattatttatttgttgtttattgtgagatatttcaggtgggatcaaagaggtcataagaatttattttcttttgtggggtgtaactactagctttagattacccctatacacaagaatggccaacctaaaattatgtgtgtcttgtacagttagttatattagcagccctctgagatggcgtatctatcggaaggatttcaaacaccaattgctttacctgaacaaatggtgcttaccctttgaacagcagagtgaccacgtagaaggaaggaaaagggcaaaatcgcttcagttaaactgaaattaaatgaacactacggcacctatataagtaacttctagtagcattgcctggcgagacaaattattgtttgataattttcatttgtgaataggaatccaatagatcatatg

SEQ ID NO: 121419 - DNA, 854 bp, Homo Sapiens
gcattttgattaaaccagtatttattaacagcatgcctgattctgtggaaagcagacttgaaccctggtcattcctactctcaggggcagcatgttaaggatagcagcctgcaagtctatctcttaaactccacttgtgtgtacaccttggtgatgtcattgtacctgccttcagggggttggtagttagggatcggtggtgtgtaatgtggcccttccttctcaaaggggaacaggttaggatcccgcttgatggcctcagcatggagcttcggggattccagttgcagttcctccagagcttcctgctgggcttctagcatagccctgatggtgtccctctccatcttacgctcttgctgcttgtacaaggaccacttcttcagaagcagagctctcctctcagtctcctcaaaggtgagctccacctgaggccgctctcttgctttatccaagaactttagaggggtaataaaatcttcaataggaattagctcttgagtagccttttccagttttcggatcttccttttcaagcgctcctttgcttcttggtcttttttaggatctaccttcttcttttttcgaagaggttctgatctcatgggaatgagttcccagaaagacaacaatgacgctcgctggtgagtctctctaagctgcgtctgccaagttcccagaagcccgctagtcgggcgcagggctagcgagatacttcgcagcacggaggccgtcatggctaccctcgccgcttccggaacgtgcgcccgctccacagtcccgacgcgtgggtcgacgatatcccgggataccggcgcgtaccagcctgcttttttaacgtgtctatatgtcac

SEQ ID NO: 121420 - DNA, 848 bp, Homo Sapiens
  misc_feature (823)..(823): n is a, c, g, or t
ggggcgcacgcccggaagcggcgagggtagccatgacggcctccgtgctgcgaagtatctcgctagccctgcgcccgactagcgggcttctgggaacttggcagacgcagcttagagagactcaccagcgagcgtcattgttgtctttctgggaactcattcccatgagatcagaacctcttcgaaaaaagaagaaggtagatcctaaaaaagaccaagaagcaaaggagcgcttgaaaaggaagatccgaaaactggaaaaggctactcaagagctaattcctattgaagattttattacccctctaaagttcttggataaagcaagagagcggcctcaggtggagctcacctttgaggagactgagaggagagctctgcttctgaagaagtggtccttgtacaagcagcaagagcgtaagatggagagggacaccatcagggctatgctagaagcccagcaggaagctctggaggaactgcaactggaatccccgaagctccatgctgaggccatcaagcgggatcctaacctgttcccctttgagaaggaagggccacattacacacccaccgatccctaactaccaacccccctgaaggcaggtacaatgacatcaccaagggtgtacacacaagtgggagtttaaagagatagaccttgcaggcttgctatcccttaaccttgctggccccctgaagagtagggaatggacccagggtttcaaggtcttgccttccccccagaaatcaaggcatggctggttaataaaataactggctcttcagcccacaaaaatacaagacccgcatgatatttccngtatttctttgtgtcgcgccccgcc

SEQ ID NO: 121421 - DNA, 2705 bp, Homo Sapiens
  misc_feature (109)..(109): n is a, c, g, or t
  misc_feature (116)..(116): n is a, c, g, or t
tctacacagtgcgcatacaagatgtggatgcgcggtcaacacgtccacacagagggcgtagagggaagaccgtgggcgtcgcggcggtctcgacggtcgggtcgcgtcngactccnacccgctctccgtacgggaggccattctataaagcaggcccggtggcgcacatgtccctcctcaaaacctaagatgttccccgaagcaccgggggcttcccagatttggtctttcgcccaggccgcccctgagcgacgctaaccagtctttgctgaaatcgttgacacatttcccacgcgaggcaggggtggcacgcctggcggcccatgggagtaccccacacgctgaatatgacgccgtctcgacggaggacaccgccatcattcgggtgggtgtgtcggtttcgcgacgagtgcctgtctgaatgggagttggcgccgcgaaccgagagggcgctttctctttggatattggggtggaaggaaatgccccgaaccccccttgatttccatggcgccccggggatgtttcgtcggcgaacacaagcctggcggcccgaggtgtccaccctcacctgccccggggccccgcggggcccaaaaagggatgggtttaggaaaagcttctcggaggggccgggggcggccgaccattgtgtggtgctctcctcctgtgtcttcctttggccggtaacaggattaaaaagaaatttttaattccttgtctctcttctgatggctgaacagaactgcggtgtcaaatggaaagcagcacacaagaattcccttgcagaccttgatctttcgcagaaatgcaaagacgcctgagttatacaacttgcaattattattttctagacagaagtgccaactgttgtgctttccagtgtatcagtggttgctacattctccttcttgtcttcgggtttcatggcaggaaacagaagtacttccttgatgttgttggagtccgtgagaaacatggcgactcgatcaatgcccatgccccagccagctgtggggggcagcccatattccagggcagtacagaagttttcatctatgaacatggcctcatcatcacctgcagccttggccttggcctgttcttcaaaaagctgccgctgccgcatgggatcattcagctcagtatacgcattgcatatctctttcttcatgacaaacagctcaaagcgctcagtcagaccctctttagagcggtgccatttagccaaagggctcattatctgtgggtgatcacagatgaatgtaggattgatgcaagtcacttccaggaactccccaacaagcttgtcaaggagcctggctgtggtccgaggtggagggcattcaacagcttttgccacacagatatcatcaagaattttgcgagtttcttcagtttcaaagaggttcgtttctggcagcttcatccccagggctttctcaagctcttctaccatgttgattcgccggaagggtggggtgaagtcaacatcgtaggcttggccctctgggccatctgggtggtaggtgaccttgtaactgcctgtaatatgcttcaccatccctgaaaccatcttctccgtgatttccatgagatcgtgatagtctgcataggccatgtagaactcacaggtggtgaactcaggattgtgcgtcaaatcaatcccctcattccggaactggcgtccaatttcataaacccggtcgatgccaccaaccacaagcatcttatgatagagttctggagctattctcatatataagttcatgtccagctcgttgtgataagtgatgaaaggcttggccacggctcccgctgggatgatgttcatcatgggagtttcaatctctaggaatcccagctcatctaagaaacttcttatatatgtgatgatcttagagcggatgataaatttctgcctcacaaagtcattcaggatcaagtccaagtatctctggcgataccttgtttccttgtctttgaggccaaagtgaagatgaggtaacatatgcaaacagggagacagcagtgtgatctcatacggaatgatgctcagctcacccttcttggttttaccaggattcccctgaactccaattatgtctccccgacgcagtttgttattaatatgaataaattcttcttctgatttataatttctggaattggccatgacttgcaacttcaccccctctcctcgaagatcatagaagatgagctttcccccagaagctcttttggcatggatcctacctgccacctttaaggtgatgtcagtcaggtgatccccaggctgcaggtgactatatttttggatgaagtcagtgagtgagatgtctacatggaacttgtgtgggtatgggtcttccccattgaccttcagctgatgaattgcttgactgcggattttgtagtattgatttgggtccacgctctcttcctcaggacccacaccattatcagtggtgtggttggtggcagcagcagtggcttggcttagctgtttctcactgagctctttctgtttggcctccttctctgctactttcttctcagctttcaggcgtctcttcagctcattcttgctcagtttcggctcgctgccatccactttcacctcggccgcctgcacggccgccatcttcccggagggcccggacgcgtgggtcgacgatatcccgagaattccggaccggtaccac

SEQ ID NO: 121422 - DNA, 1136 bp, Homo Sapiens
ccatgtgtgcgccgtgtgactgctcgtggtattcgacgcgctccacgtgctttggcgctcttacaatctcgcgctttgtattatgggtcgctgctctccgggtacgcacggttttctttgtgccttgttttgtgtcctgttataatcgtgatttttgccgggttatattttcgcccccctagtcatgctgggctctattcaggtctctggcgaaacgtgtccggtctttgagccccacgtagattgcgtaacaagccaacgggagctgcctggatctcaacggaatgatgctcagctcaccttcctggttttaccggatttccccggactgccatgtatgtctccccgacgccagtttgttattaatatgaataagtcttcttctgagtaataatgtctggaattggccatgacttgcacttcacccccctctcctcgaagatcatagaagatgagctttcccccagaagctcttttggcatggatcctacctgccacctttaaggtgatgtcagtcaggtgatccccaggctgcaggtgactatatttttggatgaagtcagtgagtgagatgtctacatggaacttgtgtgggtatgggtcttccccattgaccttcagctgatgaattgcttgactgcggattttgtagtattgatttgggtccacgctctcttcctcaggacccacaccattatcagtggtgtggttggtggcagcagcagtggcttggcttagctgtttctcactgagctctttctgtttggcctccttctctgctactttcttctcagctttcaggcgtctcttcagctcacttctttgatcagaaaatgacttgtccttgtgaggcgctgtgaaaggagcaagttgacccagtcgcagttccctgtgaccccactctgcccaggaggttttgcgcagggaccccctaacaagccttacagcagcttgcgtcaacatggcagagcaccctggaactaatgattaccaccacttcttgctcagtttcggctcgctgccatccactttcacctcggccgcctgcacggccgccatcttcccggagggcccgacccaaaagtaaggaggcctcgtgccgaattcaaccgcccaggcctcgtacctagccgtta

SEQ ID NO: 121423 - DNA, 1740 bp, Homo Sapiens
  misc_feature (70)..(107): n is a, c, g, or t
  misc_feature (151)..(160): n is a, c, g, or t
  misc_feature (202)..(210): n is a, c, g, or t
  misc_feature (226)..(239): n is a, c, g, or t
  misc_feature (275)..(423): n is a, c, g, or t
aagcccgggggaaaattttttaaaaaacatccccggtggaaaaattttttaaccccaagaaatttgccgnnnnnnnnnnnnnnnnnnnnnnnnnnnnnnnnnnnnnnccccggggggtttaaatttttggggggggttggcccaaaattgnnnnnnnnnnaaagaaggtttttttccaaaaaatcccaaggggcggtttttnnnnnnnnnaggttttaaaaaacgnnnnnnnnnnnnnnttttaataaagccccctttaggggccccctttttcnnnnnnnnnnnnnnnnnnnnnnnnnnnnnnnnnnnnnnnnnnnnnnnnnnnnnnnnnnnnnnnnnnnnnnnnnnnnnnnnnnnnnnnnnnnnnnnnnnnnnnnnnnnnnnnnnnnnnnnnnnnnnnnnnnnnnnnnnnnnnnnnnnnnnggtagttcttagttttattataaccttgtattttctggcaaaaatataaatctaaatgcatgatctctgggcacacagctcaagtatcagccttgagatgacctaagcagcaaaaatttggcctatttaattaaatgcacaggaggttgcagccgcatttattagaaaaatattatcctttggaaattcctttcttgaagattggctccagggcgttgttctttctgtttttatgcaattgcacttccttggcaggcagccaggcgctccggtgctcacaggccatgggacagtccagttccctgcagacccagcggggcatgggcggacagagccgcaccgtgaagcccgcctgttatttccatcgggtggtcctggagacgacacggctggggaaatgggtcaccggaactccacggcggccagacgcccatccaatttgcctgcgggaactcgctcttcaccttttcttcacaaacttctttctggaagcgttgggatttaagcgtctccgcccagctcccaaggtgctgtcccggacctgcagggtagctgagcggctggagatgtcattctcgacaaagggtgacaccccggcgatgtagtcaggggcgaacacgttggttttctgcctggccttttgggagagtcgcagctgagggaagcgctgatcctcggtgagatgggggttgatggcgtatttgccccctttgggagtgggaagcgagtaccggaggccgcgggggttcagcaccttggggttgcgggagaagtgcatgtgcagggtgccgtcgtcgctgacggtcacggacactttcttcagggtcttgttcccacagtgtgagcagaacactcggctcatgtcagacgttgtcttgaaacagccatggcagcgcaagatgtagctccgggcctcacgaatcagcatgccgttcaccgccagcacgtgcagccccatctgcagcagaacattctgcatggcgaagtctgtggtcaggcagccaaccctgcacgtcctcggggacgtcacactgctccagctcctgctggatctgcttgatgttactgggggttatccagccacccccgtcgtcatcgctgtcatcttttctgtcttcaaacccgttttcttcctcctcctcctcctcacttggaacgtcctcacctctgtcaatcagcagctcctgcagttcatgatcggatgttgggcaaagggtttctccagaacatgaaggaactaaattccaggttctcaggctcacaagctgagcggacgcgtgggtcgacgatatcccgggaattccggaccggtaccac

SEQ ID NO: 121424 - DNA, 951 bp, Homo Sapiens
cccacaggtgtggagccagaaccactcgggttcaaagtggcagacgttgtcttggaaccagcccatggcagcgcaagatgtagctccgggcctcacgaatcagcatgccgttcaccgccagcacgtgcagccccatctgcagcagaacattctgcatggcgaagtctgtggtcaggcagccaacccgcacgtcctcggggacgtcacactgctccagctcctgctggatctgcttgatgttactgggggttatccagccacccccgtcgtcatcgctgtcatcttttctgtcttcaaacccgttttcttcctcctcctcctcctcacttggaacgtcctcacctctgtcaatcagcagctcctgcagttcatgatcgatgttgggcaaagggtttctccagaacatgaaggaactaaattccaggttctcaggctcacaagctgagtgtcctttttctgtttcttgtgggggtttaggcttgtagggcagatggaaaccagaaatgtgcagaggtgtttctgggtgctgaatcgatgagctcaccttaaccttctgtggttcttgttttaggtgagacaccccaacaaactctgcttccaactggtatgtgagtgcaagcacttggatgtccgtggcagagaggctggggtagtctcctgttttctttgaaaactcagtcaccagccgcacgtattccggtaagggctccttgaaccgcagctcgtagggcaggacagcgagccgcctgcgtgtggccttgtcccgaatctcagtgaccacctcccggatggtgtaaatgttcttcccgatgtcctgcagagccgcatgccgcaggaaagccccagcatccgccacaacgtgctccactggagccatgttgcctcgtgccagaattcgccacccaggcctcgctaccttaggaccgttgtagttactggccgtcttttata

SEQ ID NO: 121425 - DNA, 1847 bp, Homo Sapiens
  misc_feature (571)..(581): n is a, c, g, or t
  misc_feature (818)..(834): n is a, c, g, or t
gtgatttttatttattttagcttctaaatttaaaattctcagattaatgtaacataatctgttcatttagggattcgtgtttaagttctatgctttagtgctaggtggctgcaaatcacaatgtactttcaaaacaaagtatcttaaccttttaataaatccttttcataacctgttcaattcaaaaaaatgtttataaacatgttagacatctgacaccattctatcgcaagagggtagaaacatttattgcagcagaatactatggttattcactctcaagtttattattccccttattttattgtagcaactctggattctttagtataaagagaaatcaaaagaaacaaaatatctatagtcttagtttcagaactacactaggatctggtgacctaaaccatatgtacagaatataaacatatttatactttatatgtacatagttaatggttacctatgcattataaatagtaagtttaacttagattctacaaaaataatcattttgggtgggtacatgcaaaccagtacacataaacctatttataaaacacatctctatgcnnnnnnnnnnngcttctaaatataaattttgctatttagccatcagctaaatgatctaaatgcaaaccccacagtttccagttaaaagtataaaatctgcttctaaccacagcagcatactgcttcaagtattctcctcctatgtaaggtcgagataattttgtcacatatgaattttaggtggacatctcatttcctcacatattagacatcctgctggggtcacagcttctttgttccatttgtcnnnnnnnnnnnnnnnnnaataagacattgcaaacagtagctatttcttaaagtgacataattttcgcttttgcattctgataaaaatgaacatacttaagcctcttccttgcaccctgaccctggtgctctagcataatgcaacaaatcgtacgctcaatggtttgcagggccatccacgcaggcagatgactgggtggccacaaaaggctcattttgcttctggtcctctttcatgccagctgcctggtctgtgatcgaggagaaggacagttggtcatgctctatgatgtgcacctgatcctcgtccttgtccttcttcaacatagaacatttttgctgaatgtttttcagctcatggagttcacagaaggtttccagaactaccaacatggcaataaggccaagtagcaggtaacacgtgatcccaatcttatagagctctctgaattgtttgattgtagccttccccaggcacataatcccccaggccaatggtgctcagggaaataaaacaaaaataaaaggattccaggaagttccagtcatcctccaggactgagaagacagcggccgggatgaagaagaagcaggacacagtgacaaacccaaggagcacggcatggacgatggccaccacctgcttggagaagccccagcggatgtggaagtagaggaccggcctgcgggtgacgtgcacggtgatgcgctggaccacagccgtcaggaacaggagggtgaagggaatgccaatgacggagtagatgatgcagaaggccttacctccatctgacaagggcacggtgtggccataacccaggctttctagtcgggtttgggttgtgaaattcttggtgcggccgtccagggccgtctccctcttcccgccgtgccccagaaccaatgagtttccatttatgtccacctaggagctgtccatgacaagctccgcccatggttttccttcatccctgcgactacggagcatcacagacctggcggtcctctggtcagtgcaatctcttcttccg

SEQ ID NO: 121426 - DNA, 1455 bp, Homo Sapiens
  misc_feature (387)..(421): n is a, c, g, or t
  misc_feature (1187)..(1187): n is a, c, g, or t
  misc_feature (1193)..(1193): n is a, c, g, or t
  misc_feature (1298)..(1298): n is a, c, g, or t
  misc_feature (1312)..(1312): n is a, c, g, or t
  misc_feature (1325)..(1326): n is a, c, g, or t
  misc_feature (1428)..(1428): n is a, c, g, or t
aatctaaagtttttattttgtaaaagtataaaaacacatacaaaaagggacttattcttgagaaatgatcatatcattgtaacacacaggccattggacaaggccactatgcagaaagtattgctcccaaaccattaggaattttaatcaccactttgttccagactctttagaagttactatttctaaaatacacatggacaaagaataagctttattcaaccagactcacaaaagtaaggattctgcttctctaggttcataaaatagaattccaaggctctgaggaaaataaacttgtgtcagtcccagggaacttttctccccagaagttgattggtcactctctttttatatagctgggctcgcagccggtatgacttatannnnnnnnnnnnnnnnnnnnnnnnnnnnnnnnnnngtacttctggaagctgctcataaatccgtttggacctctgaatcatttccttcttgctgataggcttgttcttctggatagccaggaagactctcttgggcagcgggcacatgcgattctggtggccctgccgttccctgtcaatgttgaatagtgcatcccgctcggtctgtaacatgctctgcagcttcctctcctggactattaacttcaggcgctttatccgctccccagagcgggagatgaagtcaggtctgtgaaactgaagcgattcctgaagggttgctctcacaaatggcttcagtaggtctctgccagcctctctgcctgggcctgccaggtagccccgaccgtccaggtgctgcccctgacagttctgctcccgcagtggctccctccagggtctggtcttggttattggttcaaaccaggagatgccagggccacaagtgttaggcacgttttccttctttgatctagactccacattttccacaggaacaaaccaggaaactccttcatgggaattcttcttgttcttttttaactttctgtcctcaggataaccggtaaagagattttctcttcacgtttttcttctgaccaagaagtcacatcactgttctcttccaatttagcctcgctggaacttggagttgggaaagttatcccaacatctcgagtgtgttttttggcaccgttcacaatctccaagttacctgcttgtatgcccttgtttaacatgtgtacattctgcttgttgcanaagtanagtttgagctcaaggaactactggcagaagaggaatagagtcagaagaatcacatggtttgctacctggatgtgtctccttctgggtgtgctcagaagtcactanggggatgacctgtnatcagcactttcnntgctgtgtttgctcccgctctcaagggtatctcctctgtttgtttggtgatgctgctatataattaaattcgtctggggtgacagcatactctttcatgggncaaagcttggatcagcggggcttgtta

SEQ ID NO: 121427 - DNA, 877 bp, Homo Sapiens
  misc_feature (70)..(82): n is a, c, g, or t
  misc_feature (176)..(231): n is a, c, g, or t
  misc_feature (233)..(243): n is a, c, g, or t
  misc_feature (267)..(302): n is a, c, g, or t
  misc_feature (305)..(305): n is a, c, g, or t
  misc_feature (311)..(389): n is a, c, g, or t
  misc_feature (391)..(392): n is a, c, g, or t
  misc_feature (394)..(406): n is a, c, g, or t
  misc_feature (496)..(508): n is a, c, g, or t
ccccctgggggaggcgggtaaaaaatattcttgggggggagggattgtgtgtccaccaaaatatattcgnnnnnnnnnnnnnaagaaaaaaaattgttttcttcctcaaagagattcccccggaggggggcggttttttcccccaccccgggaggggtgtataaaaaacgcggggnnnnnnnnnnnnnnnnnnnnnnnnnnnnnnnnnnnnnnnnnnnnnnnnnnnnnnnncnnnnnnnnnnnggggtggcggtaaaatatgggcgnnnnnnnnnnnnnnnnnnnnnnnnnnnnnnnnnnnnggnttgtgnnnnnnnnnnnnnnnnnnnnnnnnnnnnnnnnnnnnnnnnnnnnnnnnnnnnnnnnnnnnnnnnnnnnnnnnnnnnnnntnntnnnnnnnnnnnnnggtgccatgcttttattcaaatgaaaggggaaaaactacactgtaccaggaaatagcaagtatgacagtattttacagcacagcatcttnnnnnnnnnnnnncctgtaagcaatgctctagagtggacaggtaagcacaccatacactgtacattgctcaacagtgtccatgaaaccataattaaatagctgaatttggctttaaacagccaaataaaactgtaacagtcattctaatacaaaacggaaaaaccaagaactaaatctttccaaagctgtgtcaaatagcagaatttgacaggctgcactggtaaccacgacaaatgtttggcaaacttaatggaatagttatcataataatttgacctctgatgatgaaagcaccagtgtgtttcagtaaggttgacgaaaatcctcagactttatgaaatggcatatttttcaactgtatatcccgggaattccggaccg

SEQ ID NO: 121428 - DNA, 676 bp, Homo Sapiens
ttttataaagtcaaagtagtttacttgagatatggaatgtaccaggttacttagggcatgatgtatgagaggacagtgttttcatgaccaagtccagtgtatcctgaatcctcatgttattgttttccatcaaggaaggatatctcccaaatgattttgtgttttcttctggatcaagggggtgaagcgtatgtgggttgaatagacatcgaggctcccccaagatgccaactaccggcatgggcacagagtccagagttcccacatgcttttgcatctcggctgggaatctgacgtctacttgatgatactttttctcaaagacgttttgagctttttctctgagagatggcagcagagtagacatgactggagaacgcatgttgatagcttttttaattgctgggcgttttgccatcattctcctgaactgaacaaaagtcatgcgtttcttttcccctcctgattcctcatcttcacgcctcctgcgaggaatgttgaacatattggtacgaaagagtctccctacttcttcttcaatctctgtcaagtgttgacgtcggaagacaatccaagccacatatgtacagaaagtataaaagggactcaaagaacttccagtctttctgtgtatctgatattttctcctttccacagcacatgtgatgcttatccg

SEQ ID NO: 121429 - DNA, 1883 bp, Homo Sapiens
  misc_feature (1772)..(1806): n is a, c, g, or t
ggacaaaagaatgaggcccactctcgaaaaacaagaatggggaaaaagctaattggttacaatgaaggttgctagaggtggaatacattatattaaaactgataagagcaagaatatttatcccgccttttctatataaatgcagcactaggtaaccaaatagtagaaggggaaatttttctttatagaagcagtacagctgaaaaataagtgagggagaaaaaaccagagtatcaacaatttgcaaccactgatgaaataatgcatccaggcatgaaacattaatgtcagctaagcctacaaaattaaagacaaccagacattatgtgcttcttgataaaagaagttaacatcaccttataatgtagtcttacccttactcacctaaaaaagaacctgaagctgaaactctagagccaacttgcaatttataggggacagatgaacatgttaaattataccatgggatacaaaagcaaaattcaaactatgggaaaacgtgaaagacaaataaccttgtttcttaaacaataaattatgaagaataaaataacagatagagtgggaacttataggacccaaagaaacataaaagatatatccatcacccacaatgtgcaggtactttatttggatcccgagttttaaaaaaaattgtaacatttgcaattagtagaaatttgaacacatatttaataatttgtgataatggttttgtggctaagtttaaaaaatgaaaggccccaatcttcagaaatctactctgaaatatttacaattacatatttaacaagtatataaaagtataaccatatctgggatttgctttcacttagtaagagatggtagctggagagatgtatggatgagataagattggccacaagctgatggttactagaactaggtgtctgaagtttaaaattctacacgataaaatatctaaaaaatttgtgtcacagaatttcaatagcaattaaattcaggaaaagatattcaaatgtcttaatagcaattaccagataataaaaagttattgtaaaagaaaacctttgtgttacagattttcactgaattcagacttataaagaattatgcaaatgtatgtaagagtaattattgattaatagattaacagtatttaggaaaaccctatgatgtcataaaagttaatggaaactgtatacgattacagtaagtaataaaattatgtcataaatctttccatactaaaattgttgttttcaaagaagtgaacttcattgttaacattgcgggcacaaagagtttcatcttctgaccaggatggacaccaattttgcatttttttctggatgaaagatttcaaacatgtcccagttttcacatcataaagttgtaggttgggtatcccagctgtgccatctttagaagtagtgtaaggctgccacgttgccaggacagtatttttgggtgagaattcaaggcaaactgccttcaggaggtcgaaggagtgcagtagtcccttgttagtgacactgataatatttactttttctccattgccccaggcaaacaaggtcccatccttactaaagatacagactttgcaattcttcccagattcccttggaaacactgtgctttctgtaaaatgtggtggtccattcaccatgtacagtccttctgatcctcggactgtcaagagcggcgtggacggcgccatgttgtcccggaaaagccccggccgtaatggccgaattcccgggcatatgtccggtaccgtcgactgnnnnnnnnnnnnnnnnnnnnnnnnnnnnnnnnnnncggccgcttcctcgctcactgacctcgctgcgctcgtcgttcggtgtgaccgagtagccctatagtgatctatacat

SEQ ID NO: 121430 - DNA, 2133 bp, Homo Sapiens
  misc_feature (51)..(59): n is a, c, g, or t
gtaaatttaaaatgtctttattcatttacatggtatatatcaccctctacnnnnnnnnntgacacttgtctttcaatctgtcaagcttagctaaaaaattcacgtatctcttttctatatcacatattgacatgatataggatgcaagatataaatatcaatttaatagacattattaaataattttacacttagtagaatcttggataaatggttaaaattatagattgacattaagtgtgggcacaggaatattctgtgtataccaatgggtttaacagaagatgtgtttgcactgatttctggtcatcaacttgctttccgtgaatctttaaatacccaattccaaatcttccagctcctggagaagggctgtttctttctgaattttctccaactgatttttttctagctgttttccagttgctgcttgttctttcagttgttcgattgctttcagtttcttctttaggttcttgatttttttgtctatctcagggtccccagaaattgactgagagacagtgtttcgtggtgtgctctgtggggcaggagtaggtgccaaatctggactcttgtcacttcttgcttcctgctttgcagctttcttagcttcatgcttcctttgatttttaagagctgtttttgataatggcttatcgtttcctgattgtggtttcatattctgaggtggttcctcttcatgcaatttggaattggtgattggtttatttcttaaagctgggggtctataagctgttgcaactttaggttcctcattgggtacttcacttggaactgcttggtaagttattgtttttgctggaaatattccatccaaaaatggctgccaagaaacctgccataattctgcatttgatggcacatcatacttgtgcaagatagagccagtataatgccaaattttgtatccattattaacccgtaacctgggagcacatgtagctgttaaaatatgctcaccatccgggcaccaagcaaaatatgtagaatcagaagccaccggtttagaaataagtttgtagtttttcacatcccacacttccatttgtcccctcagatttccaaatccagctaatactaatatatgtccatgagggctatagtaggctgcattacgaggaccagttccaaagtcaaatacaggatcacatttcaagttgaaaattgtcgctttggcaggcataaaaccatatacagcacaaaactcagtagaactagaattccaaactacatcataaatggggccattttttggtaattgcactacagcactttctccatttgttgcaatgtagtgtagagtttgttctccatagtaggaagctcctgtcttgtcaacatctgtgctagctattaccaacacagcagtagcttttttattccacagcattgtaactttatctgccttaaagaaacttttattagctaaagctgcatgaggtccagcaaagttggggtactgatataatctaacaaatgaaggtgcacctttacttcctggaacatagacagccaccttgtatggttggggtccaggtgataatacaaaatcattaattttttgcaaatgcaatttatttgcaattgtgttaaaattgttgttttcaaagaagtgaacttcattgttaacattgcgggcacaaagagtttcatcttctgaccaggatggacaccaattttgcatttttttctggatgaaagatttcaaacatgtcccagttttcacatcataaagttgtaggttgggtatcccagctgtgccatctttagaagtagtgtaaggctgccacgttgccaggacagtatttttgggtgagaattcaaggcaaactgccttcaggaggtcgaaggagtgcagtagtcccttgttagtgacactgataatatttactttttctccattgccccaggcaaacaaggtcccatccttactaaagatacagactttgcaattcttcccagattcccttggaaacactgtgctttctgtaaaatgtggtggtccattcaccatgtacagtccttctgatcctcggactgtcaagagcggcgtggacggcgccatgttgtcccggaaagacgatatcccgggaattccggaccggtacc

SEQ ID NO: 121431 - DNA, 2188 bp, Homo Sapiens
ttttcattaaacaaacatttattgagtgctttctaggtgccaggcaccaagccaggcactgttaatacaaaaattccaacacaatccttgccctcaaggagcttacagtctactggggagatgaccattaggcaggcaagtgagcccagagtgatctgtgtagtatgccagggtgggggtcgggaggagagagtatagccaaagctccttggaggaagtcaagtctaagttgagatttgacagagaaagtaccctttctctgtgaccaaaagaaaggaggaatcagagtggcaatggagagccactgcatctctggatacaggaggctgggacccagaatgcaagaaggcaagtgatgagaccagagaggtgagcagggacaaggacaccatgagtctcacaagccatgctgaggggtccagactttatcctgagggcagcagggagccaaggaaggttttaggccagagagtgacttgatcaactatgcaatgcattttaggaagatagctctggccacatgatagagaagcagtaggaggctgtcacgataatccaggtgaaagctgatgacagtgggagtggctcaaatcaagagatgttaaggtagacctgaccgttttgagagattggatgtggtgggcagaaagagaaaacaggaatagaataagtttcctgtctggctcctgagtgatctcggggtcaagggaagtacccagaaggggcaggtttgcagaagacagcaagtaccatctgggccatggacctgaattgtctgtgcacctagagggcagcaaaactgtggttcaggtgatcaggaaggatgttggggctggaggtcaactctaaattcctcaccatccttgaaaccatccagatggatgggcttccctagggagcccacagcagaaccctgaaagaccctactgtgcatgggccagtggagaagcctgcacggaagcctgaaaggaacagccagggaggtaggacaactagccacagaggtgccagggaagtgccataccaagaagcaaggggtgatcagaccatgtcaaatgctgcccagatctagataagacaggaaaggggtctagctggatttagcaagccctgggagaacactggcagtagagtggagggggcgaagccacatcatcaaggtgagggaccaagcagcagagggaggaaagtagggccagctgtcagcccaatgggaggatgatgcaggctgccagtatcccctgccttgtctatcctggtgtgcataggagaaaagggcctggcaatctcgttcacactaagaggagaccaacatgtgctcttcctctcagggaaaggggaaagctggtaattcttaagagaaggtaaatgctaaagccaaggaaatgaagggctatgatggaactccaggcatgatatagaggaaatattttcaagcacaggggtttttccagtggcttaaatgtatcacatgtgtacagttcatctctgtacctgccagcctcactttgaggtatagaacatggccagaaatggctctcatagggacttcattccaatatgtactgttgagcacttgcaaggcactatagttggagtgcaaggtcaacaaatgcaggtctgtgcccaagacctggcctgccttcttagaaggcagatatatctccccaggagccaagagtgcacagacgggccagggcttggatgctcttagagtgacaaacagcttctcccattagtcccatttctttaaaaacaggctgcctggaagctaatttttattttgtttctccttgagcctaagatagtattcagccagaaaccactccttttcccagaggaagatttataaataggatattgtagatgttcttctgaaaatctagcccagtcctaaattgtcccctctcctactcccagtttgacagtcacggagccttggggaaagagatggaagagagtgcatcagagaggctgcctatagccccacttcccactccttgagcaggctcagctcctcacccctgcccccttcccattaagggccacaagaacagtcccttgggaagggcaaagacccgaacccagaaaaggagtcccttgacccggagcgcgtggtcgacgatatcccgggatatccgaccggtaccagcctgcttttgtgacactggtctatagtactatcgcc

SEQ ID NO: 121432 - DNA, 2047 bp, Homo Sapiens
  misc_feature (1623)..(1898): n is a, c, g, or t
tgacaactagtcttacttattgattttgcacattcatggaatgaatcgtgggttgaaaaaatggaagaagggaactcgagatgttggtatgcagccttgttatcagctacagctctgaattatctgctgtctttagttgctatcgtcctgttctttgtctactacactcatccagccagttgttcagaaaacaaggcgttcatcagtgtcaacatgctcctctgcgttggtgcttctgtaatgtctatactgccaaaaatccaagaatcacaaccaagatctggtttgttacagtcttcagtaattacagtctacacaatgtatttgacatggtcagctatgaccaatgaaccagaaacaaattgcaacccaagtctactaagcataattggctacaatacaacaagcactgtcccaaaggaagggcagtcagtccagtggtggcatgctcaaggaattataggactaattctctttttgttgtgtgtattttattccagcatccgtacttcaaacaatagtcaggttaataaactgactctaacaagtgatgaatctacattaatagaagatggtggagctagaagtgatggatcactggaggatggggacgatgttcaccgagctgtagataatgaaagggatggtgtcacttacagttattccttctttcacttcatgcttttcctggcttcactttatatcatgatgacccttaccaactggtacaggtatgaaccctctcgtgagatgaaaagtcagtggacagctgtctgggtgaaaatctcttccagttggattggcatcgtgctgtatgtttggacactcgtggcaccacttgttcttacaaatcgtgattttgactgagtgagacttctagcatgaaagtcccactttgattattgcttatttgaaaacagtattcccaacttttgtaaagttgtgtatgtttttgcttcccatgtaacttctccagtgttctggcatgaattagattttactgcttgtcattttgttattttcttaccaagtgcattgatatgtgaagtagaatgaattgcagaggaaagttttatgaatatggtgatgagttagtaaaagtggccactattgggcttattctctgctctatagttgtgaaatgaagagtgaaaacaaatttgtttgactattttaaaattatattagaccttaagctgttttagcaagcattaaagcaaatgtatggctgccttttgaaatatttgatgtgttgcctggcaggatactgcaaagaacatggtttattttaaaatttataaacaagtcacttaaatgccagttgtctgaaaaatcttataaggttttacccttgatacggaatttacacaggtagggagtgtttagtggacaatagtgtaggttatggatggaggtgtcggtactaaattgaataacgagtaaataatcttacttgggtagagatggcctttgccaacaaagtgaactgttttggttgttttaaactcatgaagtatgggttcagtggaaatgtttggaactctgaaggatttagacaaggttttgaaaaggataatcatgggttagaaggaagtgtttgaaagtcactttgaaagttagttnnnnnnnnnnnnnnnnnnnnnnnnnnnnnnnnnnnnnnnnnnnnnnnnnnnnnnnnnnnnnnnnnnnnnnnnnnnnnnnnnnnnnnnnnnnnnnnnnnnnnnnnnnnnnnnnnnnnnnnnnnnnnnnnnnnnnnnnnnnnnnnnnnnnnnnnnnnnnnnnnnnnnnnnnnnnnnnnnnnnnnnnnnnnnnnnnnnnnnnnnnnnnnnnnnnnnnnnnnnnnnnnnnnnnnnnnnnnnnnnnnnnnnnnnnnnnnnnnnnnnnnnnnnnnnnnnnnntatatatatattgaaaatcaaaggaggcaaaattttggacagggaagggaagtaactgcaaaacactaggctttagtaggtacttatataaaatctagtccagttctctcatttaaaacaatgaagacactgaagtacagacttaaata

SEQ ID NO: 121433 - DNA, 1036 bp, Homo Sapiens
  misc_feature (675)..(942): n is a, c, g, or t
tttttttctctgaattcatttatttagaggtaaaacacagccattcaaaattgtggaatacaatgtctacacacagaataaggttggggaattaagctgaattgttatattccattcacattaataaatatttttaaagaagaaattgtagattttaaaagcttcattagacactagtgacacatacaaataactaaactctcatactgcttgattttcaggttgaaaggttacaataatctatatatttcaattacatggcagtaaatacaaaagcattttaaacatcttttgaactgtgtagtatactataagcaggagtttattctaaaacattccatcattcttctgacctgtttatgggtcatgctggacaccagcaatccacatcacataaattatccaccagtaatgaggtgtaaaatcaattatgcatgtattttgaatagaaattatttttaaatgtcagagagaatgctattattggccaacttgaaatttcctaattagctatctgagctatttaagtctgtacttcagtgtcttcatttttttaaatgagagaactggactagattttatataagtacctactaaagcctagtgttttgcagttacttccttccctgtcaaaattttgcctcctttgattttcaatatatatatatttttttnnnnnnnnnnnnnnnnnnnnnnnnnnnnnnnnnnnnnnnnnnnnnnnnnnnnnnnnnnnnnnnnnnnnnnnnnnnnnnnnnnnnnnnnnnnnnnnnnnnnnnnnnnnnnnnnnnnnnnnnnnnnnnnnnnnnnnnnnnnnnnnnnnnnnnnnnnnnnnnnnnnnnnnnnnnnnnnnnnnnnnnnnnnnnnnnnnnnnnnnnnnnnnnnnnnnnnnnnnnnnnnnnnnnnnnnnnnnnnnnnnnnnnnnnnnnnnnnnnnnnnnnnnnnaactaactttcaaagtgactttcaaacacttccttctaacccatgattatccttttcaaaaccttgtctaaatccttcagagttccaaacatcc

SEQ ID NO: 121434 - DNA, 748 bp, Homo Sapiens
aaaacaaaataatttatatttaactttattataaacttgctaactttagtgcatccttgttcttcagaagtgcagcacttctggaagtgaatcaatgaggccctcgtcttggaggtaaaagagcaggaactttatcctccaccagccaaagagggggaaaaaccacaaacaccattctctcacgattacataactcttaaatccatgtgctgatgcagaggtacagggagatgtccacacggagctgaagatgtggactctctccaaccagagtgctggggaacacggacagaaatgtgcacagagcagggccggggccatcagctcacaggggtcaaaacaacatcatggtacaacttctggtaacatgtcagtgggcaacaaagtgtatgttttcatgtaggttctattcacaatgtgctttgaatttatattacataatagccacttgaaactggagtgagaagctggttacttgcttgcagtgcatcagaaccaaggtttctggggtggcccctgcaggttcactccgcccaggagatcaaaaaggatgcgctctctacattcttaaatgccacagtcccctaccaacggcttaggtggaagcacagctcccacatcagcactgatgccctggcgcggccagcactgcctctacgaggccacacctgcctctgccaaggccactggccctcattcatctgcggggacgttctagagatatgcacttacagaccagttacttaaa

SEQ ID NO: 121435 - DNA, 1714 bp, Homo Sapiens
  misc_feature (1614)..(1616): n is a, c, g, or t
ttttaatctagtggttctttatttataacgtaggctgaagcaattgttacaatgtaggagggagacacattacacaattgttatttatacaagtttagaacaaaaaactgcacagggagaggtcaactctcagtacaaactagcaactaaagcacaataatttactgttagaaacgatttctttctttttagctgtgacactgcttttacaatatgcaaaaacacaagcagaactacccaaggtgtgttgtcacattctttctacattgaatttggcaacattttatttattcagattatactaacgtttaaaaactaaacaagtgaaaagctgtaccaaggtacagttacatccatttatttcaaaggtttaaaataccacttttatctattgtgattaccttgcagcgatttctgcttttgcaaaaaccatctcaagcatcatatgcacaatgcatcagctacttttagtcatcaagattggtgggctaaaccacaggcactactgttgtttatattctgtaaaaggagcttgtttttcaaagaaaaaagcttaaatagtttctaataatcatgcctttgctttaaagccgtaacataaaatgtccttgagcaatcgcagcagtgttcaatgttaatatatagaacaatgaccatacggtacgttactctcacatccaatgcagttatgtgttaaagcataagattaggtaattgagggttagagccaacaggaatctgcagggtgtatgaaacccaccaaactcctcctctgccttgagagggttcggtcagaaatgtgccctgttatgacctgactgctaagggacttgcttgctttcttaaacactattgtcttcaaatgtgatctctttaaatctacaaatctctgttggctttaggggatgggcagtataacaaatttaacttccacttagaaaagacaaatcttttccaaaaaacatttacccagaatacaaaaaaaggacagtatagtggtcagattcccagtgacaataaacaaatcctcctctcttcaatgtttactgtaaagccagttaactgccatttatttgaaagaagaaaagaaaaacaagcccccagattggtaaacacattggcaagttgctagactccaagctggctacccttgtcaaatctgttcgagttttttcaaaatacttgggctttttaacgcacccagcctgctgggcacagttaagtaaaaggcatttactataatctaagaattccctgctattatcatttttaaatgttttcacatttttaaaactgccttacccttttggatgtatttggattccataaaggtgagtacaatcaacgagaaactgaagtgggagattctacgactgcccagaggcagcagcatgcatggggctggttgtgggtgctgtgtgcagtccagaggaatcatgggagaaaggaagtcaagtccttaaacaccctacagaaacaaacactgcaatccagtatggcttattcggatgcatttaccatgaagctaccagaagaaattcaacctacgaggctactcttaaatgtaacaggatcgggctatgttgacgatgtacccctcccatggccctcccnnnaatcccaacacagtctaccatttccagatttacttcactctgaatattgctcatcaattgttactcctgctcttttcatccagaacatagtgtattta

SEQ ID NO: 121436 - DNA, 683 bp, Homo Sapiens
  misc_feature (24)..(24): n is a, c, g, or t
  misc_feature (57)..(57): n is a, c, g, or t
  misc_feature (90)..(90): n is a, c, g, or t
agttagaaattgtagacttttttntaccataatagtatgtgttcattgaagatgatntgggtttattttacagctatataaaacataatntgatgatgtacttctaacctttcaagcattttctgttattgactatataatatagcctccataaatgtttttaatgacaatattctgttgaacggttgtaccatactcagccatgccctttcattttgacgatagtgtttctaatattttgtatttttattcccctccccccatttttgtattacttaagatagattatctaatggtgtttaaaaagatgtttattctgtttgtcaggtacaaagatatttatgatacatgtatgacttgtctaagttattaacattttctctagccttaggtaatgcatgaaagcacatgtttcagtgccactcacataagaagtgcccggtaagtgttagctattattgtctacttgagttactactttctaaaagtatgttgaagtctttttctgtaattgcagatttgttgattttgcatttgagtattttctatattttgaagctgttagatgcatagtcatgatttttggtggaatgttttatcaatttttgaaaattgcctttgtctcatataatgcttttcatattgaactatattttgtctgctattaaatacttccaagcctg

SEQ ID NO: 121437 - DNA, 540 bp, Homo Sapiens
  misc_feature (113)..(173): n is a, c, g, or t
cataagagctgttgccaaatcagtgataatgttcatttaattgtattcttgccagccatgtttactggggtgatagttgttattgtggttgttattgttctttaggggtaggnnnnnnnnnnnnnnnnnnnnnnnnnnnnnnnnnnnnnnnnnnnnnnnnnnnnnnnnnnnnntgtcaggtacaaagatatttatgatacatgtatgacttgtctaagttattaacattttctctagccttaggtaatgcatgaaagcacatgtttcagtgccactcacataagaagtgcccggtaagtgttagctattattgtctacttgagttactactttctaaaagtatgttgaagtctttttctgtaattgcagatttgttgattttgcatttgagtattttctatattttgaagctgttagatgcatagtcatgatttttggtggaatgttttatcaatttttgaaaattgcctttgtctcatataatgcttttcatattgaactatattttgtctgctattaaatacttccaagcctgaaaaa

SEQ ID NO: 121438 - DNA, 646 bp, Homo Sapiens
gttattcattggcagctttgccgacagacttccagacagtgaggcagttctgagctgtctgacagtattacttctgcaccacatttggcagccaaattcctggaaggctcactccagctccaattgagagacatttaatgcaccgaagggcttcatatccgacgtttttgctccgggggtcaacctaaagcaggaagctgcgcagctgagcgtccgcacccccggtccctcaggaacccagccaagtcagccgacatccgctcctgacctcaggcgcctcctggcgggtgctgctgcacgcacctgcgggacgtggacctccaggacagccccgtcggcccccggacccggctcctccgagaatcgaaagcgctgggcccggaccccctgtcctcggaaatcgtgctcgcccagtagggcgtcgttgggccccgggcgggcgggggaccgcggaaggctccgggctgccagactgcgcgagcgggaagccgcgggccacgtggccgtagcacctgacggcaagaaggggaaagcccagatctggtgataaccctgccgcgctgcgagcgaagaaagcccggagcaaggcgaaagagactcacacgcgcagaactggcaacgggcggctggcgcgaccggaagtccc

SEQ ID NO: 121439 - DNA, 1205 bp, Homo Sapiens
aaatggggggggaatcacaatgcccttggtcacggacccaggcttcttcctaggaaaaccgcttatgtcccatgttaccctttacctgctgtggggccgccccgccaaacggaatgttttggaaaagctttttgagtggccgacggcggccagacagccagtaattacgttcgaatctgcatttggttccttgtaatacgtattttaatttttgtttcatatgagtttaagtgttgtctaggtgacatcaaaatctaaggcaaacagacttgaccatcttcagacccactgcattctcaagctgaagtggtctgctcatagtttgtgtgccaggttgctcatcagtattgatactgtcccagaacaggttgtaggtataattcagagactgtcctttgcaaaggaaatgaccagcatttcaactgtatgtcttcctggaagggtagattctgctatatcttctttgtctgcatcaaaagactcaagaggaatgtggacacatttcatatcccatttgtagagtaaagcttcaagtgaccagtcagcactcctaacttgataagtagaccacaattggaccttgggattcttgtgcatcaaaaaatatattgtagccaaaatgtcttcaaaatcttctggttcaaagaacacatcagatgcaaggataatatcttgtggtggtagagccagaagatcccaagatatatgaccccatgttagtcctaccacctgcagatgtggcaggttattcatttggcagctttgccgacagacttccagacagtgaggcagttctgagctgtctgacagtattacttctgcaccacatttggcagccacaattcctggaaggctcactccagctccaatctgcgggacgtggacctccaggacagccccgtcggcccccggacccggctcctccgagaatcgaaagcgctgggcccggaccccctgtcctcggaaatcgtgctcgcccagtagggcgtcgttgggccccgggcgggcgggggaccgcggaaggctccgggctgccagactgcgcgagcgggaagccgcgggccacgtggccgtagcacctgacggcaagaaggggaaagcccagatctggtgataaccctgccgcgctgcgagcgaagaaagcccggagcaaggccctcgtgccggatagccacccaggcctcgctacttaggaccttattgtg

SEQ ID NO: 121440 - DNA, 960 bp, Homo Sapiens
cgccagccgcccgtggccagttctgcgcgtgtgagtctctttcgccttgctccgggctttcttcgctcgcagcgcgggcagggttatcaccagatctgggctttccccttcttgccgtcaggtgctacggccacgtggcccgcggcttcccgctcgcgcagtctggcagcccggagccttccgcggtcccccgcccgcccggggcccaacgacgccctactgggcgagcacgatttccgaggacagggggtccgggcccagcgctttcgattctcggaggagccgggtccgggggccgacggggctgtcctggaggtccacgtcccgcaggtgcgtgcagcagcacccgccaggaggcgcctgaggtcctgcatctccagtatggaatgtatgtttggccctgtgctgtggtcctggcccagtacctttggtttcacagaagatctctgccaggcaaggccatcttagagattggagctggagtgagccttccaggaattttggctgccaaatgtggtgcagaagtaatactgtcagacagctcagaactgcctcactgtctggaagtctgtcggcaaagctgccaaatgaataacctgccacatctgcaggtggtaggactaacatggggtcatatatcttgggatcttctggctctaccagcacaagatattatccttgcatctgatgtgttctttgaaccagaagattttgaagacattttggctacatatatattttgatgcaccaagaatcccaaggtccaattgtggtctacttatcaagttagggagtgctgactggtcacttgaagctttactctacaaatgggataatgccatgtgtccacattcctcttgagtcttgatgcaaacaaagaagatatagcagagtctaccttccaggagacaatccgttgaaatgccggtcattccttgcaaggacactctgatataccaa

SEQ ID NO: 121441 - DNA, 731 bp, Homo Sapiens
  misc_feature (556)..(556): n is a, c, g, or t
tgcggccgcccgttgccagttctgcgcgtgtgagtctctttcgccttgctccgggctttcttcgctcgcagcgcggcagggttatcaccagatctgggctttccccttcttgccgtcaggtgctacggccacgtggcccgcggcttcccgctcgcgcagtctggcagcccggagccttccgcggtcccccgcccgcccggggcccaacgacgccctactgggcgagcacgatttccgaggacagggggtccgggcccagcgctttcgattctcggaggagccgggtccgggggccgacggggctgtcctggaggtccacgtcccgcaggtgcgtgcagcagcacccgccaggaggcgcctgagattggagctggagtgagccttccaggaattttggctgccaaatgtggtgcagaagtaatactggtcagacagctcagaactgcctcactgtctggaagtctgtcggcaaagctgccaaatgaataacctgccacatctgcaggtggtatgactaacatggggtcatatatcttgggatcttctggctctaccnacacaagatattatccttgcatctgatgtgttctttgaaccagaagattttgaagacattttggctacaatatattttttgatgcacaagaatcccaaggtccaattgtggtctacttatcaagttaggagtgctgactggtcacttgaagctttactctacaaatgggatatga

SEQ ID NO: 121442 - DNA, 1693 bp, Homo Sapiens
  misc_feature (217)..(279): n is a, c, g, or t
  misc_feature (455)..(470): n is a, c, g, or t
  misc_feature (723)..(738): n is a, c, g, or t
  misc_feature (1418)..(1469): n is a, c, g, or t
cacaagaaactgatctttactcaacaaagttctacacaagtggaatctcacgccacctcggcgccaatccccagcacagcacagtaacaaatggacagacccgggagcccgcagggggaagagggtgaggagggaaagagggactgtggctcaaggccagtctgggtccacagccctgggtaggggagaaggttgagaagctgaaacttcattgtgnnnnnnnnnnnnnnnnnnnnnnnnnnnnnnnnnnnnnnnnnnnnnnnnnnnnnnnnnnnnnnnggaaaacgagaagaaccaggctccccttccctgaaggtgtttgtatccccccatcttgagtagcgaggggttaccaatcccatcagacagccaatccatccacacaccccaagacccagcagaggatgcttcaaagaactggaattaccagaaaattaaaaggtatttttaaaacnnnnnnnnnnnnnnnnaacaaatggcttccagagacctgctcgagtttcatggggtgggcgtgcagggacacccagctaatttatggaatgtgtactgagtgccccttggaatagatgcagggcctgaccctgactatggaaagacacagggcttggatggagggtctggcgcccaggagggatggatggagcaggccccaggatgcgagactccagtcagactccaaaacacaaggggctccccaaagaagtagaaagcagggaaggnnnnnnnnnnnnnnnntgctaagggggtctgcaaggcccagttttctggccaactgggaagtaactacacccccaccctctctaggggagccccttccaccttgaccatgttcccagactattccggaaggttctctagaattgctgacccagtctagtaggatctctgggctcactgggtactatgatgagcaggaagtcccagggagatggaatagggaacaggggacacaccacctttcccttccaccaagccttggttttcctttttgctggcaaaaacctgtgtcctctgtcatcatcaattaaacgcccctgccccaggccttgagttaaaactggggcctgaaacgtgagaagggggtttcagaagcacagagaaacggactgcccctgaagctgcttacagagagagatgctcggggtaggtgccagtagctctggctacacccagctctcttcaggaaaaaggtcccaacccagtgtcttcaaaagccactggagcacacaggaaggagaaacggtgacctctggccagccccagccactccagtggttctcaccctgcgagctaggctaggataaggacggagacaccaccagctgaggctgcaacaaagctggcagggagtgtgtggagtgggtcccaagcatgtgcgtgctgacagggcgactcccaaggtcaccatcctcctnnnnnnnnnnnnnnnnnnnnnnnnnnnnnnnnnnnnnnnnnnnnnnnnnnnngtcaccgccattccggcaaaacagcagaagcttcttaaactctagatgcaggttacacggaaggccttacgggttaactcaggggttcactcattctactgtctccatgcagtcggggaaatggtggagcggctggcccagcctcgccggttatgcacccgcacatgcgtgcctcgtgccgattaaccacccagcctgtccttagctagtgtggttcctccccc

SEQ ID NO: 121443 - DNA, 593 bp, Homo Sapiens
  misc_feature (219)..(287): n is a, c, g, or t
  misc_feature (457)..(472): n is a, c, g, or t
ttcacaagaaactgatctttactcaacaaagttctacacaagtggaatctcacgccacctcggcgccaatccccagcacagcacagtaacaaatggacagacccgggagcccgcagggggaagagggtgaggagggaaagagggactgtggctcaaggccagtctgggtccacagccctgggtaggggagaaggttgagaagctgaaacttcattgtgnnnnnnnnnnnnnnnnnnnnnnnnnnnnnnnnnnnnnnnnnnnnnnnnnnnnnnnnnnnnnnnnnnnnncgagaagaaccaggctccccttccctgaaggtgtttgtatccccccatcttgagtagcgaggggttaccaatcccatcagacagccaatccatccacacaccccaagacccagcagaggatgcttcaaagaactggaattaccagaaaattaaaaggtatttttaaaacnnnnnnnnnnnnnnnnaacaaatggcttccagagacctgctcgagtttcatggggtgggcgtgcagggacacccagctaatttatggaatgtatactgagtgccccttggaatagcttcccctcgtgccgaattctt

SEQ ID NO: 121444 - DNA, 642 bp, Homo Sapiens
tttaattctctctctttggctccctccttccgcgcgagtctctggagaagccgcagcgcgagttgccgccgctgctgcccggggccggcttgccttgcgccatggactggcagccagacgagcagggcttgcagcaggtcctgcagctgctcaaagactcacagtcgcccaacacagccactcagcgcatcgtgcaggatgaactcaaacaactcaatcagtttcctgacttcaccaactacctgattttcgtcctgaccagactcaagtcagaagatgagccaacgcgctctctcagtggcctcatcctcaagaacaacgtgaaggcacactatcagagcttcccaccccctgtggcagacttcatcaaacaggagtgtctcaacaacattggcgatgcctcctcgctcatccgagccaccattggcattctcatcaccaccatcgcttccaagggtgagctgcagatgtggcccgagctgctgccccagctctgcaacctgcttaactcggaggattacaacacttgtgagggctcccgggtctgtccatttgttactgtgctgtgctggggattggcgccgaggtggcgtgagattccacttgtgtagaactttgttgagtaaagatcagtttcttgtg

SEQ ID NO: 121445 - DNA, 363 bp, Homo Sapiens
  misc_feature (31)..(31): n is a, c, g, or t
  misc_feature (80)..(95): n is a, c, g, or t
caggcccccaggatgcgagactccagtcaanactcccaaaacacaaggggctccccaaagaagtagaaagcagggaaggnnnnnnnnnnnnnnnntgctaagggggtctgcaaggcccagttttctggccaactgggaagtaactacacccccaccctctctaggggagccccttccaccttgaccatgttcccagactattccggaaggttctctagaattgctgacccagtctagtaggatctctgggctcactgggtactatgatgagcaggaagtcccagggagatggaatagggaacaggggacacaccacctttcccttccaccaagccttggttttcctttttgctggcaaaaacc

SEQ ID NO: 121446 - DNA, 787 bp, Homo Sapiens
caggcacagtggcagattttctttaatagatatatttcaaacagatacaacaaattaaaaaatctaattcacggcaggtaaacatgggtgctcaaaaagttccacatagacatttacacttgggccatcagtatttccctcacattcccttttgttaagtcccatcttcgcagtggcagtacaggagaaatctccaccgtcaccgcacaatccaccaggcgcattaccacctgaagtgaaggtctcatctcgaaggtgcgctcagccataaaaagaaaacatattacagaaaggaaaaataagtgtgctcttcccacccgcaaagcggtctcaccttcagttctagctttctttactccaaagtcttctgagtcttccaagcatctctttcgatttgttcccacactaatatgattaggaaatacattctgatgacccccatttaagatgccattgttatagaaatggttcagatgacaattctggaggttcaagagaaactgggcacactcttggaaacctgggtttgtgcaatgtctgctgctgtcaggccactggcatttctcaggctttagacactgaattaaaactgagggatcaaaagtaactccatgttgaagttcccctggaagacaagaatgtacactgctctgtgaaataaacctgttcagcaagctacactacatccacagcaaaagcatgatgaaatcaaggccttgtgctgtgtcactcaaacaaccactccagaaccctgatgcctttcttggggttactgttaatgcaaaaa

SEQ ID NO: 121447 - DNA, 1006 bp, Homo Sapiens
ttaatcaatctagctctgtaactaacttctcttatatacatttgatttctaagcaagatttgggagataaactaaatatgctaaacttctaaaaaaggcatcttcctatttaacttctcaaaatcatgttttatgttagtctgaagaatctaaatttacgctaacttcagacttgaaactgaattctatattatatgcacttaattgttaatacccattcctttagcggtgaataaaatcataacaaacaacatgtactgagattgtccatggcattcataactgtcttcctaaaaacaaagcaatggctcaccaacgagccagccttcatgcttacatgtgacactgtaagtggaagtttagaaggatgtcctgacattaaaaagtagcctatcatcagattccagagctgaacagctgtgtttttctgtcagattttgattgttttggccttgcttgggaaaacctgcaggagtattgtatttttggcattgtagagcatttgagtagttggttcctttaaaaaggctttgaatactgtcctaaaaactcatccctaccactcacaagaaccaaagttttacctggctaatagtactaaaaaggaaaggtctgagacctctacagtagctaaaactcagattcaagtaggaagtgatggcagagtaagtgaaagagctgaataaaatagagtaagttgaacttgtaaacctttagacactgaattaaaactgagggatcaaaagtaactccatgttgaagttcccctggaagacaagaatgtacactgctctgtgaaataaacctgtaaaaaagcagacatcctgttagctgcaggttgataaacaaacgggagaagtacttaacagcaaagacagcttccatacctgttcagcaagctacactacatccacagcaaaagcatgatgaaatcaaggccttgtgctgtgtcactcaaacaaccactccagaaccctgatgcctttcttggggttactgttaatgc

SEQ ID NO: 121448 - DNA, 1039 bp, Homo Sapiens
  misc_feature (31)..(31): n is a, c, g, or t
  misc_feature (253)..(253): n is a, c, g, or t
  misc_feature (268)..(268): n is a, c, g, or t
aaggtggccgtcaacccctaaaaagggaaanccttttcccggaaagggaaaaaataaggtgggttcttccccacccggaaaagccggtttccacttacagttctagctttctttactccaaagtttttttgagtcttcccaggcatctctttcgatttgttcccccccctaatatgatttggaaaatacattctgatgaccccccatttaggatgcccttgttatagaaatggttcagatgacaattctgganggttcaggagaaacntgggcacactctgggaaaccctgggtttgtgcaatgtctgctgctgtcaggccactggcatttctcaggctcaacagtatgcctcgtgtgcagaaaggaagcgatactgaacattcaatgccacaactgtaaggttttcggagaagcacctgtggcagtttcagcagtttctatatggaatgctccccctttctaggattatcgacgtgagccccattcgccacaagggcactgatgcattctaggctcccagagcgagctgccttgtgaatgggagtttcaccctcacaatccggtttgttaatgttggctcctgcttgaatcagccagaccaggcactgaggatgtcccccaaaggctgcaatgtgggctggcgtctgcgcgtaccgtgtggtggagacgttgagtgtgggtcccgctctcaccaactgcactaagcactccaacttgccgaaatgcgcggcccagtgcacgggcgtccagccatagaaggagtcctcagaggccaggtgggcgtggggtgtctgctgcagcagcgagcagagcgtggccaggtccccgtcgcggcaggcgcggtgcagcgggaaacggagcgagagcagctcctcgctggagaagcccgcctctacgcccgcgcccgtcccgccgccgacatggtcgtcaccggagagcgcggggctcgctggcctagaggacgcgtcggggaggactcgagaagccgccgccgcagcacaaaggaacgagactagcgccgcggatcccgggaatccc

SEQ ID NO: 121449 - DNA, 1063 bp, Homo Sapiens
  misc_feature (238)..(905): n is a, c, g, or t
gacatacaaaaagacaatatttattttactcaagctttcctataagaagttaaacagaaacaatccctgggttgaagactaccaaaaatgttaacattgtttcacatatcccttcagtgcccagatgaagggaaaaacttaactgaacgaaagaataagaattaccatcctgacactgggtttgcttaggtatgttaggaaaaaagcctacagccgcggccctcgtgccgaattcttnnnnnnnnnnnnnnnnnnnnnnnnnnnnnnnnnnnnnnnnnnnnnnnnnnnnnnnnnnnnnnnnnnnnnnnnnnnnnnnnnnnnnnnnnnnnnnnnnnnnnnnnnnnnnnnnnnnnnnnnnnnnnnnnnnnnnnnnnnnnnnnnnnnnnnnnnnnnnnnnnnnnnnnnnnnnnnnnnnnnnnnnnnnnnnnnnnnnnnnnnnnnnnnnnnnnnnnnnnnnnnnnnnnnnnnnnnnnnnnnnnnnnnnnnnnnnnnnnnnnnnnnnnnnnnnnnnnnnnnnnnnnnnnnnnnnnnnnnnnnnnnnnnnnnnnnnnnnnnnnnnnnnnnnnnnnnnnnnnnnnnnnnnnnnnnnnnnnnnnnnnnnnnnnnnnnnnnnnnnnnnnnnnnnnnnnnnnnnnnnnnnnnnnnnnnnnnnnnnnnnnnnnnnnnnnnnnnnnnnnnnnnnnnnnnnnnnnnnnnnnnnnnnnnnnnnnnnnnnnnnnnnnnnnnnnnnnnnnnnnnnnnnnnnnnnnnnnnnnnnnnnnnnnnnnnnnnnnnnnnnnnnnnnnnnnnnnnnnnnnnnnnnnnnnnnnnnnnnnnnnnnnnnnnnnnnnnnnnnnnnnnnnnnnnnnnnnnnnnnnnnnnnnnnnnnnnnnnnnnnnnnnnnnnnnnnnnnnnnnnnnnnnnnncggtgtaggtcgtcgctccagctggctgtgtgcacgaccccgttcagccgacgctgcgctatccgtactacgtctgatccaccggtagaacactatcgcatggcacaccactgtacagataccaacgagtagtaggcgtgtacattctgaatggtgcg

SEQ ID NO: 121450 - DNA, 1333 bp, Homo Sapiens
ttttgacatacaaaaagacaatatttattttactcaagctttcctataagaagttaaacagaaacaatccctggttgaagactaccaaaaatgttaacattgtttcacatatcccttcagtgcccagatgaagggaaaaacttaactgaacgaaagaataagaattaccatcctgacactgggtttgcttaggtatgttaggaaaaaatccacataggctagacctaaaacagtaaatgagcctactaatttcccacaggggatgggaaatccactgatacagacacctccaagagctcccaagacctagggatcacaaccaccacaggtattcccataacttccttttccctcccttttccctcagctattttactgctaaaagaagaggatgggaacaaaagatcacttccccactcccagactgcatgactgtcagcatcaatgtttgttgggaatttcacagcatcctcttcatggccatctaaataggataacagtaaaaatggctagggggaggcatgggttttgcttcccagaattataaaatacctggaaaggaattaatctcattcctatacaggaaaaccaaatattctttctagagaacagcagaacaaagtagaacatctactacggctgtctcccagcctcaatctgacttcaagaattactttacatctgccattgtcatgaaccccagcttcctcagagaagccagggcaccatgcttctacacggccatggaagccaggttgccacttgtaccccaacctgtagagagtgagggtttcttatctcccttcccctaggagcaggaattgcaaatagcatcattgtattaatatgattggtaaatgtttgacaactttggaaataaagttctcaagttcctaccagtaatatgagtctgtgtgtgaggagagaaatggggtgggggaaatgcctctcatttcccatacttctttaaatttgggggaagtaagagtagaggggatatatacggatatgttgtgtggataggtgagaatggaacccaatatatgccccccaaaagcataaacagagccttggctggctggctaccaatgtaagacacaaaagctatttaattaatcatttatggcagagaaaagaggaatcctggacccatcttgtaaagaaagagaaatagggttcaactattctttttttctcaagcgaataccaatgttctacgtgaagataccacctcatctctgtttagaaaatgcacaaatatcaatgctgaaaaccctcacatggaagttacaaaatatgcaagaattagtcattgtttctcagattaccccgg

SEQ ID NO: 121451 - DNA, 1831 bp, Homo Sapiens
  misc_feature (82)..(82): n is a, c, g, or t
  misc_feature (84)..(501): n is a, c, g, or t
  misc_feature (532)..(551): n is a, c, g, or t
  misc_feature (1164)..(1177): n is a, c, g, or t
cggttcccactttgactgactcgatttttgtgctgtcaggggcggacctatgaaaacgccagcaacgcgcctttaccgttcntnnnnnnnnnnnnnnnnnnnnnnnnnnnnnnnnnnnnnnnnnnnnnnnnnnnnnnnnnnnnnnnnnnnnnnnnnnnnnnnnnnnnnnnnnnnnnnnnnnnnnnnnnnnnnnnnnnnnnnnnnnnnnnnnnnnnnnnnnnnnnnnnnnnnnnnnnnnnnnnnnnnnnnnnnnnnnnnnnnnnnnnnnnnnnnnnnnnnnnnnnnnnnnnnnnnnnnnnnnnnnnnnnnnnnnnnnnnnnnnnnnnnnnnnnnnnnnnnnnnnnnnnnnnnnnnnnnnnnnnnnnnnnnnnnnnnnnnnnnnnnnnnnnnnnnnnnnnnnnnnnnnnnnnnnnnnnnnnnnnnnnnnnnnnnnnnnnnnnnnnnnnnnnnnnnnnnnnnnnnnnnnnnnnnnnnnnnnnnnnnnnnnnnnnnnnnnnnnnnaagaattcggcacgaggccgatacgcggtcnnnnnnnnnnnnnnnnnnnnaacgtttttaatcgtgttttattccattgccacagcctactctaccttttctaccaccccgcagtatctgcctctgggtccagggtcctttctgctccggcactgggggctctcaagaggtggggctgccacgtgggtggcctctccctggagctgagcccaccctgggggaccctggatcatgcccctttgcccccagcccttggtttgcagggaggccgcctggcgatgcccagcctgaaacagcacccctggcagggctgctcagtggcagctctcactttgtgctcaacaggaagcaatcagaaacacataccagaagccaaatctacgccaacaatttctcagacaacgaaaaagcaaagagcaaaatcaacatgatttggaaaaggaattttaaaccttaaattaaaaaaagaaaacattttcacacagaagaattatctgctttgagaaataaagaaattagaaggtgtaaaaaaaaatttttcaaaccccaaataatgataaaaatagatgtatcctctgtaaaaatctggactaaactattcagtcattcatggttattcagtattcagagcatgaagtgaaacaccaaagtattaaaaatttnnnnnnnnnnnnnnggaatccgagatactgtcgtttgttgccggcctcggcgtggacgccccgaccatgggccacgcagggcgtctgcctcctcccaccttccgcagacctcaggccttcaaagctcttccttggtcctgctcagttttgtggcatgttcttctataaacttgctcaaatgctccagatctctgtctccaccctcaaatttaactgggttctttttgtccccactgggggcgaagtagatggtggggaagccctccaccttatagcggtcgctggggacgtcgttggcagtggcgtccatcttggcgatgaccaggcccttttggcccttgtacttcttggccaggctgttgtacacgggctctagctgcttgcagtgcccgcaccatggcgcgtagaactcgatgaggacgtccttcttggggtccatcacaatggagtcaaaggtctttcccaccacgaccttgacgggtcccttgttgttcttgggcactggctgggatttgatgactggcttcagttttccttttttgaaagcagtgacaaactcgcggagggtgtcagagtcaaactcccggacgcgtggttgacgatatcccgggattccgaccggtaccagcctgcttttttgtaaaactggttctatagttcactatgca

SEQ ID NO: 121452 - DNA, 2071 bp, Homo Sapiens
  misc_feature (34)..(34): n is a, c, g, or t
tgggcccaccaggcgtttgcctctccccactttncggcagacttcaggccttcaaagctcttcttgggtcgtgctcagtttgggggcatgttcttctataaacttgctcaaatgctccagatctctgtctcccccttcaaatttaactggttctttttgtccccactgggggcgaagtagatggtggggaagccctccaccttatagcggtcgctggggacgtcgttggcagtggcgtccatcttggcgatgaccaggcccttttggcccttgtacttcttggccaggctgttgtacacgggctctagctgcttgcagtgcccgcaccatggcgcgtagaactcgatgaggacgtccttcttggggtccatcacaatggagtcaaaggtctttcccaccacgaccttgacgggtcccttgttgttcttgggcactggctgggatttgatgactggcttcagttttccttttttgaaagcagtgacaaactcgcggagggtgtcagagtcaaactcctctggctccatggcgaacttcttcccactctcgtccaggatggcggcattgacatcctccccactctcgctgagccccaggtccttcacctccccagcatagtcctcttcgtccgcaatggcaaaggtgtactcagggaagtccttggccacctctaggactttgctccgccaaaactgagttgcagctctgtaatcaaagctgaagtccacactgtagtagacgaccaccagggggcgcctggtgtagcgcttagcatcgtttgacaccttgcggtggccaaccaggggcagggcgtacttcagcacgaagtccttgatggccgagtcctgggtggagccctggacgtccatcatgtggctccggggctcatacttggactggaatttctcaggctgcattacaaccaactgcccctgggagactttcaagaactttgctatttctgtgctgaaagtgtggtgaaatttgtaatcttctctcaggttgttagcggcatcctggtattgctggtaggctgggtcactctcccccttaaagaccccgatgatgatgacatcgtctccatccttcaggaactcctggacctgcttcagggtcagaatctccttggagggaggcccggactgctcgatcatgtaatcaacgattccatatttttctcgtgggccgttgtagtcataaggccttcctttgcggaaaattttcagggtgggatagccagagacatcaaacctcttggccaggtctgtttctgcggtggcgtcgacctttgccaggggaattggaggagaacgcttgctgagctccttggcggccttctcatactcgggggcaagtttcttgcagtgtccacaccatggggcataaaactccaccagaatgatatctgcatcattcacaacttcatcaaagttctctttggtcaacacaagcgtgacttctggtggaggcgtccagtcgggctgggagacttctctgaccttggcaacaatttcttcctgggttctggagccctcgtagtctacagcctgccccttcttaaggatcttgatggtggggtagccactcacatcaaacctgctggccagcacagacgctgaggttgcatcgatcttggcaacaggaatgggaggatctttatcctttaatatgttggcaattttttcatattccggagcaaactgcttgcaatgtccacaccatggagcataaaactccagcagcactgtgtctttgtcagccacaaaattatcaaagtttgcatcatttaggaccaagactccattttcttccttaacttccaagtcgtcttcttcctcatcatcatcttcctcctcctcctcctcttcatcctcaatggcattttctctgttagaagaatcctcgtccgggccctcggcacccgccacggccagcagctgcaccagccccaagagcagcaggagcaggaaggctttccggggcctcatggtagcgggggcggagcgcggcctcctagcgtcggcggccgctgcctcgtgccgattcaccacccagcctcgtacctagccga

SEQ ID NO: 121453 - DNA, 955 bp, Homo Sapiens
  misc_feature (734)..(734): n is a, c, g, or t
  misc_feature (754)..(754): n is a, c, g, or t
  misc_feature (784)..(784): n is a, c, g, or t
gcggtttgatttcagtagtttattttggagacaaagcagtgcaagaggccagccacgctttcctgttccccagggctcagggtcagaactaggaaaggtgacgtacagacattaatcggggttcaaaactcaagtcgtgtaaacgtggttagttgttgggtcctcagtttccaaaaaagccgggcagttctgatggcctctgcccctcgcccaagccctgtgcctccctcctcaaagtgggcatcctgcagcccagctgagccaggccgaaggacctccatgcactggctcgggggcctctctcgggacactcagcactttctctagcgtcctccatctcactgggcagaggacagcccggaagcctttttcactttttcaaagtaaactgctatcttaagacacaaaaacatacttgtgggggctgatgcctctcacccagcaccccacatcttccaggactgcagaggcttctccccaacccttttctctgcggagggggctgcctggatcaggggtcagacggcagagccagtgctttgctgccaaggtgatggggtgagtctgaggtgtgcagaagcgatggggggcgggtggctccctggcacctgctggctcagtgcttggggcttgcaatgagaggtggaccaggcctgctgggtgaggagggaccagcaggtgtgaaaaggagtgaaccactgggaagagggcccgatctcatggtgtcatgcgangctccgcgctatctcactangtacttatggaaggcagtgcatccaggtanggacaagcagctgtgggtctctgattcaagtcactaaacagctctgcgatctggctcaggcaatcctaaggatcgataatcgatcagcaactttctggtgatgtacgtcaatcaacaatacacgacaaatgagctgggctagtgcataatatgtggcacgcgtcatcgacg

SEQ ID NO: 121454 - DNA, 938 bp, Homo Sapiens
tttttgttctctaggcatatcaagtgttttatttagaccatttctgaggattttgctttaaaggctttacatgcagcattcaagtatctcataatataagacagtctagtctttcagagatcatgtatcatcaaggtctgcagagttttcactgtcatttgcaacaagagcctctctgttctcgtaagtccagaagccattcaaatcgattagaatggtggttactgtgtctccttgattactgttgattaaatcctgaagagagattttcaaaggatcctttggttttaccatgtcaaagatttcatccttgacatcttgaaatgaaacaggatcttgtccatggattttcattagttcctgtatggccctaaagaaataattaagtgaaaagacattcaggtatcctttgttctcaatatcaagcagtttgaaaatatattgtagagctgcaggttcctttctgttttctaatgcaaggacaaagtccaagtaggtcttatagtccatttctccatcataagtgagacactcctggaaaacacggtctaagaagacattggtcatggtagctgttccatagcgtgagagttcttctttactgagcatgccattgtgatctttatcaagattcaagtactggccataaactcttagggcagaaggagcagaaaaccaatttgtttcttgactctccttggacagttcctcatcccttagctccaataaatcatctaggaagctgcatgctaaaatatcttgaatttttatctttcctgttcttaaaggatctaaaaagaagaagaacttcctaactgctgtacaaacataaaaggagtagacacgatttttccagaccatctaattgtggcaacgtagggaattagtccagtatgtagtttcctaaatcagatccgcaggtaccccttccagcgact

SEQ ID NO: 121455 - DNA, 509 bp, Homo Sapiens
  misc_feature (452)..(452): n is a, c, g, or t
gatttcagtagtttattttggagacaaagcagtgcaagaggccagccacgctttcctgttccccagggctcagggtcagaactaggaaaggtgacgtacagacattaatcggggttcaaaactcaagtcgtgtaaacgtggttagttgttgggtcctcagtttccaaaaaagccgggcagttctgatggcctctgcccctcgcccaagccctgtgcctccctcctcaaagtgggcatcctgcagcccagctgagccaggccgaaggacctccatgcactggctcgggggcctctctcgggacactcagcactttctctagcgtcctccatctcactgggcagaggacagcccggaagcctttttcactttttcaaagtaaactgctatcttaagacaaccaaaacatacttgtgggggctgatgcctctcacccagcaccccacatcttccnaggactgcagaggctcctcgtgccgaatgtcccacccaggcctgactaagcctagtc

SEQ ID NO: 121456 - DNA, 2845 bp, Homo Sapiens
gctcccaggtgcgggtcccgcgtcgctgtccaggcccctcattgctgacactcccctggcttcactgggcagagtccaccggccccccagccctgtgtgtggctggcccctccctacctcccatgtagctcccaggcctttacgaagcaaatctccatcctccatctccactcttggaaaatgcagctgccctgcacacccacagccccgcccccgccccaccacggaggcctatggacgccaccacgacaccacatggcagttactcggtatctgggccctggacgcgcaagaccccggaggccacaaacggtacaggaacacagccaggagtcacgctgcacacccccacccgtacctgaggcagactgggattgaaattttatttttaaaaggtaaagctgttttattaaacgtcttttaaggactgggagtatgacataacaaacttgagcaacatgtgtaaacacgtgtgaaatgcggtttgatttcagtagtttattttggagacaaagcagtgcaagaggccagccacgctttcctgttccccagggctcagggtcagaactaggaaaggtgacgtacagacattaatcggggttcaaaactcaagtcgtgtaaacgtggttagttgttgggtcctcagtttccaaaaaagccgggcagttctgatggcctctgcccctcgcccaagccctgtgcctccctcctcaaagtgggcatcctgcagcccagctgagccaggccgaaggacctccatgcactggctcgggggcctctctcgggacactcagcactttctctagcgtcctccatctcactgggcagaggacagcccggaagcctttttcactttttcaaagtaaactgctatcttaagacacaaaaacatacttgtgggggctgatgcctctcacccagcaccccacatcttccaggactgcagaggcttctccccaacccttttctctgcggagggggctgcctggatcaggggtcagacggcagagccagtgctttgctgccaaggtgatggggtgagtctgaggtgtgcagaagcgatggggggcgggtggctccctggcacctgctggctcagtgcttggggcttgcaatgagaggtggaccaggcctgctgggtgaggagggacccagcaggtgtgaaaaggagtgaacccactgggaagagggccccgatctccatggtgtcatgccgaggctcccgcgcctatcctcacctaggtgactttatggaaaggcaggctgcatcccaggggttagggcacaaagccagccctgtggtgctctctgatctcaaatgtccactagagacgagggggtggaggcccaaagacctggaatgatttgcccaaatcacagcacaaatcctcagcacaggcgccatcggctcgggcctccagccaggcagcctccttcccgggctccagggagcagcagtgctggcttaggggaaggagaccgctgtgcagggctaaatgggacgtgtgttggggggcccggaggacgcccagcttcctttccttccctttagtgagggagcacagcccagaccccagcgcggaactcccctgaggggtctgtggcctcctctggctgtggggagggaggggttagctgcacaccaggcagggtgggggctaacaaagccttggtggagaccagtaggaggaaaaacaaggaaggggcaggtcagggagtggggagtcaggcagaagggaagccactctcacacgcaccgatcagcctcccacagcccgacatgggcaggcttcccccaagggtcccggtccacagtggccatggagaccaacagacagggatgtgcacagacactggcatggcagccatacgcacacccctcacctcccatccagacctagtgttgcaaacacaagcgtgtgtaaactcagttaggaggtctgcacagtagagagcaggcggacggccccactccccaacggtggaccacctggtactctcttccatcccccactacccctcatttagatcatgacatcagagaatcaggttaaaaattaaaaaacagaagaatcagatcactggggattcttagtagtagcatcgccgttgggagctgctggcccagcgggtgtgctctgcgccctgcgctgcccctctgggtcccggctccgtggctactgggaggaggccttggtggccagggaggccacacaatgctgctggaagctgggcgacacgccggcgttgcagccgagtctctggtgcggcagcttggcggtgccgcccgcgtcggcctcagccttccagggcgcgtcctggcccatcatgctgccgcagcagccggggctggcgctgcatgtccgctcgcccaccaggccgcccgccggctcggccagaagcttgctgtgcctcagcagggccacgtcccctgtggctgccatggctgtgctctggccctgcaggacagtggcgatgtggttcaggaggtctgtgaagaactcgctcacgccctcgtagcctgggaaggcattgatgtcaatgacggcgtgctgccctgtctggttgttgatgatgatgtcgatgccgaagagtgacacgcccagtgcctgccgcagggcccgggagagctcccggatgacctcgtcgctcggccgctcgaacacgccctcgatcttgtccagctccgtcaggaccgatgacgactccggctttgacacgttgtggctgttgaagaagatggactcacggtctgatgtgcctgcggagaagttcttgagtgagggcggacgcgtgggcggacgcgtgggtcgacgatatcccgagaattccggaccggtaccac

SEQ ID NO: 121457 - DNA, 1179 bp, Homo Sapiens
ggcattgatgtcaatgacggcgtgctgccctgtctggttgttgatgatgatgtcgatgccgaagagtgacacgcccagtgcctgccgcagggcccgggagagctcccggatgacctcgtcgctcggccgctcgaacacgccctcgatcttgtccagctccgtcaggaccgatgacgactccggctttgacacgttgtggctgttgaaggaagatggactcacgggtctgatgtgcctgcggagaagttcttgagtgagggcctctggaccacggtgtaggactcgccaaccacggaacaccttgtacaggacggcgttgtggttgatgaaattctggaccacgcagggtggctggatggcgttcaggccctcctggttgaacacgatagccatctcgtgagagttggtgccatgagccactctggttttgcaaatgaatgggaaagtcaagccgttcttctccagcagccgcatggtgtcatccccgcacaggctcgtgagctccatgaagggtggcgagcagatcctgtcgtcttccatgtaggcctcaatcttccggatgagctcataggacttggagcggtcaagcagggttctgatggcagggagcgggtccaggacgatggtctcagggtgggcatcgatgtactcctggaacctgtgcaccagctccagggactggctatcattctggtcggcttcaaggatgacgtcagtcagcttgtggatgatgacgtccagggggccctgctcctcgatcggccggctaaggttcagctgcacaacctccatccctcgcttcctgcacagctcggcgaaggcctggaaattcagcttcttgattttcttctcgctcagccagtagccaactctcttccctttcagaaaggtctgcatcttcctcctcgggcggggagcctgggtccggaggaaatcgcccacaggccgagtctggcggccggcgcgcgccgcgagcgagtgggcacctcctcccggcggcggggacgcggaacggggatcggagctggggcgcgcagtcccgccgccgccgccgccacttcctcctcggcctggtcctcgcgcgctgcccgccgagaagggcggcggcgagcgacccgcgcactcgccgccctcgtgccgagatcgccacccaggcctcgctacttaggaccgtaatgg

SEQ ID NO: 121458 - DNA, 1031 bp, Homo Sapiens
atcctcttcacaaactcggttcgctcatcctctcgggacccttttcactttaaacaaatgggtctccccccactttctgccagctctcccactttccagggctccgaacggtcacgcaaccgcttctccagttggtactcagttcaaacatggggcggtgctccctgcactctgtccaggcttggccttcaatgaagtgaccagcctctgggtgaggaggaccagcggttgaaaaggattgaacccacgggaagaggccccgatctccatgggtcatccgagcttccgcgcctatcctcactagtgactttatgaaagcagctgcatccagggttagggcacaaagccagccctgtggtgctctctgatctcacatgtccactagagacaagggggtggagggctaaatgggacgtgtgttgggggcccagaggacgcccagcttcctttccttccctttagtgagggagcacagcccagacaccagcgcgggaactcccctgaggggtctgtggcctcctctggctgtggggagggaggggttagctgcacaccaggcagggtgggggctaacaaagccttggtggagaccagtaggaggaaaaacaaggaaggggcaggtcagggagtggggagtcaggcagaagggaagccactctcacatgcaccgatcagcctcccacagcccgacatgggcaggcttcccccaagggtcccggtccacagtggccatggagaccaacagacagggatgtgcacagacaccggcatggcagccatacgcacacccctcacctcccatccagacctagtgttgcaaacacaagcgtgtgtaaactcagttaggaggtctgcacagtagagagcaggcggacggccccactccccaacggtggaccacctggtactctcttccatcccccactacccctcatttagatcatgacatcagagaatcaggttaaaaattaaaaaacagaagaatcagatcacctcgtgccgatttaaaccacccagcctcgtacctggcg

SEQ ID NO: 121459 - DNA, 1080 bp, Homo Sapiens
  misc_feature (756)..(765): n is a, c, g, or t
atggcagtgacaggaaaataaatgatagttgttcaagagttttctctagttattgagatttagatataatagtatcctcatgaatatcgtaagttagataagattttgcttttacctgttcttaaaggatctaaaaagaagaagaacttcctaactgctgtaccaacataaaaggagtagaaagatttttccagaccatctaattgtggcaacgtagggataagttccaatatgtagttttctaaatcagattcccgaaggtacccctgcccagcgacatcatataaactgagtcctattcttgtttgatgaagcccaacttttctcatgacataattaaagaactgcatgatggaaattcttccatatgaatctgtatgaaggagtttagcaaagacttttgctgtgaaaaattgcttgcactttgctccagccttttcaccaaccttcaaaaagttttcgtaattgatcatcgcttcctctccaatcataggtggtgtctggtgtttgtccagccaaaaccataagttctgtaattcttcattatctaacagttctctgctttttctttgtagaaagacagctcttgattcctctcttaatttctgtagtaagacttcatcttcagcaggcagcctataataaaaccggggaatggtcttatagaattcatttgtgttttttctacctcctttccattcggagtaatattttgtaaataaatccatgttcttcatcttttaattcttgttcacnnnnnnnnnngtttggacaggtgttgggcgtcgctaggcgccgacgaagaacttctttccagtccatggccgacttccgcgcagcagcttctgcatttgctgtttcctacctgctccacccctaccagctcaggcgtcagcaccgccaggccccgtaaaggttaggaaggccgtccaaccaccatcttgatcgagggcggaagtcttggctaaagaggcaaaaacaattactgtcactgccgcggagaataccgctaccacgctgactgggggaaaaaactatgaaagagatggaaaatggttctccttcagaggcgacccaagc

SEQ ID NO: 121460 - DNA, 1105 bp, Homo Sapiens
  misc_feature (60)..(78): n is a, c, g, or t
  misc_feature (706)..(801): n is a, c, g, or t
  misc_feature (988)..(988): n is a, c, g, or t
  misc_feature (1013)..(1013): n is a, c, g, or t
  misc_feature (1038)..(1038): n is a, c, g, or t
  misc_feature (1046)..(1046): n is a, c, g, or t
  misc_feature (1048)..(1048): n is a, c, g, or t
gtgccaagctaaaattaaccctcaactaaagggaataagcttgcggccgcctgctcaggnnnnnnnnnnnnnnnnnnncaatggaaaaattttttagtaaaactggaaaaggctctataaaatgtcctgactccagcagtcttgaggcagcacacaatggcatcagtgtctaggtggcaggcactccgggctgacagcttccttctatggctctatgaccaagcaacccagcccgaggcagctcccaccagtgaggccctgatattgcagggctaagcacctaggatccaattctagtacatgccacctcatgctaggctctacaaagtggggagcagaggagcttggtacccactgtatcaccctttgactttgaaagcctaggctggagtttcgcatgaagtccccgattcccctccaggttcatgcggcctgacctcactgccttgaatctgacctgctcattcctacctcagggcttggatttccttttctctctgcctgggtccccttcgccggatgttcacgtggctctctccttctagttgtttaggccccagctcacatgccctcggctcagagacaccttttcagaccacttatctacactagcctgccagcactctatcgcatttctattttctttacagcatttttcactaaaactaggttttctgctaatttgttcattgcttgcttgtctctnnnnnnnnnnnnnnnnnnnnnnnnnnnnnnnnnnnnnnnnnnnnnnnnnnnnnnnnnnnnnnnnnnnnnnnnnnnnnnnnnnnnnnnnnnnnnnnngtagtctgctacattgaattttctcactatggaacctgctctaggttaggccctcagactgagaagggacacagctcaggacacaggatagaggagccttgcagagtttatgctccagctatctatcaggtcattcagtgaccagtctgcacggcttcactttgacgcttggagtgtctgctggtcnggagtggggctgcctgacaatctanagtctgtgtctacccttttgcaganaggctttngncatgtccatgcatctgtctctgagcggctgtcttgggatggaaggtagatctgttac

SEQ ID NO: 121461 - DNA, 1751 bp, Homo Sapiens
  misc_feature (97)..(143): n is a, c, g, or t
  misc_feature (1323)..(1339): n is a, c, g, or t
gggcccgtcaggacgtgcgaaaagcgacggcgcagcacggtgcggcgcagctcctgctcgcctttcccttcgctgggcgagaggtgtctatggggcnnnnnnnnnnnnnnnnnnnnnnnnnnnnnnnnnnnnnnnnnnnnnnnagtgctgtctctatggcgaggaggaggaggaggagcgcgagctcagcgacacaagtacataaataaaggataaaatattttatgaaacaaatcttcaatcaagtataacattttgatgcttggcatctagactcccttgtgccctcactatgccagcggcaactgtagatcatagccaaagaatttgtgaagtttgggcttgcaacttggatgaagagatgaagaaaattcgtcaagttatccgaaaatataattacgttgctatggacaccgagtttccaggtgtggttgcaagacccattggagaattcaggagcaatgctgactatcaataccaactattgcggtgtaatgtagacttgttaaagataattcagctaggactgacatttatgaatgagcaaggagaataccctccaggaacttcaacttggcagtttaattttaaatttaatttgacggaggacatgtatgcccaggactctatagagctactaacaacatctggtatccagtttaaaaaacatgaggaggaaggaattgaaacccagtactttgcagaacttcttatgacttctggagtggtcctctgtgaaggggtcaaatggttgtcatttcatagcggttacgactttggctacttaatcaaaatcctaaccaactctaacttgcctgaagaagaacttgacttctttgagatccttcgattgttttttcctgtcatttatgatgtgaagtacctcatgaagagctgcaaaaatctcaaaggtggattacaggaggtggcagaacagttagagctggaacggataggaccacaacatcaggcaggatctgattcattgctcacaggaatggcctttttcaaaatgagagaaatgttctttgaagatcatattgatgatgccaaatattgtggtcatttgtatggccttggttctggttcatcctatgtacagaatggcacagggaatgcatatgaagaggaagccaacaagcagtcatgacatgaaatagtccttttatttttatttcgagctacacacatgcttgtatataggttttatctctggttgaatccctcgaacaatagacagtacctttcccccccctttcatggcccattttattgtctgcctttcagtactaagtatgaccgttcctatctcagatcttaatnnnnnnnnnnnnnnnnncgcattcaggttaaattttggcttaatttaatatacttgttagcaagcgtgtgtgacagagagtggggaaggctacatcattgactcttttgataaactttaccgacttgagtttggtttcatttttcccttttcctcaattaactagcactgactgtattatttcccggttccgttctcccctcattctgcggagtgtagctattgagaccggggacctccagtctgcccttagccaagtgttctgctctaacacggttttcccaacttggtttctgacttgcggagaattgcctcaccgcatatctgtcttgacccaacaatcgtggcgacgggctcaggattaagaagacatcgcggtatgggtgtcagtatacccactatgctgtagcgggcgcgacaaacgcccaac

SEQ ID NO: 121462 - DNA, 596 bp, Homo Sapiens
gccacactccttgatcatgctctcctggaagcaggagtgaatacacacctgctgtgtgtactttgaagggtaaaggttctcaacaggaacatcactgccattcttggtgtagtcgccataatcgcccccaagtctgtccagggtttccttcctcatgctgatggaggtctccacgccaggccgcaagttaaagccaccatcatccataaaggcaggttcatcctgcccgtgcaccattacccgggccccagtcactgtggacagcaggggaatgaagtcattctgctctgcgcgcagcatcagggacagaccgttgttgattccaggcatggaagacatccagaggttggagttgttcttgtcattgaaagtatagcagtttccatacatcgggtggtggaagtgagagtaattcgcctggttgcaggagacctggttgaagcggcaggcgaagatgaagttgcccagcgtgtcctcctccagggatggcagagtctctggcagcctcgacaggatgttgatgtagcggaagcggtaccactccctcaccgcatccacccctgatgagtatgtctggtagaagcagtccgatttgt

SEQ ID NO: 121463 - DNA, 2394 bp, Homo Sapiens
tttttccttcatgcaacaaacatttattgagctcctgcctacttgctccaagcaggatgatgggctagacatggagcatacataaacgggcaagattcagtccctgaccgcaaggcacttacagtctagttgggaagggagacacaaatgtacaagaaagtatggtgcaacagcaacactccagcagatgttatagtgtgctacgggagcccaggagaaggcggagtgatcaattttggggaagacaagatgtggcagaagcgttcacaaaagtaatggtgtctgagcagggttctaagggatgcataggagttctctggcagatggttggggaaactttcaggctgaggaaatatctcaagcagacatgtagaggtatgaaagacacagggcagaggtgccggggcatggctctgtgagggcacgggtatgaggctagaggagccctgggtctgcctttacttacccgggtctgctctagccctagccctcgggagtcagggaaggggaattgcctaagtaacaaagggggcttttgggtggggtttcccacccaagttcaagaggaggagcagacatctgtgctactggagagcagtgtggccaggccagtcgggggctggcttaagccgtcgctgggcaggaaacccgtgcatgcctgcgtgtacccttggttgtgttttgtcctggttatcagcggtttcttaggaaagttccttgtcaaagctccaagtttcgcttggctgatccaagggaaaaagagacttagccgcagttgggtggggaaaccagagtgttcagaggcagtaccaaggggtacagggctggagccaaggcacttctgggcagcttcatcagctactgttcttggagcaacttcttgagcccttacccatcttgcttcccctccacacatcaacggcagtttgggcggctctgagaggaagccctgcacatccttcaatcttgccagggccagcaccctcccaccagaggagcatctgccttggtgtgagaaacctctccttccctctcagggcccccccagaggacaggcggaggaactggcccctgcagagccccctggagatgggcgggggcccagggtggcataggcagggggaggggctgtcaaggctggagagggagcagggcctggctgggacaaggacagagacatggggtgggggcagaagtgggaaggaggggaggatgccagggtggaggctacctcctgagcacccctgccccctcggcctggagaccagtatcggcttcggaaccttcggagcagcatgaggaacatgatgaccagcaggtcaaagacgagctcagccatctccaccacagacaacaccgaggagccgaaccacaggctccactggctgcccaggttggacaggagggtgaccatcgtgacagagggagactcagaattggttttgtagttcagctccttgaagaagatgttgactttggccactccatttctcttgttgttgacggtgtaattgttctgtcgcgatagcatctggaagacccattcctgggatgtcaccgagggccatcgtgagtaaccagcagagagctggtagctggtcacgctgcatggcttccggcacttggtgaaacagcccaggtggtctgaggagaagtcaacctggagcttatagtagcagtacccccaggaactgtgctttctgtagtcacagtactccacgttctggggccgcggatagaagatgtaggcacagccacactccttgatcatgctctcctggaagcaggagtgaatacacacctgctgtgtgtactttgaagggtaaaggttctcaacaggaacatcactgccattcttggtgcagtcgccataatcgcccccaagtctgtccagggtttccttcctcatgctgatggaggtctccacgccaggccgcaagttaaagccaccatcatccataaaggcaggttcatcctgcccgtgcaccattacccgggccccagtcactgtggacagcaggggaatgaagtcattctgctctgcgcgcagcatcagggacagaccgttgttgattccaggcatggaagacatccagaggttggagttgttcttgtcattgaaagtatagcagtttccatacatcgggtggtggaagtgagagtaattcctggttgaagcggcaggcgaagatgaagttgcccagcgtgtcctcctccagggatggcagagtctctggcagcctcgacaggatgttgatgtagtggaagcggtaccactccctcaccgcatccactcactgatgagtatgtctggtagaagcagtccgatttgttctggttgcacagctggagccctcgtgccgattcaccacccagcctcgctacctagccgga

SEQ ID NO: 121464 - DNA, 627 bp, Homo Sapiens
tccaatacaactctttcacttttatggctaacacaactaggtatctccagggccacatcacacaaattcggccaaggtcaaagtctgagtgaggtccggcctcagtcctaggtgcaacatctgtcttagctcctggagtccctgaccctctctctcaagcggagaagaggaggaggtctcagctgtccaggctcatgagtagagcagtgcccctcttgatccaatgatcaggtgtcatggccccagaccgcaggtcaatgccgatgacaaaggaggctcggtctgagctgcctgcccggttgggatagtaatagcaggggcaggagtacatgcccttggcgctcttcttgcggctctctgcaggccggaagtggatcgtgggcatgaggcagacaagctgcatgggctctgctccaccaagcaggagttcttccggtcccagccagcaccttccaggtacaggccccggacccagacaccatccttggggggatacactaggttgctgtcatccacagtggaaacgataaactcccaggagaggctgtccactgaaacgttgttttggcgagctgaagactgcagcacagcagtgagggaagcagtgggaaaggtgaaaccagacac

SEQ ID NO: 121465 - DNA, 1064 bp, Homo Sapiens
  misc_feature (79)..(110): n is a, c, g, or t
ttttgacgcggggagagatttaatttacatagcagccacttggggtccagtcagagctggggcagtgggggaatctatnnnnnnnnnnnnnnnnnnnnnnnnnnnnnnnnggggagaccagtcctcaccaacccttggatgggctcccaaggttgtgcagaagatgctccagtcaaaaggatagagacatttgggaataaggctgtccccaagttgggggaagtccacggcctggagtggtggcctacatggtggcccaggggtctgagagaccagtccatgtcctgggcgagtcctcagcctggtggccctagaggaagccttcgcggcggaactgttcctggaggagggcgcggtactggtcaaatcctccttccacacgggtgacgccgcctccttcgcatacccacaactcccggcacaccagcctgataaagcgctcatcgtgggacaccagaatcacaccacccctgaaattgttgagggcacggcccagagcctcaatggtctccatgtccaggtggtttgtgggttcatccagaatgtagaagttggggcagggcatagtcatctgagcaaaggccactcggctcttctggcccccagacaggctggcaagaggacgcatggccagttctccggagatgccataccgacccagctggtgacggtactcctcctcagggcgcccaggaaacttgcgtgccagcagttccacagcactgacgtttaggtccagctgctccacatggtgctggctgaaatagccaatcttcagattcctgtgagcgtgtctgatgccccgaacaggtgccaggtcccccaaaagcagcttcagcatggtagacttcccagccccattctctccaaccacacagatgcgagactcgagatcagcagacacagagaggcgactgaagatgacgtgcttcggatcgtagtagaaatccacctcatctagctgcagaattggcggcgagaacttctcaaacccatcagggaacttcattacgacctctgattccttgtccacaggcttcagctcaggcctgggagaagagatg

SEQ ID NO: 121466 - DNA, 681 bp, Homo Sapiens
aaattctatatttattttctcttagaatgttcatgatttttggttttctaatttaaacatacatgatttcaaaattatataaaattgtgttctttagaagtatgtggcaaaacagtacacactgtgaaatcactccatttctattaatgactgaattattttacacataaactgaattttagttgaaagaaaaactacacttagaggaaacaattctatcatacatatacatttacagttttttacttttacaatctctttatttaaaatcattctttcccaaaaactatacttcagcatgagacttttagatataagtatccaatgggtaattagtatgtacataggtggctgtgaaaaattacccacaactctaatatattctcctccaaaggtgaaaaaatttccttttagaaagcactttaacatttcttctcatcatctacaaagcagcagcaatatttaaattatcaaaaatgacaaatccagtaataatcataaacagttccttaagaaatgtatttgaaaagccattattccataaaatatttacattgtttaaattacatgacagcaacattttctttctattttagttcaacatattagtaagaatctctaaaccctccaaaaagaaatgctattcatctttaattaaggagactttatccttggggttta

SEQ ID NO: 121467 - DNA, 380 bp, Homo Sapiens
ctgtaaaatatacatcttgatagaaaaatattataaggttttaattttctaaataccaagggttaacatcttacgattaccctttgaaaatagggtattttggaacatttaaaaagttctcaaaataagtacaaagcttattcacatttttactaaatccaacacaactttcacaaatggcaaaatgattgcctcttcaaagcaatgcagcctagtttttggtgggttctggtcactgcttagctaagtctttgttgggcagagtcctggctccacagtctccttcgatgggctccttgatacacgaggcttcataacatgcgctctttgaagaaccatttctgatgatccgagttggtgcagtctcgtaagagtggaac

SEQ ID NO: 121468 - DNA, 1222 bp, Homo Sapiens
  misc_feature (902)..(948): n is a, c, g, or t
aatgttcaaaacacatttatttactaaatcacctgacactgacatctaagataatttcaacaaataaaatgtttaagaaaaattgtggtatacatcatatttgtctctagaaaaaagtcttatttacaagttgaggaacaaagatatttcttttaattaaaaacacattaattatgcagtgctaccataataaaagtgaatctcccaagaacagctcaagtatcttgtgaagtattaagaggtgaactgtttttcttttcaatcatattcagaaaatcttatatgtttactcgcttgttgagtctttgccagtctaatcttttcagctttggtgattaacttttcagtgcctcttttcttttcccgaggctgattaagttttgcctgtctatcaaccaaaatcttctgccaatacctttgttcgtgatcaccagaaaggatctcgagtttccagcagtgtttcttgttaatttctgtataggcatttattactgcttgagcatcctcaggagttttaaatctagcatggcattctgtatccccttctagcaaatcaacataaagaacttctgagattgctgccaaagtatcccggacttgtttcctgccaggtagaggctctgtgctaatgatcttcacaatcactccactcacgaactgtggtcctgttgcattaactttctcctgggtgcgacactcttccctgttggctgttttttcatttttcattccagtgttttgaggtactccactgtctgtttccatttctgactctgattttatttgggatattgttttttttaaagaagccatgctagctttttgtagcgctaaatactcttttttcaaatccatccattcgctctttgatagcactcttaatggtataacttcttctcccnnnnnnnnnnnnnnnnnnnnnnnnnnnnnnnnnnnnnnnnnnnnnnncaagagagagctatcttttagatctccagtatccttttcctcttcagtagagatttctatatctctattttccttggaagcttctgatgcttccttaatgatgtctttctgaataattttctttacttttgatcggggagctagggattctgcatcttcagagctgcttctcttcctcttccctgttctgacttcaggtaagctagatgcttcaactctgtcccgttttttctttttctttgagcactgcttttggggttcagtggactcaatg

SEQ ID NO: 121469 - DNA, 1412 bp, Homo Sapiens
  misc_feature (164)..(222): n is a, c, g, or t
  misc_feature (586)..(636): n is a, c, g, or t
  misc_feature (1200)..(1270): n is a, c, g, or t
attccagtgttttgaggtactccactgtctgtttccatttctgactctgattttatttgggatattgttttttttaaagaagccatgctagctttttgtagcgctaaatactcttttttcaaatccatccattcgctctttgatagcactcttaatggtataannnnnnnnnnnnnnnnnnnnnnnnnnnnnnnnnnnnnnnnnnnnnnnnnnnnnnnnnnnaagagagagctatcttttagatctccagtatccttttcctcttcagtagagatttctatatctctattttccttggaagcttctgatgcttccttaatgatgtctttctgaataattttctttacttttgatcggggagctagggattctgcatcttcagagctgcttctcttcctcttccctgttctgacttcaggtaagctagatgcttcaactctgtcccgttttttctttttctttgagcactgcttttggggttcagtggactcaatgtcagagccctcagatgtgggtctggatcttttcattttactgatgctggtgttgcttgtgtccatgttttcttctttggcttggatattgnnnnnnnnnnnnnnnnnnnnnnnnnnnnnnnnnnnnnnnnnnnnnnnnnnnacaactcttaaggctggaatgggcttatttttcactgttttaggaaatatgccaggttttcttggtgcttcttctggtgggttgttaagaaactcaattgcttttgctgcttgttcttttgtttcaaattccacaaacgcaaatccctttggatctccagtagacttataatgtggtatacttatataaacaacattgccacatttcccaaatactctttcaatccagctgtgattaacatttttgggaagtaactccacatacactgtgcgttcatcctcatcctttggtctttcccccagaggttttttcctccggattctggtgccttccaaatcaagctctacaacagctgaacttctcaatgctctggcaattaacttcccatcagtagtcaattttttcattttgttaaaagacacaagtagtgatatatcaacatatccatctctagatttttctatctgttctcgaagaaatctatccttgtgaagatttgcatccccaaaccagaagtccacttgcttagcaatatctgcaagcacctgtttaactcgtgaccgnnnnnnnnnnnnnnnnnnnnnnnnnnnnnnnnnnnnnnnnnnnnnnnnnnnnnnnnnnnnnnnnnnnnnnncagtttccattcgttcgctatcttctggcagccacagctcagctccaatctgcgaaatacggcactctctttattgactactgcttctctcccccggccgtaatggccgaattcccgggcatatgtccggtaccgtcgactg

SEQ ID NO: 121470 - DNA, 997 bp, Homo Sapiens
  misc_feature (14)..(14): n is a, c, g, or t
  misc_feature (355)..(365): n is a, c, g, or t
  misc_feature (882)..(916): n is a, c, g, or t
tccccggaggtgantaactcaaactctccatttcatgcacatgacttgggcttctgtgtcttttccatagccacatccaaatccagaaaaggctcttgcaccccatgctcaaaaatgcaacctcaagtccctgaggtcctcagcacagactgacattaacaagcctgtgttcagccttcatccagaacctccagggaaatcaggagcacaaacacagagcaaggcaccgtttctttaaacaatggctttaactgtcgaatgagctctgacaagccatatgcatttcataaacaaaccaaaacatcatcttcatatcttcctatttttcttgcaaaaatgttaagccatccaagtnnnnnnnnnnnttttaatttaacaatgaaaaaggaacttcaaagggtttatgccaaaaaacaaaccagtcctctgcagcctaactcatttgtttttgggctgcgaagccatgtagagggcgatcaggcagtagatggtccctcccacagtcagcgccatggtggtccggtaaagcatttggtcaggcaggcctcgtttcaggtagacgggcacaccatcagctttctggaaaaacttttgtagctctggaactttgtttttcccagcataatcatacactgtggaatcggaggtcagtttagttggtgtggcaaatatgataggtggtgcttctgtggaaaccacaggctttaatccctgcgggctataggcctccgaagcccatgctcctgccaacttctgcgtgaagccactaaacttgtagtacatgacgcccagagtccggcttcccgcatccgctgccaacgcgaccgcccccccggccgtaatggccgaattcccgggcatatgtccggtaccgtcgactgnnnnnnnnnnnnnnnnnnnnnnnnnnnnnnnnnnncgccgcttcctcgctcactactcgctgcgctcgtcgttcggctgtaaccggctagcgcccatatgattattcaagtccttt

SEQ ID NO: 121471 - DNA, 943 bp, Homo Sapiens
  misc_feature (805)..(839): n is a, c, g, or t
ccatggctcaaaaaaaggcaaccctcaaggtcccccggaggtccttcagccacaggactgacaattaaccaagccctgtgtttcagcctttcatcccagaaccctccaggggaaatcaggaggcacaaaccacagaggcaaagcaccgttttctttaaaccaatggctttaactgtcgaatgagctctgacaagccatatgcatttcataaacaaaccaaaacatcatcttcatatcttcctatttttcttgcaaaaatgttaagccatccaagtaagaaaaaaaattttaatttaacaatgaaaaaggaacttcaaagggtttatgccaaaaaacaaaccagtcctctgcagcctaactcatttgtttttgggctgcgaagccatgtagagggcgatcaggcagtagatggtccctcccacagtcagcgccatggtggtccggtaaagcatttggtcaggcaggcctcgtttcaggtagacgggcacaccatcagctttctggaaaaacttttgtagctctggaactttgtttttcccagcataatcatacactgtggaatcggaggtcagtttagttggtgtggcaaatatgataggtggtgcttctgtggaaaccacaggctttaatccctgcgggctataggcctccgaagcccatgctcctgccaacttctgcgtgaagccactaaacttgtagtacatgacgcccagagtccggcttcccgcatccgctgccaacgcgaccgccccccccggaccgtaatggccgaattcccgggcatatgtccggtaccgtcgactgnnnnnnnnnnnnnnnnnnnnnnnnnnnnnnnnnnncgccgcttcctcgctcgactgactcgctgcgctcgtcgttcggctcgcgaactgccgccacatatcagtggatcgactacaggctttccttctactctcccccc

SEQ ID NO: 121472 - DNA, 1728 bp, Homo Sapiens
  misc_feature (79)..(88): n is a, c, g, or t
  misc_feature (296)..(304): n is a, c, g, or t
  misc_feature (1195)..(1205): n is a, c, g, or t
gaccgcacggttttgtggggggggcgtcttccccaaagtgtgggcgccagagaaattgcccttacaaaagggactattnnnnnnnnnnagttatctttccccatatgacagtgtggccaacggggccggggggggcgttatattttgtgaaagttgggaacggccgccgcgtttggggactttcacatcgcggggatatacggagtcccccacggtaaaatgggcgccttaacaaaaaagtcttccctattcttgggaatttgcgcttccgacggaaaccggtttcggggttttgnnnnnnnnngcgcgccgtcctttcttttaattgcgggggggagagaatccccaaagcgcccgttaaattccaatggaacccaaggggtatcttcccctgaggggaacaccaaagccctatggggcccattgtttcccactttaactataatgggggggcccggggcccccaatacggaaatgggtttaggaaaagtttttttcgaagggccgaagagcggccccaccaggcatactctcatccatttggggtttaggtggtcacaatttttcattcatgtatttattccacagtcaaaataaatcaaaatttaaagctataacatttttaaaagataaaggagaatttgtggcacagctgcattaacaaaacagacaccagtctaaagtgcaacactaaacaggtattctctgttcccacggtggaataattacacataagatttcactaaagataggagatgaggcaaataaccctttgaaattacctgcccaacaaatagaggcaggctacattaatttaacattttactgcaaaatggaaaaaatccccgaggtgactaactcaaactcctcatttcatgcacatgaccttggcttctgtgttctttccatagccacatccaaatccagaaaggctcctgcaccccatgctcaaaaatgcaacctcaagtccctgaggtcctcagcacagactgacattaacaagcctgtgttcagccttcatccagaacctccagggaaatcaggagcacaaacacagagcaaagcaccatttctttaaacaatggctttaactgtcgaatgagctctgacaagccatatgcatttcataaacaaaccaaaacatcatcttcatatcttcctatttttcttgcaaaaatgttaagccatccaagtnnnnnnnnnnnttttaatttaacaatgaaaaaggaacttcaaagggtttatgccaaaaaacaaaccagtcctctgcagcctaactcatttgtttttgggctgcgaagccatgtagagggcgatcaggcagtagatggtccctcccacagtcagcgccatggtggtccggtaaagcatttggtcaggcaggcctcgtttcaggtagacgggcacaccatcagctttctggaaaaacttttgtagctctggaactttgtttttcccagcataatcatacactgtggaatcggaggtcagtttagttggtgtggcaaatatgataggtggtgcttctgtggaaaccacaggctttaatccctgcgggctataggcctccgaagcccatgctcctgccaacttctgcgtgaagccactaaacttgtagtacatgacgcccagagtccggcttcccgcatccgctgccaacgcgaccgccccagagagccccggccgtaatggccgaattcccgggcatatgtccggtaccgtcgactg

SEQ ID NO: 121473 - DNA, 1049 bp, Homo Sapiens
ccagttacaccttagatcacatttttaccagtttcccatcagacctcaaaatcatggcatctctattatttgtgatgggctgaggataagaggagtgtgttcaaattcagcttattctaacaaaaaggcaattaagctcaaaggaaagctgatttctaactacaaatgttcttagttcttttgcaagataacatttttgtatctgctaaattccagagagatttttattccacaattagattttaacatcaataaaatcttagatataacaatacagatgaaggaacaattgaatttgcattgaaataaatattagacatacaaagcatatacagtgaaaaagggtcacaataaattacaagtagagacattatttccctcaatcaccaaagaaagcccttgatacttccaatttcacaccatcaaatttatcattcttgctgatttaagcagaacacaaaacaaatatggatcccagggcttactttcacaggtaccagcatggataatttactatcgtgatccaatttggaaatcagtagggaccagtaaatcactgcataaaagaaagagtgaatgaggtcctttttccttagtgtcagcaggctatgattattatgtttattagattttcttgaaaggacttcacattttctcaaatatgcaggagaactgtatttcccctctgagccctacattagcatttatgtgctttggtcttgaatacaggggaatgaatttttcaatttattttataaatttatatagtctggatagtattggcctgaagaatgtaactccccaacctgtacaatattagatattaaaaatggattcaagagaagttactaagaaatgctgacatactgtatatacaaatttttagttcaatatatgccattatataaagcaccaaaagtaatgcctttataaatcaagccattttttatgactctgtttctaatctttgtaacccttttacatttgttccaatatacacacatcataaatgttacttgctcaacacttcaccgatttggtctcaactt

SEQ ID NO: 121474 - DNA, 582 bp, Homo Sapiens
  misc_feature (122)..(240): n is a, c, g, or t
agaaagataattttcttttattacatttttataaagtgtagaaatgtgagtaggcagattaatcttgatactatactgagctacacaattttattcttttattttttaaattaaaaaaatannnnnnnnnnnnnnnnnnnnnnnnnnnnnnnnnnnnnnnnnnnnnnnnnnnnnnnnnnnnnnnnnnnnnnnnnnnnnnnnnnnnnnnnnnnnnnnnnnnnnnnnnnnnnnnnnnnnnnntgatgagatttttaaaaaatattttctctgtacttttcattctcttttaatgaggaccaatgtacagttgaaataactggaacaaattatttttggtgtgtgtgacaattctgtttttaatgctatttgaacaagtgggccattagccagatttgtctttttgttgtaaaacaaaatttgactaattttacatgtttataaatcttacgctctcactgtttgtttttatttaaattacaattttatctgtttcctgacattgtctcctatatatttctattattaattgcaaaaacatagaaatggaaattttgctatcaaccaataaaatttttttaaagt

SEQ ID NO: 121475 - DNA, 1061 bp, Homo Sapiens
  misc_feature (855)..(855): n is a, c, g, or t
  misc_feature (873)..(873): n is a, c, g, or t
  misc_feature (953)..(953): n is a, c, g, or t
  misc_feature (986)..(986): n is a, c, g, or t
  misc_feature (988)..(988): n is a, c, g, or t
acattttggtgtgcattttatttttgactggaatcatatccatatgaagggaaattgtgaaagtatcctttactcttttgaaagcttggcctttgccttactgtgtcaaaggaaagcaaaactaagccagtaatgatggagatgtccctgtttccatatgcacagtgacaggcgaggagctgcctaggaaatgctttttgattgatgaacagaggagggtctacacacattaaatacaaatggaaacacatcagcacacacaagtcattagcctggtcctctggcatccactggcatgcatctttccaaagtatcacttattcagtggtagcagcactatgtctcgttatgccttttatcagcaaatacctttttattccagaatggaaaacaaactaggaattaaatacatccaatattgatgctttatttccataagtcaccaataagagaatgaatttaattttaatacatttatttttgtgtgattcttaataaaacactttcaaaacattctgtacatttcaagccactcagaaccgcattacatttctacaaatgtgatttgttgggatgaggtgccaagatgtctctgtacaaagatgtacaatatgtacaatcactgtaagtgcaagctgtgcaaagcagagtctagaacactaattcatgccaaggcttacaaaaacatttcaacacataagactaaagcttgaaacagcgttgtggttttttccctgggcaaatgattattttataaacaagtatatgtatatgtcatacagaaagaagagtttgactcctcagctcaagtcagtaccatgcagctgactggatacattacagggctgctctccntaggctctctttcttcanaggcgccattttgccacactcaacagttgtctcatcactgagtggctgccactgctgcttttggctgacacagcacatangctcgtgcgaatcttgctcgagggcaatcctanangagtcgataattcgatcagtcaactgtccgggtgaatgttcgccaaatcaaaaaaagaccgacaaatgtactg

SEQ ID NO: 121476 - DNA, 693 bp, Homo Sapiens
  misc_feature (261)..(281): n is a, c, g, or t
gcgatgagataaacatgtatttgttgacatggaaagaggttcacaatgtacagttaagtgcaaaagcagattataagaaaacagtgtgcatagtaggataccacggtggcaaaatctatattctatatattcatagaaaaaggcctagaagaaaatataacagtattcaccccagagagtgggatggccaatgagtcttctttctgcttctattttctaatctttctacaatgtttgtgtagtcagttttcctggtttgcnnnnnnnnnnnnnnnnnnnnngagcacaggtgggtcatgggagtcacgctctcatgctgcctgtcaagagcatggtacttgctacaggggctactccccagcagctctgcttaagaagattctgggaatgtcttgagtctccagaacaaggaacaagcacttcctgtgcccagggaaccagcagcttcccacttcttctcacagcaaccttgtggggttgaggttttctgtctgcttgatggaaaagaagagcccagagaggggaggtacctgcctaagttcacacagcagggatttaaagccgggtcacctggcccagagccccgggggctattaaagcttatgaacagagcaagcagctgagcccagggaagggctcaacattctcccgtgatttccgctgtgttgacaagctgcaaatgtgccaggaaag

SEQ ID NO: 121477 - DNA, 1179 bp, Homo Sapiens
ggcattatacaaacaagtttcttttattgtttccatacattcataataactatagaacagaaagattgttttaatttgctgtcctacttcggtgacctgatgagtacactgggaacagtccccagtttgagtaagatcagttgaagcccttactgtataagtccaaaatttaagaaaaatgaatctcatgatgagcttcctcaggcttcggccgtgcgtggaccagtcagcttccgggtgtgactggagcagggcttgtcgtcttcttcagggtcactctgcaggggttgtctgggcttggtcttgcctcccaggtttcaggcgctgcaggttttacatggctgtggtggatccaggctgggattccttctaccttcacagcggtgggagtgctcagaacgacagtctggggtcctttccacagtggacacaaagaggctacgttccagttcttgatccacactcgatcacctggggagaaagggtgaactggggagaataagctaacagggcatctctcatttacccaggctgagattgtttgtgtaatgttttcctaaggcctgtagctgtcgctgtaactcaaatttcacctaactctcggggagttgcctggaagtccccgcaatataggagggggcctatgatataatatttcataaggggaatatcctgttcttttagaaggggtacatctaattttaaataataccatagggagagcctgtatccattttaatcctgtttcttgacatactttccctaaactatttttgatagtttgattcattcgctctacctttccggaactctgaggctggtaggcagcatgcagtttccatgtgatccctgatatctttgccgtcttctgtactaagtcagccacaaatgctggcctgttatctgagccgatccgtaagggcagttcaaatctaggaataagatctcgaagaagcacacgggttacttcatgagctttctcagttcgtgttggataagcctccacctgcccagagtaggtacgcccaagaactagtaaatacttgttacctctacactttggcatctctgtgaagtccacctggagatcttcaaagggggctgctccataagcttgtatgccgggtggaatagctggaccttgtctcgcattatgctgtcggcaggtacacaccgctg

SEQ ID NO: 121478 - DNA, 1077 bp, Homo Sapiens
gggtaccagtgacgggcagcacaggaagggttggcttccccttttgaaggatggaccaaatccttgtggtctttgtccaagtagcctaataacacagggccaaagaggccacattgtccacaaacccgtgactcattgacaaacatatgttatgctgtctactcggtagctccttttcccagttaaagagaaccacatcctgttcctagcttgttactattaatggctgcacaggcgtcacaatcttgaaagttaacttcgttttggggattcctgttgttcgttctgttctagttattatttcaacttgtatcacctaggaaaaggccagttcttaatcttatttcaaaactggtggttgtaggggcctcagatgggttataacacacatcaggtcagtcatttcctgggctacataccttgtactgagtggcattatacaaacaagtttcttttattgtttccatacattgataataactatagaacagaaagattgttttcatttgctgtcctacttcggtgacctgatgaatacactgggaatagtccccagtttgagtaagatcagttgaagcccttactgtataagtccaaaatttaagaaaaatgaatctcacgatgagcttcctcatgcttcggctgtgcgtggaccagtcagcttctgggtgtgactggagcagggcttgtcatcttcttcagggtcactctgcaagggttgtctgggcttggtcttgcctcccaggtttcaggcgctgcaggttttacatggctgtggtggatccaggctgggattccttctaccttcacagcggtgggagtgctcaggacgacagtctggggtcctttccaccgtggacacaaagaggctacgttccagttcttgatccacactcgatcacctctacactttggcatctctgtgaagtccacctggagatcttcaaagggggctgctctataagcttgtatgccggggtggaacagctggaccttgcctcgctttatgctgtcggcaggtaacacccccggccgtaatggccgaattcccgggcatatgtccggtaccgtcgactg

SEQ ID NO: 121479 - DNA, 1518 bp, Homo Sapiens
  misc_feature (392)..(405): n is a, c, g, or t
  misc_feature (782)..(849): n is a, c, g, or t
cggacagcggcggcggagcgcggaatatccggggggacgaaccgcgcggcgggcgcacagttgtctgccgaatacaggcgtggaccggcgaataccgcgcgcccgataaaagggaacaggcgggtaatatacccccgtgcggggggaaacggcggcagcgggatacgcgcgcaccaccggcgactccgtgcggaacataacagcggcagcagggtaaataccgcgcgaaacgacgggcgtgcacaggcaagcatcgttcgagggaccaactgccggcaggcgaaaaaggcgcacaccgggcggcgtaacgcgaggccgggcggaacagaagccgcgagccggccgcgggttaagcgccatcgggcgaaatcgcgaagaggacggaagccttnnnnnnnnnnnnnncgggttttcgttaacggcccccgaagacaatcttctttacaaggccccggccgcgagagctatcacctaccccggcaacagcgtcgtgggtcgcgaaaaatcgttccccgagggggacggggtataggtggcgccgccaaccagggtggcaaccctcggggcccttatcgccggaagcgccttaatggccactcccggtgtggtctcctcgcggggcggcggcgtgcacaacggcggttgtgtccgagagtggactgcccgccacaatcccgggggggaaatatagtgggtgcagggagggttgtgcaacgatgagtcggcgggtctagggagcatgggaggaagtttatgtggataggagtttccgtgtctggtcnnnnnnnnnnnnnnnnnnnnnnnnnnnnnnnnnnnnnnnnnnnnnnnnnnnnnnnnnnnnnnnnnnnnccaaatgttgtttatttgctctcctttacttgtattttgactactcagatagatgattttaatttcttgatgcaatttgaaatatcatttcagaaaactgttgcatcaaataatatacaaccaggtatcagtatgaaaaaggatctttgttcatcactatttcttacaaataaaataacaaataaatgaaactattaaattttaatcttgacagtttttacatatccatgagtgtttttatttaatcaaagtatccttttccgacatcttaaaattatttttatgagtttatgatcacacatgggatgaattttaagattcagaaatatcctttacttacattgttttgttttttaaaactctcttctaggtctacttgaagatttttttcttcgttaaggttcaaatggtggtacttaaaataaagttaacaattacaacagacccaatcacagacaataccagcgtagaaatattaactccagaattatgacttttatcaggagtaggagtaggagtaggagtaggatcaatgtcatcaggatttgcttgagggataaacaaagttacttgtgcaatgttggatacttttgatgtcaaattgcttttatctatacttttaatggcaataaatatgtgggttgcattttcttctgagatattttctgg

SEQ ID NO: 121480 - DNA, 607 bp, Homo Sapiens
ttttttttaaaatcaaatgatttattgttatttataaaatatttattatgctcaatatacatatttcctttcagatgttaacatattgtttgatagccatcattaacacagtacttagcactaaaattgtacataataggagccactgcctcacagccagcccacaaatttcctacagttttcctgtcgatcagttatttcctttgattcattctgtacattcctgaaaaacatctgtatggttttccagtaaaactgcatgagtaatatccatgcttttgcacttaaacgtcaatttagatagacatgcaatttgtgctgtagtaagtgacctaattctcctaccttacaaatttccttcacacaaaaaacagtctgatgctttttagtttttatctttttgttcccctgaacatagtgagtactgcccacttctggtgtagtatcttgagtttagggaagtttttgtcctgtttcctctaaaatgttgttcctgttacatgtgttctgttagtattttccttctatcacttaacaagactctgtattccctcttgggctgaccacagcttctccctttcccaaccaataaagtaacccctcgtgc

SEQ ID NO: 121481 - DNA, 1516 bp, Homo Sapiens
  misc_feature (13)..(13): n is a, c, g, or t
  misc_feature (38)..(38): n is a, c, g, or t
  misc_feature (44)..(44): n is a, c, g, or t
  misc_feature (54)..(54): n is a, c, g, or t
  misc_feature (59)..(466): n is a, c, g, or t
  misc_feature (1276)..(1276): n is a, c, g, or t
  misc_feature (1433)..(1433): n is a, c, g, or t
cagggggcgagcntatgaaaacgccagcacgcgccctnttacgntctgcccttntgttnnnnnnnnnnnnnnnnnnnnnnnnnnnnnnnnnnnnnnnnnnnnnnnnnnnnnnnnnnnnnnnnnnnnnnnnnnnnnnnnnnnnnnnnnnnnnnnnnnnnnnnnnnnnnnnnnnnnnnnnnnnnnnnnnnnnnnnnnnnnnnnnnnnnnnnnnnnnnnnnnnnnnnnnnnnnnnnnnnnnnnnnnnnnnnnnnnnnnnnnnnnnnnnnnnnnnnnnnnnnnnnnnnnnnnnnnnnnnnnnnnnnnnnnnnnnnnnnnnnnnnnnnnnnnnnnnnnnnnnnnnnnnnnnnnnnnnnnnnnnnnnnnnnnnnnnnnnnnnnnnnnnnnnnnnnnnnnnnnnnnnnnnnnnnnnnnnnnnnnnnnnnnnnnnnnnnnnnnnnnnnnnnnnnnnnnnnnnnnnnnnnnnnnnaagaattcggcaagaggtttaaaattgagaaatttatttttttccatgaaatagtaagcagaattaaagaaatatacagcttaaaacagttgaaatgaccttagaattttaatgacaattacacatttatggccaaaggaaaaaaatgaatagtttttaataatgaattcactttaaaatgtttgcttaataattcatctgaaattacatggatacaaggataactgggatctgggcaccttgtaaaataaaataatgccactttatccttctcaaaaaaattgttatcccagtataacagtggtgcggttctgctccccactcacagtagccaccgttctaccatttacaaacgtgtcaagtcagtcttcctgatttgtaaggatgcctattttggttccacttaaaaatatttccagtaggcggtcagagaaaataacttatttagccccactcagagtagaggatcagtatgtcaacatattggtcggtcatggctttcttctcgtgatcactgaggtcaaatttcctcatataattataaatgttaaaagataaaattacatcttcacagcagccaaaaatttgtatattttttatgtatttacaatattgtacatatttacacgaccacatcaaatactgaattgtagaaacaagtgactatctataaaggcattcatttaatgcccaagcgttattttcttgtgcaaacggaaacttttcttaaacttctattagaaagctaaagacagtcaacgttgcgaaggccacatcccatgggtaagagccaaccttttctaaatgtgngtattttcagcaagttctttaccacccctcccctcgtgccgaatcctgggctccgaggccaattccctaaaggagccgtataaatccgaatcatgtacagctgttcctgtgggaatgttatccgccaattccaacacatacaccggaacaaatggangctgggggctaggatggccaccacatatgcgtgcccacgccgctccatcggaccgtctgcactgatatagacgcaccggggaa

SEQ ID NO: 121482 - DNA, 689 bp, Homo Sapiens
tttagaattatgcagattatttattagtcaataggatagttctgattaagaagaacagcttactatttaaacacttttcctttgtctctgttggctgttttttgaagagatgtagttgtctctaacatggtctctggtattctgtaacaacaccttatactaggagcttagtacttagatttggaagagaaaatagtttttatcttgcacattatctacaacccactgggagtggctgcctgaatctctgaactaaaaaggagcctgaccctttatccaaggctcagtacagaaaagggctgtaattgattagcaatgtctgccacagaaacactaggaaacaagtgtggcagggtgacccaggaccagtctaaaatgagcccaagtgaatcattacttttctatgttctgaattatactggcataaaatcgaaggttaacaaaattggagacattagcttttaaaatgtcctttcaagctctatcagactacaaacaccacataagactacttttacaattaaatcattcagtgatttttcactcacaggttatatgcatccacattaaaaatataagattatgattttctttaaactgttatcattatataatcccatttaaacatgagactagtacaataataatgatccatatgttactggagcaggggctttagaattccagat

SEQ ID NO: 121483 - DNA, 565 bp, Homo Sapiens
atcactaaaggtgtgtatctctgtctagagtagttcatgagaaagctgttaatctgccactttgacattttgcttaggatgtcagtagccatattaagatgtgtagaataccttcagaagatgatcatagtgttttgtaatcatttaatgtctgcagccaaatttttaaaggtaatttagacctaatactgctcttgctgtgtcttattaagttaaaattaatgaatgaattctggtaaaaattcaaaaggcactctgtgagtagagagtatcatttaagcttattttagtcacatgtagtatatatctccttaaagctgtcactctcactttcttaccattctcttgatttcttcagaaaccatctagtcatcatctttatactctacctgcttctgcaattatatatcatattatgttttcagagcagttcattgtcaagttggactttaagtgaccattcaagaaaagatgaaatctcacgaacctcaaaacttcattcatgtctttttacaaatgagaaaacccaatgcattaaagattaatactcaatttgattataaaa

SEQ ID NO: 121484 - DNA, 758 bp, Homo Sapiens
ttaaagttagtttatttcagtttctaccttctgacaactcaaggtgcaatatatacacatgtttttcttcacagcaaacacctttgattttagcactgttttgagatcttcacccttgaaactttctcaaccttaaaacagagtttgtagaacatcaccgagcgggacacaagattgcaaaaatgcaacagagaagatactggtgtcactgcacgccacttgggggctaccaacaaggtaatgtctggatgtgagcaccgcgagtctaggaaagagaaagcagagggcgtgtgcatgggagacgccactgatagttccaacgggggccaccaggttcaagaaggcggcaggtcaaccgtgttctgacacatttacatgttttaaggggatccatgtgtgttgtctgaatttctagcttttcctagtgttccaacgtttgccttctctttctccacgtgtccacccagaagaccctaagcaacagccccaggctcaccgggatggcagggactcctccccaacagccaaagccaagccaagctgtctcttgcagggagatctggagtccaccccttagggctgcacctcccagagtgcatgcggtcgtcccccacctctatttcatgagcaaatcatctaggattaaggagggagcgggcgcagccccccagttctagtcaatgcacaggggatttactgacaggcatcccctttttaaagtgcaaagtcccttatagcgctgctcaagggagttcacc

SEQ ID NO: 121485 - DNA, 1268 bp, Homo Sapiens
tttccaatccaagccaacatttattgttgcacaagcctgttgcagtcctgaggggatcttctggcagaggtgtgggtaggaagctgagtggccactggggtgaagggcagacagaggaggctgtgaccagcaggctcctatccagatgatacatgagatggaggcctcctcagccacactccagggagggtggggtggcaagggggattcagggataatggcattaataatacaagtggtaaacaaataaccaagaggatctggctggttacgatacacaaaagttagcagtaagagtccgtgctttcacattcctatcagacagatctgagttcaaatcctgtatgtgtagcagggtgaggtatctgctttctgtcagagcccatgggtgcacatctctgagcctagttacaacagttggcacataggtgggtggacaaggagggcagctcttgattcctgttgcttccacagcacagagagataagtatggctggtgtgacagatcccacttgacagatgaagccactgagacttggagagcaggtaggcttagtccgagacctagcattcgctggtggctgccttctcatttcccagaggcttcagagtccctcagtccttgggttgcaccgtcctcccaccagactgacccaggggccagtccacttcggtggggaaccactaagataggtgtgctctccaagcataaactccagaataacccactttgaaaagctgatagctaagcgtaaagagagaatggggtagtgagctgcatcttcagtcaaatgcctgagtggtaatgcttaacccaaaggaacttgacagcaatggtgaaatttcaggcactaccgtggtgttggtgctggtgaccttcccgggcagaacctttctgccctcaggtcacaccagtgttgtttgaggatccaccggttgctttcctccaattgggcagaagagccagcagggggcagagtcaggatgaaagtatgtagactttttgcccttgattggcgtagggggcctttggaggaggagtctaatgactgagttccacctgcaaccctccaggagaggagctcccatctctctcacttgctagaaacgctccaggcaggctctagggctgcgttctctaggagtgtccggaccagagaccagggggcacgggggcagcactccgagccacagggccggggctgaccgcgcccgggcaggcctctgtccccggcgtctgccggggtgagtgggaaggggcgggaggg

SEQ ID NO: 121486 - DNA, 487 bp, Homo Sapiens
gctttatttgatgaaccagcctatattaatgacataacttccaaggtacacagaatctaatactaacggtgcaataatttattggtataatttctacctccaaaggtaagtaacacaaatgtttcaggattacagtatatattatcaaactagtgtctttgcattaaaaacaaattatagctcagagatagagcttgctgtgatgtttagtttctgaaatgcattaaatttatccttcagtcttagaagaccgtgtgtctcaaattggcatgtcttgcactttctgcagctcaattctgtaaacataaagtgtttaattcctagacattctaaaacaaaacaggtttattgcatcatttagctaattcccaaagaagagaataacacattttaaaccataagcctgtttgaccatgctaaaaccttttttgagctattcaggatcattacaaccccatattcttttgtgtatactgtgcaaatgcaa

SEQ ID NO: 121487 - DNA, 867 bp, Homo Sapiens
  misc_feature (705)..(725): n is a, c, g, or t
tttatctttaattcttttatttctttcttcattatgccaggctagttctaaatgcctaaaatacattaaaatggaacagaaaatcttaaaaggatgttaattttaagtttcttactaatctttcctcatagaaataaagaagccataactgttaagcacattttctaagattgtatataatcatttataggttaagacttttttggcattgaagatagtaaactttttatgaatgtaattattaaagtataatcaactcacatctttgggtttatattggtcttaacatgtttcatagtttgcagtatttgaagaatctgaagatgacaggcacagccgtcacttacccatgaccgtcaccttcctaaagctgtctcgatatctactgtggacactcaggttagcggagagaaaacaactgcattacactactttttaagcaaaccaaagaactttatttggagtaatagctaagaaaacagctttttatggaaactgaaaaagagagcagaggaagtataagagctaccccttaagaaataactttaatagttaaaaaactttcgtagaatcttactaaaaaggaggcaacattagtttaaaaaataactgaacaagaatctggcctaataaccagacctcggattagcatactttctagttatagatgtaaatcttcaaagtacatatattcagtacaagtcnnnnnnnnnnnnnnnnnnnnnagtgccagaccatcctttactttttcatgtccttgaaatgagaagagtaatgtacttaagtaattccttcttaagaatgtcccttaaactataacaacttcatagcatcttgacttagaatataccacattttccaagtccc

SEQ ID NO: 121488 - DNA, 1474 bp, Homo Sapiens
  misc_feature (107)..(115): n is a, c, g, or t
  misc_feature (281)..(289): n is a, c, g, or t
  misc_feature (315)..(329): n is a, c, g, or t
  misc_feature (379)..(522): n is a, c, g, or t
tcctacttatttcaggtgccccgggcggcgggggcttatattctttttttcgttgcgccctcggtctttcctctctggttagagtttcttcttagtgcgccgccagnnnnnnnnngttgtgttttgttaaaaagcccgcgggttcgcccgcgcggcgcttttttttggggatctacctagcgttttttcttcttcgtcgtttccgttggggtcactactgtcgcgctggtctcttcttctttcttggggggcccccccgcctccgacggctttttattaannnnnnnnngcgcccgcgcggcgccgcagcgcacnnnnnnnnnnnnnnncctgttttattgtggggtggtggttccgacgccgcgtggctccctcttcnnnnnnnnnnnnnnnnnnnnnnnnnnnnnnnnnnnnnnnnnnnnnnnnnnnnnnnnnnnnnnnnnnnnnnnnnnnnnnnnnnnnnnnnnnnnnnnnnnnnnnnnnnnnnnnnnnnnnnnnnnnnnnnnnnnnnnnnnnnnnnnntggtttgcaataaatttatttaatcagaacttcagagggttctagaaacctgcatttttaacaaggactgcagatgattctaggttttgattaaaagtgtggtttggggaagcaactttaccctttattgtgtgttaaattacatatacaataaaacaaaaagtcacgtaatggaacaaaaaattgctttatacaaaatattagtagatacccaaatataatatggtcttaaaaataaaatcatatgtatatagttgtattcctaagtacagtagtgcccccctcatccaaagtttccctttctgtggttttggttacctgtagtcaaccacattctaaaataggtgagtactgtacaagaagatattttgaaagcaagagagaccaaccacattcacataacttttattatagtatgttatcattgttctattacattattattaatctcttgctatgcttaatttatacattatactttatcataggtatatatatatggaaaaaacagtgtataaaggtttggtactgtttgaggtttcaggagttcactgggggccttggaatgtatctcccgaagataagggggaactactgtaagcaaaatcgaaagctatacaacaatcagaaatgggaagagagcaaatccaagtataagtgaagacattcctctgaattcccagcattcatcgagcatcaaaaacgaccaatcttttagtccttttcttgtacattattctgtatccacattctctgcatctgattggatccctagattttatttcattttctgtgtgacactctccacagatatatatcattggttgctgctttggaggttgaacgtccttctgggtgtccattgttagcccctacacagcacggaaaaacgtcactccgcgtttccaaatacaacccggctagtccaggtgtcgagccttcgtgccgaaat

SEQ ID NO: 121489 - DNA, 931 bp, Homo Sapiens
  misc_feature (38)..(38): n is a, c, g, or t
  misc_feature (82)..(116): n is a, c, g, or t
  misc_feature (483)..(809): n is a, c, g, or t
agactgtatagtcactatagggcgctactcgtcacagncgaacgaccgagcgcagcgaagtagtgagcgaggaagcggccgnnnnnnnnnnnnnnnnnnnnnnnnnnnnnnnnnnncagtcgacggtaccggacatatgcccgggaattcggccattacggccgggggtatttggaaacgcggagtgagtttttccgtgctgtgtaggggctaacaatggacacccagaaggacgttcaacctccaaagcagcaaccaatgatatatatctgtggagagtgtcacacagaaaatgaaataaaatctagggatccaatcagatgcagagaatgtggatacagaataatgtacaagaaaaggactaaaagattggtcgtttttgatgctcgatgaatgctgggaattcagaggaatgtcttcacttatacttggatttgctctcttcccatttctgattgttgtatagctttcgattttgcttannnnnnnnnnnnnnnnnnnnnnnnnnnnnnnnnnnnnnnnnnnnnnnnnnnnnnnnnnnnnnnnnnnnnnnnnnnnnnnnnnnnnnnnnnnnnnnnnnnnnnnnnnnnnnnnnnnnnnnnnnnnnnnnnnnnnnnnnnnnnnnnnnnnnnnnnnnnnnnnnnnnnnnnnnnnnnnnnnnnnnnnnnnnnnnnnnnnnnnnnnnnnnnnnnnnnnnnnnnnnnnnnnnnnnnnnnnnnnnnnnnnnnnnnnnnnnnnnnnnnnnnnnnnnnnnnnnnnnnnnnnnnnnnnnnnnnnnnnnnnnnnnnnnnnnnnnnnnnnnnnnnnnngtacttaggaatacaactatatacatatgattttatttttaagaccatattatattgggtatctactaatatttttgtataaagcaattttttgttccattaagtgacttttgttatggtat

SEQ ID NO: 121490 - DNA, 1057 bp, Homo Sapiens
  misc_feature (233)..(533): n is a, c, g, or t
  misc_feature (940)..(974): n is a, c, g, or t
tttaggtttggataaaccctgggttttgggaaccaactgctccccttatgtcgcgggtaaaggaccagtaccatgtaacccaaagtcaccgttatgggcacccaaaaatgtgctgttaacgcccaaatattagttaggatacccaatgataatatggtcttaaaaatagaatcaatacgtatatagttgtattcctaagtaccagtagtgcgcccctcaatccaaagtttccnnnnnnnnnnnnnnnnnnnnnnnnnnnnnnnnnnnnnnnnnnnnnnnnnnnnnnnnnnnnnnnnnnnnnnnnnnnnnnnnnnnnnnnnnnnnnnnnnnnnnnnnnnnnnnnnnnnnnnnnnnnnnnnnnnnnnnnnnnnnnnnnnnnnnnnnnnnnnnnnnnnnnnnnnnnnnnnnnnnnnnnnnnnnnnnnnnnnnnnnnnnnnnnnnnnnnnnnnnnnnnnnnnnnnnnnnnnnnnnnnnnnnnnnnnnnnnnnnnnnnnnnnnnnnnnnnnnnnnnnnnnnnnnnnnnnnnnnnnnnntaagcaaaatcgaaagctatacaacaatcagaaatgggaagagagcaaatccaagtataagtgaagacattcctctgaattcccagcattcatcgagcatcaaaaacgaccaatcttttagtccttttcttgtacattattctgtatccacattctctgcatctgattggatccctagattttatttcattttctgtgtgacactctccacagatatatatcattggttgctgctttggaggttgaacgtccttctgggtgtccattgttagcccctacacagcacggaaaaactcactccgcgtttccaaatacaacccggctagtccaggtgtcgagaccaacttccggcgctccccggccgtaatggccgaattcccgggcatatgtccggtaccgtcgactgnnnnnnnnnnnnnnnnnnnnnnnnnnnnnnnnnnncggccgcttcctcgctcaatactcgctgcgctcggtcgttcagaaaatgacgcgggagcgccctatagtgagttatagattcc

SEQ ID NO: 121491 - DNA, 922 bp, Homo Sapiens
  misc_feature (76)..(110): n is a, c, g, or t
  misc_feature (491)..(812): n is a, c, g, or t
tataatcacctatagggcgctagctcttgaagccgaacgacgagcgcagcgagtagttgagcgaggaagcggccgnnnnnnnnnnnnnnnnnnnnnnnnnnnnnnnnnnncagtcgacggtaccggacatatgcccgggaattcggccattacggccggggggactagccgggttgtatttggaaacgcggagtgagtttttccgtgctgtgtaggggctaacaatggacacccagaaggacgttcaacctccaaagcagcaaccaatgatatatatctgtggagagtgtcacacagaaaatgaaataaaatctagggatccaatcagatgcagagaatgtggatacagaataatgtacaagaaaaggactaaaagattggtcgtttttgatgctcgatgaatgctgggaattcagaggaatgtcttcacttatacttggatttgctctcttcccatttctgattgttgtatagctttcgattttgcttannnnnnnnnnnnnnnnnnnnnnnnnnnnnnnnnnnnnnnnnnnnnnnnnnnnnnnnnnnnnnnnnnnnnnnnnnnnnnnnnnnnnnnnnnnnnnnnnnnnnnnnnnnnnnnnnnnnnnnnnnnnnnnnnnnnnnnnnnnnnnnnnnnnnnnnnnnnnnnnnnnnnnnnnnnnnnnnnnnnnnnnnnnnnnnnnnnnnnnnnnnnnnnnnnnnnnnnnnnnnnnnnnnnnnnnnnnnnnnnnnnnnnnnnnnnnnnnnnnnnnnnnnnnnnnnnnnnnnnnnnnnnnnnnnnnnnnnnnnnnnnnnnnnnnnnnnnnnnnnnncactactgtacttaggaatacaactatatacatatgattttaatttttaagaccatattatatttgggtatctactaaatattttgtataaagccaatttttttgttccc

SEQ ID NO: 121492 - DNA, 706 bp, Homo Sapiens
  misc_feature (332)..(653): n is a, c, g, or t
ctggactagccgggttgtatttggaaacgcggagtgagtttttccgtgctgtgtaggggctaacaatggacacccagaaggacgttcaacctccaaagcagcaaccaatgatatatatctgtggagagtgtcacacagaaaatgaaataaaatctagggatccaatcagatgcagagaatgtggatacagaataatgtacaagaaaaggactaaaagattggtcgtttttgatgctcgatgaatgctgggaattcagaggaatgtcttcacttatacttggatttgctctcttcccatttctgattgttgtatagctttcgattttgcttannnnnnnnnnnnnnnnnnnnnnnnnnnnnnnnnnnnnnnnnnnnnnnnnnnnnnnnnnnnnnnnnnnnnnnnnnnnnnnnnnnnnnnnnnnnnnnnnnnnnnnnnnnnnnnnnnnnnnnnnnnnnnnnnnnnnnnnnnnnnnnnnnnnnnnnnnnnnnnnnnnnnnnnnnnnnnnnnnnnnnnnnnnnnnnnnnnnnnnnnnnnnnnnnnnnnnnnnnnnnnnnnnnnnnnnnnnnnnnnnnnnnnnnnnnnnnnnnnnnnnnnnnnnnnnnnnnnnnnnnnnnnnnnnnnnnnnnnnnnnnnnnnnnnnnnnnnnnnnnnnactactgtacttaggaatacaactatatacatatgatttttatttttaagacc

SEQ ID NO: 121493 - DNA, 489 bp, Homo Sapiens
ttttttttcattatttacgtttagtttattgcagagatgaagacagcatactagaagttggcttctatttcacaccgttcacagcactcactctgttctccatttcatccactcacccatgcaaaaggtctgtacacgcaatgatgtctgatgtttcttggtttccatagtgtaacaggaaacttgacatttcaattaaaaaggtaaaatgaagacatttaccatcagactataaaactcctcttctgtaagagaatactatagtacttgaagatatgatttgaaaaaattcatgtaccaaatgaaaggggcaccatttcaagagcactaggactacattaaacttaaatatcttcccacattcttaaaaatgtaactcaaaaccaaatctagtcttaaaaaagctccaatatctaaaactacattaacaggcactatgatcagtgtaaccactgttaatgggcaccaagtttaacagggccctcgtgc

SEQ ID NO: 121494 - DNA, 901 bp, Homo Sapiens
  misc_feature (185)..(197): n is a, c, g, or t
  misc_feature (221)..(265): n is a, c, g, or t
  misc_feature (291)..(291): n is a, c, g, or t
agtgaatatttttaaattttattaatgacaaagcaaaaattaacacagaagtatatatacataggttgtattaaaactaaatgttttaactctcaaatgttttaactctcaaatagaaaacatacacatctattacaggaatcacaaaacttatctccataaggaaactttaaactccagaggcnnnnnnnnnnnnnttatctccaatttcccccatgagnnnnnnnnnnnnnnnnnnnnnnnnnnnnnnnnnnnnnnnnnnnnnatactttaatacctttagtttttagnacaacagttaccagaatcaattttagatacaggtattttttaaccttaatatttaaaagtccaaaattatatagaattaatccaaatcatatagcaaagaattctgaaaactgaatgcacaattggtcacatgatctttaatgacctgcacactaccatcctgcatattggtttcttttatgctgtcgaatccaggtatattgtgaaccgtagttttgttcagtaatgaagataggtgatctccatctgtttctttctcttcagttattactgactcgtttaagttatctttttcctcatttgaacaagtagcacttttttcttttattaattcagattgcatttttgactcaggttgctgagattttccaagtatcatttgaggaacatcaagagactcttgttgaaagcatgtaactaaaccaaagctatctatttgtagtgctttaactgctatagatgaatcagaatcagttgtaggggtgttacaatgttctatatattccttttcagttagatgactttcttcatttactctttcctcctttccttgtagctgatcagagttactacattcttgcaactttgcattaatttgaatcttattacc

SEQ ID NO: 121495 - DNA, 1699 bp, Homo Sapiens
ttttttagaatccgtgttattttatgtatatttctaccacagggcgaaaattcccaaattattcaaacacaatcagtaattaaatgcctaccatatgtatggcattgggccaaaagataaacgtgtgtttacagtacccacatggctttgttctccatttcccacagatgtaggcaaatgtgtaattaactaacatcatgcctcctatagggccacatgtcacttccaatatcaggaaaatgacctgttctgaagtgctcatccattttccaggcccaaccagaccccaaaatacatcgtttatgcagaggacttggaacacattcaaaacagtacatactttattttcaagcatacaagaaacactaaactcttccagtgccagtacactctccatgaattcttcatatagaattgggtatattggaagcaagttgtttctggtgaaatttctgatgatcaggaatcaagactcagtagccctaaaggaagagagttttgtatccaatatcctcaaaaccaagacatagtatattttactttcaaagtaaactataaacattttaccatatccttcaatccataaagcatctcactgtgaaatgatccatgttgactctgcataattctcagaagtcacttcaagtgatgagggactaactataaaacatgcattatttgaagtacatgagcatgaaacatcgaagtctacaacttatcttaaaagaaagagtaagttccaccagctttttattgtttgaataacagaacacacaaaaccaggcagagaagtccgcaaggagatgatgatcatatttcactgttttttggccttttggtccttcatctttcaagcacttactgtattttcctttagcgatttaaacatttattttgatcacaaatgcaattcaagtgtgaataaataaacgtattatcttttagcacccttccccgcttgttcctttaaatagaaaaaagtgctaaatgtctctttatagcctattggccatagctgtcccacctatggttttaaaaacagactgtaacttgatcttctgaaatccttctcgaaccacaactcgttctgttaaagaaatcctaggaaagaagtcctactgatattgtcgatagtctccaaaaggtgaggaaggtaactgagttgaaggcaactgggaggggtcttctgcaaactgaggaccattgggaaactgtgcagaggcaaatcttgtcaacaagataccagctccttcaattaaagctaggagaatgccacccattgcggctgacccaaccatggccactggtccatttcttgctgccagtatggctcccgttaaggcaccacttgtgatggagttccagggatcttcctttcctctgacttgaaccatactacagtcaatcatggaaaacagccctccccaaactgcaaagctacctcctaactgtggagccctggttttaatagctgtcaaactccctcgtagtctgtggtttactcccactggagaattgcgaaaacctttgattgcttgaaagataccaccaccaatggtacccatcgtaaaggccccaccacagtcatccacaattcgccatgggcaaggctctcgcgcgtactcctccatcttgactccaatgccgcccccggccgtaatggccgaattcccgggcatatgtccggtaccgtcgactg

SEQ ID NO: 121496 - DNA, 588 bp, Homo Sapiens
tacacactgtctcgacaagccatgttctttcctccctcttcgtgagcactttctctggtgatgagttagtatggactacttgaacctcaaaactgggcctctcacccaaagccaaatgaagtagcgtatgccaggatgatgtttcttttgggccgttggcagtgagactgctaagcaggctgccttaggttttgctgtggcaatgctagcagattgttccctctttcaaaggggcaaaaatatcattttggtatgataactgactttctatttacagtttctggcccccaaagacaaaccaagtggagacacagcagctgtatttgaagaaggtggtgatgtggacgatttattggacatgatataggtcgtggatgtatggggaatctaagagagctgccatcgctgtgatgctgggtgttctaacaaaacaagttggatgcggccattcaaggggagccaaaatctcaagaaattcccagcaggttacctggaggcggatcatctaattctctgtggaatgaatacacacatatatattacaagggataatttagaccccatacaagtttataaagagtcattgtt

SEQ ID NO: 121497 - DNA, 3431 bp, Homo Sapiens
agcagcaattcacagagagatgagtcatttatgcctttaatgttacatgtacaaaactgtgtattagtgacgacttatgagggtgctgaagacagaggtgactgggtaccaagaagtctgtacaccaaagaggaactggaactcaaggcaagaatgaggacaagaaaaaaagagaataagggctttgttattttcttatttagtaaaggagacaccatccacaaagatgaaagctgacttaggtagaaatgggaaagaccgaaaagttacctaagtgttttaatataacgaaactttctctctttgaggcttgcaagtagagaacagtgaagtgatataattctaactactgtagtaaatttctcagtttttgagtttctaaaggttcactgatatggcagagattgggccaaaaggtcttttcttcatgagaccaccaccataactcactgcttaaaaggagtatgaagggaaattgtgctccccttcccaccccacttaaagaaaaccacctatatacagaggcagagtaatgtggtaactagaaggcctcaactaaaaagagaagtgagtccgtccttacccatggttttcctaacccagctgcttgttgggaggaagcaaatgctactgcttgctcaacacaagttgtgacagctgttggaggatcaggcaaaggaggactctggaaagggttaagaaactcatcaataaccatgccatggttccacatgagacactaatcacatcacaagggctgcaactgtcactgatatactaggtcaagaaaagatctactttccagaaacttcaaagcatgtatgtaatatacaaagatcagtaagaccacagaaaaaataatacaccaaccagaaaataacaatgactctttataaacttgtatggggtctaaattatcccttgtaatatatatgtgtgtattcattccacagagaattagatgatccgcctccaggtaacctgctgggaatttcttgagattttggctccccttgaatggccgcatccaacttgttttgttagaactcccagcatcacagcgatggcagctctcttagattccccatacatccacgacctatatcatgtccaataaatcgtccacatcaccaccttcttcaaatacagctgctgtgtctccacttggtttgtctttgggggccagaaactttttggcttcctcagctgtgacagaacttccagaggcttcctctttggtgatcagagtaattccatcctggacaacaatttcccagaaatgatttaattgtttaatttccactttctcttgaagggctttcaggaagttgttaaagcgctgctcttctgaaaacttaatggcttcttcccggaaggctcggatgcagtctatgctcttcataaaatacggtgtttcattagtatccaaaaactgttcgatgtgatttatgagctggttactcgcttcctcaaagctggccttcttctgtttcactagaacacggaagttttcagcaggattcacacttccaacagaggtgacactgccttcagccagactggagacgctgaagtgggctcccccttgctcagtctttaattttttagctgtaggtccatcttcatggttgtcttggaaaatttcctgagcagtcacttgatcctttttcttggcttcaatcagaggaaaaagggtctttattttagagagaggaatctgacttttcgttgtcacctcagcgggaggattcagcatattccaaatatgctgctgaattgggggtagaggctcccggggatgtaaagctctgtgcagcagacactgaaataatctctgaaatcgaggatttgggattttggtggttggaaacaagtcttcaagggtgtctgtcttctcatctttctttgccaagctcatggagtcaatcaaagcatcaacagcattcaactgtgcctcggtgggagcatatttcttactgtttttcaaggatgaaaacatgtattgccgcaagtcttccatgaaaggcagctgcacatacactaaacactcatagttatgcttgatatgaggaaaagccacgccgacttgaggattagctcttttgtcataagcatatcgaactatggccaccatgtctaagtcatccaaagcatgaatcagggaggaaagtgcaactgcagctgcctcatcatctcttgctgcaaagacctttagaacttgatttcccatgaagaatcttctctgaacctgagaagatttacaaaatcccaaaacagagaagcacttcccctccgatttatatttcatttgttcctcatccactttagagaaaggaactatatcacttccatagcggaacccttgaataatatcctcttttaaaacttcagtttcatcatcatcatttaagcaataaactgtttctttttgtatatcttctttttttagggtttttgcatccacaactgtccaagtctttttaactctctcctgtagaatcgatttataggctgcaatccttatagacaaattggagccaatggtcagtcggcagggccagtgaatggaatgcctctcaattttcttgaagacgcacagttttctcagactctcactgaatgaataaatttcatccaacccatcttcacctttctaaagatatcatcaccattttcactatctcaagaccttctttttgctgttcggtaattccttttagtggaaaggaaggcccatggccacctaagcgaaaggggccatctcctctgtccccacttccatcttccttgccaagtgagaaaggcaagaagaattgcagggagatgtcacatttcttcaagctatgaattataatatccagctgacttttgctgaatcggctgctgaggtcagtgaatatttcaatatgcctcttctcaaacttctttcctattgtttcatgttgaatcacatccatgctcacgattagtgcatccaggaagtcagcctgttgagaacctggttggattttgctttcaatgtcctccagcaaatcaaaatctggtagcatcagatgtctgtgcactgtgatgttctgatactgatccccaccagaaaggggattgtcagtgccatctgtaccaaacaggactaaagcaatctcatccttgttctcagcaaacacctgtcgctgtacaaacatggttatcaccttctttgcttgttcaaatggggattctataccaggaatggagttactcatggtaaagcccacgtccatacacagcacaacagctgccttattccccgaccgcaccatgttgccggtcctcaggcgctttggtcgcttcttccgggcgggaacctgccgtgtcgcaactcgcttccggtggaccctcgtgccgaattcgccacccaggcctcgctacctgagaaccgttagagtactgcc

SEQ ID NO: 121498 - DNA, 783 bp, Homo Sapiens
  misc_feature (84)..(84): n is a, c, g, or t
  misc_feature (183)..(183): n is a, c, g, or t
gaaaggacggccacagtttttcttcaggactcttcacttgaaatgaataaaaattttcatcccaaccccatttttccacctttnttaaagatatccatcccccatttttcactatctcaaggcctttctttttgctgttcggtaattcccttttagtggaaaggaaggcccatggccacctanagcgaaaggggccatctcttctgtccccacttccatcttccttgccaagtgagaaaggcaagaagaattgcagggagatgtcacatttcttcaagctatgaattataatatccagctgacttttgctgaatcggctgctgaggtcagtgaatatttcaatatgcctcttctcaaacttctttcctattgtttcatgttgaatcacatccatgctcacgattagtgcatccaggaagtcagcctgttgagaacctggttggattttgctttcaatgtcctccagcaaatcaaaatctggtagcatcagatgtctgtgcactgtgatgttctgatactgatccccaccagaaaggggattgtcagtgccatctgtaccaaacaggactaaagcaatctcatccttgttctcagcaaacacctgtcgctgtacaaacatggttatcaccttctttgcttgttcaaatggggattctataccaggaatggagttactcatggtaaagcccacgtccatacacagcacaacagctgccttattccccgaccgcaccatgttgccggtcctcaggcgctttggtcgcttcttccgggcgggaacct

SEQ ID NO: 121499 - DNA, 993 bp, Homo Sapiens
tttttttaaggtgaaatcacctatgttttattataaaaaacatgtgacacttataataaacccagtaaggagcacatacaatttgccctgggttcccattttctgagcgatctgtgtttgcttggggtggaggcaccgggaggtgtggccacgtggcttcataaagctcagctgcggttctccgtggccacagtgactctgctccgggtacccagtccccgactccttggcctcccaggggccatcccgggggtctcggaaggcacagcctcggttagctttgacttcttggtgtggctgaaactcagcctgtacaggagagctgccattgctgccgcggggcctgcccaggtgtgagcacacaagctcacccgggcccaccctgtgccctggagggcggctctggcggctgcacccatgtccaagtgacaggcatcacctccttgtgccccagagtttcctctaagtccggccaggccaccgtcccttctgatccggataaccagcgaatactctaattccgttaggcgtgtcctgagccaccctctggaggaggcggcatgcagtttcatatgcgtctaacggcctccatccaacaggacaggcgggagaacggcggacggcctgggcgtgtggcaggggctgcttccctcattttaaacgcgcctacagggtcactatagcaaacaaaattcaggagagaaggggccgggccacgcgtccggcgggctctagggcgcctgtcacctgaggctcacacccaaggtctgtccctacaggtggtcccacttcgacaggaagttcctcagcagggtcctcatgagacggtcggcccagaagtctcgagaccggatcctgaatgtcttccacgagctgaacctgaaggatgccatcagctacgtggctgaggtagcagagccgcttgctctgccggttcggggctgcagcaggctcgggcactggctgtgggtgccatggggcagtgaggaaacg

SEQ ID NO: 121500 - DNA, 689 bp, Homo Sapiens
accgtcccttctgatccggataaccagcgaatactctaattccggttaggctaaaaaaaacctcactctggtcagcttggctcccacaagtctaagggctcagggtgtctgtccgcccctgcccttcctgcctgtgcagcctgaaggtgcccccccatgtggccaaagcccccttgcctgaccaggcctgacacccaccgtgtcctgagccaccctctggaggaggcggcatgcagtttcatatgcgtctaacggcctccatccaacaggacaggcgggagaacggcggacggcctgggcgtgtggcaggggctgcttccctcattttaaacgcgcctacagggtcactatagcaaacaaattcaggagagaaggggccgggccacgcgtccggcgggctctagggcgcctgtcacctgaggctcacacccaaggtctgtccctacaggtggtcccacttcgacaggaagttcctcagcagggtcctcatgagacggtcggcccagaagtctcgagaccggatcctgaatgtcttccacgagctgaacctgaaggatgccatcagctacgtggctgaggtagcagagccgcttgctctgccggtcggggctgcagcaggctcgggcactggctcctcgtgccgaattcgccacccaggcctcgctaccttaggaccgttatagttactg

SEQ ID NO: 121501 - DNA, 513 bp, Homo Sapiens
  misc_feature (116)..(160): n is a, c, g, or t
gggcttggatattggaccctgggacagagcagccagttgttcatatactgcccgaagctgttcctgtagttctgctaagcgatgagccctttcttcctctgagtctgagctttcannnnnnnnnnnnnnnnnnnnnnnnnnnnnnnnnnnnnnnnnnnnntcagaggagctcctcactgctactttcctcactggaggactctgaagacgatttggccaagccagggggcatggcagtagagactggtaaaggccctggttctagtggttcatctggcatcttggcataacggaactcaaatacatcctgtagctttcgtgccattgccacaacatcgtgatctgggggattgtacttatagcagttggagaacataagccgtacatcagcagcaaactcctgtgcatcccggtaatcacggttctccatcttccgcttgacagtgctgaggtccatggggtgcttaatgatgtcatggtagtcatgcaggccaagtgcagaagcatccactg

SEQ ID NO: 121502 - DNA, 2957 bp, Homo Sapiens
  misc_feature (141)..(165): n is a, c, g, or t
  misc_feature (489)..(504): n is a, c, g, or t
aaggtaactcaaaacttgaataatattttctttatttacaagttagaatcaacaaagacagtccaggggaccaaatggggagatgactgaaacccccagggccccaaatggagcggaaggaaaaagggaaaacagagtagnnnnnnnnnnnnnnnnnnnnnnnnngagctcccccttcttccctccccatggaggctgaggggaccacggccccaccctccccccagccttacctagcttaaaataaattagaacaaacaatctcaaaacagggcccttagaagtgaatagggcagctatggcctcaggtaactccagatcagggctttgcacactcccacccttgccctgccccattttgaatgggggctctgtgtccaagagatcactccccaatggggctgggaattcaatgttgttttgtccatgtccctccttcagtaaatgtccctgcatccctcccccactgcagagccagctctcctagannnnnnnnnnnnnnnntgagatgaagaagtgtcacagcaaagggggaaggggcaggtggggcagggtggtctaggggtccggtcctgcggagccttcctgccccatctggcctgaccccttagcctgagtctgaatcactggtgtctgaagacgacgacgaggaagaggaggagctggaatctgagctggagctggaagcgctaaggcgtgacactgctacttgctgtgcagaggatgactctgttttctcattcgctttcttggggggctttttagtagaattgagctgtccgctgacatcttgtaaccgcttttctaattcccgctttttctccaaagccagttcctcctttgtctttcccacaggcttcttaatggtgtagggcttccggggtttcttacgtaggcaggaaaggacatagcgctcaagctctctaagtgtggatggcttgagtgtttcaaaatcaatctcaatctcttctgggtttgaatcacgtaaagagggctccctggcttggattatatgcacaactcggcccagcttctccccaggtaatttgttgatgtccaggctcagctgccgcttctcatcgtaactcatgggcctgctctcttcctcctcctctgaatcataacctgtaggcagggcaggtggggctgtctttgtggcctttttggggagcttggtgccacttcctccagaaggtccaaagccggaagggcctaaagcagcactgccacccccactgccacttgctttcttggacttcttaggttgaggtgggcggggtgccctaggccccttgtcatcttcatcggccccagctcggcctcgatgcttctctgccttccgtttcttcttgtttctcttttttctctctgtttcctcttgggcttggatattggaccctgggacagagcagccagttgttcatgtactgcccgaagctgttcctgtagttctgctaagcgatgagccctttcttcctctgagtctgagctttcactctcttcttcctcctcgtcctcctcatcttcctcctcctcttcctcagagggagctctcactgctactttcctcactggaggactctgaagacgatttggccaagccagggggcatggcagtagagactggtaaaggccctggttctagtggttcatctggcatcttggcataacggaactcaaatacatcctgtagctttcgtgccattgccacaacatcgtgatctgggggattgtacttatagcagttggagaacataagccgtacatcagcagcaaactcctgtgcatcccggtaatcacggttctccatcttccgcttgacagtgctgaggtccatggggtgcttaatgatgtcatggtagtcatgcaggccaagtgcagaagcatccactggtttatagaaaggccaagcataggcagcatgcttcttagagagtaactccttcaaaatgccattgcaatgttttaactgttctgaaagctttcctttcttagagctctggtgttgttgctgagagtcaggcaagtctttgcgtgggggcttgatggggcgaccactctctctacgcatagggggaagccgtgctgccttaggctcaagactcccaggagggctagctggagaaccaggagccaagatggctgtaggtgtaggggtggtagtatctgctttccgctttacgccttttttcttggcaaggggctgggctggaggagctgcagtaacagcaaggagcgggggtccagcagagtgcaaggacttgagaagtggagaggaaatgactgatgggtggggaatgttgaggacagtggtaggtatctcaggtggaggagtatacagggctgtgtgtgacacagaagagacggcaggcacctgatgggcactggtaacactgccctggagcgctgccaacttggcccccttcttgtggctgttcttagggatggtcactaccagctcttgttcttcttgtggcattgatgcaaccttctgtaggaatatcttttccagcgtttgtgccattaggacaatatcatcagtgggcttgttgtaaatgtaacagttggtgaacatggtattaaaatcttgcatacactctgaagcagcccaataataattgttttcaagtctcctcttaatagtacccatgtccataggctgttttataattttgtgataatccggtagacccagtttgacagcatccacaggctgccggaatggccatgcgaactgatgtttccacagagccttcatcactaccttgtgtaggtattgcagctggttggtaactcgtcctggctttttgggattggacacctccgggggtggtgggttggcaggggtaagttgcaaagcaggcaccgaagccattgtggggctctcaaagccctcatacaagcggcacgaggcctcgtgccgattcgccacccaggcctcgtacctacctaagttt

SEQ ID NO: 121503 - DNA, 1488 bp, Homo Sapiens
cactttatatagtttttattcagctaactactttctataaaccatgtgacagaaaatgaaattaagccacttattccacataaaccaatactttatcaaagttccgcattttacaagtcatgttcaaaaaacacacacaaattagcattttgtacacaaatgtttatttctcaattaaacattccctttaaacacaaggaatgagttctaaatcttcataaagatgaattaaaaatgaaatccctccagtatagtgtatataatcactgtgttcttggtcactactggcatttactgtttaacatcaaaaacaaagacaggttatttaaaaatcatgctactggatttctagctcttcctctatgaccagttctacactgatctgcaatgtttaaaagtttacatcaccaaatcaaagcaagtttaaggtgtgaagtagctgtgcattaaacacaaaataaacaataaaattataagatatagtcaagttcataacgaatataggtgttcttatcatcgttgtagattcttgggtaatgtgctatgagagcgtcctgggaaccaatgtagatggagttgtaaattttccaatatacatctctgactttccgggctgggtgaaacagaccctgtaaacaatattgcaacattctacatggtccaatagcaactctcaggccctctagggctcccataactgcctgaattacatgaggagatgtctcaaacacattgggccatacatagttcaacaagtgattcagcgaatcttcacaaccaaatccataaaccccaagtgacatgtgctgtaccactgcactagccgtctgtctgtgtacaaggtctctatccattaaagcatcttcaagtaacggtgttacggcataaatgtagtcttttcccatttcaccaatatattcaaacaagaaggaaagcgattttaacactccattttgaacattcagttcaggaactctgtattcattcattaaggcagggagtactgtaaagggtgaacatgtttctgcaacaatagctattgctacagtggtacaaactctgttctgcctttcttgaactttgaggttgttcagaagtgtagccaatacatcatgagggccaatggcctttgcaatataaccaaatgtgttgactgtggctctacgaatagcctttttgtgggcttttaagagctctaaaagctcaaagcaaatcctcatccactctcttgcagatacatattcagctcccctgtcagcaatacgaccaacaagatcaatacaattctcttgtactttttcatgtctgttctttaagatgggggtgagtctaggcagcagatctttaattggtggagtcatcttatgcatacctatgacatttacaatggccttcagtgctccaagaatgctgcccaatacttcagggtactcttcacccaaatactcatacaatacaacacccaagtgtcccatcaatttttcctat

SEQ ID NO: 121504 - DNA, 1502 bp, Homo Sapiens
  misc_feature (170)..(246): n is a, c, g, or t
  misc_feature (339)..(339): n is a, c, g, or t
  misc_feature (355)..(355): n is a, c, g, or t
  misc_feature (1111)..(1367): n is a, c, g, or t
  misc_feature (1428)..(1462): n is a, c, g, or t
atataggatactttatttacatcagagtgatctcacattatccaatccattaacaaagtcaacacaggatggaagtatagaatctaacagttgaagagactaagatcctaatcccttgttttgccacttgctagtgtgacaacagccagttaatctatcatatcattagnnnnnnnnnnnnnnnnnnnnnnnnnnnnnnnnnnnnnnnnnnnnnnnnnnnnnnnnnnnnnnnnnnnnnnnnnnnnncttatgtgtatgtaacttatttactataaatactagttgactttactttatttcaaaaaatataaagcacatatgacaaaacattaacacatngttatttctgggcggnatggtacttatattttatacttttctgtatttaaatttttcaaaataaaataatgatcctatatacttttaatacaaaatcacatatgtagggcatcactttatacgcagggaatctttacaaaatgaactatgtgctatcacaacaaactccttagaacaatagtttataacaaagcagaattccagacaagaactacaggtcagaaatggaagggatgtcggaaatctaatctaaacctctgactttctagactaggaagctgcttgagtggcttttcaaatttacatccagctagttaatgccaacgccaacagaaacaccctgatcctagtttcctaaaacggtatttagtataaatacacatgaaaatttttcttatttttgaaatttcaaagtccaattttataacacaattttacaatgcaaattcttgctgtttcactttctggattcagctgaatagttttgtgaaaatactgacaaacttgccttcacgaactgacttcccaagaacaaattgttaaaactttaacagaaaaatcagttaaaggtgctcatcaagagaatccttttcatttggtataaatccaaaactatgaaaataccttttgtattatgtgcatgcagaaaattaagaatttattcaatttgcagaaataaatcagtgatataatgggaacatttaaaattttatctctggaaaataattccaaatcatctatccaaaattataggccgggcacagtggctcannnnnnnnnnnnnnnnnnnnnnnnnnnnnnnnnnnnnnnnnnnnnnnnnnnnnnnnnnnnnnnnnnnnnnnnnnnnnnnnnnnnnnnnnnnnnnnnnnnnnnnnnnnnnnnnnnnnnnnnnnnnnnnnnnnnnnnnnnnnnnnnnnnnnnnnnnnnnnnnnnnnnnnnnnnnnnnnnnnnnnnnnnnnnnnnnnnnnnnnnnnnnnnnnnnnnnnnnnnnnnnnnnnnnnnnnnnnnnnnnnnnnnnnnnnnnnnnnaactccatctcccggccgtaatggccgaattcccgggcatatgtccggtaccgtcgactgnnnnnnnnnnnnnnnnnnnnnnnnnnnnnnnnnnncggccgcttcctcgctcataactgtcgtgcgctcggttca

SEQ ID NO: 121505 - DNA, 585 bp, Homo Sapiens
cgaatccctcctcctcttctttacctctctcgcttctcctcaggttctctatcgacgagtctggtagctgagcgttgggctgtaggtcgctgtgctgtgtgatcccccagagccatgcccgagatagtggatacctgttcgttggcctctccggcttccgtctgccggaccaagcacctgcacctgcgctgcagcgtcgactttactcgccggacgctgaccgggacttgcttgctctcacggtccagtctcaggaggacaaatctgcgcagcttggtttttggatacaaaggaccttacaatagaaaaagtagtgatcaatggacaagaagtcaaatatgctcttggagaaagacaaagttacaagggatcgccaatggaaatctctctacctatcgctttgagcaaaaatcaagaaattgttatagaaatttcttttgagacctctccaaaatcttctgctctccagtggctcactcctgaacagacttctgggaaggaacacccatatctctttagtcagtgccaggccatccactgcagagcaatccttccttgtcaggacactccttctgtgaaattaac

SEQ ID NO: 121506 - DNA, 2180 bp, Homo Sapiens
aagctaattcaaaatgcgttaatttgtaaatcagaagattaaaccttgttaaaatttacaaagaatatgccactataagaagaagtagctcaactttatttcagtaaaatcaccaacaaaacaataaaaagccaaaactaaaaagacagttttaattgtgagctgaagttttatatttctttacgaattccatttaaaaaagagaaatctctaaaatcatcaatacgcaggtctttaatccacttttaagtctttccccaccagcattgcagtcacgggatgcatgcttgctttgtgctcttggtaggttcggacagcttgatcatgggatttgtcaaaggcagcaagatccttgaataagggccgggtaaacttcattcttccttgttcagttgccatctttagcgccaaaggaattgcgtcctcccacttggattgaatgcagagccgcagccatctgaatcgtatttcagaattgttaatggcattgaagttgtacacctcttgcattcgctttatgtgccccaatggaagaggtgccctctggagcgtctgtgctaaaaactcattcaattgatgagaagagagatccttcaggtctgtggcattgaatgaatttaaatcatcttctttggcagtaatccatctttgacttaaggcaatacaagcatttgtcagagtcatatcataattgggctttatgggaggcagtccaggagagtagagccaggcattccaatcaacttgattgagaacatcaaccttatctttaaaataggaatacaggaaatccttccagtcatcagtagttatgctcttataggaaaacttctcaacataagcttttaagaatcctaggaaaatctctggtcctccaagcagttgttcaaggtaaaaaagtaaagcaaagcccttctcatagggaactgaagaataagctacatcagggtctatatctgtcagatcaaccacaagtttggtgaaaggatgtgtctccccaaatgtctttaccgaattctgtagttctccccatcctcccagagcattaaaatgtctgaacttttcaccaaacaatcgtccgcaaatgtggcgttccaagtacacagtatgtccctcatttaaccaaaagtgatcccaagttttgttggtcactagattccctgtccagctatgagatatttcatgtgcaatgacattggagagtgacttgtcgcctgccagtagagtaggagttacaaaagtaaggcaaggattctcccatgcccccataagggaaggatggtggcaggaccaataggtcatactgtccccatacatacggtcctcccagatcttctgctattttaagcatagattcagtctcagaaaactcataagcagacttttccacctgctctttctcagaccacaccaaagttcttgggccaatttgcctgctttctaaagctccaacaactaaagcaatcaggtagcagggtattggaactttttggatgaatttgtatattttcctgcttgggtcttctgggtcaggtgtttctccatcacgaatagcactcataagtgccaccagttctttagggacagacacctctgcagtataggttaatttcacagaaggagtgtcctgacaaggaaggattgctctgcagtggatggcctggcactgactaaagagatatgggtgttccttcccagaagtctgttcaggagtgagccactggagagcagaagattttggagaggtctcaaaagaaatttctataacaatttcttgatttttgctcaaagcgataggaagagagatttccattggcgatcccttgtaactttgtctttctccaagagcatatttgacttcttgtccattgatcactactttttctattgtaaggtcctttgtatccaaaaccaggctgcgcagattgtcctcctgagactggaccgtgagagcagcagtcccggtcagcgtccggcgagtaaagtcgacgctgcagcgcaggtgcaggtgcttggtccggcagacggaagccggagaggccaacgaacaggtatccactatctcgggcatggctctgggggatcacacagcacagcgacctacagcccaacgctcagctaccagactcccccggccgtaatggccgaattcccgggcatatgtccggtaccgtcgactg

SEQ ID NO: 121507 - DNA, 546 bp, Homo Sapiens
ctgaatacttcacaaagtaaattatccctgtgctcccagtagaatatcctcatctggaataagtttgcacagaatttacttagtgtgcaatttgtttcttttatttttatctgacttatttctatattataaaatatttaggattttaatctggctatgcatttctctccagctcctttcttccaaggaatcctgttgaaatgatacggtatacttctttattttgctcttaggcacctcttccattggggcacataaagcgaatgcaagaggtgtacaacttcaatgccattaacaattctgaaatacgattcaggtacatcattttaacttgtctctgtggaagaaagcagaaaactaaactcctttgaaagatggagaaagggaatgcagagtatgagacatacttgagtcttgagaattccttgtcaaactgactgcttctatataaatacttatagtggtatttaaggaatagttgcaatatgtaatctggtagtattaatctttttgttagactttgctctaaacctctcttgccttaaa

SEQ ID NO: 121508 - DNA, 1439 bp, Homo Sapiens
  misc_feature (876)..(888): n is a, c, g, or t
gctggtaccggtccggaattcccgggatatcgtcgacccacgcgtccggatttaataggttgtaaaaagagttgttccaaattcagactacatctcatcatataaataatattatgaataataagggtaaaagattagccaacaaaagctaatctagtacaccccatagaggtactccaggtgtcttggttttggataaatttttatagtggagaaaggttactttgatctctcaataattgcttggtacacttcttcctaggcaatatgctcatgataccctcttcatgtgacctattcctcaaatgctgcattctccaaaacttccttacctgccttctatcccctagtcattcttatcaatacttccaaaatataacctatctcaagtgttagaaatttgctttaactaatttatattaaagtgttagtgactatagcccttttatctctcttaaagagaaatctgcattaaaagcaaacacattgctgttagctcaaattaatgtcagtgagtagaatcttaagctttaaaacaaaagtggaaataatttaaattagtgttgatgggactattttgaggcaagagataccattaagtgacctagcttggaaatctgccccctttgcccaaacccatgtgatgtctgaaactactgtatattttcaatgaccttgagaaagggagctagtcatttgtatttatgggccttatgaagtcagggcctgctgatcctgttttttaagttcaagcgcaatgcctgaagcatcctagatctccttcaccctcattctacctgacagacagctaggtctgtcttccagctctttctcattgatactacctttacataagaatactatccatgcttgttnnnnnnnnnnnnngtctttccccattttactgttacaatttttcaagagctataaaggtagaaaaagtattccttttcattattctaaaaaatatgtcatttttaaatagctggcacttagcagtttagttttccaaactttattctgaatcaaattgctgaggtgattctaaatgtctaatgttgatttatcatataaacatctaattagaaagtgtttatgctaaagacttgtattttgtggcattagttcttcatgtttcttttttatatgtttattaaaattgttcacttccaaatgagtggaaaagttgctgttgttgggatgtacagggcaagtgcacttggttagagcatgaactgggaatttcacattctctgatgtgctttgcactctgctcttgtagatttattttgtttacagtagactgatgtcagtttttgtaaatgttttttcttagcactttaactgtgagtgtacaaactgattttaaatgtagtggttgtatattttggttataaattggagatttttaataaaattaaataattctcttttctgtc

SEQ ID NO: 121509 - DNA, 1312 bp, Homo Sapiens
  misc_feature (142)..(142): n is a, c, g, or t
  misc_feature (1209)..(1209): n is a, c, g, or t
caggcccacactttaattaatgggagaattgaggctactaaacacatactttcaaggtatgaaaggaaatttgaaccactgttaagaattattctggagaataaaaggatctgaaggtggcatcaagagaatcacccatctnccatatatgggagctactctagaaagaaatgcaaaaggtatatttcagtaatcttttcccaacttctctgttcccctgacaatactgagatcaacagaagcattggaaggtttcttttagataatagtgagagatacaggcagattgctagccaaatacagctctgggttactgtgataacacaggttccttcgaatgtatttattttcccaaattaaaaataagcagggatggaagtagttattatgcatttttcaaattctcctttcaacagtctatataaatgttgcagaatgctagactaggatgaaaagtaggagtcatgagaactgcagaagcctgagatcctaaaggaagtccgtaccatctgacttggcaatgtaagacacacacgttagtgtggggcacaaacgtggaatattaggagagagctggttccagcaccaaatccagagtcactcggggaaggaggtatggtggcaacactttatgcttaatattcaattctgctccagtagaacatggtacccaggagaacccaaaaagtccagcagagaatggcaaatccaaaccaggcaaccccccaggcgtgtcggttcattggaccagagatcagttcatagcagccctgattgtgataaaaaccaggcacgcctagtttacaagcctccaggttgagaggttctttaagattgttcataacacagcattgacgaggccagggatagtcagcatcattattctcagtccggaaggcagatgtgtatttttgccagtctgatggaccatttacgccacagcaattgtcctggagcatgagcctgtcccaggttttggtgactccattgtttttccactggtcatcattgtttggagggctgttgttttggtactctctagcatctgcttcaggaagaggttgggtgtgaaaattctcgttgtgttgctgctgtgatacagatgcacttcaaggcatattctataacatcagaatgaatatgctagaagattttctgctggactcatgatgctatatgcctagacagacagcagagagcaatgccaantatgcgatcagcagccataattctcgtgtcgtgctcagcatggtaaggtgtgtgtcaatcaagagagatcgcatcggcatgcgcacacatatcattcaaatcg

SEQ ID NO: 121510 - DNA, 1927 bp, Homo Sapiens
  misc_feature (1822)..(1822): n is a, c, g, or t
  misc_feature (1901)..(1901): n is a, c, g, or t
tttaaaactatgtcaaacattttatttggtgtttcatgctatgttgatttaaacaaattaaacaagtttgttgaacagctttcttttctaatataatgactatgtgtacatggacaactgaaaacagggaaaacccccaaattaatgttttcacaaattacaagccattactaaagaccatatgcctggattaaaaaaaatagtccaatagatgaagtctctcattcaacctagcagttcaaccaatttctcttttaataaaagctgcacattacagtggtataaatttatcttttaaacactccacataaaaacatgtgcaccctctccttctacatttaatcattagtagtctctaaaatggtaaaataaaactgaatttatattagcaaatgaaagtgcaagtttgtacagctaggctcagcagcaaaagtgaagaataagaatgaaaggtgaaaagctgacagatgccacgcagagcaaggacttccatgaaggtccgtgtcctgtgtgccaaacacagtcaacattccatcattttctcattgctcttaaacgagcaaaaccaaattctttttctatttaaagaaatattaaatctttattttccccaacataatttgtgatcaggtaaggcaaagataagtccaccatcactggggacagcagcaacatacagacttcagaaatagccctgaatcatcagtaacattctatcgtggtaacatcagaaggaatgcagctaacaaattaaatttgtaatgttgtcacattattctaatttatttgattagtttatctggaaaaactttataaatacattatgtaagagggcagtaaattattttcttgctttgaaaaaataatgttttttcacattttaaaacattttagtctgcttttgcaaaaggagttgcaagaaaaatgtgacagctgggtttgcagaatgtccatgtacaagctgtatttataagaacctggtaatctgcctataatttgcttctacaaatagagctctttgcaataatattttaaaaaaacaggcttaaactcttctcctattcattctacttgtagaacaaagaggtacttatttttcaagtattataaaaggtaaaaaattttttttgccaattttacatgttaagcttttaagaccaaaaaaatcatgcctagtcagcccatttcttttataaccaaattctcttgtcttttaaagaatgcagaaaaatattgattgctaagaaggagcacactggaaaaagccattttaaagtattgaagaatgagacgtatttcttttttcctattgatgaaaattattagaaaagctatccagtctgttgtctttagctagttttaataaatcttttcaaaatgatggtcaagaactctagaaaacgggtggaggggatgctcctttatagcaggaaaggaattccattaattgtagaaattctcattaaatttcagctttggttcttcagaagaaacactcatataacttctgcagtctgctgtgtctgaacaccatctacctgaggcaggggcccaagtgtcccttcatcatcaaaggccaaaattggattcaaaggaatttctgggctctcactgttggtgacatctaatctggatggtttagatccaatgggtaagtttataatttcttcaaaattttcattctgaacagatacaccattttcatttggttgtttttccaaatcgggagtgctctccactgtcacttttgactggtgtgaggtaaccacatgtgggctgccaactggctttccatttcccggagcgtttgttgtacatgggnaggtgcagacacctctgttcctccagtgaggagctcccttgggctatatcacccgtttctctgatcactgggttttctnatctgtaggcttctgttctccggggg

SEQ ID NO: 121511 - DNA, 587 bp, Homo Sapiens
  misc_feature (55)..(55): n is a, c, g, or t
  misc_feature (121)..(121): n is a, c, g, or t
  misc_feature (401)..(401): n is a, c, g, or t
aaatccctaaaaaatttcattctgaacagatacaccatttcaattgggttgtttncccaaaacgggagtgctctcccactgtcacttttgactggtgtgaggtaaccacatgtgggctgcnaactggctttccatttcccggagcgtttgttgtacatggaagtgcagacacctctgttcctccagtgagagctcccttggctatatcaccgtttctctgatcactggttttcttatctgtagcttctgttctcctggttcttttcataatctcctcaaggtcgcttctttctctccaggcgctcttgctcttctctctggaaatgcttctctgcgttctgccggaccctctctgcttcttcacgaacgcgagcttcttcttctttctgaaaacagaaggncgcgtctgcctctgacaaacaggcgggctgcccgggtctcccagggggtgcccagaggtgggggcgaggtggcggatggagaaggtgtggaaagcgggagcaccagcagtccagtccgcaccctcctctgctgggctggggcgatcctgcgggacatgggccggggccagggtggggtgcggcccc

SEQ ID NO: 121512 - DNA, 875 bp, Homo Sapiens
  misc_feature (261)..(321): n is a, c, g, or t
  misc_feature (580)..(659): n is a, c, g, or t
  misc_feature (757)..(810): n is a, c, g, or t
ctttgggggcgccccgtgggtgctgcagatcccgctgtgggtgtggtgtcggacagcgtgtggtgtccgcgcggcgcggtttttttgtgtggggtgtgttcgcgcggcgtgttgtggagcaggcgacgttttttgttgatgccactggtgttgctcccgtgtggtctccttcatgtgtggcccgcccgccacagaagatgtgttataaatctcctgcggggacacggggcgcagcacctgtttttttgtcttttgcgtctnnnnnnnnnnnnnnnnnnnnnnnnnnnnnnnnnnnnnnnnnnnnnnnnnnnnnnnnnnnnnatgctttagcgatgtttatttaattctcagtggatttgaaggaacatatcagggaatccaaagcaccagtgcagaatcccacagctcagggaacctgcgccaaggaggctttttgatagagggaaacagtaggaggaggcagctgggaatgaggatgggggaagactacagcagtgtgtgactgtggtctacaacaggcacgaacctcaaaaatagcgttcaacgtgaaaggaaccagacacaaaagatcacatattannnnnnnnnnnnnnnnnnnnnnnnnnnnnnnnnnnnnnnnnnnnnnnnnnnnnnnnnnnnnnnnnnnnnnnnnnnnnnnntgtccctactaaaaatacaagaaaattagccaggcgtggtaccacatgcctgtaatcccagctacttggaagctgaggcaggagaatctcttgaactnnnnnnnnnnnnnnnnnnnnnnnnnnnnnnnnnnnnnnnnnnnnnnnnnnnnnnagacagagcaaggctcccggccgtaatggccgaattcccgggcatatgtccggtaccgtcgactg

SEQ ID NO: 121513 - DNA, 1413 bp, Homo Sapiens
gggagttctctctagttgatgtttattagtctgcatagtgacttatgttccaaacactggggatcccctcagcccctcctatcttacataggaatgcaagttaacttgtttcaatacctgttataaaaaaacaaataccccttttaaaaaatctgattcaacatattttttatttcacttttttccatttctttataaaacagtcatctcactagcagctctctcccctagagtaggggaagggggtggaggaggttgggcacctccaaaggagaaaaaggatagcagggaagggcccaaggttacctcctgaggttcttctgggcctgtttcaacaatgtgtcaaagtcaagagaatcaaatttgctctttacaggtgctgggtcaaagtcttcccggttggagtcaagatcagaatagctcctcttgcagaactgccttcggcccccaaagcagagatcaaagggctgctcatctgcctgccgcagcttgtggccactctcaatggctgcaaatgcctcctcagcatagcgataagtgacgaagccgtagttgtccccttggacacggaagtggatggtgcactcctcaatctctccaaaaacggagaacctctgtttcagctctgatcgagtcatgcggccaggtatctttccaatgaagaccacccttctttcttctattgcacgctccttttgtagcactctttggctttggtaaatggtcatgtgaacgataagagctgtaccgccgcctcctgtcacttctccggcggggggatggggatcgtgagcggcttcgagaactggatgctgaggatgaggccgacgaagaggaagatgatgacgaagaagaggacgagcatcttcgagaacgtccagaggaactccagctggaccttcgccacctcttgtgtgggggggagagggacctggaccgagatcgggatgaggacgacgatgatgaggatgaggacgatgcttcgctagtccggttggacccagagctgacagaacgggtgttgcggcctcggcggccctgccagccctggcttgaggggctggctgacctgcaggcttttcggtaacagcgcattgaccgctgcttgcctgagggttcagggggagtcctagtgttcatgtcattccggcagggtgaggcctcaggggacagcaagctggatggggcaaggcagggtgctgagggatctgcctgctcactgctagtcctgtgatcaagcggctcccgggaggcagctatgcatgggggcggaggggcagctgggcccaaggacaagacaggtttgatggtgatgtcctgatggcgcttgacattccatcgggagcccacctctggaatgactagggcaggcatcttttttgggggggtcctgctccggacacaatagtcagt

SEQ ID NO: 121514 - DNA, 1795 bp, Homo Sapiens
  misc_feature (101)..(101): n is a, c, g, or t
  misc_feature (171)..(195): n is a, c, g, or t
  misc_feature (399)..(407): n is a, c, g, or t
  misc_feature (1615)..(1623): n is a, c, g, or t
  misc_feature (1684)..(1718): n is a, c, g, or t
aattagggattgaagttatcactggtaatagccaaagaacaaccttaagccattccaccagtagcagattaaatccaattaggttatatctattcaaaaanaattttaggcagccaaaaaaagaatgaggttccttgctacttacatgctggtatagaatgatctccattnnnnnnnnnnnnnnnnnnnnnnnnnggcgagggctagacctccatgtatagttactatttgtgttacacgtgtttgtttaggcacagactctttctcaaaagtacaaggcgaagtggtaacagtaacttgtcaaacaggagccaggagccagagaacaggggtgggagaggccctttatatgaaattacttttgtatcttgtcccatggcaaaagttaattattcaaannnnnnnnnaatttaaaaacaatacaagctgattatacatttgacaaatacaaggaatttctgactgcaggaaaaaacaaagcatcaactacaaagagaagcagaaattcttcttgagctgctgattttactatacatttgggctatattttttcttaagacaatcactacaaagtaataatataaataccttttttaatgtgaaaaggtataaaatctcctttaaaaacttttcacttatccatcatataacatcaaatgtacctgtaatcccaagtatgattcttttgagaaggaaaaaagtcagatcaaatacatcattaaggaaaaacatgcacactaaatagactatgaactctactgggacaaagaccattattttgtgtattttttcattccccaattcctgacaggattctcagaatcgtttcttcatgaatagcaaattgacttattggttaaattagcaactacagagctgcctaacaacagtacaaaataaatgaataattcaccagaaactagctctagatactaattttaattactttgcagcaacataatttagtaccaaatgtttaacaagtacccattataattactaaactgtgaagtcactattatttgtatctgaccagctatacaaaactcatcaatttttcttttgaaaaaaggtagtaaaaatcgcaaacgataaagaagacactactcattaaaagtcatgtttactaatctagcaccataattccagtcttagaacctcccatgcagttggaaagggattatgggaagaggtgagtatgttggaaatgtcgggtagttctcaaattggggccccattttgcttgctttaaagcaaaaaacacagggtctagcaaagaagagaagtgctgaggctggagacgaaaacaaaagcttttggttcagatagtaaacgaggccctcaagagcagtagaatcagtatatcctgaaggcagtgctggaggcagtctcatgcactagggggtttcttcttggcatccaagtcctttttaatttcttcaagttttttagccaggtttggtatatcatagttctgagccagatacattccaaccacgttgcccagtgtaaatccaagcaggaactggagcatgatgtcggtggggagggcgaggagggcgcgaaggactgcagcagctccgcgggccggtccgagcctacctccccatgcgcnnnnnnnnncggaaccccccccggccgtaatggccgaattcccgggcatatgtccggtaccgtcgactgnnnnnnnnnnnnnnnnnnnnnnnnnnnnnnnnnnncggccgcttcctcgctcactgacctcgctgcgctcgtcgttcgctgtaagagctagcgccctatagtgatctataca

SEQ ID NO: 121515 - DNA, 773 bp, Homo Sapiens
cgatacctacttattgtgctagtgaagtaactcataaagtataactcctttctgataacatttgtagtgtgtacagtgcacttaggaatcctgtaaataatagaattgaatggcagggcagaatttggtgatatctgttacctgccaccactatcataataataccaaaatgccatattgcacctcctaattatgtatttttttctaatcacaacgttaacggcaaaatattaccaatcagcaacactctttgtgctgttttatcatctgtcctgtatattgtttataaattgacatctttttgcaggaatcaggagtaccagagagagaccttggggtgtatacaggaggatatctttattgagtgcactcagactcagctgacttaacatccagagattgggccccaacaaagacagcacttgactttcatacacactttccaaaaggggtgggctaacttgatgtaggcttacagtggcatgaaagcagagatacagagggagaacaattaatcaaattgtgacagttcataactcgggattacacatgactgttgctttgcaacctagatgtctgttatctaggttttgctcaaaagagccttgcactggtttgccttataaccttcactaggtgcccagacagctgtagttcaggccttctcaggcgtctcatgaccttcgcagtaccaaattttagatgtctggactccaagtgccagttccttcctggtgttcagccactgtgttaatcctctgcgagggcctgct

SEQ ID NO: 121516 - DNA, 1628 bp, Homo Sapiens
  misc_feature (1510)..(1544): n is a, c, g, or t
  misc_feature (1548)..(1588): n is a, c, g, or t
tttttcctggaagcaagtcttttttattgacggaataaacacaacattgatggtagtaggatagagttggtggcaatgtcctgtcactgcaattatgacattcaaatcagacctacataactgtggctgcttttgattctttcaactttgaattttgattatctgtacagaggggcttctaaatgaaaacgaattcacttgcaccacccctactcacctatttactgtttctggagaataacaaattttttaaaaggtggtaaggctaaaagacaaaaaaaagattaactaaaataagctatgaggtccaatcaagaatggcttaacattattcattttcttctttgaacatcttacttaagtgttttactaaggctactagctcagggttcccaccacgtgcatcaatctgtttataggctttagcttcaagctctttaagggtattacgagtgtattcaaaagaacctacatcctcaagataatgtacacagtatttttttatatctatgttttctgttctctggcgcaagatattctgcacctgggtgctttcaggccttgaccaaatagcatgaatagtaggaaatgagaactttccctctgtcagatcttcacaaaaacttttgttttcactatattctttggagtgtagattagcataatcatccctaatttggaaaaagagcccaagtgtattaagtagcggttttaaatcttctttgtaatcagagaacaactgcatgagacctactgctaatccaaacagtccacctgttttctgcagcaccatagctttatattcttcttcagtgggacaagtgtaattatccctccagtaaatatctaggccttgtccctgatggagttccaaaagctggcgggtaaaaagcttcactgcatctgggtgatcaagggttaagactttctccaagccaaggaaatacacgtaattggcagaattgatgacagatgggattccatagatgctgtgggccactggaaagccacgtcggagttttgagttgtcttcaatatcatcgatgagtaaactggcattatgcaacatttctgtcacttcaataataatctgtagcttgtcctctggaactttcagccaatgattaaatgcctgtgaaagtttggttctcacttgtttacctggtaactgaagtaagtatttatagggttctagaagaattctttggactgtttcttgagtcttctccattggatttaaacttcaaagctaatagttcaacgatgatatcacgactttcacgccgccggtccgggagtaactgtaccccgcatcaacttcctattttataatgtggacttaggctcttcccgatgcctacatgaatccttcccactatttcaccacagaactctccgccctcctcagccgccagcgacaccgcattagttggtgcaagaaaatgcgccatcccggtcccccggccgtaatggccgaattcccgggcatatgtccggtaccgtcgactgnnnnnnnnnnnnnnnnnnnnnnnnnnnnnnnnnnncggnnnnnnnnnnnnnnnnnnnnnnnnnnnnnnnnnnnnnnnnnacataacgacgcagcgccctatagtgatcgtatagacttt

SEQ ID NO: 121517 - DNA, 655 bp, Homo Sapiens
  misc_feature (593)..(593): n is a, c, g, or t
tttttattttaaatatacagtaggaacatttattttaacacttctaaaagatatttctccatgcctgatgatttgatataaaaatcaaacccatcatactttccccatcagtctctctacatttagggcaatcagaaatttgtacaacacgaatatttgcttctgaaacgaaaattacaaattaaatgataacaaaaatacacaaatcaactggaccctaaacaaatttctagtgaattctttcctttcccccaatcacctagagcttctttcttcagcctcattctgctccttttcctttctttgcttggccatgaatttctcagtattttgcttatgacgtgtactcttgcagtgatttgtcattgctttttcacctgagtagaagagggaacaaattggacagaagaatccagccttaggtacaagaaagtctaattcctcagggacatcagacgccactgatttgcctgaagaagagtcttcagtcttcttgcgttttcgctctggttctgaatcctttaatccagattcctcatcaacttcactcatctggaaggcctcttcaccttttgctggttctgtcacaacangctttttctgatggcagagttttcccaattctaactctcttggttggagttttagctgttcc

SEQ ID NO: 121518 - DNA, 699 bp, Homo Sapiens
  misc_feature (213)..(213): n is a, c, g, or t
aacgctttcttctcagcccgagctcttttccgttgttcagccttttcttcttcttgctgcacaagggctgcttccttctctgcagccttcattctctgctcattgacacgagctaatcgggtttcagttttctgaacagctatatcccaatcttctaaagaaccttctgtcctctccatggtgagtaacacttcgcagacgtgctctgggtantcactggtgcactggacggcccggtgcagagccttccggcagtgctgggtgtcaccatgagctctaaggcagaaaacaaaaagttgctgccaccaggacacaaagtggaaggcactcgaagggagaggccgtcttctcccacggtagaaactcactcttcagtaactctagcttctgagaagaccttagctttcagatctatccatgatgctttctccttccagagtctctacagtcacctacgaagtatttccctgaagcactctctccctcagccatgtaggggctactggaaagtgtacctgatattgtgatctgcaaccagcattctgcctttacagcattcacatgtgcggcacatggcgggggagtccaacacctctctgtaacctgatacagtccccagggaaattttactatggcgtcctactgacaggagagttatgaatccagggtagtgtcaaatttcatacccagagtcagatc

SEQ ID NO: 121519 - DNA, 1464 bp, Homo Sapiens
aacgctttcttctcagcccgagctcttttccgttgttcagccttttcttcttcttgctgcacaagggctgcttccttctctgcagccttcattctctgctcattgacacgagctaatcgggtttcagttttctgaacagctatgtcccaatcttctaaagaaccttctgtcctctccatggtgagtaacacttcgcagacgtgctctgggtagtcaactggtgcaactggacggcccggtgcaaggccttccggcagtgctgggtgtcaccatgagctctttccaggttgtaatactctagccacatgttggcgtacttggcatttcctctggtcatgatgctatcccagagttcccgagctttctgcatgttattgcacagtcgagcctcaatcctagcccagttctgcataatcacgcagcttggatcaccactctcattgaaacgctcttccacctcctgcttcagatactccaaggcacgagtaaaggcggccctcaactcctccagctctttactggagtcttgtttgaaatcaacccttctcctcaggtaatcaaggtatgcctgccaaatctccacataatcagtggcctggatgaagccggcattcaaagctttctcgaaggttacagaaattacttgatgatcaactccatgtctctccatggccaagaggtaccgactccataaggcaactgtccaggggcagtttctaatagcgcggttatgtacagataaaaccaaatcctttactttcagttgtcgatctaggtactgactgtaacggatccataagtctgggacaaggcagttctcgaccagggcgcgctcaaagatcaactgaatgcgagcaggatcgccaattttcatctcaaaatcgatatatgcttgatattctgccagccttggtgcctctgcctgcaacagtgcttcttcatagggtttatatttctccagctgctgtagtgctttgttatagttctgaattactgactctggtattgggtcttctgaccattcttcatactctgcaaatgtggcctccatatcatagagtgggatcgccaactgtcgccggaaaagactgtggactttctcaagccgagcagcttccacaatcgcactttcaaactctcggtaagcctcccagagggcgagtcctttggtcatatgtaaaccaacagacgagagagccctttcaaacacggagcgaactttctcaaggccacctttctgaccaatcccaccaactgagtactggccatactctagccaaatgttaggacaaatgtaatccttcacggctttctcaaagaggtcatacacgtgctctctgtccaggccatcctgggccatgctgatctcgtcatgcagccactccagccagagctcttcagtcaagggaaagatttcaccggacgcggggtcgacgatatcccgggaatccggaccggtaccac

SEQ ID NO: 121520 - DNA, 1000 bp, Homo Sapiens
gaagatggtcggatctggaccacctccccacaggcctcgaagagtggcctgagcttcgtgtccggctcctgcatgctgtagggcaggttgctgacaaagacggtgatgctgtccttgctgctgtcgtgcagcaccttgggcatgtccctcttcagggaggctgccttctccttctgcttcgaagggggctccacatctacggcagcacatttcccagcgggccctgctgctacttctacattttgtgtttctccagctgcagggatgctgttctcgacccttctgcgtttggaaggctgctcttcttcatcatcgccccactctttctcatcatcctcatctgctccgcgcttctctgggcctctgatctttttcttcttttttaacgctttcttctcagcccgagctcttttccgttgttcagccttttcttcttcttgctgcacaagggctgcttccttctctgcagccttcattctctgctcattgacacgagctaatcgggtttcagttttctgaacagctatatcccaatcttctaaagaaccttctgtcctctccatggtgagtaacacttcgcagacgtgctctgggtagtcactggtgcactggacggcccggtgcagagccttccggcagtgctgggtgtcaccatgagctctttccaggttgtaatactctagccacatgttggcgtacttggcatttcctctggtcatgatgctatcccagagttcccgagctttctgcatgttattgcacagtcgagcctcaatcctagcccagttctgcataatcacgcagcttggatcaccactctcattgaaacgctcttccacctcctgcttcagatactccaaggcacgagtaaaggcggccctcaactcctccagctctttactggagtcagaaattacttgatgatcaactccatgtctctccatggccaagaggtaccgactccataaggcaactgtccaggggcagtttccctcgtgcc

SEQ ID NO: 121521 - DNA, 924 bp, Homo Sapiens
gaaattgccagctgggtagctttgtaagttcgaattcggactcggtaatgggtcttggaccatcttcaacctcgcaaagtggcctgccatatcataggagtgggatccccaactgtccccggaacagcctgtggacttgtctcaagtccggagcaggcttccaacaatcgcactttcaaactctcggtaagcctcccagaggcgagtcctttgtcatatgtaaaccaacagacgagagagccctttcaaacacggagcgaactttctcaaggccacctttctgaccaatcccaccaactgagtactggccatactctagccaaatgttaggacaaatgtaatccttcacggctttctcaaagaggtcatacacgtgctctctgtccaggccatcctgggccatgctgatctcgtcatgcagccactccagccagagctcttcagtcaagggaaagatttcactcatcttctggcgggccatcctcaccttggtaagctccccttccagcctgagcagtctgatcaagtccacatggcagttgtagtcatagacgttgatagacaactgctcctccagtctctcaatctccagctggtttttctcctcctcttcgtcatattcccactcgtactccccgggggagctctccgcggaggaagccatggcgtactcatccccatcgctctcgctcacgccttcctcctgctgatcccacgctggccccatggtcttgtatgtcgcagcggccacagcccgcgataacaccttcctccttgtcctagccgccttaacctcatcctcctctccgtcagccttgggcccagccttggactcagcctcgggttctgaagccgaggtttcggccgcagtcgccatccggacgcgtgggtcgacgatatcccgggaattccggaccggtaccc

SEQ ID NO: 121522 - DNA, 995 bp, Homo Sapiens
  misc_feature (650)..(650): n is a, c, g, or t
  misc_feature (666)..(666): n is a, c, g, or t
  misc_feature (711)..(711): n is a, c, g, or t
  misc_feature (778)..(778): n is a, c, g, or t
  misc_feature (804)..(804): n is a, c, g, or t
  misc_feature (821)..(821): n is a, c, g, or t
  misc_feature (942)..(942): n is a, c, g, or t
gggaaaggcattggccactttggactttattagcaacagtaatgtcccctgacatccgcacaagcttgtagctccacggccaggtcttcccccaacctcacaatggccccgtgatgcaggcaggcaggcgagtgggggtctcccctccttatccacaggccaccgaggcccagagagggccttgcccgaggtcacccagggagtggcttgctggagccctgggaataacagccccacacaaggctctctccctccgcagctggacctgtacgcgggggctctgtttgtgcacatctgcctgggctggaacttctacctctccaccatcctcacgctcggcatcacagccctgtacaccatcgcaggtatggtgcctgcagcagggaggtccacccaggggacgtgtaaaggggtcagaaggccacctccccctacaggcccgagggagcagcccaggaagtggccccagcaggagccccagaagttcctccccgtgtccctcctccctggggccagggccccctccagcaaccttgcttccactggcagggggcctggctgctgtaatctacacggacgccctgcagacgctcatcatggtggtgggggctgtcatcctgacaatcacaggtgaggacagagtctgtggncatggcggggctgtcnccacagcgagccctttggagtctggcactgcccggcactgtgcangattcatgccgttggggttctgggtagcatcgctgggagtgggtgggttcaggaggttgagcactangcagtcagccccctgctggccctcanggactgcctggctggtnaggctaccacctgctgcccgctgttacagctctggcctggcaggagctactcaagactcagggcagcacaccgcattggtcacgctgatggtaggtgggctgtagcggtgtgaggacacancaggagcataactgctggcagtctccattgttaagcagtcaatgcagagggtg

SEQ ID NO: 121523 - DNA, 1318 bp, Homo Sapiens
  misc_feature (380)..(406): n is a, c, g, or t
  misc_feature (1240)..(1264): n is a, c, g, or t
cataccaccattttcatttattagcaataacagaggaaataccaatagcaccaattcaaaatgaatccacatgacgtgttttatccttacagctgtaataactagtaactaacatggattggaaagcacttcgcaaatgtaaaaagtgctgtacagatacattataattatcatcattaataaattagcccgattctcctagttcaaaaggcacgtaaggtcagatacatgggcttcagtggggcaaaatgatcacaacctacaatgtagcaatggttcacatgtgttggtaacaagttttaccccatgcaatcctgcagagctgaagttacacacccttcaaaatatgggagaatgaagctaaaagtagacaagacagnnnnnnnnnnnnnnnnnnnnnnnnnnnaaataacagactcctacctcttttatattaatgcctaaatagataatataattaatcaaacttctaaattgtacattataacaaaattaaaatgtcttatttaaggtgacagcaaattttgttactttctatgagctgatatttcagataccattagaatttcaaagcattctgcaacttcaaagaggtcagattggtaaaatttgtgcttgcacaccctcatggaatattgtcagtattcattccaaaattgttactagaacaaaacagctttatccattcccttgccagcagaagtcttggcacgagatggctcttggctggaccataaataaaattccttgaatcaccagtatcttgatttaagaaagaaattttactgtgtctttcatacacaaaagctgattaacaatggttaaaaaaacactactccactttttcacaggtgtacaaaaggaaatataatggaattacattcaacaataaagcttaaagttcactctaggtaatagttgcattaacattcacatacacaagcacagagtaagtatatttcaggagtcttagcatagcatacagcatacatatgggagattgatttcaggtaacatcataggtgttagtaagattagcaattcagagtgttatagaaaaggaaaactaaaccaaagagaaggtgtaggctagcacaccaagacaagtcacagaattagtagattgaaaaatctgctcactgtatgagaaaacaatatttttcttcaatttttgggtcttgatatatagttggttagagaaggttgtgtatcaaagtgcacataattgtttcttagaaannnnnnnnnnnnnnnnnnnnnnnnntcattttatttagtaatacatgcaagaggcagccccagagtgacctgaaagagt

SEQ ID NO: 121524 - DNA, 513 bp, Homo Sapiens
cagtcgacggtaccggacatatgcccgggaattcggccattacggccgggggcgtctgggatgcgctgggagcctaggatccccgacagttttgcagaacactgaaatctatggactctaaaatggacttcatttaaagaaacccacggaccattaatggacaaaaacatgagtcaatatgtattgtggcattcaaatcctagcactctgggagagcatcaagtaccacgtttttgaagaccatggcctatcatcattatgcattcaagatttgagtttgaataacctcatcaagacttagatcttcttcagaagcttcaagtctcatctgcattaaagctctccattgaaccctctcacaaaagtacaagcttaaaggggctaaaatccattaatacattccattttatatcccttcctctgacttctcttcaatttccttggcctctagggtccttcatattgcttacgttcctttagactagagccaaggagacagtgctttccaaaaaa

SEQ ID NO: 121525 - DNA, 777 bp, Homo Sapiens
ttttcactgcctgaaagtctttattgaaaatctgggagaaaatatattgaaatgttagtagtgcataactttaatttttatactttttgcatcttacaaactttctacaataagtacacatgacttatataaacagagaaaagcaatcattatcttaaaaataactatccagtaactgccacaatctcctgagtccagacaatctagagcagaagggtagactgaggaaaatatacacagtataaaaaagtaacaaaatcaaaacctgaaacaaagatcaacatccaataaatgcttctgaataaagggagagtagataagaactggattttaatcccaacactgccatttaccagctggccaatactgagctagttactctaaagagttcagttttctcatttgtacaaataggatttgtctttccatctcactgagttgtgatgagagtcatatgcaccagcatatgaagaggctagcaaaaggtatttaacaagcgttcaacattctcatgattacatgaataacactgttcatacaacataccaacttgataaatacacagcacagttaatacctgagggcagagttatggttgggaagagagagagtgcaacataggcaaagggaggggggattcccacattttccaaagacagaaagggggggatcataagtacgggaaagataggcaatgctgactggataaaaaaggatctagcccttggcaatttcaaagagtgacttagcctaaactggggatgtcacactactccc

SEQ ID NO: 121526 - DNA, 710 bp, Homo Sapiens
gcagtcaagcatcgacacaatgagaccagaaaggtgtcagaacacatttgcctgtcagagcttccttttgtcatgagagcaattggcttttacccatctgaagagaagattgatgatatatttaacgaaatcaaatttggtgaatatgtggacactggaaagctaatcgacaagatcaacttaccagatttcctaaaagtgtaccttaaccacaagccaccttttggtaacaccatgagtggcatccacaagagctttgaggtgctcggttataccaactccaaagggaaaaaggccattcgaagagaggacttcctgagactgctcgttactaaaggtgagcatatgacggaggaggagatgttggattgctttgcttcactgtttggcctgaatcccgagggatggaaatccgagcctgcaacctgctccgtcaaaggttcagaaatttgccttgaagaagaacttccagacgaaatcactgcagaaatattcgcgactgaaattcttggcttaaccatttcagaagattccggccaggatggtcagtgaagttaccaggaatgtttaaagcacaaaggactttgggtgtgtgtgcatgcacatgtgtgtgttttccatgaggcactgctttttatgcatttccctcccccctctcatctttagaacatttagacattaaagcaagtttctggtgagcaatggaattc

SEQ ID NO: 121527 - DNA, 1054 bp, Homo Sapiens
  misc_feature (55)..(55): n is a, c, g, or t
  misc_feature (71)..(71): n is a, c, g, or t
  misc_feature (76)..(449): n is a, c, g, or t
ggggcgggcttggaaaacccagcacgcgcctttaacgtcgtgcttttgctgcttntgctcactgtcttccntgcgnnnnnnnnnnnnnnnnnnnnnnnnnnnnnnnnnnnnnnnnnnnnnnnnnnnnnnnnnnnnnnnnnnnnnnnnnnnnnnnnnnnnnnnnnnnnnnnnnnnnnnnnnnnnnnnnnnnnnnnnnnnnnnnnnnnnnnnnnnnnnnnnnnnnnnnnnnnnnnnnnnnnnnnnnnnnnnnnnnnnnnnnnnnnnnnnnnnnnnnnnnnnnnnnnnnnnnnnnnnnnnnnnnnnnnnnnnnnnnnnnnnnnnnnnnnnnnnnnnnnnnnnnnnnnnnnnnnnnnnnnnnnnnnnnnnnnnnnnnnnnnnnnnnnnnnnnnnnnnnnnnnnnnnnnnnnnnnnnnnnnnnnnnnnnnnnnnnnnnnnnnnnnnnnnnnnnnaagaattcggcacgaggacgaaatcaaatttggtgaatatgtggacactggaaagctaatcgacaagatcaacttaccagatttcctaaaagtgtaccttaaccacaagccaccttttggtaacaccatgagtggcatccacaagagctttgaggtgctcggttataccaactccaaagggaaaaaggccattcgaagagaggacttcctgagactgctcgttactaaaggtgagcatatgacggaggaggagatgttggattgctttgcttcactgtttggcctgaatcccgagggatggaaatccgagcctgcaacctgctccgtcaaaggttcagaaatttgccttgaagaagaacttccagacgaaatcactgcagaaatattcgcgactgaaattcttggcttaaccatttcagaagattccggccaggatggtcagtgaagttaccaggaatgtttaaagcacaaaggactttgggtgtgtgtgcatgcacatgtgtgtgttttccatgaggcactgctttttatgcatttccctcccccctctcatctttagaacatttagacattaaagcaagtttctggtgagcaatggaattcac

SEQ ID NO: 121528 - DNA, 1924 bp, Homo Sapiens
ttttttggcaatgagctctctctttattgaggtatttcaaatatacaaacacttcagagctttttagatatgtgaaggtccaatttagtgaagcggattaacaaaacatgattctaaaagcctgcctcctctagaccaaggccatgtaaaagatttatgtaccaatcagcatcttttccttttaataatcttcaggatgttgtgttgggtccccagattcccatttgattttcttgcatcattttctcagactgtttgcttccttgcttcctccccagtgagtgccttgggcattttgtgtgtgcagatagagaagtacagagttactgcaggagccctcaggagtgagacaacaggaaatgacaaagtaatacagagctgcagtagctgggatgggtgaggaccccacttgggatgccccatggtagagtactggtgccttgggagggtagaactgctcaggtctagcacgcctcactgaagattggattcacctgctgggtgactcggatgaaggtagttctcctgctcaactctttgagcttagctgctcccacataggtacacgtagagcggatccctcctaggatgtctcggatggtatgttccacatctcctttaaaaggaacttccactgtctttccctctgaggctctgtactcagccacgcccccagcatatttcttcatggccatttcagaactcatttccatagaagagcttgtacttcttgccatccctctcgatgagctcaccacctgactcactgtgccccagccagcatgccacccagcatcacgaagtcagctcctgccccaaaagccttggccacatccccaggacagctgcaacctccatctgaaatgatgtggcctttgaggccatgagcagcatctgcacactccatcactgcgctgagctgtggataccccactccagttttcttccgagtagtacacacagagcctggcccaattcccactttgatgatgtcagccccagaaaggatgagctcttctaccatctctcctgttaccacattccctgccatgatggtgtgctgggggaagcgcttccgtacatcttttacaaattcaacaaagtgttcagagtagccatttgccacatccaggcatatatacttcacctggggaatagcttccaggatctgttccagctgctcaaagtcagaagagcctgtgcctgagctggcagccagatgctcaagacagtcaggattctggccagcaaactcttgccactgaacgaggctatagtgcttatggacagcagtgaagagagagaacttacagagaaccttggccatctcaaaggtgcccacagtatccatattggcagcaatgatgggaaccccagagtatgtctgctttgagttccgaaatgaaaaggatcttgtgagatccacctcacttcgagacttaagggtactgcgtttgggcctcaaaaggacatccttgaagtccagtttcacatcgttgtcaatatgaggcatggcgcttagcctcggggtagcgatgaatctgagggctggaaggcaggaagtcataaggagcctagtcttcccctgggctttaacgccctgttacggcttggtgagcctctattccgcttaacgttagtcggaatgagtcgcggcattaatggctcagatacgtgtgtgtcccactgatatgcctggtcagccttcggacgccatccccgtgatttgcgattaccctagggctccatctccaggtactgtattgttggggaggagagtctgggataagggttgtgagagacccctgacggtgcattcccttaccccgcctacacttccttcttctacacgctgccaagagcaatggggcaagaggctgacctcgtgccgaattctcaacccagcctcgctacctagacctaa

SEQ ID NO: 121529 - DNA, 845 bp, Homo Sapiens
ttaggctaggtacgaggctgggtgttgaatcggcacgaggctccagtgcgtgaactctgttatccagaaggcctcgccctgccgccgccgaagctggaattcgtcggctagtagttctcgccggcaactagaggaacctgttggcgtggcccagaaggcttagcgggattgcacgaggttagttgctaagcaaggtggtctttggtcaactgccgcctggaccaaggcaacaggaaccctcagattcatcgctaccccgaggctaagcgccatgcctcatattgacaacgatgtgaaactggacttcaaggatgtccttttgaggcccaaacgcagtacccttaagtctcgaagtgaggtggatctcacaagatccttttcatttcggaactcaaagcagacatactctggggttcccatcattgctgccaatatggatactgtgggcacctttgagatggccaaggttctctgtaagttctctctcttcactgctgtccataagcactatagcctcgttcagtggcaagagtttgctggccagaatcctgactgtcttgagcatctggctgccagctcaggcacaggctcttctgactttgagcagctggaacagatcctggaagctattccccaggtgaagtatatatgcctggatgtggcaaatggctactctgaacactttgttgaatttgtaaaagatgtacggaagcgcttcccccagcacacctatcatggcagggaatgtggtaacaggagagatggtagaagagctcatccctttctgggggctgacttcatcaaagggggaatttggcccaggcctctggtgtggaccaccccgg

SEQ ID NO: 121530 - DNA, 608 bp, Homo Sapiens
  misc_feature (571)..(571): n is a, c, g, or t
caacaaagtgttcagagtagccatttgccacatccaggcatatatacttcacctggggaatagcttccaggatctgttccagctgctcaaagtcagaagagcctgtgcctgagctggcagccagatgctcaagacagtcaggattctggccagcaaactcttgccactgaacgaggctatagtgcttatggacagcagtgaagagagagaacttacagagaaccttggccatctcaaaggtgcccacagtatccatattggcagcaatgatgggaaccccagagtatgtctgctttgagttccgaaatgaaaaggatcttgtgagatccacctcacttcgagacttaagggtactgcgtttgggcctcaaaaggacatccttgaagtccagtttcacatcgttgtcaatatgaggcatggcgcttagcctcggggtagcgatgaatctgagggctcgtgcaatcccgctaagcctttttggccacgccaacaggttcctctagttgccggcgagaactactagccgacgaattccagcttcggcggcggcagggcgaggccttttggatanccagagttcccgcactgaggttgctgttcctcgtgcc

SEQ ID NO: 121531 - DNA, 561 bp, Homo Sapiens
gctctccagaggctcttttttaaatcttggggaaatcatacccactgaggaatagaggccagggcagatcaggcctgcgtggattgtgggtcagctagggaagcagaaggaggaagacgctggaatcattgtcaggactgagaatatggtgtgagttgcttttgagggtggccatgtgagcaccttggccagattaatctctttcccccctccatgatggtggcaggggcaggagctgacttcgtgatgctgggtggcatgctggctgggcacagtgagtcaggtggtgagctcatcgagagggatggcaagaagtacaagctcttctatggaatgagttctgaaatggccatgaagaagtatgctgggggcgtggctgagtacaggtatgtgtggaggcccaggagcttagtaatagtatggaggcagaactcatggctgctgagagggggatggtacagttctcagagaagcatggtgaaccggggctcaatgctagggtctgtggaaaagtccctgggcttaaggaatccagaaggagaagataataaagtttttccc

SEQ ID NO: 121532 - DNA, 1908 bp, Homo Sapiens
acagtagtgtgtcagaggagaagtggcagaggttgcacaagagagggcagtggggtggtgacactagagagacgtgactgtgtagagggagagcagacagtctcactgatggagtggcagtggcagggtaatgtgaagagtggagtccagggtgttgtaggggttgacttgagccctgcgagggcagtactgctgctccttgagagaagagtggtgtggaggcaatgaagagctcctgttaggccatgctgtgttttctgcgactttgagacgtttagtggagacgtggcaaatactgctagtgattgaatggttatcatgtggattatctgaatttctttaatcaactataatttatttaagcataaagttactttcacatttgtccacaacccacagtaaatacagttcttggcataaagacacagacttcagaatttaaagcctccccacctgcaagattacatatataaaactcccactattgtttatataatagtggattaatcaaattgaaatagttataccgtctaaaataaaattgaaataatttactcataagattcatatttaaatcatctttatttacaaaatactatcctgagaattataattccattaagcttcaatttgagcaaaagtgtaatcacttaagtaacagcagttacttaaactgaaaatgagatcagtcaaaattacttttgaagagagcaaaaatattgtcaggtttcttgctgtggttctggatgttcagtagcaggctcatttgaaggtggaatcaaacctgaggggaactcacttctaccttcagaatgtgggggtggggggaaaaatccaggtcttgggggaaggtaaggaggaaaacccctcggtggatagacatttctcattgcaaatggagcaggtggtggacctgggaaatcccctggtggaaaataatctcgagaagctccaaacatggctcctggaggaggtggggggaaaggaggtcctcttctcaagaatgggcctcttgcatccactggaaacaatggacctctgactggagcaagaggtggaggaacaaagccagggccagtggcttcattttcagcagggagagatgaatcaggcacatttaaattaccaagatcatctttggtatcatttctactggattccatttctgaaggcattgacccatccattttatccaaagaaggcatattaaaacttctgagttctgctggtccagacagtctaccagaattagaacaaaatctgtcttgcctttgtggaggaagggctgaatcaggatatgattgtcctggcggaggaaacatcatcctacggtcctggtcccatggaggtgacagagacccagtgtcagagggagccctatgaggatcggttaacctatcacagcttgattctcctctttcattggtaatctgatggtccagaggattccctgggcctcgtgagcctcttcctcctccccctggaagcaaaggtgagagtctgagtggaccctccaacaaagttggaggagagagaaaagctcttgtttcagatgaaggccaacccaatggtgagggaccatatggggaatgctctctgccaaatgctgtatttggaacatcgagtgcataaggatctttttctaaaagttcaaatttaagctctgtttcagttaatttttgtctgttgtgagcattttctttccttaaatcattgaggtttctttcagcattccgagctgccaaccaattatcatgtgcttttttctcatgggaaataatctgcccttgataagaatgaatagttctctccaattcttcttcaagatctttggctcgctttctataggtctccagctcttcagtggcatggctgatcttttcatctactttagaaagtttctcttct

SEQ ID NO: 121533 - DNA, 450 bp, Homo Sapiens
tttttggggagaaaaatcacatttattagttaagacgaccacaggctggacacaacacacatgctaaaaagtggactgtcttttaaaacttccaaggtaaataggtaaatgttttccacagcccaacaatcatttcagtgtttacaaattaaaaggcccacggttaagacattaaacagtaaaatatgtaataaatgctccaacctaccctctcccccgaaagctgcttctaagtttaaaaccatgaatttgactaaccatgccattgaaaaccatccaggttactacaggctgaattagttttcaatgtctaagtcctagaaatatcactccctatcccagccctagcaaattctaactttacatttgacataaggcattaacatcaattaaagcctcagtttaataatcagaatttaaatgaagtctcctgaagacctctcttctggc

SEQ ID NO: 121534 - DNA, 921 bp, Homo Sapiens
  misc_feature (845)..(879): n is a, c, g, or t
catacctacttgatcattctttttatttttacaaagcatggcaaaatgaggaaaccactgacaggtgaagaatttgcacaatggaaaaccaccttgaccatctcatgactttatacaggaatcggaggtaagtgttcctttaaagtgattttgtcatgaaagagtcatctgaaatgactctcgtgatggaggaaaggaaagtaatgaaatcaacattcatggttatttaaaatgccttaaaagctaagcataatatacatagtaactccttttcctagtataaaaatagtgccagaaactatatttgttcaaatatattgaaaaggtataagaatacaaatagatattaacagtggctagtgatgcctcataaggttttcttaaactgtaatataaatttatattttcaactatttacattgctttcaacaacattcattaagacatgtttacacaggcttttagtaagtatatggaatggtaaagtgagctttaatactttcttcttcactctctgtagtagagcagaaggggtccaaaaccatgcacaatttaacagtccagaagaactgtgtaatctttacctggctagcacatggaaaaaataaactatatacaagaatacaaaactcctaaagtgttcttcaactatcagcaggttaagtgattcatacttgcaaaaagacaggatgtttgtttactggtagattcttagtaagtttcaggtaaagaaggtgcataaaacatatgttattgatgaaaatggaaatgatgcagtataccccatgttctcacccggccgtaatggccgaattcccgggcatatgtccggtaccgtcgactgnnnnnnnnnnnnnnnnnnnnnnnnnnnnnnnnnnncggccgcttcctcgctcacagactacgctgcgctcggtcgtt

SEQ ID NO: 121535 - DNA, 1013 bp, Homo Sapiens
  misc_feature (875)..(875): n is a, c, g, or t
  misc_feature (927)..(927): n is a, c, g, or t
  misc_feature (958)..(958): n is a, c, g, or t
  misc_feature (979)..(979): n is a, c, g, or t
  misc_feature (989)..(989): n is a, c, g, or t
  misc_feature (999)..(999): n is a, c, g, or t
ttttttgaatgatgtttccttttattgacatatttgtttcctggtattgcagttatgtaaaggttaagtaggattttatatgccaatcatccgtggttgatgtagtgaaaaaggtctggactgttaacattctcctaggaacctctgtggagttgaacttaataacttttcagatctgttcaaaattcacattctgtgatcctgtcaagtaaggcatttggttccagagtgaggaggcagtaagaggtgcttgagccctgacatgttgtaggctctcattataggccatctccctggatgatctcacctactcgcatgccaggattaccatctgcattgttggtgcattccaaatctatatctccagcccagaactgagttgacatttatatccatttgggtatatttcaggcacgcaatcctgtttccagtaagttcatcctttttcagaaatatagtcctgttactctgttcattgtcatcccattttctgatgctgagcacagtacctgatccatagtccaactcactgatgcaaagcaggtgaaaccttaggagatgatccagtcactgacttgattgagggataagtgtgatttagaaatggaatggccttggatgtctatcagtgaagaaaaatgttctgttagaagatctctctaagagtttttttccttctgagcttccttttcaaaataaaagtgacaattgtagcattgacttgaagtgagacatggttatagataagagagtacaaaatgactctttttcctgtcaattgaaatttaaagaaaaagttttaattatataaatagcaaagggctattgccaatacctagggtcaaaaatgaatttgagggaacagtgggtaaganactttatgcctgaataacatttagcagtattgtgaattgaaaattgccatantttgatgtataggaccagtccacctgagatncccgagaatccccggatgtgnatgcccaacnccgggccctnaccccccattccat

SEQ ID NO: 121536 - DNA, 1000 bp, Homo Sapiens
tttgaatgatgtttccttttattgacatatttgtttcctggtattgcagttatgtaaaggttaagtaggattttatatgccaatcatccgtggttgatgtagtgaaaaaggtctggactgttaacattctcctaggaacctggaaataaagaaaatatgataactttttaaaggttaaatttagaattaaaaccctaatggagcaacatttagatatataaatataactttaaaagtctgaatacttttccaattgcaagatttgactataattttattgaatgagagttttagtcagaaagaaggggcagagggtatcagtaatgaaaatagaaaaagaaaagacagatattaaaagtgactgtccaagttctgtgcaagagtaaagtaacatttgtccctaacacagagatggatgtagagagttgtatcagtgtgcatcgagtattctgaccatatggtgagccttcactaggtgcaatggatgcatcagattatagccagtaatatctttccaattcgcagtccctctgcctagaatgcatccttattgtgaaaggaatacatcagcttagcacaattcaacattctctgactctgatttcccttgttctgattccagtccccccaatccaacttgtcctgattactctcttttccagtgtaggttagctcatgggaagagaatgcattattcatgtcctctcaaatatactggttgccctgacagttgtttcttattgtatgatctggacttgaggcaatgggctggagctgcaggtgcttatacttctgtttctgggacagatctgtttctttttgaacattgatactattttggttttataaatcagtcttgtcaacttagttactgtgtctccaccccagcagtcttcagtatgctaatctagtgcctaagctaaaaggttcagggtcagctcctgcccctggtgaattgtgcattaaagccgcttagaagccagcgtgccaaccccctgct

SEQ ID NO: 121537 - DNA, 946 bp, Homo Sapiens
  misc_feature (187)..(475): n is a, c, g, or t
  misc_feature (493)..(504): n is a, c, g, or t
ggggacctggtttatgtcctcggtcccccctaattaggcgttttgatgtcctagggccgcctttgaaacccaccacgcgctttacgtctgcctttgtgctttgtcacatgtttctgcgtaccctgatttgtgataccgtatccgccttggtggctgtaccctcccgcaccgacgaccggcgaagcgnnnnnnnnnnnnnnnnnnnnnnnnnnnnnnnnnnnnnnnnnnnnnnnnnnnnnnnnnnnnnnnnnnnnnnnnnnnnnnnnnnnnnnnnnnnnnnnnnnnnnnnnnnnnnnnnnnnnnnnnnnnnnnnnnnnnnnnnnnnnnnnnnnnnnnnnnnnnnnnnnnnnnnnnnnnnnnnnnnnnnnnnnnnnnnnnnnnnnnnnnnnnnnnnnnnnnnnnnnnnnnnnnnnnnnnnnnnnnnnnnnnnnnnnnnnnnnnnnnnnnnnnnnnnnnnnnnnnnnnnnnnnnnnnnaagaattcggcacgaggnnnnnnnnnnnngtgtataaatactatgctttaatgagccccttaaatagaaattccactacaaaaatacagaggagatagggtgtttcctgtatccgcctcattcccatagaaaactataagggaagaaatagaacttggaattaaagcagcagcaaggcgaggtgagaatgcgatttctaggccatcttgttgggactgatgaacagcatctctgatctcatgatttaacatctggttatccagaagggatgggattggcctaaaaaaaccgatcaatttctggattgtttttgtttcttaatccttcaaatgacaagaagcaaaaatatttgtagaaactaagcaagacaagagttggagcagttaacaccactatctgcagcagaaactcagaccttcttagtgaacttaagggctgaagtgtgaaagctgaggctgcaagtgcagatac

SEQ ID NO: 121538 - DNA, 942 bp, Homo Sapiens
tttttttcagtgatatttccatttattttactttgagtaataaaaatttttctatctcatacatgatcgaacacataagttgctttaaaattaacagtcacaattgaagaaacaatggtttatttttctaatcaagtgaccaagctgctgaatcataaggcctcaacaaatgttgcatcttattatttcactgaacaataagaccttctattgtgattattcctggtaaatagcaattttgtttctccagcggtttccatttgccaaacagtcatgacagatggttgaacatggtggctactgctttcaggggattctatcagatgagtcctcatttccaataaagcagctgttggcaatctttcatcaaaagttcatccatcaggacttctctatcgtggttggccaaggagtcctgctttggctgccagggcttcattctgctgaatatgatattcctgaaatctcatggatattctttgtgtcatttttaaatatttctgtaagcaatgttctgaacaggtggtctcttcaggttttacttctcttgttgtgaagtctttaacacagtccaaaaagcaggtctctgtaagtttattgtaggtccccagaaattccttaaactgttttatctgatcagattctggtatttgtgcagccatattcttctggtacctttattagtcaccttttctgatgcatgagtttcctttctgttctggaaaagtagttgtccaacctttgcttgaatgtctccaataaggcctgattcttacttaagcacaggctctcgcagccgacatcagtacaaggctggcggttgttgggggacggttgagccttgggagggagggtcagggtctggacaggagccgcggccgccagatgggaccccggccgtaatggccgaattcccgggcatatgtccggtaccgtcgactg

SEQ ID NO: 121539 - DNA, 386 bp, Homo Sapiens
  misc_feature (249)..(315): n is a, c, g, or t
tttttcttggtgaaacaatttattagccatggttcagaataatacaaaaataaaggtgtggctttatttacacacactcttgaagctcttggcattcagcggacagcaaacaccatactcagagtgatggaattaatagcatttagggtaagcaaggaccagtgtgagactgggcccaggaaatggggagggaatgtgaggagaaacagggaatgacattaaagaagaaacagacaccttggagaattnnnnnnnnnnnnnnnnnnnnnnnnnnnnnnnnnnnnnnnnnnnnnnnnnnnnnnnnnnnnnnnnnnngcctagggatggggaggttggggtggtgactaaggggggctggatttcttttgggggtagtaaactctaag

SEQ ID NO: 121540 - DNA, 1828 bp, Homo Sapiens
  misc_feature (28)..(28): n is a, c, g, or t
  misc_feature (41)..(41): n is a, c, g, or t
  misc_feature (43)..(43): n is a, c, g, or t
gaccggaattccggagggcagggaaagnctgcagagttganangggtagaaaatgattgtgatgtacaaattttttatttgatcatacttaaaaagacagagcagaatcacattcattttcttaatagtatcactgtaaacatagcgaattttggcgcttttagattgctctgaaaatttctgaagagttgaccatagcagcctggtaagccttttcctttcccccaaagctctcctgccctttgcagaaagactgttggtgacaactgatgctaactaaatagcatgtggttgagcttgccaaatccttccacctcctcccataggcaacagggtgacttggcttaaaggcattgagtaagcaagtaggttatcagagaacagagggaagattccattgtagataatttccaaatattacaattgatgaactcagagttcaactgctcagttccttcttctgctgacctgatacagatataatcacaatggatctcagatctttggtccatttagacatcagggtaatgtactcagttcctttaattaaaatgtgttggaaaagccatctctgggtggagaagagaagttcgttgattatagtgatggtactataagagaaaaactgaagcaggaaaacagtgagcagcgcctctttcttcttgcactcaaatgattacttcactcctgtcagctttatagtccaagcaaactctgcggggacagcagagggtggcaactggggtagagagatgaagagacctttatctggatctgtggaccacttcagatctccttgaattcccagcattgttatctttgtagttgaggtagttatgggggattcaaggtttaagactccattttctggccagtgcagaaaaatggcataaacagccgatccctttgaggtataccatacagatgttgtgttcttttccccattgcacccgccatggtttggaggcatagatagcctccccattgatgctcagccatttcccaacagcaagaagcctttcttggaagatgggaacaatcagtccatctttagttggtccaatgttcagaagatagttgcctcccaaacttactgtctgaaccagttccgaaatgatttcagattcttctgtaacatcagacaatgccatgtcacgacgatagccccaggaaaacttgtcaatgctggtgcacatctcccacttgtgatctggcaagctctgtggcttgaatttatcttcacagttatagtatcctccatggtgacaggaacagttctgaccccatcggtcatttactaccacctcatccttgacagggctgtcattgtagagccatgaaaggataatttttggagttccagtaagtatcaggacattcccactccccatcagaccagatcagatcaggtttatagctgttaacaaggtcgtacagctctggcattgtttttgcactgacaaaatgctgtgttttgaagccatttttcttatcaagtagatagagtggatggaaccactctaagagtgagtggtatagtccatagcggatgttcctcttccggagagctgttcccaattcaccaaccaaatcccgatgaggccccacgtctttggagttccagttccaagacacaggactcggccagtttgtgaagccttcgtgatgctttgtcgtcaaaactacatacttggcgcccgcggcctggaagaggtcggcccactcctccgggtggaagaagcgcgcagtgaactgcggtccgaagtcggcgtagctgaagccgggcgggtagttgtcgcgcatgaagcgctggtactgcggccgcacg

SEQ ID NO: 121541 - DNA, 792 bp, Homo Sapiens
ttttcttcaactttgatattttattgaaaaaagtacacaaaaaccactgaggtacacaagcccaggtaagcataccaagcaagccccctcacaccttttgtctgaaaaaagcttgacttctttgcagcaatgtctcgcccattccagcagcagtatctcagttaacttggttccttttcctccaggctcaaaacaaaatcaaactcttcatggaccacttagggttgtcctctttgctagatgggtcataatggggattgtttttctcaaactgtgtgtggtctgggtaagcctctttcacgatcttcatgagtcctgcgatgcctggctctttgcagttgctatggtagaagaaggcttcttctcccagcttcatggctctaaggaagttccgagcctggtagttacgaacaccatcccagcatgttgtctgtttgggctgtgctttgagatcctcaatgctgaacttcacatctacacctttctctaggcggctctctggctctgacttcatcagccagtggctgcttagattcttcaaacagtttttagtggctgaagtcttctgagggttggagtcctccactttagctaatgcctcacctgagttctcagttttggtgcgttttcctgatagtcccttgtctgaaccagaagtcccagccagcctcttccggggtctcgacatggtcacgctgcaggggactttagtgcggacgattccaacactctgcagactcgactgcggtccgcctccgctgcgccgcaggctgtgcagcgcgacccccgccc

SEQ ID NO: 121542 - DNA, 1201 bp, Homo Sapiens
  misc_feature (1078)..(1112): n is a, c, g, or t
cctttgttttttggggttttcgggggtgtttcaactttgatattttattgaaaaaagtacacaaaaaccactgaggtacacaagcccaggtaagcataccaagcaagccccctcacaccttttgtctgaaaaaagcttgacttctttgcagcaatgtctcgcccattccagcagcagtatctcagttaacttggttccttttcctccaggctcaaaacaaaatcaaactcttcctgggtcaggggctggattgataatctctggcgagtgaagagaaccatattttttaaggggccaccagtagctttgtgagcttgatgataggatttgagctcagccaggggaatgaaacgtttcatcatccgaacaaactgtacatccaccatggaccacttagggttgtcctctttgctagatgggtcataatggggattgtttttctcaaactgtgtgtggtctgggtaagcctctttcacgatcttcatgagtcctgcgatgcctggctctttgcagttgctatggtagaagaaggcttcttctcccagcttcatggctctaaggaagttccgagcctggtagttacgaacaccatcccagcatgttgtctgtttgggctgtgctttgagatcctcaatgctgaacttcacatctacacctttctctaggcggctctctggctctgacttcatcagccagtggctgcttagattcttcaaacagtttttagtggctgaagtcttctgagggttggagtcctccactttagctaatgcctcacctgagttctcagttttggtgcgttttcctgatagtcccttgtctgaaccagaagtcccagccagcctcttccggggtctcgacatggtcacgctgcaggggactttagtgcggacgattcttgttatccttgctaattaggatcaactgaatggataatctagatgatgaagtaatttgctggctacagacccaacactctgcagactcgactgcggtccgcctccgctgcgccgcaggctgtgcagcccccggccgtaatggccgaattcccgggcatatgtccggtaccgtcgactgnnnnnnnnnnnnnnnnnnnnnnnnnnnnnnnnnnncgccgcttcctcggctcactgaacctctgctggcgcctcggtcgttcgctcgacgagttagcgccctatagtgatgatcagcttccttc

SEQ ID NO: 121543 - DNA, 868 bp, Homo Sapiens
ggcctcaaaaaaacccaaaattctccaaactcttctttcccgtggggtcccaggggggctgggaaatgaataaattcttcttgggcgaatttgaaaggaggacccaattatttttttaaagggggccccaccaggtaggctttggtgagcctttgaatgataaggattttgagcttccagcccagggggaaatgaaaaccgtttccttcatccggaaccaaaactgtacctcccaccatggacccacttaggggttgtcttctttgctagatgggtcataatggggattgtttttctcaaaactgtgtgtggtctgggtaagcctctttcacgatcttcatgagtcctgcgatgcctggctctttgcagttgctatggtagaagaaggcttcttctcccagcttcatggctctaaggaagttccgagcctggtagttacgaacaccatcccagcatgttgtctgtttgggctgtgctttgagatcctcaatgctgaacttcacatctacacctttctctaggcggctctctggctctgacttcatcagccagtggctgcttagattcttcaaacagtttttagtggctgaagtcttctgagggttggagtcctccactttagctaatgcctcacctgagttctcagttttggtgcgttttcctgatagtcccttgtctgaaccagaagtcccagccagcctcttccggggtctcgacatggtcacgctgcaggggactttagtgcggacgattcttgttatccttgctaattaggatcaactgaatggataatctagatgatgaagtaatttgctggctacagacccaacactctgcagactcgactgcggtccgcctccgctgcccc

SEQ ID NO: 121544 - DNA, 503 bp, Homo Sapiens
aatataaaatgtttttaattgtttttgaaaacatttaaaaaacaatttttgagcactttaataaaaaaagagaactgaaatgctaccgcaatattcaactactgtagtttcagcaggtacaacagacaacaaaacactggggaaatctgactttttgcactaaatgaaacatgaaacagggcttgtttttgtcatttatcgtgtagtaaagcacattatagtacaagactattatatgaacctcagaagcactgcacaaaaaaacactttccttcttttcagttcaaaagtcagtgcttattgcaattatatgcaaaattatttacttcatgaagttttatgataaacagtatgcaaaatgttttaaacatcaaaacaataaaaataatctggaacagaacatattcaacaataactaagcagaattagtaaacataaagtaaataacctgtgaataactatgcttgcctggttaacactgaaccagtttcaatacagcgaag

SEQ ID NO: 121545 - DNA, 1167 bp, Homo Sapiens
  misc_feature (55)..(92): n is a, c, g, or t
  misc_feature (299)..(307): n is a, c, g, or t
acgtatcaacaaaggatcctttattgaccagagcaggaccgtggcatttttattnnnnnnnnnnnnnnnnnnnnnnnnnnnnnnnnnnnnnnaataaaagtttgaagatctggcaggcagtgatcctattgtccgcccaccacccccagcactgatttcctgctccctgcacggggaagggggaggatgactgctccacccaggccacagggccacactcccctgcaaacagaggaagaaaggggcttttctgtagccatcccctgcacatcagaaatcaacaagtattctctcaaagnnnnnnnnntacagaaattgaaacatttaaaatatgaaaacccaaaggggaagtgagtgggaagagggcaagagaggaaaggaactggagtttcttgggaagggactcccatgtctcccttcccatttatgggcttggggtctggggtacgaggctcacacagtgagtttgcagtgacacagctccttgtagatctgccgacgaagtttgggcatgtcctgctgggtgaagctgaatggctgagacagggccagatgcttgcagtactgcaacacaaaagcaccacagtcactgtcattattctgcctggccacattcattttgaagtaacctttccagccctggtggaaatccagtcggtctttctttaccgcctctgcctgtagatacttggcaatatgcttagggcagcggcggtttagggtacgctgcgagtcaaaataggtgatggtgcgtcgcctcacatcaacagagatgagggaccaatgcacctccaggtggatggggattagcagtagctccttattgaagatgtccaccttttcagggactgtgtccatgaccaggtctccatacatgttcatcacctggtcattgagccagttctgtccatacaaggtccccaagtcatccatggtcagcacgtgccgcttataagccactcggaagcccctcaccatggcattgcctggcatccgctggtaagactggatcagctgcaacaccaggcccttcctggaaggggtggaaaactcctgctggaaaatgtcctccagcttctctactacctcatcagtgctgaggggtatgaggctgccatacgtttgaaggaattcgtccaagatgctctgtacgcaggtcacatgctc

SEQ ID NO: 121546 - DNA, 1167 bp, Homo Sapiens
  misc_feature (480)..(491): n is a, c, g, or t
  misc_feature (1039)..(1039): n is a, c, g, or t
tttttcttaatacttatctttattatgaaagtgtttccaaagtaaaatgatcctcataataatgattgcttccagagatcaagaatgaataattatattttcatataaaaatcagcaaaacacaataacaatacataaaataattctaattggctaacagtatttcattccatttctgacagagatgctcaagcactgaattgtcttaagaaaacaagtaaggttttgtcacctatcctatttctcactgcaagttgaaaaaaatcaaatccaaacaccaccaccccttctatgacaacaaacggctgtggaggtaaatgactatgtgggcaaagagttgatgaaaatcatgagcttaggggctttatgaaactttgggaaatcaaactcagaggttgttttccattcttaaagtaatgaagctctaagttaaagtttcagaatcatcacataactgttcctattccataactcatttcnnnnnnnnnnnngcaggtaatcttattttcctaagggtagtttcatgatgacagtgtcaaaaaattactgtggataaagaaaaaattgtctcaatgaaatagaatttttcactgaacacagaaaccatctcaatagttgctgctccctggtttccaggccacgcaacagacatcaaaccaggaagccaaactttcatggacctgtgttaagaaaaacacacatacatgggcatactactttttccagaaaaacggaattaggcagagaaggaagtgtgggtgtacaactgatccacaagctattgggaaatcaatagctaaaaaatgtccacaccctggcttccttttatcaggaactccaggaggctgaaggaatgtgagtgcatgagataagcaagacagatcttaacggtcccctcacatccctttctgggcaatctccagaatgcctagttttgtggagacaccatgtactatctggctgcagagactttcttaggtcccgtgttagaccccatggggtctcagcatgtggtcatgtggtaatgcattcctttcanaggctttgggttgaactcaagttggaaatacctggaaaagaccaagcttctcctttgggtgtctgcggatcctattaaaaatattcgtgatgttttaagttctccaatacaagtttctcccctcgtgc

SEQ ID NO: 121547 - DNA, 2365 bp, Homo Sapiens
  misc_feature (52)..(100): n is a, c, g, or t
  misc_feature (218)..(255): n is a, c, g, or t
  misc_feature (2288)..(2322): n is a, c, g, or t
aatttccaaagccctataatttcttatacccagggttctttctttggggggnnnnnnnnnnnnnnnnnnnnnnnnnnnnnnnnnnnnnnnnnnnnnnnnnaaacggaagttttttagaaaagtttttttagggggcggaggggggcccccaaatttaagtatgcgcttgtgacgttggttgtagggttccttctttacccgcgttaatacaaattcannnnnnnnnnnnnnnnnnnnnnnnnnnnnnnnnnnnnnaggtgaagtagaacacaatagaatggctcaaaaatatcagaatgcactacgcacatcacgagtaaatactgtttggtaaaacttgtttcagttaaatatgtacgtgtccgtgcatgtcatgattaaatatccttcttaccacagtcaccctaaagaaccaaagcttaggactagggacacaaccatgcagaaagagcagggagaccagacactctgggttgagatgatgaatttaatgccgcagccgacacccacattcacactttggctccttcagacaacttgatctttgggactagaatttgtacagagtcaaacaccacatagaagcacgtggccgccacacacaacactcctttttagtgagagggacaagatacctatgtctcatgatcaaagtactcttttattcttaaataaaaatcttaatttgctttgacctccaaaggctctaatcccagtctccaaattcgtctcaagggatgttctcttcatgtggggccggtttaaacagaggctgcctcaccagagcagcctttcagtcctgcaagtgtctctaatccatggtatgtacatgtaggtttgtgcaggcagggaacacacatgacagagaactactttggtggtactggacgggtggtgtttcttcactggattttggtgactgcttcatggatggaggtggccacgtaatctagatttttggtggttaagccactcacgttgattcgaccacttggcagcaggtagatgtgcttttcattgaccagatactcaacctgcttggggttcaacccagtgaagctgaacatgccaatttgatcagtgatgtggttccaggtcccaggggttttgagggcttctagtcgtgccctgagttcagatctcatggtcagaatccggtcagccattgtcttcacattacctgtccattcctcaaagagctcagggttagagagggtgctggccacaattcgtgctccctgggcggggggattggaccaagtaatccgcacgatcttctccatctgggaaaggacttgcaggatgctctcaggttcttttccaaccacagtcagattcccgactctctcattgtagagcccgaagttcttggagaaggactgggcacagaagaactcgaagccttcagacacaaaatagcgaatggcccaggcatctctctccaggtttccagatgcgaagccctgataggctgagtcaaagaaggggaacagaaaccggtgcttcatgacagaagcaatctgcttccactgctccggagttgggtcaatcccagttgggttgtgtgcacaggcgtggaggacaacaatggagaactcaggagcattctccagatcattcaggaagccctggaggtccaatcctctcttctctgcatcccagtagcgataggaccgaatgtctttaaaaccagcagcggaaaacacagcattgtgattctcccaggttggtgaggacacatagacaggtgtgttcttgttgtttgttccattgtaccaacgcgctaagaaatcagctccaattcgaagtgcacctgttccccccaaagattgcacacctcctacccgcttctccttgagtgctgggctgtcatccccaagggcaagacgagaagcacagctccggaactcagccaggcccaggattggcagatactcgtgatttaggctattgtcattagcaatcttctgctccactttcttcactactggcaaaacccagggatggcagtcatccgtgcgatatgctcccactcccaggttgaccttgcgggggtccggatcctccctgaagtcggcagtgagcttgaagaccaggacaggctgggcctgcggaacctcggcaaagactgacggaggtgccatatcgagagactaggaatcaagagatttcaccccacgcccggagctggcaggtcaggtctggccgttgcgactggaggagacactcaccttctccccggccgtaatggccgaattcccgggcatatgtccggtaccgtcgactgnnnnnnnnnnnnnnnnnnnnnnnnnnnnnnnnnnncggccgcttcctcgctcactgaactcgctgcgctcgatcgttg

SEQ ID NO: 121548 - DNA, 993 bp, Homo Sapiens
  misc_feature (102)..(102): n is a, c, g, or t
  misc_feature (794)..(794): n is a, c, g, or t
gcgaccaaaagaagcctttcagtgatggaataacttcagttaggaattcttggtttaagattttacaggaatacgttgaacatcaggtataatgtctttaanaacattttcaggaataagacagtttggatgcagagctgtcattgctgttcattttgtatttagtttgaatgatacatgtatttagtttgaatgatacatgtatttagtttgaatgatacatacatcagatatctctctgataggatgtccctatcagagagattcagagtctctgtaaacaattatctcttttgtaagaattacgtaagaattaagtagcatgaaggattataaagtagcatctagaatcgagagagagaggagacttactactaatcatcactgattttcatttatcagatttttgggcacctgctgggtgccagatcttgttaggcacaaatgactaaaacagagccaccaagtattaaaaatatgcatatgagtgttctttaaaaggcactgcagctatccatattatgaatactttagcattttctaagtgatgggtgattcaaagggtctcatacaagttacagtcacgtcttaacattttctgtttcgtgaaatgagactaaacacaagtatttcctgccattttaaaccattttgctcttatatgcttattcttacaggttgatgatgcaatgatggcaaatgcagcccagaaatttcccttcaatactcctaaaaccaaagaaggatattactaccgtcaagtctttgaacgccattacccaggccgggctgantgggttgagccattactggatgcccaagtggatcaatgccactgacccttctgcccgcacgctgacccactacaagtcagctgtcaaagcttaggtggtctttatgctgtaatgtgaaagcaaatatttcttcgtgttggatggggactgtgggtagataggggaacaatgagagtcaactcaggctaacttgggtgtg

SEQ ID NO: 121549 - DNA, 2574 bp, Homo Sapiens
  misc_feature (162)..(173): n is a, c, g, or t
  misc_feature (276)..(339): n is a, c, g, or t
  misc_feature (414)..(428): n is a, c, g, or t
  misc_feature (436)..(557): n is a, c, g, or t
aatcgcacaagggcggccaagagggtgggagattcccccgtggggggaatttcagggtttcaatcaaaccgccgtttgtgagagggtgtttcccaatgttggcgcgaaaaatttttttatttaatattccccgcccttctttttcacaaaaaatggccaaannnnnnnnnnnntaaattttgtttttgaggggtttcccttgggatcccccttttaatagagcccccgaagggcctccgggggcccccttttgggttttgttagaaaaccccgggnnnnnnnnnnnnnnnnnnnnnnnnnnnnnnnnnnnnnnnnnnnnnnnnnnnnnnnnnnnnnnnngggaacaggtttggccccgttccctttcccaaagggggccccgcccccaaaagaaaaggttttaaaaattttttnnnnnnnnnnnnnnncccccaannnnnnnnnnnnnnnnnnnnnnnnnnnnnnnnnnnnnnnnnnnnnnnnnnnnnnnnnnnnnnnnnnnnnnnnnnnnnnnnnnnnnnnnnnnnnnnnnnnnnnnnnnnnnnnnnnnnnnnnnntagatttaggacttttatttttttcacacccaagttagcctgagttgactctcattgttcccctatctacccacagtccccatccaacacgaagaaatatttgctttcacattacagcataaagaccacctaagctttgacagctgacttgtagtgggtcagcgtgcgggcagaagggtcagtggcattgatccacttgggcatccagtaatggctcagccagtcagcccggcctgggtaatggcgttcaaagacttgacggtagtaatatccttctttggttttaggagtattgaagggaaatttctgggctgcatttgccatcattgcatcatcaacctgatgttcaacgtattcctgtaaaatcttaaaccaggaattcttaactgaagttattccatcactgaaggcttcttttggtcgccagagaatctctttgggtatcagattggaatcctcaaacgtctctctcaggagatgtttttctatcccattctttggaattctcatttctggtggcagagacaagtaataggaagaaaatcgatgatctagaaatgggactctcagttcaagaccatgggcagcagtagttcgatctgcgcggagaacatcaaacaaatagagttccctcagaagcctctcactctcctcctcggctttttcaggagaaggagccttgtgaaaatatatgtaaccctgcgtaagttcatctgatccttctccagagaagatcaccacgctatctgtgttcttccgaatatacttggaaattaaatacatacctactgaagcacgaactgttgtaatgtcataagtttccaaggaaaatatgacttcatccagagcctgaatgccttcctcagagttaaaaaggacttcataatgttcacttccaatatgatctgccacctttctagcagccagtaaatcggggctgtcttccatgccaattgcaaatgtctggagaggatactgtacttgggcttctttcagctgcttcaacagagtggcagcaaccaagctggagtccaagccccctgataaaaggcagccaatccttctgtctgtcatcaaacgtttctttacagcattattaaaaaggatcctgaggttgttcttcacagtttctatctcaaaacctggaaagagtttctccacattgtcatagagggcgtgcaggggttcatcccgacagtgatgatatttaaccatttccacggatgcaactttgccatttggctttaaatccaaaacttcatagtgtccaggaagaaaaggctccacttttaaaaagggagtcgcggagtgcttcaatgtaacaagacctttagcttctgaacatacagccaaaaatccatcttctgtcattgctttaaacaaaggtctgactccatatgtatctctacccaggaacactttcttattggcagtatccagtaaaacaaatgcaaacacaccatccaacatacaaattgtttgctcaattcctcctttgtcataaagatgaaggattatctcaccatccactttggtctggtattcaaattcaaaatgctgttgcatcttcttatggttgtagatttcaccattgtaacagagccacaaatacggatatttcttcactcgaattggctgcattccaaacagcgggtcaactaccgccaaccggtgaaatccaaagcagcagttggtgtatccattgacattctcaaaacggaatgcatctggacctctgtgtgcaatcttcatagcactcagacactgaacagaaaggcaatcatcactgccaaacagcgcccaaatgccacacatggtgcaatgaagctataagctttcttcaagtgatttattcagatgtgattgaagaaaatctgggcgtaagcaggtcagggtgatgtggcgggctgaggccagggatgtggacagcttgacgggcggcgaggccgctggcgcttataccgacctggctcctgtaacgcgtgcgggaagtttcatcatgcctgcgcctcgtgcc

SEQ ID NO: 121550 - DNA, 564 bp, Homo Sapiens
gatgggagtctcagttcaagaccatgggcagcagtagttcgatctgcgcggagaacatcagacgaatagagttccctcagaagcctctcactctcctcctcggctttttcaggagaaggagcctatttcacaaaccgaaacaccaagagttttgcttttggcacacaaagcagtttttctttctccctctccaatccttgtgaaaatatatgtaaccctgcgtaagttcatctgatccttctccagagaagatcaccacgctatctgtgttcttccgaatatacttggaaattaaatacatacctactgaagcacgaactgttgtaatgtcataagttttcccaggcaaatatgacttcatcccgagcctgaatgccttcctcagagttaaaaaggacttcataatgttcacttcccatatgatctgccacctttctagcagccagtaaatcggggctgtcttccatgcccattgccaatgtctggagaggatactgtacttgggcttctttcagctgcttcaaccgagtgcagcaccagtgggagcaagatccgtagatcgac

SEQ ID NO: 121551 - DNA, 381 bp, Homo Sapiens
aaaaatgaagtgcatttattaggataatcaacagttaccaggtccagttctaaacggaatgaaaactaccagctctcctgaaactaactgtaccctcgttaagtctcttagtgtgtggaactgtttcttcatctgaaaattggaaacaacaagacatgcaaggtacagcatgaggtaacgtgctcagggtgctttcaacagctagacttgtatactagttccagctgcgcagctctctagctaggtgactttgaacaagcagtccaaccttctgagctcccattttctttcctgtaatagttggataaaatcacctcgtagtggcaagaatcaagagacttctcaaaagttaaacatagaggccaggcgcagtggctcaca

SEQ ID NO: 121552 - DNA, 970 bp, Homo Sapiens
  misc_feature (76)..(106): n is a, c, g, or t
  misc_feature (626)..(654): n is a, c, g, or t
acagaaatgacatatccaatatattcatatatatatacacacgcattgtgtgtgacaggttgggatgtgtgtgagnnnnnnnnnnnnnnnnnnnnnnnnnnnnnnnttacctttatttatgcatgggatacaacaatacacctttttttcttcatatgaaccaccctcccactgcccattaggtgctagtcagtactatttaaaatacagaaatcctgttcattaaaatatcttaattaaaatagacatttcttcccttagaaaaagaattaaaaccttttagggcctagctttaaaaagcaacatgctacagctgatttattttggtagttgtttttatggatgtgaaaaatattaccactgcaactagcaagaactataaatgatacattattgcaagtgttctaaaaaatcagaacaaaactaatttattatagttctgtcttcattatacaccacgtgttggtgagttaaacacaacaaaattgtcttttcttttaaaagtgtctactaaagataaaaagaataagataacaattaacatgtagtttgttacattaaaaaatctgatatacatatttctattgcctgttagcttgttctaagcctctttaactattacaacnnnnnnnnnnnnnnnnnnnnnnnnnnnnnttcattgtttaaaggcaaacattcaattcagttgatacaacattacagtacagtcaactaacatcattcaacgaaggtaacaagtctagccttagcttcttgagttaaaagtctatagaccagattgctacaaaagtttcaatgctgcttcaaaaccgtatgttagctttttggaggacaaagtactttctacggatggcttcagaaggggtcatgctactggtaaaagcacaggggaaccccatcctgtcattaatcattttattgagcactgtagttagaacagcattattgagtttagcacaacaactaaaat

SEQ ID NO: 121553 - DNA, 706 bp, Homo Sapiens
  misc_feature (210)..(270): n is a, c, g, or t
  misc_feature (614)..(614): n is a, c, g, or t
acattcagtttaattccatttattattctttaaggatacatacatggagataaagtgatgaaagacaagaaggctatggtcaacacaaagttcagtacaggggttccctctatcagacagggatagagataggttcaggaaaccgcacacggtacctcaaaggaaaggcaataaggtgggtggtaggcacacaggggtttgtttattgtnnnnnnnnnnnnnnnnnnnnnnnnnnnnnnnnnnnnnnnnnnnnnnnnnnnnnnnnnnnnnccattgcatgtatgaaattttttaaaaattcaaatggcttataacaaaaacaaattatgtataatgtctcaaatggtgaatcacagcctggaggctcttaatttacctccactctatcattgaaccctggctaaaactgctgctttgtttctattcccctcatacttgagagtagagatattgccctgctctgacaacacttaccacattttaggggcttgatccatgctgacagaaaggatgaacaaacaaacctgacatgtatttctagaagaactaggaaaactctgaagatttgaatcacaagtaggcagtgatcattttggtttcacacatttctgcanacctacagctcgttccctctgatcacttcctccaccctccttctgttctggtgcgtagggcttgaaatcgttcagtgctgagatcaacctcg

SEQ ID NO: 121554 - DNA, 1014 bp, Homo Sapiens
  misc_feature (208)..(264): n is a, c, g, or t
cagtttaattccatttattattctttaaggatacatacatggagataaagtgatgaaagacaagaaggctatggtcaacacaaagttcagtacaggggttccctctatcagacagggatagagataggttcaggaaaccgcacacggtacctcaaaggaaaggcaataaggtgggtggtaggcacacaggggtttgtttattgtcatnnnnnnnnnnnnnnnnnnnnnnnnnnnnnnnnnnnnnnnnnnnnnnnnnnnnnnnnntccattgcatgtatgaaattttttaaaaattcaaatggcttataacaaaaacaaattatgtataatgtctcaaatggtgaatcacagcctggaggctcttaatttacctccactctatcattgaaccctggctaaaactgctgctttgtttctattcccctcatacttgagagtagagatattgccctgctctgacaacacttaccacattttaggggcttgatccatgctgacagaaaggatgaacaaacaaacctgacatgtatttctagaagaactaggaaaactctgaagatttgaatcacaagtaggcagtgatcattttggtttcacacatttctgcaaacctacagctcgttccctctgatcacttcctccaccctccttctgttctggtgcgtagggcttgaaatcgttcagtgctgagatcaacctcaaacaatgccgttcagaaatactgttttcttctgctttctgatgtggctgctacaaaggtaataggggccgcagccactctgcccttgtcttctgcacccaattcagagaacatggccaccagcctgtggcttcagtgtactcaggagatcagtcatccatttgaaccaccccaccccacccaggggctgagtgatttaactccatcctcagtcctgatcactgtctgagatgaatctgtggtgtcctcccaacaccctcgtgccccggccgtaatggccgaattcccgggcatatgtccggtaccgtcgactg

SEQ ID NO: 121555 - DNA, 410 bp, Homo Sapiens
  misc_feature (233)..(265): n is a, c, g, or t
tcagtttaattccatttattattctttaaggatacatacatggagataaagtgatgaaagacaagaaggctatggtcaacacaaagttcagtacaggggttccctctatcagacagggatagagataggttcaggaaaccgcacacggtacctcaaaggaaaggcaataaggtgggtggtaggcacacaggggtttgtttattgtcattattattactctttatactttagcnnnnnnnnnnnnnnnnnnnnnnnnnnnnnnnnntccattgcatgtatgaaattttttaaaaattcaaatggcttataacaaaaacaaattatgtataatgtctcaaatgggtgaatcacagcctggaggctcttaatttacctccactctatcattgaaccctggctaaaactgctgc

SEQ ID NO: 121556 - DNA, 1831 bp, Homo Sapiens
accagcaaatgagttgacttttattaagttctgacagtgggccacacacgatgaaggtgcccgcatgtgtgttcttctatgaacgccctcctccctccaaccctgggcattggccctcactatttccattctagaaaaggaaaccgagctgcagagcagagggggaactggcccagtgccgtcgagctggggcaggtggctggagttgaggactaggaactggctcccagagcgtctgaatcctctctcttgcctgcccctacctcatggcttagctcccccactctcaggttgcacctatgagagatgctagagcctccccatccaggcccaacctgccagaccagtccaggcagcccctcacaagatggttttcttcacatggtctcgggggcggtctggtaagagaggaggatgactgtctgagcccagaaagatgaggtcacccgaaaggaggtcgtcttgtttgcaggaagaggtggtaccgtgggggtgatgacctgtgcacatggcttgagctttccttgctgccaggcactcgtggcatctcttgctcaccaggtagatgagctccacgaggttgagcaggatgcagatggcagctgtggccaccatgaagagggtgaaaatgttcttctctgagggcttggagatgaagcagtccactatattgggacatggatctgcgtggcacttgaccacaggagggaggatatatttggggtagaatgagtggaacacatagagaaaggcgatgtccacgctcgccttgaacactaggctgcagacatatgtccaccagagcccaccccgcttcttgccggggttcaggtaaaggcgcccactgttctccccatgggcttctcggtgcctcttctcctgaacctcccggtaggccacgtgcatgaccacgagcagtgaggggcatgtcaccaggataagctgcagggcccacaggcttcaacgggcttccccgaaaaccttccccgcttctggatatgaaattcaagctgcttgctgagtcctattgccggctgctgggagccaggagagccctgaggagtagtcactcagtagcagctgacgcgtgggtccaccatgaactggagtatctttgagggactcctgagtggggtcaacaagtactccacagcctttgggcgcatctggctgtctctggtcttcatcttccgcgtgctggtgtacctggtgacggccgagcgtgtgtggagtgatgaccacaaggacttcgactgcaatactcgccagcccggctgctccaacgtctgctttgatgagttcttccctgtgtcccatgtgcgcctctgggccctgcagcttatcctggtgacatgcccctcactgctcgtggtcatgcacgtggcctaccgggaggttcaggagaagaggcaccgagaagcccatggggagaacagtgggcgcctctacctgaaccccggcaagaagcggggtgggctctggtggacatatgtctgcagcctagtgttcaaagcgagcgtggacatcgcctttctctatgtgttccactcattctaccccaaatatatcctccctcctgtggtcaagtgccacgcagatccatgtcccaaatatagtggactgcttcatctccaagccctcagagaagaacattttcaccctcttcatggtggccacagctgccatctgcatcctgctcaacctcgtggagctcatctacctggtgagcaagagatgccacgagtgcctggcagcaagggaagctcaagccatgtgcacaggtcatcaccccccccggtaccaacctctttcctgcaaacaagacggaccc

SEQ ID NO: 121557 - DNA, 1507 bp, Homo Sapiens
  misc_feature (1381)..(1415): n is a, c, g, or t
  misc_feature (1418)..(1459): n is a, c, g, or t
ttttttttgagttttgaaaaatgttttattcaagaattacataatttcaaatatcttccaaaatacagtttcctagattgctacaaaagaaatttgataagaaatttaaatcattaaatatgtttcactagtatatacatacagaatgccaagcaatagtattcagccctggaatgcgtaccatgtcttttgtttttcctcatgaaaggctcaacccagcattttgtataggctatgtacaacaggcaaagttttgtattcaagaatttgacgttagctgcctcaatttatagctgtggtagtttgtccactggggtgtcaaatttgaagtctgtaggaaacagatctggggctcgaggatagatcagtctataggactgtctgattgtaacatcagcaacaccagcaatatctccaatttctttttgggtcctcttttcagctgatgcctgtgaggccatgtaaatagctgccgctgccacagagatggggctcctcccaggaaccaagtccaattccacagctttacgggctatatgtgtagctgccatctgtacttgtttaggaagacaaaggttggaacagaacctggacatgaagtccccagttgtaatcaaatccacactggtttctagcgctttcaaaataagtttaaaacaccgaccaatttcttttcttagaaattcgtgatacggcacatatttctttaaatgtcctaggaaccccttcttgtctacaggcaatatagagacaagcagaagctatagcatcattagctcttcccttcaggctcttctgttcatatacttgcttgaataaattatttgttcgatcaactatatttcgaggtagattgattctgtctgccatggtagtgatttctttgaatgcattcatcattgcccgatcagaactgctcattgttctccgattctggtacttagaattgccaaattcgtcaaaacttgcagctcctgtgcccttgccaatcatggtagacaaatctccatcactcagaagaggattctgagaatctccaactcgagatggatcttttgttgctttgtcattgctgaaagttcgccattcagatcccacatcaataacccggtcacctacaaccaagccacattcaggacagatcatatcaccggctctgtagtcctccactaaaatcgcatctggatggtttggacatgtgactcttggaagagcatccaaacggctggtagacgccatcttcacggcgactgcggtgcccgcaacaagacacaacagacacaccgaaagcaggaagcgaatgtggcgaagagacgcgcagagatgagtccccggccgtaatggccgaattcccgggcatatgtccggtaccgtcgactgnnnnnnnnnnnnnnnnnnnnnnnnnnnnnnnnnnncgnnnnnnnnnnnnnnnnnnnnnnnnnnnnnnnnnnnnnnnnnnatacaaagcggcggccccatttatgttaagggttcaattgaattcaag

SEQ ID NO: 121558 - DNA, 1047 bp, Homo Sapiens
ttccctttacagtactttattaattttgagtccatgttttacttgactaaaaatacaatgtatgaaaatttatctttaatagcattttccataagctactataacaatttattgatacatctgggattcagccaggtcttatagtatttaaatttataacccctgccatgcttagcattaagtaaatcagtatgcaagcagtatttaaggcaaagctttaagaatactttaaatttcatttgtaaatacatagatgcaagactgtttccataggaagtcacaaatcctcaaacagaaatatgtgtgttctcaatgttaccctgatacagaaatcaaacttggaagaaatatttttacattagaaaaaggactcagtataaggtgaaaacaaaattcccagtgggctagacatgaacaaaagtattcattccccaaaaggcacatttctttataacagttttttcaaatctacctccctatttaatgaaagcatattcattaaatatgaaactatgcatacattaaaaaccaggatttgtttttaatgtgctttagcagcagtagattctaaaactgtgtcttcttgtcctctcattagtttgaataatcacactccctagagatcagagcattgagtctgaaatgtcaaaatgctagagaaaagagggagtaatttttaactacccagaaagaagatgcacaaatacatcttttcctacgtaggtcacggcatatgttggcttttataatttgggatttctcctaattgatgacccaccctattgggcagtgaggcatagcaaagtgttcctcagttatcacaggaaacttcaataaaatcttacatattgctatgggtattcacaaaagaggaaaatgaagttgacttagaggataagactgattaaaagacactacaatgcatattagactgaattgaagaagagaatggatttgtcttatttttcaaaatttgttttcactttgcacataaacccccggccgtaatggccgaattcccgggcatatgtccggtaccgtcgactg

SEQ ID NO: 121559 - DNA, 871 bp, Homo Sapiens
  misc_feature (770)..(830): n is a, c, g, or t
tttgagaaaactattgtttatttagaaaaaaggttacactggtagaattcggcagataaaaaaattctcttttaaaaatgtcactgtgaaacttttccagatgaaagttcagcaatacaaagctcctacagctgtagaattaaaacaattatgttttgatccccccgccgccaagatttgtctaacataattacaagaaaaaatggcaagggacaagtgatcgctggtacctttttcttttttaaacacgtttaatgttgtacatgtactatataaaatgattcctaagcatttcataagacaatgctcccactgcttttagtgactaatattaagaacaagccaaataataaattaaaacagttttaaaatgaggtaaaatcaaaagggttcaacaattgtttattttcagtttcaaacaataaaaaggaagcatttcagaatggaaataaaaactgaacccaggcaatatttagttaatctaaagtaaaactctgtacacaggtaaccttatgcagcacattgtgctaaaagtatggaacagttaacactttcagccattactgaaaataaacatgtagaaactaagcaacaagttaaaatacagtaatgcacaacttaacaattttaagttttccacatggagcaataaagcaggtaactgaataatttaaggagatgcaaatggccctcttcattcttaattctcggcaatttactcaggaaaataatttctggtcgcagccgaacagttccagtccgatctcacnnnnnnnnnnnnnnnnnnnnnnnnnnnnnnnnnnnnnnnnnnnnnnnnnnnnnnnnnnnnngacttgtccaaatctttcttgtccatttctctctccttact

SEQ ID NO: 121560 - DNA, 1600 bp, Homo Sapiens
  misc_feature (1313)..(1376): n is a, c, g, or t
tcgtcggacctagtcagctgggtagacagtagaattctcacgccagagctgtcgctgaatcgcagcatccttcagtgtcccatctgagtattctagttctgggctggaactcaacatgtcctgaggtctcatgctgggcatgatgtgatctgttgccattcacgctgaggatctgccctgcaggttatgagctcaccctcacagacctccacgttgtccccaggttggaagttgtgctcccgctccttccctgtgctctcagtcaccacctccaggtcaatgccctctggctggtcctcaaacttttccagctcagagagtgttggcttcacaccctccgtgatcacagcagacatggcgaagctcttgaacagaaagcccttccggctgtaacggttcccctcaaagatgaggaagtcaccatcagaggcaacatcaccccccagggacctgatcttctcagcatcaaacagcctctgtggaggccgcttaaacttcttccttttggcaaaccagtctttcaagctcatgcgggccttgatgcgatcgtagtcgatgcgtgggatcatcttcagggagatggtgttctggctgggctccacgtagtccacctgagcaatgtcatccttgtagatgccccgcttgaggcggacccaggactttggtttcaggttggccacctccttcaccactttgagcacgtctgtcatctccttgatgggcaccatctgctggttccagtagccaagccgcaggttgcccaccccctcaatggcctgcttcacgtgggtctgcttgtaggcctccacgtagatgtagcccttcacatgctctggtgccactactgacttgatctgcaggggcgtgtctgtgaactggtaggcaatgaacttgcgcatcaaggaaatggccgtggcccgttcctccccaatcttacatttgacagtccacagattgggatccttgactcctgggagcagctgctgctgggtgatgtcgtctgagagctcatcagatcctccatacaccgtctctcccacagatgacttggcgtatttcttcatgtaatactcgcccagttcttcttctcgctggtccctccagaggttttgcaggcggcgagccccagaacgatcttcatccaggacaacattatcgatattggaggcttcaatctcttctttctctagaatgtcctctgctccatcctcccactggtcctcgtcctcatactcatcgtcaacatcagcctcgtccagaatgaagcctcccatggcggggtttcttggggggtcggtcatcatcttcttccnnnnnnnnnnnnnnnnnnnnnnnnnnnnnnnnnnnnnnnnnnnnnnnnnnnnnnnnnnnnnnnntctcactgcccgctgcactccgccgctcttcgtctacctcggcctcctcgccgtcactgctgcgctcgctgtcctcctcctcggaaaagttgctgtcctcgctgtccgacatcttccgctgctgctgggaaagacagcagccttggcgcgtcccacaatcctgcggtccaccccgagcctcagtttccccgctggttccctctcgggctccacctccgccttcg

SEQ ID NO: 121561 - DNA, 992 bp, Homo Sapiens
gggggtttcccaaaagcccgccccggttgccctcccagcactgggggtgccatggggcttgctgattccggggactcataggggcaaagcccaccccccgggaaagttggtcacatcacggggcctttgagcccccagccagccaccaggtggcgggtcttgcagacaaacatgcccccggtctcccaccagtttcttgcaatgtagaaggcgaagcttcggaagagatggcgaatctccccttcctcggcctgagtgggggccatcaatgaccttaacgatgtctttcacatggatgttgttctgctctgagtccaaggccacagcaaagcggttgtccttcttccgggtcacagcctgatgtctgacagtcaccaccttcccgtacatgttcagcacctggaaggtctcccgttctagtcgcacgatgacacccacagtctggggatccagctgcaccagctcgccccattcatgctggcccccaacatccacacctgatgctgtctctgagcagagctgcaggtcccgggggagcaccttcagctcatgcatggtgaggtcagagaacaggataacgaaattctcctccacccgcacaatgaggcctgtgtcgccctcgaatcggccagcaatcaccttcacgtggtcccccatcttgaagtattttctaagttcctgggctgggaactccaacatgtccttgaggtcctcatgcttgggcatgatggtgatcttgttgccatccacgctgaggatcttgccctgcaggttgatgagctcaccctcacagacctccacgttgtccccaggttggaagttgtgctcccgctccttccctgtgctctcagtcaccacctccaggtcaatgccctctggctggtcctcaaacttttccagctcagagagtgttggcttcacaccctccgtgatcacagcagacatggcgaagcctcgtgccgaattcgccacccaggcctcgctaccttaga

SEQ ID NO: 121562 - DNA, 794 bp, Homo Sapiens
aggtctcccgttctagttcgcaacgatacaacccccagtctgggattccaactgcaccaggttcgccccaatcaggctggccccctacatccacacctgatgctgtctctgagcagagctgcaggtcccgggggagcaccttcagctcatgcatggtgaggtcagagaacaggataacggaaattctcctccacccgcacaaatgaggcctgtgtcgccctcgaatcggccagcaatcaccttcacgtggctcccccatcttgaagtattttctaagttcctgggctgggaactccaacatgtccttgaggtcctcatgcttgggcatgatggtgatcttgttgccatccacgctgaggatcttgccctgcaggttgatgagctcaccctcacagacctccacgttgtccccaggttggaagttgtgctcccgctccttccctgtgctctcagtcaccacctccaggtcaatgccctctggctggtcctcaaacttttccagctcagagagtgttggcttcacaccctccgtgatcacagcagacatggcgaagctcttgaaccgaaagcccttccggctgtaacggttcccctcaaagatgaggaagtcaccatcagaggcaacatcaccccccagggacctgatcttctcagcatcaaacagcctctgtggaggccgcttaaacttcttccttttggcaaaccagtctttcaagctcatgcgggccttgactgcgatcgtagtcgatgcgtgggatcatcttcagggagatggtgttctggctgggctccac

SEQ ID NO: 121563 - DNA, 1642 bp, Homo Sapiens
tttagcaccaaacagcttctttttattgaaagacggtacgacaaaagcaagctgtggggaggaggtacaggaaggtggggaccctcccccagactctactcagattccaatgagcaccagggagggaaaagatggaaaactaaaaggaaaaacaaaaggaaatccagaacaatccgcctagccctgcaggaggatcttgtgtcacagccaagggccagggaaggaaggaggatcactcttcatccgacgaagtccaccggccctgcctgcttcaggcttccaggagcttccccaggaagcggaggttgaggatcttgagctgctcatcaaggtccatacggacaatgccatcctcaccatcaatgctcagtaggacgcccgtggcttcccgatcctcgcccaggatcactttcaccttgttgttcttggtgggggtgataggctccaggtgctcactggaaatgctgacaaccttctcactgtccttcaggtacacagagcacatgccccccgtgacactgcggatgacacctgtctgtcccaccacctgtgtatccaggtaggtgtcccgcaccttcacctgaatgtcagtggttacccagtcgctggagttctgctcgatgcctgagcctggcgtgtgtgggttgtagccaccaggggagggagctccaggtgtcataggactgtagccaacggggctcgggctggggctagcctgataggccatgggcgacggtgtagggtggtagctggctggggagtgggtattctggtagcctgctgggcttggcgccacctggtggtagctctgggggctggggctgggctggtaggaaccttgtggggagggggcagcatagggagagaactggtctgtgttgtacatgtccggcgtccctggcgtctgcgggttgtattgtgggttgacctgtggggacgaggggtctgggtagccaggtgtttggggattgggggttcccccataggcctgcggggacggggtgggctcatcatcgaaagcatactcatattcttcctcagcccgtgacggcgtgttggggttgttggggtcccaggccccactctgggcaggagtgcggctgccatcatgcaggggcgtctgtgagccgtagtgtggggtgcggctaccatcctggaggggtgtctgtgagccgtacatgggtgttcgggagccagagccatacatgggcgtctgggagccatacatgggcgtcctcccataggtcgaggtcatgccgcccgggcgccgtgagcccaccgtggtgagccgctgacggtccacagagatggtctggcaggtggagtgcagctccacacgggccgtggactctgtggcatctttcaccacaccgatgtagcctttgtagggcccctgggagatgcgcacggtctggccgatgagttcgttgtccctccggccccggcccctgctcatgccaccactgccgccacctgggctaccaaagccgccacgctgacctccagcactggggtgcatggggctgctgatccggggactcataggcgcaaagccacccacggtgaagttggtcacatcacggggctttgagcccccagccagcaccaggtggcgggtcttgcagacaaacatgccgccgtt

SEQ ID NO: 121564 - DNA, 2130 bp, Homo Sapiens
agttaaaagtttaatgtagttcccaaatacatttcatatgacaatcttacataaatgttccaaaacacaatgggcgttatctcgttgtactcgtcactagctggctaaggcttaaagcagagacgtgtgactgggtctctcgggagggcctctggttcttcccgggctcaggcttgctggctggctgctccccacaaaggcagggccccacagcagggtgggaagggtgtgggtggcggagaagccaggggctctggctggacccagaggctggcgacacgcggggtgaaggaacgaggtctccagtcccagtgagaagccgtgacaagtcttaatgtgccatttcaattcaaaggaggggagggaggaaatgttcttgtttgttcgctcatcaatatgatgaggtctcgtgtcccaaaccacattcaggcagttcccgagtctgcttttgaacaggacgtgcgggtccagactgtggccggcccagtggggtgtgtggttcccggccccgcacctggacgctgccggtggggtgggggcgggtgggcgggtggatagacggacaaagcagcagcctggtgtgcagccgggctcccggccgctatgtgctcccggtcgtctgcccgtccccttcgtcaccagcaccagctgcggtggcccctgaaggagccaggacatcgtcatcgtcgctgtcgtcctcctcgttggatggggctgccccaggctcaggcgcgggcatcttggcctcctgctcctgctccacgcggctgcgcagggccaggatgcggtggtgcagggctgcatacaactgacctgtgtccttggagctggccgagatcaggaagaccttcacgccctggtcctcggtgtccatggctgtgatgcgaatgctcttctcgctggccttgtcgatctgcatctgggcccacagcttggtgttgaggatcagtcgcaggctcccctgggtccgcatcactagtcgggactgtagtgtgccgtcatcggtggacgccatgtcattgagtctgagcagcccccggcctctctccacccaggactgtgaggtcttgtcaaagacaaacagcttgcactgcatctgtaacacattgctctccgcctcctccccggtgatgacttccactttttccaacaaacacttccgcgctgttgccttggtgtaggcggctgccgactcagccagggactctttctcaggggtggcctcctgggacgaggactcagaccctgactcggcagctgcattttccctgttggcatctgaactgacctcgtttaattttggggggctcaaaactcgctcgctcatgttctggccaaatacaaatttgttgctggaggcgtcggcactattggttgagttctctaaactggaactgatatactggaggaaatagttcgttgcggttggcgtgtctgcgctggggtgtccagcattcttcatgtcggcttcgtccacgctctcatttatcagcttaactctgtccctcaagttctgcccaaatacaaaggcttgctgtgtggcggggtcttttttctcacaggcttcctcttcagaggcattgctggactcatttttctggggctctttctcctcaagtgcacacacctcatcggcagcttcggaaggacttctccatgcagcagtgtcaggggatgctgcgggcactgcccccgtgcagtctgctgggaggctgaccccgttggtgccactgctggggacagtctgggacagcgcctttggctgcggagcttgtaacactgccgggcgaagcacgctccgctgctgctccttgggcttctggcttggcagacctgcgctgggggcttggccgtggatcagcgttggtggcttcaaccggaagccactgctcctttcctctgactgtgagggtgggaactgggttaaagaggatgttctttctcgcttgacaggagggcagtaatttccatcttctctgtcagaatcttctccgccttcaggactggagccgccagctgacctcttttgtcctttatccttctgaaacacaaagacgggcggagcaatggcaggcttttctcctcgtgccgaattcggcgcgccgtcgacttcatactctctcgccctca

SEQ ID NO: 121565 - DNA, 1080 bp, Homo Sapiens
  misc_feature (185)..(212): n is a, c, g, or t
caaggtagcgaggcctgggtggcgaattccgcacgaggccctgcccagggctccccaactataggcctgggacccccgcccagcttggggggctgctcgtacgagtgtagacactgggcccattggacgtgctgttaactactatcttcatttcccacttcccctctctgattgggggtgtatannnnnnnnnnnnnnnnnnnnnnnnnnnncgaaggctttgttttggtttcttaggttaagatgctctcgagcgttgagcaggcacagctctgtcgaggtccctgtcccccacctgtggttctggcctctgaggttgggggactacttgtttcccaccccaggttcctccaggccaagtcatggggtgatgaggagttggggccctgtctgtcctaggcctggagagtgcctgtctgggaaaaggtcactggacctggaagggtccccagggtcccctgactcccgtctccatctgtcacgtggttcaccatcatcaggcaccaggcgcaaactgcttcccgctgttggccatcccttccccagccacaggtgtccctgcccccaggacagtccagggccaggggcttctgtgagaggcagagggggaccctcaccaaatcttggtggaagagcccaggggctggtcccagaacaggcagtctcacaagcacgcagcacactggagtggacgcctgtgcccacccgagcctggagcatggccaagagccagcttgcaccacccacctgggaggccgaggaggaggtcccctgggcacagggcctctttgggacttcagaggaaatctcccagtcccactctcggagggttaagagaaggcctcctgcagctgtgccgtccacacctttaggtcgccagagccctggcccccagcccccagcaagcctgagcccgggaagaaccagaggccctcccgagagacccagtcacacgtctctgctttaagccttagccagctagtgacgagtacaacgagataacgcccatgtgttttggaacatttatgtaagattgtcatatgaaatgtatttgggaactacattaaacttttaactaaa

SEQ ID NO: 121566 - DNA, 912 bp, Homo Sapiens
attttcgggccaaggtgccattttttccctgtttgggcatttgaactggaacctttgtttttaatttttggggggctcaaaacttcgcttcggttccagttctggccaaatacaaaatttgttgctggaggcgtcggccactattgttgagttctctaaactggaactgatatactggaggaaatagttcgttgcggttggcgtgtctgcgctggggtgtccagcattctccatgtcggcttcgtccacgctctcatttatcagcttaactctgtccctcaagttctgcccaaatacaaaggcttgctgtgtggcggggtcttttttctcacaggcttcctcttcagaggcattgctggactcatttttctggggctctttctcctcaagtgcacacacctcatcggcagcttcggaaggacttctccatgcagcagtgtcaggggatgctgcgggcactgcccccgtgcagtctgctgggaggctgaccccgttggtgccactgctggggacagtctgggacagcgcctttggctgcggagcttgtaacactgccgggcgaagcacgctccgctgctgctccttgggcttctggcttggcagacctgcgctgggggcttggccgtggatcagcgttggtggcttcaaccggaagccactgctcctttcctctgactgtgagggtgggaactgggttaaagaggatgttctttctcgcttgacaggagggcagtaatttccatcttctctgtcagaatcttctccgccttcaggactggagccgccagctgacctcttttgtcctttatccttctgaaacacaaagacgggcggagcaatggcaggcttttcttcgttcgccaggtccgccattttaccctcgtgccgaattcgccacccaggcctcgctac

SEQ ID NO: 121567 - DNA, 1043 bp, Homo Sapiens
  misc_feature (344)..(344): n is a, c, g, or t
  misc_feature (414)..(414): n is a, c, g, or t
gggcccaccccgggggggaaaagggaaccgaggttctcccaagcccccaagggaggaaacccggggccaaatttctaaaatggcccccttttccaattcaaaaggaagggggaggggagggaaaatgtttctggttttgttcggctccatcaataaggaggaaggtttttggtgtccccaaaaccccatttccaggccagtttcccgagttctgcttttgaaccagggacggtggggggtcccagacttgtggcccggccccagtgggggtgtgtggttccccggcccccgccccttggacgctgccgttggggtgggggcgggtgggcgggtggatagacggnacaaagcagcagcttggtgtgcagccgggctcccggccgctatgtgctcccggtcgtctgcccgtccccnttcgtcacccagcaccagctgcggtggcccctgaaggagccaggacatcgtcatcgtcgctgtcgtcctcctcgttggatggggctgccccaggctcaggcgcgggcatcttggcctcctgctcctgctccacgcggctgcgcagggccaggatgcggtggtgcagggctgcatacaactgacctgtgtccttggagctggccgagatcaggaagaccttcacgccctggtcctcggtgtccatggctgtgatgcgaatgctcttctcgctggccttgtcgatctgcatctgggcccacagcttggtgttgaggatcagtcgcaggctcccctgggtccgcatcactagtcgggactgtagtgtgccgtcatcggtggacgccatgtcattgagtctgagcagcccccggcctctctccacccaggactgtgaggtcttgtcaaagacaaacagcttgcactgcatctgtaacacattgctctccgcctcctccccggtgatgacttccactttttccaacaaacacttccgcgctgttgccttggtgtaggcggctgccgactcagccagggactctttctcaggggtggcccctcgtgccgaattcgccacccaggcctcgctacct

SEQ ID NO: 121568 - DNA, 1055 bp, Homo Sapiens
ggagggtgcattttcccgggtggctttggaacggcccttgtttaaatttggggggttcaaaacttcggtcggtccatgttgtggccaaaatacaaatttgttgcgggaggcgtcggcattatgggtgagtttttctaaacggaaactgatatacggagggaaatagttcgttgcggttggcgtgtctgcgctggggtgtccagcattctccatgtcggcttcgtcccacgctctcatttatcagcttacctctgtcccctcaagttctgcccaaaatccaagggcttgctgtgtggccggggtcttttttcttcacagggtttcctcttcagagggcattgctggactcatttttctggggctctttctcctcaaggtgcacacacctcatcggcagcttcggaaggacttctccatgcagcagtgtcaggggatgctgcgggcactgcccccgtgcagtctgctgggaggctgaccccgttggtgccactgctggggacagtctgggacagcgcctttggctgcggagcttgtaacactgccgggcgaagcacgctccgctgctgctccttgggcttctggcttggcagacctgcgctgggggcttggccgtggatcagcgttggtggcttcaaccggaagccactgctcctttcctctgactgtgagggtgggaactgggttaaagaggatgttctttctcgcttgacaggagggcagtaatttccatcttctctgtcagaatcttctccgccttcaggactggagccgccagctgacctcttttgtcctttatccttctgaaacacaaagacgggcggagcaatggcaggcttttcttcgttcgccaggtccgccattttacttccttaagccctcccacaaggccccgcgccggcccaggctcgcctgctttctgccagaaactcccgcgcgtgcgcacttaacaagccgactccgtgtgaggcggccagctcgcgcctgcgcgctgaatgccgcgcggaggcgagccccggatcgcgtgacctgcagagcagcctgcccatcccggaaaa

SEQ ID NO: 121569 - DNA, 2052 bp, Homo Sapiens
  misc_feature (161)..(176): n is a, c, g, or t
  misc_feature (212)..(212): n is a, c, g, or t
  misc_feature (553)..(564): n is a, c, g, or t
gtgggggattcccaagccccttatttcagtgccccggggtttttccttggggaaaccagctattggccccctgttcccctttaccttccggggggccccccgggccccaaacgaatgtgttttggaaacttttttcagggccgggggccgcccacaaggannnnnnnnnnnnnnnngtctgttttcggtgtgaccccggtgtgtgttttggnttgactttgaaaaaatctgattttattttctcaatcaaaatgaagtatttcatgttaatttagactgtttagctttccactgatatctcaagatactttccagatattaacagtactcagaactgtgtaaaagttaaccaccaaaaccatgttttaaagaaaaaagtttaaatgtaagactaatgtcttggggactttactaaatgtatttctaaaaaaacccttctcaaatgtagaagtattggcaattctaatttaaaaattttaaatttttaattattggaaatttaagtagcaatagtttcaagagctaagaatcagattgctttttaaaacagaannnnnnnnnnnncctgagggactcatacttgacaactccagttaaacataatactccacccaaatcccaaatttaaatgcattatgtcaccctggaatagtaaaattataaaatggtatttctaaattataatatatatacataatgcaccattttaactgtcacatttaccagcagaattatgaaatcaaaaacaaattctacattcaagggacaaacgataaatgctctttcattgttttaagagtccattccattctttgttgttttctactcccatattttaaaattatgaccaaaggagcctgaaggccaagtcaatcccatttccctgaacccaactgccagtaggtacgggccctacatacgcgtcctttaacaagccccgttctcaaaaggctgggggtatttatataagaacttattccaaagtgactctaagatccatgttcccaagatctagtacgggctattcatggttctgaggcatgtccagcatgcaggcaaacttatctgttcaaattgaggtaaaacagacaaaaaacacttaatattaacagaagctacataattaaaactaaccttctgctgcttatttaagctaatgatgtattcttaccaaacagagaccctcaagtcaatcatttcttttgattttagttaccacccccaaattaagcctcttctttcaaagccattattagttaaaaaaagttttaaaatggaagaaaaatattttttccagaacttgtattttgtaattagtgtgatgcaatttctttttatttttcaaacttagaaataactcatgtatggtactatttggtatttttttcagataccaaggaataccgacaggattcataaataggattttctgacactggcaggaaagtctgctaacgtttacaaaataccaaagactcttctttcaagcttcaaagatggctgagaattaacagttatgattagtttttcagtacaaataaaaaaattaaatcttgatttttttggccaacattttaaacagtcaaattttactgtatttccaggtttcaaatcaaaacaaacaaaacaactaatgaaaattacccaattggcaacaagtcctgtattccaatgttatttttaaaccaccaattataacctactgccagtaattatttgtaagtacctgcttgttttattaagcactggtcagttatataaaagaataatttgcaagaatgatacttggcaatgggttaccttaatgcttctggaataaacagaagcattaacaaaacaccagatcttaagctcttttaaatctgtaatttgaattacccaaaggatttttaaatgttacttttccattgaaggactgtagggagtctaatcccagctaacatggttgattttaaaaaacaaataaatccctaagccacatagtaatggaatactacacttgcccggccgtaatggccgaattcccgggcatatgtccggtaccgtcgactg

SEQ ID NO: 121570 - DNA, 1618 bp, Homo Sapiens
  misc_feature (671)..(683): n is a, c, g, or t
  misc_feature (1601)..(1601): n is a, c, g, or t
tggaccggtccggaattcccgggatatcgtcgacccacgcgtccgtctactatgtatcctggcctgccatcacggttggaacgagaacttaaacagctttacttagaacgagttttgaagggtgatgtggaaaaactttctaaatttaagatccgcattgaagacccaccccgcagaaagcacatggtattcctgggtggtgcagttctagcggatatcatgaaagacaaagacaacttttggatgacccgacaagagtaccaagaaaagggtgtccgtgtgctagagaaacttggtgtgactgttcgataaactccaaagcttgttcccatcatacccgtaatgctttcttttttcctttattgccaatctttgaactcattcaactccaggacatggaagaggcctctctctgccctttgactggaaaggtcaagttttattctggtgtcttggggaagctttgttaaatttttgttaatgtgggtaaatctgagtttaattcaactgcttccctacatagactagagggctaaggattctgtctgctgctttgtttcttctaagtaggcatttagatcattcctgtaggcttcctattttcactttactgctctaatgctgctagtcgtagtctttagcacactaggtggtatgcctttattagcatnnnnnnnnnnnnnctttaacaggagcttttacatattactgggatggggggtggttcgggatgggtgggcagctgctgaaccctttagggcatttcctctgtaatgtggcgctttcaactgtactgctgcagctttaagtaccttaaagcttctcctgtgaacttcttagggaaatgttaggttcagaactaaagttttttgggtgggttttgttgcgggggggagggtaacaatgggtggtcttctgatttttatttttgaggttttgtcaactggagtacgtagaggaactttatttacagtactttgatttggcaggttttcttctacttgtgctctgcctggagctgtttccatatgatataaaaagcaagtgtagtattccattactatgtggcttagggatttatttgttttttaaaatcaaccatgttagctgggattagactccctacagtccttcaatggaaaagtaacatttaaaaatcctttgggtaattcaaattacagatttaaaagagcttaagatctggtgttttgttaatgcttctgtttattccagaagcattaaggtaacccattgccaagtatcattcttgcaaattattcttttatataactgaccagtgcttaataaaacaagcaggtacttacaaataattactggcagtaggttataattgggtggtttaaaaataacattggaatacaggacttgttgccaattgggtaattttcattagttgttttgtttgttttgatttgaaacctggaaatacagtaaaatttgactgttttaaatgttggccaaaaaaatcaagatttaatttttttatttgtactgaaaactaatcatactgttattctcagcatctttgagcttgaagaaggtctttggattttgtaaacttgcaactttctgccatgtcnaaatccattatgatctg

SEQ ID NO: 121571 - DNA, 771 bp, Homo Sapiens
aaacactttttgaaatagagtgtgctgtgtttaaaaccaaaaatatgcatgttgtctctgaaaagtaggcattgaaacagacttttttgtagtcagtgttaataaaacggatcctgtttgggccttcattgttaaggtggacttcatggccactggaaggtctgttttggtgttacctgagtgtgacacaggccctggggtgtgcgtgtttctctaactgtctacacatgcacataggcagactttctcatagaatgttcttgaaaggtgattggcaaagtcatgcaggcccgccttaaagcgctgattagaacagtccaacacagtccgacctcactcaatacccacaaccatcgaaaatggattcttagtaccagacaatcccagtaatgaaggtttagtttccttgaaggaaactacagaaaaggaaagaagcagaatgagaaaggaatggtacttaggtgtttggtatgctgctcacgtgaagtcagcccacaccagccaaaccctcgtggaagatctgctgcaaccattatctttgttcttgagttcatcatgcatttaaaatgagatgcaagagcatttagcataccatgtaaatatggaccttttaaaattaaaatactattggaagtgctttcaactcagccacatcttagctattagttctttgtgttgtcttatcaaagtttaatggatacagttccacagttgttgatgtgtttgtgtgtatattcgatttttataaagatggtagtaagtcaatacaaa

SEQ ID NO: 121572 - DNA, 1051 bp, Homo Sapiens
  misc_feature (884)..(884): n is a, c, g, or t
  misc_feature (892)..(892): n is a, c, g, or t
  misc_feature (895)..(895): n is a, c, g, or t
  misc_feature (935)..(935): n is a, c, g, or t
  misc_feature (960)..(960): n is a, c, g, or t
  misc_feature (1003)..(1003): n is a, c, g, or t
  misc_feature (1008)..(1008): n is a, c, g, or t
  misc_feature (1014)..(1014): n is a, c, g, or t
  misc_feature (1016)..(1016): n is a, c, g, or t
tttttaataataaaatacaatttattaaaggaatcatgtttacatagatacagaacatcttggatatttcaacaccatagcaacacaaaattaatttcttcatgtataaaagatgtgctgaaagctgcatgcctcatcagtttttattttattggttatggctatagttgacatctttccatataaaaacaaactgcacagcatcacatatagagtacagacatcttaagttcattcacaaagttaatttttctaaactgcccttcaaaaatttacatctttgctcaattctaaacattcaacaaaattagcttcccaagaaacaaaaatgatacccaatttctttgcttttctagaagtaactttccatttgttcatgtattttgatatgttatattccccacccgaattaaaccctttgttaaaagaacaacctactttaggttcagtctaaaaataaagcgtactagattctggagtgtttttcaaatattttaaaatatttgccacttatggttaaaaaaaacgtgaataagaatatcatgtgagtgtagataggcaccatactatacactcctctcagaatcatttctagaatgtgtataatcccggcgttaagtgatggtgggaatgatttgcctttaaaagcctacaaattaaaaggggaaagatgctaagctagatgctggttttctgtaaagatgaatttgtgaaaaactgctttatggtctagaaatacgtaagcctggcattagctgatggcacattctaacattttatagcattaaagaacatcgactcattccattggatggaagccatggtgacatttttacagagctgtagccaggatgcacttcacgtcctctcctcaattgtcgttnttcatcancanagcctatgtatatgtatataaatgagttgctgtgctctcnacatggagcaatgttgatttgatgntatgacgtataaacggtcccctgctctctttggctttcacaangttcnggtagntnttggcatgcagatccctgcttcatcgtgatttcga

SEQ ID NO: 121573 - DNA, 1411 bp, Homo Sapiens
gatggtgcgaatgattgcctgtaaaagcctacaaataaaaaaggggaaagatgctaagctagatgctggttttctgtaaagatgaatttgtgaaaaactgctttatggtctagaaatacgtaagcctggcattagctgatggcacattctaacattttatagcattaaaaaacatcgactcattccattggatgaaagccatggtgacatttttacaaaagctgtacccaggaatccactcaacgtcctctcttcaattgtcgtttttcatcaacaaagcctatgtatatatatataaatgagttgctgtgctctcaccatggagcagtgttgatttgatgtaatgaagtattaaacgttctccttgctctctttgccttcaactaagtttctgttagtttttggcatgccagattctctgcttccatcttgatttcctatctcactgcatgaccatcttagagctgttactaattcaaagtctggggtttttttctcccaaaggtcagtctaaggaggcagccacctatatgacatgacgtcagagggattaggaaggacccacactcaccttccctaaggcttactgacttgtacataaggtttataatttaggtatacccaccctaagtaacatctgattgaaggcatgaacttgcttgagatccactctcagaaacaggtttagaggggaaaagaaaaagaatactgggagcttcaaggaggaagaaaagggccacagaacaaggggaagctgggcctatagcagtccagcatggtaaggggccaacagttggcttctaaaaggtaatgggttaacacagtcatcctaataccacctcctgagatgctgaattttctctcagctaagtacacatttctattttcagggacagcttacataaatcagaattatatttttaggaatctttaatcatgaattcctctctaaatttcaaaatattttatgacttctaaggaaccttttttttacaataaataataaagaaagatttgggatttgcagaatcttctggcccaattaaaaacaaaagaagctgtaaatatccagaacttaatagatgtataaattataaacaaaacatgtccctgccccaaggtattgaaattacattactatagatacatcccatttatgaggtagtccgattcctcagatgtaatgggacgagcttttttcagtttctgtttcaccagtcgtagtcggcatgcaaccatgagaagcagcagagcagtgatagccaaacccagcgccaggggtagcactgcacctgtttctggggctgggtgttcccctcctcctccatcaccctttgactcaaatatataactttcctcttttctgttcttccctgaggaactactatctggcatcacaggaatgatttga

SEQ ID NO: 121574 - DNA, 1192 bp, Homo Sapiens
  misc_feature (868)..(868): n is a, c, g, or t
tatagtcaatgaaaagagtatattcttttattggtttttgttcatacatgttaagtttcaactttcaataataaaattcaataaatttgattccttaatcataaaaactggctttacacattatttacatattgtcaaagtccatacaaaacatcacaaggatttgattgactctatgcatggtaccatcacacaggaggagggagctaatccagtaacatacattcaaagattaaattgcagatatgcacagtgtatttggcactgttcattaatattataacaccttcctctcaaagacaggcattcttaagcgttagtcacgatataccagaatttgctattcacattaaaaccaccttttaaactttataacagtaaccgattattatagttttaagaaacaaaacacaatgagaactgggaatggaattcaaatcctccaacttcttgctatgctccaagctgccatccataaaacaggtttaattcggtaatttttccattgtggggagtgtcaacaagaaacaatttaaagacagtattttccaatacaaataaagacacatacttttgtttaaaattaccagttcttcttgggagtgcaaagggagccttgatgatgtacaacttgtgatgcttttggcaggaattacagaacaaccaatgccattcaagttgtggagattgtactagcaggtgaactcattaagagaaggttctggaatgactacatctgacatcagaatcctagtagtttgtagtttgcctcttcctagaacttcaagagactcaaatcataggctacagatgtactttcaagtatatacttatgaatggaaggagaaaataaaagcacgaaaatgcnaaatattaaacctttactggcttgggctatattccagtaggtaatttatttgactaacttaactttaacaacgattaaatcccttcattttaatcaggtccattaaatttcattcattaaagctatacatactccagaatgtttataagacatttatacctatcatgtttacaaaaggcataaattcagtcttcagctgcactacaaatgcctcaatataatataatcacagtataaggaatcagaaattctctggttagatatgctgttagcttcgcacgcgtggtcgacgatatcccggtaattccggccggtacagcctgc

SEQ ID NO: 121575 - DNA, 351 bp, Homo Sapiens
ttttcatttttgttttttgacctctttgtaattgcatgtacttctctatgtaattttcctcttgatctctactatcgtttgcttgtgtttctagtccttaaagttcataaatttaaaaaggagatttcaggatggcctttatggacgttgtctggacatacatcctcactttcttctgcagtttaccctggttttcctcagacagaggctagcgcatccccccggagtccttgttctccttaagagggtctcgctctgcaaagcattggcgccatggcttttcctttgcatgggtgtgcacaccgagagccaaagcccgggccaggccagacaacgagcgacagaaagaca

SEQ ID NO: 121576 - DNA, 3327 bp, Homo Sapiens
  misc_feature (3137)..(3245): n is a, c, g, or t
tgggccccagggccgttacgagtcgagagtgagatagacctcgtggtgtggtggttaatggtagaaaaacgtgctttcggtaaaaaagaattcgccgtctacggggcgctcgggtgcattacaggtgtgcggtattggattgaaagagcgatcgggtctggcccaagggggcctttgtttgttttgctgagcgatccccagaccctaatttaagcggccgggatgtccctgaggatagccacgctgggggcccatcgtgcgcttacccttatcgggcccggcgcaccccaacgagaggggctaggaaaaacttctttgaagggccgaaggccgccccacaagatgcgttaaaactcgggccctttgctctaggagagaaaaaaaagagtttatttagaaagtatcatagtgtaaacaaacaaattgtaccactttgattttcttggaatacaagactcgtgatgcaaagctgaagttgtgtgtacaagactcttgacagttgtgcttctctaggaggttgggtttttttaaaaaaagaattatctgtgaaccatacgtgattaataaagatttcctttaaggcagaggctggtcgagatgctgctgttatcttctgcctcagacagacagtataagtggtcttgtttctaagattcctaccaccagttactttgggccaagtatccacatccccttgcgtatgggaggtgggtgaagagtgttggatgcaaagtggttattatgggaagtagctcgatggtaaaaggacaaacacctatctatcttagagcttaagcctgtatgtgcttattcccaagggagatagaggtgtttaatcacaaggacagcatgagttagaggacactggcatcaacagctgccacagccgtgcacaccagggccagagcagcccactgacatctgtctttggtcttgagatcaaatgcatcccattcttcatacattagaaggtcgacctccttgaagcagaccaagtatagcaagcctctaaaaggactactgagaaacagaatcagaaactctagaactctagttagggcccttcagcagggctgcagagcctccctggatacccaggcctgggaaagcctgtctggtcttgtcaccccaggtgacaaatacaactggaatctttcaatgagttaatgagatactgagaatgagcctcgtggaattttccatgcctaccctttctaaggaagacatccaacagttcatgtgggctctggcttcgtgttaacatgaggaactaaagacatgtttcaccccgtgagaaacagaaggatcccctgaacagtaactgatttgacaagtatcgacacataaagttatggcatcagcattctcttactcaggcacggtcagaagtaacgctgctttcatcacggctaacctctcacactgagagaagtattcacagcaacagaagctccagcagcggccgtgaaggtatcttccagaggtgtgggtttttgcatttcaatctgctccatgctacggaccaacacagtattgagtcaactgtgaccttaagatcagaggaacgtcaatactgccacaaggccacctttccagaactcgtgggcaggtaaactatgctttggatgtgctttctttcaccaaaatcactcaactcaggagccacaaatagtccagcaatttcatttccctcaacgctattttagtctcaaaggaaaccatgtaaatttcatcaagagaaggtcaaaggggatatatcgccactgaaaatgtttacacagtgaccatgagttacacatttacttagagaaacttaacttaataaagaatctgtagagtgtgttggcttggaaaacacacacacaaagaagatacctcacgcttagtatgttctgctttctgaacagccaccactgggaacccagtggcctctgtgggactgaactcctaaacgcagggtgcgggagctgggcaggagaggtgacctccaactgtgttcctaaagttcgtctttcgcttggctcaggacaaagcggtgtaacgagtcaaggtctctgcctccactgtgctcactgactttcttccctcctcggaaaagcaataacgtggggtagcctcgtaccgaatacttgctgcagatattccgttcagcagtgcagtctacttcggcgatcttgacccccgccagaccagggaattcctttttagagagttcctcccaagtaggagccagagtcttacaatgaccacaccatggagcataaaacttgatgaaggttattccttctgcaatggtgtcatcgaagttattttcagtgagtgccaacacagtgcccttgtcagcctcgggctcagctgccagcaccggggcctctgagggcgtgacggtctccgtcgctccagtctctgtgcgctgcagctgcgactccacgtactccctcagtgactccaaatcccgctttcccttgtactgatccacctttttcccatctcggaaccagagaagagtgggatagccacgaacctggtttccggagcagagttcatagtgctgtgtacaatcaaccttgccaatcttgacagtttcggaatgttcaaggcccagagccagctgctcccaggttggagccagggctttgcagtgaccacaccacggagcgaagaacttgataaagtggtcgccttgtgcaacgtgcagctcaaagttgcttgctgagagctcatacagcccttgcttgagctcgggggcactgggcggttccacttccggctctggtgtcactggctcctcgttcagtgtctgcagcatccagttttccagtgtctggaagtcccgaaggaccctggtacttcacagcttcttggcctggcttgaaaagctttaaggtggggtatcctcgcaccccctgggcggagcacacgtcggagtgggccgtgcagtccactttagccacatagactttggcatcttccatgctgttgtatttgtctcccaggtcattccaagtcggctgcagccgctggcagtgtccacaccagggcgcgaagaacatgacgaagtgcgcggcgctctggatcccgtgcgtgaacatgtcggccgtgtacaggtgcttgctgtgcgggtcctgtccgtcctnnnnnnnnnnnnnnnnnnnnnnnnnnnnnnnnnnnnnnnnnnnnnnnnnnnnnnnnnnnnnnnnnnnnnnnnnnnnnnnnnnnnnnnnnnnnnnnnnnnnnnnnnnnnntcagggccgccggccgggccagcagcgagaggaggcgtcctgggcgcgccctcgtgccgaattcgccacccaggcctcgccc

SEQ ID NO: 121577 - DNA, 915 bp, Homo Sapiens
  misc_feature (80)..(80): n is a, c, g, or t
  misc_feature (731)..(839): n is a, c, g, or t
tatttccgctgcggcttcccgcgtattcccctccagggactccaaattccgcttttccctgttctgaatcccccttttcnccatctcgggacccagagaagagtgggatagccacgaactgggtttccggagcagagttcatagtgctgtgtacaatcaaccttgccaatcttgacagtttcggaatgttcaaggcccagagccagctgctcccaggttggagccagggctttgcagtgaccacaccacggagcgaagaacttgataaagtggtcgccttgtgcaacgtgcagctcaaagttgcttgctgagagctcatacagcccttgcttgagctcgggggcactgggcggttccacttccggctctggtgtcactggctcctcgttcagtgtctgcagcatccagttttccagtgtctggaagtcccgaggaccctggtacttcacagcttcttggcctggcttgaaaagctttaaggtggggtatcctcgcaccccctgggcggagcacacgtcggagtgggccgtgcagtccactttagccacatagactttggcatcttccatgctgttgtatttgtctcccaggtcattccaagtcggctgcagccgctggcagtgtccacaccagggcgcgaagaacatgacgaagtgcgcggcgctctggatcccgtgcgtgaacatgtcggccgtgtacaggtgcttgctgtgcgggtcctgtccgtcctnnnnnnnnnnnnnnnnnnnnnnnnnnnnnnnnnnnnnnnnnnnnnnnnnnnnnnnnnnnnnnnnnnnnnnnnnnnnnnnnnnnnnnnnnnnnnnnnnnnnnnnnnnnnntcagggccgccggccgggccagcagcgagaggaggcgtcctgggcgcgccctcgtgccgaattcgccacccaggcc

SEQ ID NO: 121578 - DNA, 1764 bp, Homo Sapiens
  misc_feature (40)..(68): n is a, c, g, or t
  misc_feature (71)..(81): n is a, c, g, or t
tagtttgtagatagatttctcatagatttatttctgcgtnnnnnnnnnnnnnnnnnnnnnnnnnnnnnccnnnnnnnnnnnaatacaatctatatacccttcccttccccaccaaactcacaaaaggagattaaacccttccaggattgccatcaagcttcccgagatggccagggccaagaaagaatcatctctcaacatgttaagaaacggctgccattcttaggctctggggttgaagcagcagcattcccaggacccaagggccagagagaggaaaagaaatgactgtagtgtgacaggattctaggatgaacatgtccagtgactcctggcatggcagactggctcccagaattctcagggtgtgagtaaaggtgggggccctatggctcttcagaggctgctcaataggtcaggggtagggtataggaactggggatcaggcatgcagggatggggtggcagaaaaaacgcctgtgggttatgctccagacagagcgacccccatcagggctacccacctactcaatgacatgtaatgaacagggacagatgctgagctcttaaggaaacaagggagagagcatggcagcggggagcaatggaacacatgaagtcacaaaaaaacagaaagtaccaacaaaaacatgacctacatttgcctcctccctagagaaggtgtgatctatgtttggggttaggggaggtgaagggtcatgaacctaggattatcagctggccaggggcacagaaggctctctgaggactcctaagaggcaggcaggcagctgggaccccacatccccagggaggaaacgacagttctttcaattcgacttggaccaaatcttggcgctccctcggagccccttgccctttgaggctttcttgctgggctggcgctggttggtgccaggagctggttccctcagctcagtcaggtgttgctcagggtcctgagatgtggctgcggctgctgctgccgtcgtaactttaatggtttttttaaggttggcaacctcactctcaatctgctgcttcaggcccagctgctgctccttgtgttggttggcacggctcacctgctcctcaatgcctgacagcacgacctcacagcccacacaccattcctgcagggttcgggcaatggcactgaggtcctggcgctggatgtcccgcccgatgctgtagtcaacctcgagccgctggttgcgctggtccagggagccacgaagcacgtcagcatacacagcctcaatcacaaggtcttccagctgccgcacattacgcagggcaagagcctccagcaacactgcatatgggatacactttactttagcagccagggtgacaactgagaggtgtcgaagcttattcttctgagcctctgttagtggaggaagattccgggcttcagctaagtagtcagcgtatgtcccataagcaaacactgtgagcagccggaaggtagaggcaaagtcactctcagccagctctctaacattgggcatgtccagcagttctccaaacacgtagacaccaggggcctccagcacctgatggatgagtgtggccagcgctgcccccttggccgacttggctaggagcagaaattgctcctggttctgccctgtcaccttcacttccgcactcatcactgcactgagtgtgggggacttgggctcaggatgtccagagctggaagcttcgacctccagcgcaccgggcggggcccctcgtgccgaattcgccacccaggcc

SEQ ID NO: 121579 - DNA, 930 bp, Homo Sapiens
gctgccttgggcttcttctggctgccttgttgtccccgggacgggtcccctcagctcagtcaggtgtgcttcagggtccgaagaggtggctgcggctgctgcgtgcgggtggtaactttgaagggtttttttagaaggtggcaacttcactgtcaattctgctgctttcaggccccagctggctgctcccttgtgttgggttggcacggctcaccgtgctccgtcaatggcgctgacagcacgaccctcacagcccacacgccattcctgcaagggttcgggcaatggcactgaggtcctgggcgctggatgtgcccgcccgatgctgtagtcaacctcgagccgctggttgcgctggtccagggagtccacgaagcacgtcagcatacacagcctcaatcacaaggtcttcccagctgccgcacattacgcagggcaagagcctccagcaacactgcatatgggatacactttactttagcagccagggtgacaactgagaggtgtcgaagcttattcttctgagcctctgttagtggaggaagattccgggcttcagctaagtagtcagcgtatgtcccataagcaaacactgtgagcagccggaaggtagaggcaaagtcactctcagccagctctctaacattgggcatgtccagcagttctccaaacacgtagacaccaggggcctcccgcacctgatggatgagtgtggccagcgctgcccccttggccgacttggctaggagcagaaattgctcctggttctgccctgtcaccttcacttccgcactcatcactgcactgagtgtgggggacttgggctcaggatgtccagcgcccctgggtcaggctctgcggccgctacctggaagcttcgacctccagcgcaccggcgggccaccgctccgtcacctcctcgtgccgatg

SEQ ID NO: 121580 - DNA, 956 bp, Homo Sapiens
  misc_feature (936)..(937): n is a, c, g, or t
tttcttttgtcttggggcttgggcgcttgggttggttggccagggaagctgggtttcccttcaggttcaggttcagggtgttgttcaggggtcctgaagaatggggctgcggcttgctgctgcgcgtcgtaactttaatggtttttttaaggttggcaacttcactctcaatctgctgcttcagccccagctgctgctccttgtgttggttggcacggctcacgtgctccttcaatgcgtgacagcacgaccttcacagcccacacaccattcctgcagggttggggcaatggcactgaggtcctggcgctggatgtcccgcccgatgctgtagtcaacctcgagccgctggttgcgctggtccagggagccacgaagcacgtcagcatacacagcctcaatcacaaggtcttccagctgccgcacattacgcagggcaagagcctccagcaacactgcatatgggatacactttactttagcagccagggtgacaactgagaggtgtcgaagcttattcttctgagcctctgttagtggaggaagattccgggcttcagctaagtagtcagcgtatgtcccataagcaaacactgtgagcagccggaaggtagaggcaaagtcactctcagccagctctctaacattgggcatgtccagcagttctccaaacacgtagacaccaggggcctccagcacctgatggatgagtgtggccagcgctgcccccttggccgacttggctaggagcagaaattgctcctggttctgccctgtcaccttcacttccgcactcatcactgcactgagtgtgggggacttgggctcaggatgtccagagctggaagcttcgacctccagcgcaccgggcggggcccctcgtgcggaaatcgccactcaggcctcgctacctaggaccgtatggggtggtttttnnaatcactcgcgggtgggcc

SEQ ID NO: 121581 - DNA, 1098 bp, Homo Sapiens
  misc_feature (174)..(174): n is a, c, g, or t
  misc_feature (255)..(255): n is a, c, g, or t
  misc_feature (410)..(410): n is a, c, g, or t
gacccccctgaggtcccccaaaacacccgggaagtttcccaaccaaaacccaggcccctcctttggctccctccctagagaaagttggatctattttgggtttaggggaggtgaagggtcatgaacttaggatatccagctgcccaggggcacagaaagctctctgaggactcntaagagccaggcaggcagctgggaccccacatccccagggaggaaacgacagttctttcaattcgacttggcccaaatctnggcgctccctcggaggccccttgccctttgaggctttcttgctgggctggcgctgttggtgccaggagctggttccctcagctcagtcaggtgttgctcagggtcctgagatgtggctgcggctgctgctgccgtcgtaactttaatggtttttntaaggttggcaacctcactctcaatctgctgcttcaggcccagctgctgctccttgtgttggttggcacggctcacctgctcctcaatgcctgacagcacgacctcacagcccacacaccattcctgcagggttcgggcaatggcactgaggtcctggcgctggatgtcccgcccgatgctgtagtcaacctcgagccgctggttgcgctggtccagggagccacgaagcacgtcagcatatacagcctcaatcacaaggtcttccagctgccgcacattacgcagggcaagagcctccagcaacactgcatatgggatacactttactttagcagccagggtgacaactgagaggtgtcgaagcttattcttctgagcctctgttagtggaggaagattccgggcttcagctctctaacattgggcatgtccagcagttctccaaacacgtagacaccaggggcctccagcacctgatggatgagtgtggccagcgctgcccccttggccgacttggctaggagcagaaattgctcctggttctgccctgtcaccttcacttccgcactcatcactgcactgagtgtgggggacttgggctcaggatgtccagagcctgggtcaggctctgcgggccgctacctggaagcttcgacctccagcgcaccgggcgatcccgggaattcc

SEQ ID NO: 121582 - DNA, 1072 bp, Homo Sapiens
  misc_feature (39)..(39): n is a, c, g, or t
  misc_feature (45)..(45): n is a, c, g, or t
  misc_feature (58)..(59): n is a, c, g, or t
  misc_feature (78)..(78): n is a, c, g, or t
  misc_feature (113)..(113): n is a, c, g, or t
  misc_feature (117)..(117): n is a, c, g, or t
  misc_feature (122)..(122): n is a, c, g, or t
  misc_feature (160)..(160): n is a, c, g, or t
  misc_feature (200)..(200): n is a, c, g, or t
aaagaaagggggttgatctatgtttggggtttagggganggtggnaagggtccatganncctagggattatcagctgnggccaggggcaccagaaggcttctctgaggactcntaangaggncaggcaggcagctgggacccccacatcccccagggganggaaacgacagtccttcaaattcgactggaccaaaatctnggcgctccctcggagccccttgccctttgaggctttcttgctgggctggcgctgttggtgccaggagctggttccctcagctcagtcaggtgttgctcagggtcctgagatgtggctgcggctgctgctgccgtcgtaactttaatggtttttttaaggttggcaacctcactctcaatctgctgcttcaggcccagctgctgctccttgtgttggttggcacggctcacctgctcctcaatgcctgacagcacgacctcacagcccacacaccattcctgcagggttcgggcaatggcactgaggtcctggcgctggatgtcccgcccgatgctgtagtcaacctcgagccgctggttgcgctggtccagggagccacgaagcacgtcagcatacacagcctcaatcacaaggtcttccagctgccgcacattacgcagggcaagagcctccagcaacactgcatatgggatacactttactttagcagccagggtgacaactgagaggtgtcgaagcttattcttctgagcctctgttagtggaggaagattccgggcttcagctctctaacattgggcatgtccagcagttctccaaacacgtagacaccaggggcctccagcacctgatggatgagtgtggccagcgctgcccccttggccgacttggctaggagcagaaattgctcctggttctgccctgtcaccttcacttccgcactcatcactgcactgagtgtgggggacttgggctcaggatgtccagagctggaagcttcgacctccagcgcaccgggcggggccgccgctccgtcacctccggcagctgttccaagcctttcctgccacctcccatcccggaaattccgg

SEQ ID NO: 121583 - DNA, 762 bp, Homo Sapiens
aagagtagaaaattttatgctaaaaaagattcgcaatgaaacaatcagtagcacattgcatctgttaagtgtcccagctccctgtaatggttatgtttccaacggttgtttctttccaagataatggtgtaggtgttacaccccaatcttcatgtccacattctgcaggttccttgtctcatcagctgtcataaactggtctggagtttctgacgactccttgttcaccaaatgcaccatttcctgagacttgctggcctctccgttgagtccacttggctttctgtcctccacagctccattgccactgttgatcactagctttttcttctgcccacaccttcttcgactgttgactgcaatgcaaactgcaagaatcaaagccaaggccaagagggatgccaagatgatcagccattctggaatttggggtgtccttataggaccagaggttgtgtttgctccaccttcttgactcccatgtgagtgtccatctgattcagatccatgagtggtatgggaccccccactggggtggaatgtgtcttggtctcctgataaggaacgattgacattagagttggaatctccaacagtaactgcagtaactccaaaggacccagtcttagctgaggtcactgggatgaaggtcctgctttccttcgtgtgtgggtaatgagaggtataccttccagtaagtagttgagcttcagatgatttgggtctctcttccactgtgaatcatcctatgctgatgtcaat

SEQ ID NO: 121584 - DNA, 1108 bp, Homo Sapiens
  misc_feature (25)..(25): n is a, c, g, or t
  misc_feature (69)..(69): n is a, c, g, or t
  misc_feature (77)..(77): n is a, c, g, or t
  misc_feature (978)..(1012): n is a, c, g, or t
aggaggtttgtgttttgctccaccntttcttgacttccccatgtgagtgtccccatctgattcagatcnccatgagntggtatgggaccccccccactgggggtggaatgtgtcttgggtcttctggtagcagggattctgtctgtgctgtcggtgatccagggactgtcttcgtctgggatggggtgtacagtagaaaaggtgtaaaagatgtaacctcctgaagtgctgctcctttcactggaggagccgctgctcacgtcatcatcagtagggttgctggggtagatgtcttcaggattcgttctgtattctcctttctggacatagcgggtgccatcacggttaacaatagttatggtaattggtccatcaaaggcattgggcaggtctgtgactgatgtacaatcttcttcaggtggagctgaagcattgaagcaatatgtgtcatactgggaggtgttggatgtgaggatgtacacccctgtgttgtttgctgcacagatggagttggggtggatccggggaatcaccacgtgcccttctatgaacccatacctgcaggtctcaaatccgatgctcagagctttctccatctgggccattgtgggcaaggtgctattgaaagccttgcagaggtcagcggcctccgtccgagagatgctgtagcgaccatttttctccacgtggaatacacctgcaaagcggcaggttatattcaaatcgatctgcgccaggctcagcggcacgaggcagagtccccaggctgcgtgccaccaaaacttgtccatggtgtccggagcgaacggagggcgcgggcgaaaggagctggaggatccctgggcgcggggcaggggccggcggaggacgggacgaggatggcggaccgaacctggcagaggctggggtccgctgggcaatgaggcccccggccgtaatggccgaattcccgggcatatgtccggtaccgtcgactgnnnnnnnnnnnnnnnnnnnnnnnnnnnnnnnnnnncgccgcttcctcgctcactactcgctgcgctcgtcgtcttcgggcttattaaaagcgggcggtcatggccgctctcatcatttgagttgtcagaac

SEQ ID NO: 121585 - DNA, 4439 bp, Homo Sapiens
  misc_feature (167)..(176): n is a, c, g, or t
  misc_feature (392)..(422): n is a, c, g, or t
  misc_feature (2584)..(2616): n is a, c, g, or t
tgcacgccgtcggaatagaggttgggagtcagtgtccgtgccaagctcttcatgcaggcggactattccgcgttgggtagcgcccctgtgcgctcggaagggttgataggttccctttgggcgctttgatattgttctgtaggggtaggttgggcccaagattgggnnnnnnnnnngtggtgagggggtcgttgtcccagaggttggcgccactctagccctggtgtgtcccgtgccgcgggcgttgtttagacggtcggccctggccttggtggtgagttagtatcggagctctctatattggggccccgcgtggtgtcgaagagaagctggggtcgtcgttaaaccgttgggcccctcgaagggatatcttctattgggggcccccctgnnnnnnnnnnnnnnnnnnnnnnnnnnnnnnncctttagtcttttaatgttagccttttaatattttccaataagtgctttcaactcagcaatatacatatcatgctttcctcattattattgatccatcaataaatatacaaaaaccagaggaagggtgtgctctgaaaagtcaaagtaacaataacagtggtcattgtacagcacaagaatgaacaatgggctattctttgaaaactcaaaacaaatgatttacacaaagacatatctataacataaaggtgaatggaccatgttattcttattcttaagtacattttgcttttccagataagtcaaatgtttcctctctcctactcctctgatataacagtattgaatgaatgttggctacaaaatcaattcttggtgttgttatgaatctcaatataaaacttttggaaaggttctgctagaaaagccaattctaccaggcttgaaatatggattcgaagatgtcttttgtctcttttgatttttcactcagagctaattttaagggaagtcttcaggagacacaaaagatttacaattgcaagaaaaattacatctttagctcttaggttgctttgcaaaataattaaatgttggccttttacttttataaagacccagtttaaatgacttagcccaggtcacctgaaaatcattggtaaaaatgacgtgtagtcaagctgtgcttccagagttacgcccttgagatcaagggagtgagaatacatcttattccataaacttcaggcaatgttgcaagggtttgtgaagacttggccagctctccgttgacaatggccaaggaatagaagctctagacctcccttatttctatcgtgaaaacagaggtatatccaagtgagggactacaacagtaataaagggaaaaaagtatttaattccaaaataaaattgaaaataacctcctgtctcagcctctttttgggaatatctagaaggagtggaaaaccatctctggctatgagacttgtatcactacccctttctccctggggcgacaggtagaggctgttgtaaccattttgaaccttgtcctggagtggcttgttgcttttcagttaaagagcttgagtgagcctgtctgggcctctggcagacccaggaaatctctgggaaaacaagaggcacttgaacactagtggcagtaacaacacatagtggcctaatgtccagtttctttcaagttgaaaagaaaataaaaagaaatccagaccactgaaaatggatctggccaatgatgttcacagaagagaaaggaagtttttcaagattgtggggtgaagtggagggagagaggaaggggagagggtagacagggaggagcagaggctgggaatagtgcagaaagttgacatctctcctttaaagatattctatagatcaactctgtctaagcccagccctgatttagtcaggagcttttcttcttctttctgctttgtggtctgagaagcattgcctgttaagcacataagtttaggtaacaaatgacttttagtaggagcctcagaaaggagataccatttaacaggagccgttgctttatagatgcaatggcttctatgacaagcagcctttggaagttctaggaccaatcggacaccctgactgatgaataaatgccacaaaggacttgccaagtgggagaaaatatgaggttagaggataaagccagtactctcttgtttggtcataaacttgcctatctggtgataagattccaatgatgggaatccctttaaccttttgagggactccccaggcacttaactcatcctaaatagcaactgcatcaagaacagacactggtgtgtttaagtttacaaatacagccataaaaatgtcaaacaggatctacatggcatcatccttcccctttgccaatctctttcatttccattggcttcttctcttattgtaagacatcaaaaggcacttccatattgtttttggaaatcactaatagggccagcctctatgaaatagggccccagggataacaggtcatgcaaacttaatgtgactttgcaaagcctttcacaggagagaacaggtggccattaaaccataaaagaggctgaagctcctcagcttccaactctgattccaggacaggatggaaaacctttggacagtgtcnnnnnnnnnnnnnnnnnnnnnnnnnnnnnnnnncagtgctgccctccttggtcttccatgagatttggctgagtgggtctgagtgggaactcagggtctctgagatgaagccttagaagagtctccttaccattctcagctcttcctgatacattgtagggacccagacagtgctggtttagaaactgaagaatcacagcacaaaaggtgaagatcgaagaagtacagatatttattatgaatcagtttaaacccttttgtgcctctgacaaagtaactttaaaaaattatactgatcaaaggactgatccagggtttaatatttcaaaaacacagataaatagtttactacagataaatagcttcaccctttgggtgtctcccagaagcatctgaaaaatttctagagggggtctgttgaagatgtgtaactagtacaccccaacccccaacctcagtggaaagcaatgcccagggattaggctatggaagggcaaaatggacccattcaaatttcctcccagggaccaggccctattaaccctgggaaatgtccttagctggtgggggaaaggttggcgatcaggaatacatatgtgtagtttttgttagaagccatccatagcacacccgagggatgaaaggcctccaagtgggaactggaacgatcaaattcttgctgattattaattgggccctaatttcagaaagcaatgctgtttttacaaattggacctgactttaaagaacaaaacacaaaacaaaaagagtagaaaattttatgctaaaaaagattcgcaatgaaacaatcagtagcacattgcatctgttaagtgtcccagctccctgtaatggttatgtttccaacggttgtttctttccaagataatggtgtaggtgttacaccccaatcttcatgtccacattctgcaggttccttgtctcatcagctgtcataaactggtctggagtttctgacgactccttgttcaccaaatgcaccatttcctgagacttgctggcctctccgttgagtccacttggctttctgtcctccacagctccattgccactgttgatcactagctttttcttctgcccacaccttcttcgactgttgactgcaatgcaaactgcaagaatcaaagccaaggccaagagggatgccaagatgatcagccattctggaatttggggtgtccttataggaccagaggttgtgtttgctccaccttcttgactcccatgtgagtgtccatctgattcagatccatgagtggtatgggaccccccactggggtggaatgtgtcttggtctctgcttgatgtcagagtagaagttgttggatggtctttatcttcttccaagccttcatgtgatgtagagaagctctgagaattactctgctgcgttgtcattgaaagaggtcctgtcctgtccatatcttccaccatacctgtgtttggatttgcagtaggctgaagcgttgtactatgactggagtctatatccatccttcttcctgcttgatgacctcgtcccatggggtgtgagattgggttgaagaaatcagtccaggaactgtcctctgggcttggtgttgtccttccttgcattggatggctggtatgagctgaggctgcagctgtccctgttgtcgaatgggagtcttctctgggtgtttggcgatatccctcatgccatctgttgccaaaccactgttcctttctgggtagctgttttcttccgttgtactactaggagttgtgctggatggtagcagggattctgtctgtgctgtcggtgatccagggactgtcttcgtctgggatggggtgtacagtaggaaaggtgt

SEQ ID NO: 121586 - DNA, 734 bp, Homo Sapiens
  misc_feature (644)..(644): n is a, c, g, or t
gattcaatttttttatacagtgacagtcaaacaaaatttgtacgcaggtgcaggataacccgtgggacccaatttgtgcctctacaaaactgacatgatgtgtgaatggcaacatcacaatctttctacttctacattttggtatctatttcttagaagcctgctttcccaatcatgcttattatccacccttttccagatagtcgcttgtgttatctctaaagggtgctttatttgtgcactttctgtaaataaacttgatttcatatatcctgatcctcctgatggtagcgcacagtttttttgtgcattggggcatgctcaatgctgtaacaaccccagtgcagtggcgtaacacaatagaggttgacttctgttgcatatattagtccagtttggctgtcctagttggttggctttcctgacagcctttttacagattcctcccatctcatggctctgccttctctgggtcctggagtctttttgtttagctgtaaacacagaatggaggtctcatatgggagagttttgtgagccagacctgcagtgggcatgggttacttcaacccacattccactggccataattccaccatgaatgaaccaaccttcaagagaggctgcaaattcaagaccagcanaaaatgtattcttcctctgttctctcctttccttctgaaacatatgagaagtcctcctccaaactcgacaatgcaacttgtttttattta

SEQ ID NO: 121587 - DNA, 862 bp, Homo Sapiens
  misc_feature (24)..(24): n is a, c, g, or t
  misc_feature (32)..(32): n is a, c, g, or t
ggcttttttccccccaaggaaggnacaatggnacttggccccacatcccaggctaccccccaaacccgctttctcccctgctttagccccagggaggagacagtagaggtgatgggggcagccgggagggaggggccaaggcagtgatgctttcgggtaagaagttgggctgaggctgggggcacagggaggagctgcccaggtgcagttaccattgctcagtgacagagcctcaaagcttggcccagggctgaaggtaccacacgggtgtgggtgaggcaggctaagcgggatggctgcagccaaggagctgggggagggccgggctcagggctagccctctccgctctaactgatgatctgccgaggtcgtccgtagcctgtcatgccggcctggggggccagggggacctcttgaacctgtggaccctggtggacctgttctggattctccttgtggacctggggggccaggcagcccccgaggtcctgaagatccagtacccctttcacctttctctcctggcaaacctcgttccccagggggtccctgcatccctggtgtgcccgggaagcctggccgccccccaggcccaggttctcctctggctcctgcgctaccaggaggtcccggtggacccggcgggcctggctggttgcgactggactggtaatcatttggaatctgattcagcatctgattgaatctgttcatctgaccacttatcaattgttcacagacttgtcttgcaactgctcgcatcatgttctgggaagcaatgtctcccctatcacctttttctcctttcaacccagatggacctggtctgccatgatctccaggttttcctggcttcccacc

SEQ ID NO: 121588 - DNA, 1728 bp, Homo Sapiens
  misc_feature (605)..(605): n is a, c, g, or t
  misc_feature (608)..(608): n is a, c, g, or t
  misc_feature (612)..(643): n is a, c, g, or t
acacactaagagagactccctatcaacagagatggtgagggggcgtgccatattccatttcccaccccactttttaaggagtacagggggggcaaaataaaaaaccctttttacagttatttttaaaacctcccacccaacctgtgggacgccccggccccccggcgcgtgaaaaatatttttaaaagaaacaagggggccagaaaaagattttttggggcccgggaatttaaaaatcccctttccaacctcaaatcccttagtaaatgttttttatttcttttcagtaaattattaattcgttgaggggggtttttcaaacaagtcaagccccccccaaggaagtgttgttcttttatacaattaaaaaatttttatattttccttcgacctttaaatttaaaaaggccgccgccccaattattttacaccccagaagttaggttccccctcttagataaaaaaataggcagttttaccagtgcgccccctcgtgaaattttgtccagggccccccccataatatgcttctttatagggaccttttgtacaagaaagctgggttacgcgtaagcttgggcccctcgagggattttttagagcgnccncccnnnnnnnnnnnnnnnnnnnnnnnnnnnnnnnngagttccaaccccaaaaatattccaggacaagatagggggcaggctgggctggttcttcttcaatgggcttttgccgccaaggaggacagtggacttggcccacatccaggctacccccagcccgcttctcccctgcttagcccagggaggagacagtagaggtgatgggggcagccgggagggaggggccaaggcagtgatgctttcgggtaagaagttgggctgaggctgggggcacagggaggagctgcccaggtgcagttaccattgctcagtgacagagcctcaaagcttggccagggctgaaggtaccacacgggtgtgggtgaggcaggctaagcgggatggctgcagccaaggagctgggggagggccgggctcagggctagccctctccgctctaactgatgatctgccgaggtcgtccgtagcctgtcatgccggcctgggaggcccctctgttgctgcccatctgaaggccaatgacatgctttccctcctgcagctggctctctgtgaattccctcttatgctcctgcgctttcttcataaaccagttgggatctccacggtagtgcccatcattcttggtcactgccaagctgcccaaagccatcagggtcctctgcactgctgccatgtctttgccttcaaagaggtcaacagtctggaacatgtcagtcttgatgaccccatagtcctcagccgccttcaggaactgagccacctgctccatctgcttgaagaccatggagggtgggttctcgggcaccttcaccggcttggagccatcagggtacaggctgttcaccagcttgctcagaatcacgccattcttcagccagacctggaagcccaagcgcccacggtctgggcggcccacatcagggccacactgcactatgatccactccaccagccgctcctccagctcctcgtcatacttcttctcgattttggactgcacttcgcggctcatgccataggaaggacccttgttggccatgtctggggaaagaaggcttcctcagggctcgcaggaaggagtgaagacttgtgtctggatcccgggaattccggaccg

SEQ ID NO: 121589 - DNA, 1010 bp, Homo Sapiens
  misc_feature (953)..(953): n is a, c, g, or t
cggtccggaattcccgggatcctgacacaagtcttcactccttcctgcgagccctgaggaagccttctttccccagacatggccaacaagggtccttcctatggcatgagccgcgaagtgcagtccaaaatcgagaagaagtatgacgaggagctggaggagcggctggtggagtggatcatagtgcagtgtggccctgatgtgggccgcccagaccgtgggcgcttgggcttccaggtctggctgaagaatggcgtgattctgagcaagctggtgaacagcctgtaccctgatggctccaagccggtgaaggtgcccgagaacccaccctccatggtcttcaagcagatggagcaggtggctcagttcctgaaggcggctgaggactatggggtcatcaagactgacatgttccagactgttgacctctttgaaggcaaagacatggcagcagtgcagaggaccctgatggctttgggcagcttggcagtgaccaagaatgatgggcactaccgtggagatcccaactggtttatgaagaaagcgcaggagcataagagggaattcacagagagccagctgcaggagggaaagcatgtcattggccttcagatgggcagcaacagaggggcctcccaggccggcatgacaggctacggacgacctcggcagatcatcagttagagcggagagggctagccctgagcccggccctcccccagctccttggctgcagccatcccgcttagcctgcctcacccacacccgtgtggtaccttcagccctggccaagctttgaggctctgtcactgagcaatggtaactgcacctgggcagctcctccctgtgcccccagcctcagcccaacttctttacccgaaagcatcactggctttggcccctccctcccggctgcccccatcacctctactgtctccttccctgggcctaancaaggggagaaaaccgggcctggggggtaaaccctggaatgggggggccaagttccc

SEQ ID NO: 121590 - DNA, 846 bp, Homo Sapiens
  misc_feature (706)..(706): n is a, c, g, or t
gtcgcgtcacgagggcgcgagaggtacagtggtgatgaagtacgcgagcgggtacctggggagtaagggggatgagtccaagcggagtgacctcactcgctttgatacgagctgcaggagtgcacagagtgtcagcccagatcccttcgtgctagcggaaacccaccctctcagtcagcatgggggcccaagctccaggcagggtgggctggatcagtagcgtcctggatctctctcagactgggacaggcccgtggtctcattgaaatgccccggatgacttggcgtagtgcagaggaattgatggaaaccacctggggtgagagggaggctccccatctcagccagccacatccacaaggtgtgtgtaagggtgcaggcgccggcctggttaggccaaggctctactgtctgttgccccatccaggagaacttccaaggagctttcccgcagacatggccaaccaagggtccttcctatggcatgagccgcgaagtgcagtccaaaatcgagaagaagtatgacgaggagctggaggagcggctggtggagtggatcatagtgcagtgtggccctgatgtgggccggccagaccgtgggcgcttgggcttccaggtctggctgaagaatggcgtgattctgagcaagctggtgaacagcctgtaccctgatggctccaagccggtgaaggtgcccgagaagccnacctccatggtcttcaagcagatggagcaggtggctcagttcctgaaggcggctgaggactatggggtcatcaagaactgacatgttccagactgttgacctctttgaagggcaagacttggcagcagtgcagagggacc

SEQ ID NO: 121591 - DNA, 923 bp, Homo Sapiens
tccagtcgcaaccagccaggcccgccgggtccaccgggacctcctggtagcgcaggagccagaggagaacctgggcctggggggcggccaggcttcccgggcacaccagggatgcagggaccccctggggaacgaggtttgccaggagagaaaggtgaaaggggtactggatcttcaggacctcgggggctgcctggccccccaggtccacaaggagaatccagaacaggtccaccagggtccacaggttcaagaggtccccctggcccccctggccgtcctggaaactcaggtatccgaggacccccaggtcctcctggatactgtgattcttctcagtgtgccagcatcccatacaacgggcaaagctatccaggttccggctaacacattttctaagtcgccagtgctgcttacagtttgaatacatgaaaatcctgtttctgagatgtttgcgcacgtgcttattaggaaatgagtctgtatggaaatctcaccacagataatggttaacgaaccgggtcgacatcacaaaggagggtggagactctttttactaacttgaatgagacaaaagcagtggtgtcagtttataatcctgatgcatttcagtaataatgtagaaaaacattattttaaaaaagttccaacacacagccatgaggagcctcagttttgaaagaggtgcataataaaactactaaccagaggagtctatgccattttaagaaaaacaattaacctggttatagagaaatgtcttatgtaaataataacctaattgtggcttgtaaatgatttgtatgtgatcctgtcgactaaaatcacttaacaattctacaataagcttctgcatcaaagcctgccgcttgctctatgccggaataacaccaaatggaatctcctcatctcttgcttgttag

SEQ ID NO: 121592 - DNA, 1216 bp, Homo Sapiens
  misc_feature (426)..(529): n is a, c, g, or t
cagtcgacggtaccggacatatgcccgggaattcggccattacggccggggggaaggtctaagtatggccctcaatcagaaaccaggaaggaaaatattgactattttaaacaaaattatctctgtaccaaaaacagcataaaaggtcaagaaacaacacactggaaaaagaattgcaatgaatatcacagccaaatagttaatttcttattttcaaaaaatagcttctacaaatcgaagagaaaaattctaaggtctcaaaggaaaaatgagcaaaggatttgacaggtggtagaatacagaaaaagaatttaaaatagctcctaaagatatggaaacattactcatgatagcagaagtatcaattgacaaaattactcagattggtaacaaactttaagggggaaagcacttccatgcattgcnnnnnnnnnnnnnnnnnnnnnnnnnnnnnnnnnnnnnnnnnnnnnnnnnnnnnnnnnnnnnnnnnnnnnnnnnnnnnnnnnnnnnnnnnnnnnnnnnnnnnnnntacatatatattcaaacatgtgtgaaatacttctatacaggtgattgaatttcactttattcctaagagcagaagactgcaaaatagtaaatatatacccaaaagggtctaatggattagtttttggcatatcagcacatgataatactatgaagcccataaaaaagagagatctctatatgtattgatgggcgaccatctttaagatatactgtggtgttgaacaaaacaacatgctgaaaatgtctcttattcttttagaatcaatataagtctgtgcttgtaaatgcagtaagtatctttggaagtatacctaaaaattggtaatagtgtttgactccagggaagaacagatgggtgccagagtgaaaaaaagatagcttttgctttttatgacttttggattctgtaccacgtaataattttgatgtaaattttgctgtgtgtgtttttacttgttcatgtagtgattttataaattactcttttaattttctatcaatgaatatcctgggataaacccctcatgatcataatgaataatgatgtgtggagagtggggagggtttacatatgaaaaatgtagaaaatacaaaaagtgtctatatatacaaaaatgtaagtgttaacatttttatatttgcttcaagcttttttttaaataaaagaaatgcaatattgcaatag

SEQ ID NO: 121593 - DNA, 1047 bp, Homo Sapiens
  misc_feature (445)..(459): n is a, c, g, or t
tttagaaattaaaacactttaatataaacatttccagaatatagactgaccttatatcagtactttttgagaccgttttaaaactatatatcatctaagtttattatagactgtttcattttccactttcagaactagaaaatgcaaaaatacactgcaaattagatttaacaaagaaaaaatcagtttaagttatttcatacatattccttggagaaagctgagacacataaacacagaaaaacaacaataaaataccaccaacactaacacaaaaccaaggaaagaactgattttgtaacgcttggtaattctgtcctttaaaataaattatctcccatgaataaataattcactatcacagcaatttgatgagcagaagtagagacaacttcatttagggaaattacattatatgtgagatatgtgagaaacatttaataannnnnnnnnnnnnnnaagaaaatgaaggaaagtaacttgaggaaaaggcatactgaatacttttacttcacttggcttttttagagattaaagtagccatccacctagaaaaattacaataacatgaattttataaaaccaaactttttttccttcaactttgaaggaacaaaactaaaaagttgaaaatcctagagtagactcatcccaaatcactgtctcttctgtcttttcttgagtaggtttctttttctcttaagttcttgtgttctcatgttagtgttgttcagaggctaggtttaggcttttttgttgttgtttcttctttcaattaaatttcaagtttttttaaatagctttcctgaagtgacactgactgtatctacctctccttttcttcatctgatcctcttgcttttgtctaaagtccattttcttagctgatttcctcaattaatccttgggcaaacaaaactaaaagttcaatacccaagaatagactcattccaaaacacagattcttgtcttttctgtaacaggtttccttttctcttatgttctccttgagttcttatgttctttctcagaggttaagtttgggct

SEQ ID NO: 121594 - DNA, 612 bp, Homo Sapiens
aagtcacaggcgcatttattattgtctggaacatcaaggcctttcctcccctggcagtggcacaagggagggccaactctcaggaggcggccacgctgccaccagcagcaggcccatggggtggcagggtcatgggcggcagaaacagcgccttcagcttgcctgacaggctggcgatctcaggatcctgggcttcgtaggacttgaccaagcgagcaaacttaaggacacctgcaagagggagtggaaggtcaacccttctcctaaggaccagcgtgcctaagacacctggagggggtggtagtttaagcatgaactgctcccccactggctgggcagctgtttgccaaacaggacgcatgcaggcctctgtcccgtgtggtttggatgatgacatttggtctacactgggcacaactagatgggatgcagtgaatgaaaatgtcccaaggcagtgtgcttcttgctctcaggtgaaccattttagcagtttagtcactggaaccccaagaatgaacacgagaccccaggtctgtagctggaactcaggaaggctatgaggcagcagagctgaatcagtcaacaccttttggggaacaccaggatctcacc

SEQ ID NO: 121595 - DNA, 474 bp, Homo Sapiens
  misc_feature (100)..(100): n is a, c, g, or t
ggctctttattcgtgagttttccatttacctccgctgaacctagagcttcagacgccctatggccagacctcgacccaaccggcggccttgagcgctganaagcaaaggtggtcctcgcggaggtgatccaggcgttctccgcccggagaatgcagtgcgcatggacgaggctcgggataacgcctgcaacgacatgggtaagatgctgcaattcgtgctgcccgtggcacgcagatccagcaggaggttatcaaagcctatggttcagctgcgacggggaaggtgtccttaagtttgctcgcttggtcaagtcctacgaagcccaggatcctgagatcgccagcctgtcaggaaaagctgaaggcgcttgtttctgccgcccatgacccttgccacccccattgggcctgcttgcttggttggcacgttggccgccttcctgagagttgggccttcccttgttgccaatggcc

SEQ ID NO: 121596 - DNA, 1283 bp, Homo Sapiens
ccatccggtacccgccttccggagtttttcgctgccttttgggggccggcaggtggccaccttgtgcacaaaaggtgggtgacgggagcacagcggtgcgaccagcgcgcctctcttgtcccgtcttgttgtgcccgccccggacttgattgccgccgcggggtttgaggttgtgattttgatgtgtagtgtctagaagtttatttttttttaagtcacaggcgcatttattattgtctggaacatcaaggcctttcctcccctggcagtggcacaagggagggccaactctcaggaggcggccacgctgccaccagcagcaggcccatggggtggcagggtcatgggcggcagaaacagcgccttcagcttgcctgacaggctggcgatctcaggatcctgggcttcgtaggacttgaccaagcgagcaaacttaaggacaccttccccgtcgcagctgaagccataggctttgataacctcctgctggatctgcgtggccacgggcagcacgaattgcagcatcttacccatgtcgttgcaggcgttatcccgagcctcgtccatgcgcactgcattctccggggcggagaacgcctggatcacctccgcgaggaccacctttgcttgctcagcgctcaaggccgccggttgggtcgaggcggacgccatagggcgtctgaagctctaggttcagcggaggtaaatggaaaactcacgaataaagagccacgtcctacaaccgttccccacgcccctgggagcggaaaggaaacagcatccggcgcagccggaagcgcccaggcgtggcccaaaccttcataccccaagcttacaactgcatcaagaccaccaaaactacccataatttttgcacagtgaaaacaatctatcattggcaacaaacatcataagaggggctttccggtaaaaagccagaaagcctactagacaaattctaaaagagctgtaacactgctgcgtatgtgtttggagagaagatgggatataaaggaactctacaattgatgagggtgagcttaggtgacttttttcttgttcctattactgtataaacaacgacgcatgtggtaactttcagtaggaaaaataatattctaaggaacttacttaagtcattcatttctagagttcgcgaacatttgttctcagcccatgcaaatgagttcggtgctgattggttgagaaagcagccagtcacagccccttcgttgttgttaagcccggagacctggattcggcagtaaaggcccagagcaaaa

SEQ ID NO: 121597 - DNA, 2812 bp, Homo Sapiens
  misc_feature (92)..(92): n is a, c, g, or t
  misc_feature (185)..(185): n is a, c, g, or t
  misc_feature (234)..(234): n is a, c, g, or t
  misc_feature (269)..(269): n is a, c, g, or t
  misc_feature (1553)..(1553): n is a, c, g, or t
acatccccgacgtgctgtcgatatgctcttggatgctgagcagatcgcagagaccacgggggtgaggattacaagtttgatgtacacgtacntgtgtgcaatagtgatgcctacagggctggatacgactggggtgccgcctattcttgcccgtactgcccagcgatctgttcctgaccacctcnagcccgcctgtctctgatcacccttcacccaagctgagaggaaagaagntggaatgcgaatcgccaagccgcccccacctctcntgtgtactgggtccctaaagccgacccccgctccggcggggctcgccggcccccaagtcgccagccgcttacctcacaatcccgcttggactgcatggctctccagctggccccctcgtaccctctttataacttcctccccaccggcctgtggaagcttccctacccctccaccccgcaagctctcattggctctgagcgcgaccccgcctcccaggggggtggaggtatccactgcacgtgcgccgcccgggcttcgctcagaccttcaggtgaaagctgcaaagtcgcgggtgcgtatgtacgggggctgcctcccgaggaggagctcccaagccgcagggtggacgctggagacaagaacctcagggtcacaagtttactgtttttctcccttttccatccctacattggtctgctggggaaggcggggctaggcatcactgacacacgcagactccgtggttgaggcattttattggacctttggcaattggtggtggggaggcatctgctccaactggtgcggggccctgcagatgggaccatctcaggctgggtccttgtagcccaggagcacagactggactaagcctcctgggccttgtatgaaaaaggtgttgtacctggccgtttttgccagtaataatcaataaaataaccataataaaaatcaaaggctctgttctgaccactcttcaggtcttccgctgaaacggaaaagtgcaaagcaattgaagtacatatgcagtttgtcttaacctcaaatagtgccagtcccacttcctttcctctgatagtttgttcagttcagcagatgcagaggggctggcctgttctccttttgatttcctccacaaggtcttctcttcggacatccacctcttccctgctcgtcactgaacggagcttgatgaccccatccttgagttcctgctcgccgatgatagccaccagtgggatgcctgcctcctcacagtactgtaactggttcagtagctttgggttcttcttgtacagcagctcagccttgatcccagcatcccacagttctgagacaagctttagtctttcctctagcagcttcttctgtgcagatgccacaagcacctgtgtctccgtggtccgtatcttctcctccaaagcctctagtctctgttccacgatggagaaaatccgctccaccccaatgctgagccccacacatggcaccttgcgccctttggggtcgaacatgcccactagcccatcatagcgtcctccagcagccacactgcccacacnccagggggctcttcccctgcctgggctggggtctgtagcagcactgcctcatagatcaccccagtgtagtaatccagccctcgagcaaggctcaggtcaaaggagattttgtcatcaatgccaaatagggtcaggtactcaaagagcaacttcaggtctccccaggccctccaaggccctgcttgttttgggatagtttaggatcctggagcagctgttccaccagggataccccaccatgttgctggacatagtccccaatgcggtcagccacctcaggtgcaaggcccttctctcccaccatctcattcgtcacctcttccccaggacaccttgtccagcttgtctactgaggagcagatggtacggaacttgctgtcagaaacaccacagatagcaaacatcccatctagaatgcgtcgatcgtttaccttgaccaggaagtcgcctatctgaagtgaactcaggatctcgcacatgatcttcaggcactctgcatcagggatcatgggatcaaagttcccagcaatgtcaaaatcacactggtagaattcccggtatcggccacgggtcatggctgggttatcccgccgatatacctttgctatgtggtagcgtttaatgttggtcagtttattcattgccaaataccgagcaaaaggaacagtgaggtcatagcgaagggacaggagctccccgccctggtccttcaggtcatagataagcttggagtcttccccatactttcccatcagtgtttcctttagttcaaatacaggtgtatcaatgacttctgcaccgtggcgcttgaagcaacggatgattacgtcaaacaccttctcgcgaactgccatctgccggggactatagtctcttgtgcccttgggggttttgagcacaaatttctgtttgctttcatcaggacccagctgtgccttcagtttcaggagtttcgccacctcctcctcgatcagctcggcgctggccttctgctgcttgaggcctcgcacgcgctctccctgaagtttcaccagctcctccagcgccgcacgctctgccatcccggctgtccacttgagccgcctgctgtctcgacctgcggtggttgccccagcctcagcaaggatgacttccggctatcgagtcgctgggtcgcacgcctagagagcctccgccgagcacaaaaattatttccggctcctcccggaagtgccgaagctggctactaagaggaacttgggaggatcccaccctcacgc

SEQ ID NO: 121598 - DNA, 1217 bp, Homo Sapiens
cagtcgacggtaccggacatatgcccgggaattcggccattacggccgggcagccttagcaagtcaagtgcattttataagttgggattttctttgtatcagtgttttttcacagagccaaatctgtgaagctgaacctatatacatgattagttcagaatttttcttaaaaaacagttactacatgccaatttctttaggttggttatttctaatagataactttcccagttgactggaaaatactggtaacatactagtaacaatatttttcagtgaaactcatattctgttgactagttagatgaaacattttgttttctcttccctctagttaaaaacaacctttaatattttcttctcatattctgcaacctctttactctcaaactttaactccgtggaagaccttgctcattttttcagttttattatgtctgaaactttgctaactatgaaaaataatttaggagccattagttttagttttgaattatgtaatctaaaaagttttcagtttttagagttattctcttgattcctcttatggtttaaggtcttaggatggtgcttatcaaactgaagcgtatctctctgaggtataaactttactcagttgggggaaaaataactggtaattatgttaaacattttaataaaatagatgactgtattgtggaatgggatataagtatttcaaaaaatctgagtgcctataaaataaaacttcaaggacattttagaccattccatgggctgcctcagattgtgccttcaaatcctctggaatcatagatttactctcatattctaaagttgactgtctctgtcatgaagattatagtcgtaaaaactgaagcagcattatttaagccaaggcatgctgaggtgatgaagaaaatcattgagactgttgcagaaggagggggagaacttggagttcatatgtatcttcttattttcttgaaatttgtacaagctgtcattccaacaatagaatatgactacacaagacacttcacaatgtaatgaagagagcataaaatctatcctaattattggttctgatttttaaagaattaacccatagatgtgaccattgaccatattcatcaatatatacagtttctctaataagggacttatatgtttatgcattaaataaaaatatgttccactaccagccttacttgtttaataaaaatcagtgcaaagag

SEQ ID NO: 121599 - DNA, 766 bp, Homo Sapiens
tttctctttgcactgatttttattaaacaagtaaggctggtagtggaacatatttttatttaatgcataaacatataagtcccttattagagaaactgtatatattgatgaatatggtcaatggtcacatctatgggttaattctttaaaaatcagaaccaataattaggatagattttatgctctcttcattacattgtgaagtgtcttgtgtagtcatattctattgttggaatgacagcttgtacaaatttcaagaaaataagaagatacatatgaactccaagttctccccctccttctgcaacagtctcaatgattttcttcatcacctcagcatgcctgcatgggtgaactgaacacatgggaggtggtggcagatgagggtgattttcaatggtcactgttttcttcacatgatcctgactgatgtcttcatacatgtgctcaactgttaaaggctgccgttgctcatcatagccaaacaaccataatcgtggagtctggtaatatttatcataagtgatgtaaaggtcataagttctggtttgcaaaatagcatcttcaccgccagcatcagttttggctttacaagcttctactattttccttgtatctagggtagcctcatctgtttccaacaatccactctcttcatattcttccatatctgcagcttctccttcatcttcatcttcttcctcttcacatagtgctgagcatcttgaagccttatatgtcttattttcagtgtgatctcttacgg

SEQ ID NO: 121600 - DNA, 594 bp, Homo Sapiens
cagtttctgaagttgttgttgcttctttttctttgcagtctcttccctcagaatagcaaaatatccacgggctatcttcacagactggatcaaaaagcggcttcgtataaggtcctttttgaggtttattatttccttgtccatatacttgatgctcttcattgggttgtctgggacctgccttaggttctccgaggcataaaagggccggacagcccccgagttgggggaactctgaagcttcttggtggctggaaccttggtcatcttaaaaatccttcaggttttagcctgtgcccccaagacaaggatttttccagaatcttctacttcagtagttactggtatgagaagtttcggcaacttctccctgatccccaagtcccaattacacgacctccaaagcggtttccttctgaagagtaatgagaaagcacctgggtctcccacagacgggataaggaagtccgggtagggcataatcacggcaagcctggacttatttactttttggaaggttatacacttctgtgagcttcctcctcttcggaagggatatctttctcttctataagcaaaatataatcctcgtgc

SEQ ID NO: 121601 - DNA, 1817 bp, Homo Sapiens
  misc_feature (142)..(197): n is a, c, g, or t
  misc_feature (266)..(266): n is a, c, g, or t
agaaaaatgaaagctgatttttattttatcatcaacagccattctttagacatgaacatgcatacgtaatattctacgcacacatcacagcttttaacgttagttaataaaggttaaacacacaacatacatccttacaaannnnnnnnnnnnnnnnnnnnnnnnnnnnnnnnnnnnnnnnnnnnnnnnnnnnnnnngtttgtgttgggtaccatttgtacaacacagttaatttaaacattttcattttggttgcacatgaaaanaggcggcagtagaaaataaagtcattgagggtttttaaatagcagaataggcagttttgccatgcaggagaagcaatattaaatattagtttcaaaaaaaatccacatttaaaaatatttagttcaagtcacagaatttttctcagtagagaccccaatgcaatgcataattagctgccttagatggcccgtttgaaaggatgatatcccttcagagtgtaactttactgattttggcacagaaaagaagtcttaagaacatgattaaaaaagagggaagaggaacagaggaaagaaataaaagcaagaataaatgagatagtaattgcaatcactaaaaaactgcattctcagtcattgcagaatactgtcttctgtctacagcaggtgcttattccagaattgttattgcagcatggatttaatttgcttggaggtagtctcatcattcaaatgttttgttgtgtacctgagagcatttagaagaccttccacactattaggaggttggtccttaagaactttgatacaacctttcatatcaattttggaagttttagcaaatgctcccactggatgtacgtggtcatagagtattatgacacccaccattaccctcaagcagaatgacactgtctcttcatttgtaaatctgcttctgtattccggtgtttccagcatgactctgcatacactagccattgtgcttaaacaatctgtggtattttctattggtaaatttttattctctgatacaaattttgttgtggcatcactcaaggttttcagcattggagttgcctcagcataaaacaaagacattcgatttgccaattcattatttacttcattttctccttctgccggtacattgttaatcctcatacgactcaatgttcttctataatagctgaaatcattctgtatggcaggatttgtcatcttgagttcatcaaaccggagtgtgaaatgaagaatttctgcaaactgtttagcaagagcctgctctcgctctagatgctgggtgggagaatatggggtacttgttaaggctcccagaagacctcttaatgctgcttctaacctctgagaaaattcgtaaaatttctttaatttgcctactagtggaacaactgcaccccatgccttctcttgcaacttctcatctgctggatgctggattgcctctcgtatttcgtggccagctcctctgtatgactgcaagtcctccaagatgccttctgcatcttttaatactacattcacctgattataaatttccttctcagactctgtaggctgggcattttcaaaatcaaggaaaaaatttggcccctgctcaaggtctgtgcatgtcaaaactttaagaagattccccatgttaaggtaccttcagccagtgctggtgattctgtccttgtccttctatcaactgggtaaccttgaatgagttaatcaaattccaggcctcagtttcttctcctggcggcccgggcgggcgaggggagcgcggcgcgggagcgcaggagcctcggagcctccggtgccccc

SEQ ID NO: 121602 - DNA, 635 bp, Homo Sapiens
  misc_feature (142)..(181): n is a, c, g, or t
ttttagaaaaatgaaagctgatttttattttatcatcaacagccattctttagacatgaacatgcatacgtaatattctacgcacacatcacagcttttaacgttagttaataaaggttaaacacacaacatacatccttannnnnnnnnnnnnnnnnnnnnnnnnnnnnnnnnnnnnnnngtattactaatttaaaaaaagtttgtgttgggtaccatttgtacaacacagttaatttaaacattttcattttggttgcacatgaaaaaggcggcagtagaaaataaagtcattgagggtttttaaatagcagaataggcagttttgccatgcaggagaagcaatattaaatattagtttcaaaaaaaatccacatttaaaaatatttagttcaagtcacagaatttttctcagtagagaccccaatgcaatgcataattagctgccttagatggcccgtttgaaaggatgatatcccttcagagtgtaactttactgattttggcacagaaaagaagtcttaagaacatgattaaaaaagagggaagaggaacagaggaaagaaataaaagcaagaataaatgagatagtaattgcaatcactaaaaaactgcattctcagtcattgcagacc

SEQ ID NO: 121603 - DNA, 439 bp, Homo Sapiens
ttttttgtggagcaacatgctgttttaatgagcgcctggatgcaggcgggctgaggcctaaaatggcgtcagccccaagtgaggacggaacaaaggtttcatagtctcctgtaacaggaagtctcctagtcgtacgaaactgctacgtgatacccggatggcctctttctcgatcttcaggggtacgtatcttccggccagggcaggtgtcttccggccggctctcttcctgattccgctatcttgcttcggcacgctgctgacgcaagtagccttgcgccctgggactgggcctggcggcccgggcgggcgaggggagcgcggcgcgggagcgcaggagcctcggagcctccggtgccgccgccgccgccgtttccgggttggcggggctcacgtcaccgccacaggtttgcgagctgcccccgccgcggcggcagca

SEQ ID NO: 121604 - DNA, 1640 bp, Homo Sapiens
  misc_feature (185)..(194): n is a, c, g, or t
  misc_feature (319)..(429): n is a, c, g, or t
tccgcgcgcgcgcgccagtcaccgcatgcgacacccgctgcccgccagcaggcccgccgccggacggaccccccagaagagatccgccgggcgcggccgccgccctctggcgctcgtctcttcccgcactcccggtggtgctcgccccccccggggcgtgtttttttgtgccgggcgaccgccannnnnnnnnntccgcgcccccgtgggtcttgtttgggtgcgccggcgtggtcgccggcggcgcctccgcctccgggcggccccgccggccgcccacgaaggcgcggggagaagttttccggcgccgcgcagcggnnnnnnnnnnnnnnnnnnnnnnnnnnnnnnnnnnnnnnnnnnnnnnnnnnnnnnnnnnnnnnnnnnnnnnnnnnnnnnnnnnnnnnnnnnnnnnnnnnnnnnnnnnnnnnngggctcccggacctgagcgctcgcgccgccccccctctctccagttttcatcttgttgctttattcagtttgctccgagggcaaaatcaacagtagtagagatcacaaacattattttgattggcctcacaagcctcatcagtaaaacctgaaaaaacagaaaatgttacacaagttgcaaagaaagcactcctggcgttcactgacatgatagcaaatggaaagaatataaatgcaacaggtgttaacatttagaacagtacttgtaaacctgctcatttctagacaagtccgggactctcgctgcgaacccttcatctatcactgctgatttcctttgacatgaaatatgactttatgaaaatcttcctaaacctcactctggctgcacctgagtggttcctattcctacggcgctggcatatgctgtcaggatttccactatctgtttcgtttctagggtcattcgggcttccttcagccagtcctgtgccactcgtctggattcccccttcagctgattgacaaactttgctgctagctccagatcaccatgctcaatgcaataggaagcatatgacagtaatttaaatgtgtttatatcctcagggcagagctctgggggcggcttcagttgctgaggtgggaataggagcagggactgtaggtaggagaggaagtactggtacaagctatttctggtttcatcaatcattgctacccttcgggccagtttttgaacagcatagaaacgggctctaagggtctcttcactgtacaccccacgggtcagggactctggagggatagctgcggttaaagcttgggtgaattcattatcagaacagttggaataggaaccactcaggtgcagccagagtgaggtttaggaagattttcataaagtcatatttcatgtcaaaggaaatcagcagtgatagatgaagggttcgcagcgagagtcccggacttgtctagaaatgagcaggtttacaagtactgttctaaatgttaacacctgttgcatttatattctttccttttgctatcatgtcagtgaacgccaggagtgctttctttgcaacttgtgtaacattttctgttttttcaggttttactgatgaggcttgtgaggccaatcaaaataatgtttgtgatctctactactgttgattttgccctcggagcaaactgaataaagcaacaagatg

SEQ ID NO: 121605 - DNA, 1355 bp, Homo Sapiens
tgtaaaggagctgatccaactgccatgaggcaggcaacactggttgcagagtgcagtgggtgtaacaagaaaattaacttttgtagtttgtgtagatctgtgagtctcatcaagaaaaaagtttcttgcttaagaattaacagtcaacattaatatactatatacacctttgccatttacacattagcatcaggccatttattacaaaacactatacactttccactgcaggcgggttatatattgacagcaaatttctgcagataagacagtgaataaactctccactccatgttgattaggaatagtttttctagttttaaatattagccagacacagaaaaaggttggactgtaaggcctgggtgcacagtcttgatggaaccagttaattatgtgcatttcattgatccttggtttgaggtggggatacttcttcactgccttcataattttcttgtgctcgttggccagttctctgagggttgttcatgtgatgtgctgctgggcctgtatatggctgtccatgcacatggttattctgttgatactgagatccaggtgaatgggggtacaatggggcatcttcaggtggaggcgactcatgttcatctggagcatcttggtcatctggctcctcctctggacagagttcacaagcttttgcaagtgtcatcctagcactatgtgatctctccaagaaataaccattggacgtttcattgctttgcactgggggagaccaattgttgtaagtgtactgaggattgccagtatatggtcttctttcaagttcatctccaagccattccactgcccaggtccactttcttttaagatctccattgccctgcaggatttggtaagcaacaggacagttactaaatagagctaccatacattttatacactggtatgctcttttttgatagtgattcttagagcgctggattgtgtcaaacagcccatctcggtcatctggaattcctttcagtgcattatgaattctgtgagtttgccaggagtcctcaatcagtaagatttgcaaaagcagatccaaatagggccgcagttcataggtataggaatatgcaacctgccagagaagttcactgaggacagtagatgagaactgaggattctcccagcagcaaaaacgaagcaatttgacggtttcctctgaattactgcagtcttcaatgattttcttcacataacttgttctcacaaataaaatgtctgccacattctgctgaattggcattataggttgtgataaattaggatcaccaaaaggattgggaccccggccgtaatggccgaattcccgggcatatgtccggtaccgtcgactg

SEQ ID NO: 121606 - DNA, 476 bp, Homo Sapiens
ggtcggtacctctgtgcgcatttaggtgtggcagagaagacacagcttctgaaattgagtgtacctgctacttttatgcttgtgtctttagatgaaggtccaggtcctccaatcaaataccagtatgctgaattaggcaaattatactcagtagtgtcacagctgatccgctgttgcaatgtctcttcaagaatgcagtcttcaatcaatggtaatcctcctcttcccaatccttttggtgatcctaatttatcacaacctataatgccaattcagcagaatgtggcagacattttatttgtgagaacaagttatgtgaagaaaatcattgaagactgcagtaattcagaggaaaccgtcaaattgcttcgtttttgctgctgggagaatcctcagttctcatctactgtcctcagtgaacttctctggcaggttgcatattcctatacctaaatgcgcacagaggtaccgaccga

SEQ ID NO: 121607 - DNA, 2681 bp, Homo Sapiens
  misc_feature (63)..(74): n is a, c, g, or t
  misc_feature (134)..(144): n is a, c, g, or t
  misc_feature (237)..(249): n is a, c, g, or t
  misc_feature (1724)..(1742): n is a, c, g, or t
  misc_feature (2455)..(2455): n is a, c, g, or t
  misc_feature (2536)..(2537): n is a, c, g, or t
  misc_feature (2556)..(2556): n is a, c, g, or t
gaaaccctagtgcccgggggttttattggggcgtacgtacgataaggggcggccgcccttatnnnnnnnnnnnngaaggcgggggcttgccaaaggcgcgcccctcccggagggagtttttgtggagggcgcgnnnnnnnnnnnaaaaatatgtgtttggcgttgcagggccgcgcatcgcgtcccggtggagcggggggagtgtcgtgacgggtggcccccatggggtgggtttcnnnnnnnnnnnnnactactttcctgggacggggggcggtgctttgtgcgtggtggggttttaaaactgaaaatatttattagtatgaatcagtgtgtgttaaaccaaaaataacagatacaattaggcattgttgatggaaatgctttactacagaatagaatacatggcggaaaggtcctagctgactgcagcggtgtcttgtatgtgcaagaactgggtccagcccagatggaagctctttacaaaaacacgagaaaaaggagcagtttgcacaacagggcagcaccactggactacagggtctggtttcaacaatgatgttaaaacagtaagctagatacccagtcggtctgaatacagttcagagctctttaatttataagctagctcaccattcaacttgccatgagcattgcagaacagtgagaactggagcccacacaaaaaagctcagtttcagccaccgcatgccaaagtccttgactgtagaggaaatatttcagtcatccaaacctttctcagaaaatgaactcagtttccattggggcacagcccttattgttagctaaaagttagtttcgggccttcaaccttttagtctgcaaggtaacgtcatattcaactgcctaatgtgccgtttttaaccataaaatggcaagtcaattatgtggcaatgtaaaatgcttgcacaactccactgtcattctcagagatttccattgggaagccatgcctactttatattaacacatggctaggggccaaactcagccagtgaaatggattacatatcggagtaacacatatacaatcatatttacacagatacacactcatgccacacacgaaagaaaaaaaagggagaaggaacaaattttggaaaacgatgccaaggatgctacactacatgaaactacatgactttttttagcaacagtaatttccaggcctttacataatattacatggttatggttcaattattagacagccaggaagtaatcccgagccaaaacaaaggaaggttgtaaagcctcattgtagacaaggcctgagcatccacagagaagatacaatgtttatgtgaatcctggtgtgcccaagtgtgatctactctcttcactgactactctgagtgctgatgagaatatatatattatcctctgactggcttgaatagctaagacaatacagaaaggtaacagagtggtttcacaccctcatgtgcttctgaaataaaaccatgggctcattagtgggtagctcactatctgtggcaaagactagacattttatgcaaaacacaaccactgcaaacccagcccaaagatgcaaaactctcagctaggatacttacccctcagctaaaaaacctgaacagctatctagagataaacccaggttctcagggaaaactggatgaggaaaggttacaaaataagcctgcaactcagctggaaagaggtcacttcaattttcaactcannnnnnnnnnnnnnnnnnnacctttggcaaggggtatgatcatttcttggcctgcaagcacaatcatgccaaccattaatgtggacaatgtggaaaaaaccctaaaaatccctgcaaagcccctgtcaagacatccaaatgccgcttgctaacagtttttgaggtacctatttgggagagccaagtggaactcttgaagcaaaataagtgtttcccagccttcacatcctaacactgtcaatgaactctcttaagttgagtgaagtggaagcgtgctgagttactgaagtgccaggtctttaatccaatcagctcacaacctctttcctgacttttgcgatatagattgtcaataaaggttagccgtcccttgaatgctcatggcaaagaaggtaccagctggccctggctagcacacagcatgattaaccatttctgagcaccaatcctaatgtcctttaagaatcaccccctaatataagccctggcaggaaatcagctgcttcttgatcccaactttttatgaaagttagaatggtaatagaatttgaattttcagtaggaatcagttctcttcctttccatgctttttcttccttgacttcctttggattcaaacatctttaattgagcagacagggaatctgaaaaggaaggttttcatcggagcccattctcagttccttggcattctagggtcagacctctggttagccctaagccttctcctcngctagaacataaaatacttttctgatttgtagtttttggggtcaaattttaagtgctgacactctctggctggcttctgtnnactatatattgttatatanagttgccatgattaatctctgcgaatctggctcgaggcaatcctaatgatcgataattctacagtcaacgttctgttgaatgtacggtcaatcaaacatcaccgacaaatgaactggggctatag

SEQ ID NO: 121608 - DNA, 991 bp, Homo Sapiens
  misc_feature (881)..(915): n is a, c, g, or t
gcacgaggttgaaaattacatgtttattttaatataatctctgatcattcaacattttttactgtcacttctactgtcaagatggttgagagttgacagtttgtctagaagaaggctgatatatgtcaacatggtcagcaaaggatttaaatatgggtctttgaataataaatagctaataattgagtttattaaaatgaatttttgtataatttaggcagttgaaggtctagaacagcctgcgttcctttctatggcagcttgctatgaaattcatgtttcaaacaaaacaatactttttcatgcatagataaattataaatgtactgaccagaccattctatatgttaattcttacgaatttagataatttgtcttagcaatttgaaataagttctggactcaccatctattgacatattgacaagcttaagaaacaacttatgatgagtaatttgtttcatccattttaatcagcttgacacacttaaaaaacagatacccatgacttttcccaaaattgacttttactaattgaagtcattcttgttctttagagatttcagcggaaaataacattagagaaactgaatcccatgcaaatttcactttaattcattagcaaggttttcttctatctttatttaataaagtctgacaataattcagtaagatctgacaataattttttctcaatgatatattcaagtatttccctaatttgtattatatacagtagctctattaaaatattaaagcattgtatatggtatatatagtatccttctagttttttatatttcttgaatagcctgggacatttcccaagctcccggccgtaatggccgaattcccgggcatatgtccgtaccgtcgactgnnnnnnnnnnnnnnnnnnnnnnnnnnnnnnnnnnncgccgcttcctcgctcaactgactcgctgcgctcgtcgttcggctaagacgccgaagccccatagatctgtatggt

SEQ ID NO: 121609 - DNA, 766 bp, Homo Sapiens
  misc_feature (672)..(672): n is a, c, g, or t
  misc_feature (698)..(720): n is a, c, g, or t
gaagcacactcatggtgagtctatttattccggattcttacagtacctgtttattcatttgttcttctctgtcagtcatctgtgcagtacttccagagcccattcattccctgcccactgtggtccagctgagcctggggctgcagaataccaaacaccagtctcctttgctctcccatcagtttaagggaaagctggggtgacccccgcagcctgagtaagcatatgccagaggaaatgcctgagggggccatgggaaagaaaaggccagcccacccccttcatggggatgcggcctttccctaatactgactgcctcatcttacattcagcctccttccagagtcactctccgcctgctgtctcgtttggtggcagtggaaatagctaagtaatactgtaaatatctggacagccatagacggtgtatatagtatataatatgcactaagtccatcattttctttgtcccttctaacaagcctgtgaggcatttaaggcagagttactgtctccatactgcacgagtaggctccaagaggtgacttgcccaaggcctcacagctgctgtgactggtggagcaggtctttgggcctgcagctggccccactgttgctcaggggcaggtgccaggtgctctttccaagtgcagcacaagctctagacctganactcttggattttccttccctggggnnnnnnnnnnnnnnnnnnnnnnnaacacacgtcctctcgtttcttacatgcaggttcatgcttttatca

SEQ ID NO: 121610 - DNA, 1165 bp, Homo Sapiens
  misc_feature (816)..(1061): n is a, c, g, or t
  misc_feature (1063)..(1095): n is a, c, g, or t
tttttttcaatgacaaagttttattaaataccaatactggctaggcacaattagacacattattatctcatttgctgtatctggtatcaaacaacaaagcctgaaagattaccatagattttgatggcctcattaacataattaatccgtagtgacattccctggataataaatacagttttatgtccgtgtgtcttctgtgtcttccaagttgctacagggctctatttgatctgagaaactgactgctgtttacatccaggtatgcaatgtgacattagaattgaagcagaaaggaagcaaaacaaaacagggttcatgaggaaaataatcttctaagaactaacatggcctggaggtaaaatgcaaatatatccggtaataagaagcccagattactgcagataaaagattaaaataggattcaattattcatctccatttgcaaatctacaaactaggaggaaggactaacccttttcctgggattagtaactaaatttaatgattacagcaaatataaagttcttttgtaaattattgttggttaatgattgacttgcattgacaacacactttagctctcgcccctttcattctccgcctgcaagaacaaaggcaaaatgaacagtgaggaaaacctggaaacaggaccgagtgtttgctatcacttgattcctttgaaggagcaatgctttctcataatataggttttatagtatcatcaagtacatcagttaagcaaatcaagtgctttgtgttctgtatataaattacataatacaagagtctgtggcagttaagaatctggttctnnnnnnnnnnnnnnnnnnnnnnnnnnnnnnnnnnnnnnnnnnnnnnnnnnnnnnnnnnnnnnnnnnnnnnnnnnnnnnnnnnnnnnnnnnnnnnnnnnnnnnnnnnnnnnnnnnnnnnnnnnnnnnnnnnnnnnnnnnnnnnnnnnnnnnnnnnnnnnnnnnnnnnnnnnnnnnnnnnnnnnnnnnnnnnnnnnnnnnnnnnnnnnnnnnnnnnnnnnnnnnnnnnnnnnnnnnnnnnnnnnnnnncnnnnnnnnnnnnnnnnnnnnnnnnnnnnnnnnngaatctggttctgatcagaatccttaaaatactgtcttctttatcccgaaattccggaccggtccagcct

SEQ ID NO: 121611 - DNA, 811 bp, Homo Sapiens
ttttttttacaggttgaaattctgattttatttcaaaatgataaataaaccgaggcatagttctgaccaggtactatgtctgcagggcttttgaaattaaagaaacagtccaggagggctccagtcagacccagaatgacaccagccacacttgtgactggcagagataacctctttgatcttcagcaattttaaaagttcttcatcctaatttctgagtatcataaaaagtaaaaagtactttcattttatttttcctttgaaaatgtttttagtggcaaacaggactacttgttttccttacttcatttttataagcatagtagttatatgtcaatttacttaaaattagagagggaaaccccagagacctgagtggcactgcccatccactgaaggcccacataaataggtactcatgttcatgttatcacgtctacaaatagcaataaaatgatgtccgtaaatcggaagtacagcagtagcagttcatacatatctgatatgctttcacaccaggattcagtaaacaacaataaatataatttcccctcttcaaaacaaaaaatggctttatacgggaaaagggttaatttacttggggtttatcagcacgccatttttaatgtgctttgaaagaattaaaatccatgaaactgtattcactgaataccggtccatagttatattgttttcttttaacgtggcttaaatacatacatcatgtctttcgtattaaaatccttaaatctatggggatgtgtggtagataagactatattaaaaatttttcctccttaacaatttcatt

SEQ ID NO: 121612 - DNA, 1215 bp, Homo Sapiens
  misc_feature (488)..(498): n is a, c, g, or t
  misc_feature (721)..(990): n is a, c, g, or t
  misc_feature (1106)..(1131): n is a, c, g, or t
gtattgaaaatattttataatcaattctctagaatcctagccatccagtacaggaaaaaattatattggaacacttccgtatttttaaacaatgaaaaaaaatttgactagaggatggcataagaaatttacaaatacaaacttaggcttcctcacatttcccacagagcaactaaacgagaaaaagatttcaagaaatgacagtatacctcgaatgcaaaattccaaagtcaaatagctacttacattaagagatttaccaaaacagtttgtaaattaaacattaacagcaaaaggcacaaaaagcctatttcttttatggtgtctcggctgattctttaagaagcagataaacaaggtactgtatggaacgatcaaaacttggcctgagctgtcttctgataattaatcctagtatatccagatttgttgtccaaggacacaagctccatgccaccttctgctgtcactttccaagaagaggctgnnnnnnnnnnngtttccagttttcactatgatctgagtagacagagaatgtcataaaataaatgagagtattccattatccgatcagaaatgccacctcttttcccaactcattgctctgacttgaaagatgaacgtatatatgaattctcattttattctcctgagaaattatgcatgatccattataaaacatacaggtaatacaaagtccaaaagcctgtcatgtttatgnnnnnnnnnnnnnnnnnnnnnnnnnnnnnnnnnnnnnnnnnnnnnnnnnnnnnnnnnnnnnnnnnnnnnnnnnnnnnnnnnnnnnnnnnnnnnnnnnnnnnnnnnnnnnnnnnnnnnnnnnnnnnnnnnnnnnnnnnnnnnnnnnnnnnnnnnnnnnnnnnnnnnnnnnnnnnnnnnnnnnnnnnnnnnnnnnnnnnnnnnnnnnnnnnnnnnnnnnnnnnnnnnnnnnnnnnnnnnnnnnnnnnnnnnnnnnnnnnnnnnnnnnnnnnngttatgagtacgtgatgtaaatgcttaaaagtcatcatcaccatactgtgctaaagatattgagaaattatgcagagaaatctgtgcaaattcatcttcttagtatcagatggttnnnnnnnnnnnnnnnnnnnnnnnnnngcaatccaaattatttctttaaatactcttatttatactcaggaaaacagatttgaaaaactgaacaagtagacatctgccccg

SEQ ID NO: 121613 - DNA, 2143 bp, Homo Sapiens
  misc_feature (517)..(519): n is a, c, g, or t
gctattaagatttttcttttaatatgccatgagatatcttgattgtatattttccaaagtactttccagccacatctcccaacccatccaaaagactttgccagtctttccaatgcaataaaagatgctggattatagttttgtctaccatttctttttgaaagcaatattatactaatgactttaatggtaatacactcttatctaataaagaaacacatttacaaatatcagaaacccagttttgaaacatttgcattaattttgaactgaatcagcattttgtgggttttttaaaaggcagcagtttgactcacgacttgctgataaacacgtttctgctgagggaaggggaaaagacagggagagtgaatgctgcatttctccattggccccaaaagtgctaatttcacaaagggatacatcaaaagcaaacatgcaatggttgttttaaaacttttactgcaatataacaatgaagtaaacagtaattagacacctaccaattttttccccnnncatcctttaaaatgtaaacaggaaaataactctgcctatacttgtacagcttctcaaatcatgttagaagggtctcacattcaatgatcaagaaattttaaaatagcagtaattattttcattttaagaaaaggttccctttctcccctcccaccccaagtatttaacatgaaagaatgggcttccttacatattaattttatacttatttttgaagcagcaacaattaaccatcaatttggcatttctgtttacagtcgctacaaaaattttttaaatttcacaaagccattatccagtgttgccatgaaacagagactgtaaattctaggtagctaagattctttctgaaaccaatgttaagtcaaagaaatataaagcagggcattacactaagtttctggatctagtacactaaaaagagtgaaacctaggaaaagttacctactgttttacagaagaaataaagacctgcaaaagctgatttttggttgtatatattttacacactgtgtggagttgcggcatctgctaattgaagcagacatgcactgtatttatccctgccctgtatcctagatccctccctccccacccccaacaatctactaccttataccaagtattgtggatatgagcccaagtcatcccagacaatccagtgaacaagttagtgtaatgcactggtgtgaagtgtgagatataaaaaagtccctttcaatcttcatcaaagttctgctgtagaagaaaattggcagccaaattctcattcttctcacaagcaaaatacgcttgtatcacaagtccttcaggaaatcctaatgcctttaacctttctatagcttctttttcctgaggtgttacttgaatgtagttcatatgaccacttccagcttctgcaattcctccactgccacctccacctcctcctccttgaccaccagcttcttgaactggttcatttaacatctgaataaaatgctcctggtgttggctaatttgctgaagtaattgaggattctctcgacctatctgctgtagtaacgctggaagcaaggaaggattctgctgaataatttgtctcatctgttgaaactgaggctgattccgtaaaacttcaaggggatgtcctccagaacttgttgttgtagttgttgctgtcgtagttgctgcagctgcagccactgctgaagactgaggaaccccagtactagctgcttgaggggggtcaaccacagcctgactttctctatctccagggattcccattaaaagatactccactgctctgtcagggttgttgaaactggctctcagggctgcaattacttgctctcgttcatagcccattgacatgatctcagttaccatattctcgtaagactgacccgtcacaagtgcactcgttgcatcttcaaaaaggtttgaccgagaagaatcacccgatgtactgtcagttgctgttgggctagtagccactggtgtctctgctggcttttctgcaggcttctcttgtttagctgcactagcaggtgcaggttcagaagatgctgtcgctgatgctggagtgatggatgcaggtgtggaagtgggggccaaggcagggacaggggttggcggccgc

SEQ ID NO: 121614 - DNA, 1754 bp, Homo Sapiens
  misc_feature (1330)..(1354): n is a, c, g, or t
  misc_feature (1410)..(1422): n is a, c, g, or t
  misc_feature (1444)..(1460): n is a, c, g, or t
  misc_feature (1590)..(1617): n is a, c, g, or t
  misc_feature (1649)..(1684): n is a, c, g, or t
ttttaaaaattttaaatcaaacactttatttccacataacaagcgcaaaaaactcccaaacactttaacaatacaattaacgcagttatgaattatatactactcaaagccccaaggtcagaaggtcaatcagcttaacgctccaaacatttccagacatggtttttcaaagctacctttggtttttggaaaaaccagtatggaagtcaatatacattgaacgcactgaataacatttgcttatagtaaggtgtccgacaacattagctcacacctggcaagttggagcatgatctgaagtcatacactgaaatccatacacaggtttcgcccccgagctcctgcagggagaagcgagggccgtgaagggggaagaaaaggccagtccgggtgtggcgtttctcgctttgtaacagaggtatgagagtttaacactagtacactgtcaagtcattaagcttcatgttccacatggtttcttgctgaggcttgagatgggcacaaatggtggggaagatgaagtcacagaagagttttgagcaacaagatcccaaagatgctcagagagggtgggaaggagcaagctacagtttcccattgttctcacattatttcagggtgaaattgtgatgagttcagataaaatgttcaaatatttgcttagatttttaatcggttgctctatgagaaccctcatacatagcaactttgaaactttcattataaaaaaagagcctacaaataaattcacaaaaaggagacaattaatgttgagcagccaaaaagtcatggtttattatatctgaagaaatttcataattcaaacacaaccaaactgtacattttacaatcacattctatttgtaaacagttaaaagccactgacttcttttgcatcttaggacacaaacagttagaatcaaggcaatgatatgatggcaaattctgtactgttaaaatttttacccttgtttagtctctcttctttgactaagcaagcattataataccatttgtgggcaaaaaaaggggggaggaaagaaagtttaaaatggtgtaactcgttagtttgcaacaacatttaaaattttctttatacaacaaacaactctgtaagcccaataccttggttacagtatgcatagttactgatttcggctttaaggtacaacagttaaacattaacacagtcacgagagagcagaaacatatggagccacttgatgggattacaaaaaattattacctattgattattagcaaaccatcatcactcactaataaaaagacagcatctgaaagcagaatgtcaaactccagctttaagcgnnnnnnnnnnnnnnnnnnnnnnnnnggcagagaaaattctttaacagagcaatatgtagtatcagtgctaaaagttggggnnnnnnnnnnnnncctctaagaaactacaaggaannnnnnnnnnnnnnnnnaaactggggaactggttttcctgagaaccatgctctttgatttgggacaggaatagaaaaacaaaagaacatggccaaatgctgctcctttttcccagagatagaaagcatcttttaaatcatcctccannnnnnnnnnnnnnnnnnnnnnnnnnnnaaatgatggaagagtaaacaatttcaatctcnnnnnnnnnnnnnnnnnnnnnnnnnnnnnnnnnnnngcctacagccgcggccgcaagcgtattccctttagtgaggttaattttagcttggcactgcccgtcgtta

SEQ ID NO: 121615 - DNA, 234 bp, Homo Sapiens
  misc_feature (55)..(67): n is a, c, g, or t
  misc_feature (89)..(105): n is a, c, g, or t
gcagagaaaattctttaacagagcaatatgtagtatcagtgctaaaagttggggnnnnnnnnnnnnncctctaagaaactacaaggaannnnnnnnnnnnnnnnnaaactggggaactggttttcctgagaaccatgctctttgatttgggacaggaatagaaaaacaaaagaacatggccaaatgctgctcctttttcccagagatagaaagcatcttttaaatcatcctcca

SEQ ID NO: 121616 - DNA, 1283 bp, Homo Sapiens
  misc_feature (706)..(796): n is a, c, g, or t
ggtcttttcttcatttgaagattaagtattggagccatgggaataaaggttcaacgtcctcgatgtttttttgacattgccattaacaatcaacctgctggaagagttgtctttgaattattttctgatgtgtgccccaaaacatgcgagaactttcgttgtctttgtacaggtgaaaaggggaccgggaaatcaactcagaaaccattacattataagagttgtctctttcacagagttgtcaaggattttatggttcaaggtggtgacttcagtgaaggaaatggacgaggaggggaatctatctatggaggattttttgaagacgagagtttcgctgttaaacacaacaaagaatttctcttgtcaatggccaacagagggaaggatacaaatggttcacagttcttcataacaacgaaaccaactcctcatttagatgggcatcatgttgtttttggacaagtaatctctggtcaagaagttgtaagagagattgaaaaccagaaaacagatgcagctagcaaaccgtttgcggaggtacggatactcagttgtggagagctgattcccaaatctaaagttaagaaagaagaaaagaaaaggcataaatcatcatcatcttcctcctcctcatctagtgactcagatagctcaagtgattctcagtcctcttctgattcctctgattccgaaagtgctactnnnnnnnnnnnnnnnnnnnnnnnnnnnnnnnnnnnnnnnnnnnnnnnnnnnnnnnnnnnnnnnnnnnnnnnnnnnnnnnnnnnnnnnnnnngtgcatctagtgagagtgaagctgaaaatcttgaagcacaaccccagtctactgtccgtccagaagagatccctcctatacctgaaaatagattcctaatgagaaaaagtcctcctaaagctgatgagaaggaaaggaaaaacagagagagagaaagggaaagagagtgtaatccacctaactcccagcctgcttcataccagagacgacttttagttactagatctggcaggaaaattaaaggaagaggaccaaggcgttatcgaactccttccagatccagatcaagggatcgtttcagacgtagtgagactcctccacattggaggcaagagatgcagagagctcaaagaatgagggtatcaagtggtgaaagatggatcaagggggataagagtgagttgaatgaaataaaagaaaatcagagaagtccagttagagtaaaagagagaaaaataacagatcacaggaatgtatctgagagtcc

SEQ ID NO: 121617 - DNA, 917 bp, Homo Sapiens
  misc_feature (157)..(219): n is a, c, g, or t
  misc_feature (712)..(712): n is a, c, g, or t
  misc_feature (761)..(851): n is a, c, g, or t
ttagaatcagactgcttttctttttctttaacattttcatgatcccttcctttactccttgacctcatcctcttttcttcatttctattatgttttgaatctctttctttactctttgatttctctttgctcttactcctacttttagatttggccnnnnnnnnnnnnnnnnnnnnnnnnnnnnnnnnnnnnnnnnnnnnnnnnnnnnnnnnnnnnnnnttgctgttagatttatggtctttaactttcttctccttttcattttttctgtttggactctcagatacattcctgtgatctgttatttttctctcttttactctaactggacttctctgattttcttttatttcattcaactcactcttatcccccttgatccatctttcaccacttgataccctcattctttgagctctctgcatctcttgcctccaatgtggaggagtctcactacgtctgaaacgatcccttgatctggatctggaaggagttcgataacgccttggtcctcttcctttaattttcctgccagatctagtaactaaaagtcgtctctggtatgaagcaggctgggagttaggtggattacactctctttccctttctctctctctgtttttcctttccttctcatcagctttaggaggactttttctcattaggaatctattttcaggtataggagggatctcttctggacggacagtanactggggttgtgcttcaagattttcagcttcactctcactagatgcacnnnnnnnnnnnnnnnnnnnnnnnnnnnnnnnnnnnnnnnnnnnnnnnnnnnnnnnnnnnnnnnnnnnnnnnnnnnnnnnnnnnnnnnnnnnagtagcactttcggaatcagaggaatcagaagaggactgagaatcacttgagctatctgagtcact

SEQ ID NO: 121618 - DNA, 884 bp, Homo Sapiens
  misc_feature (727)..(811): n is a, c, g, or t
  misc_feature (848)..(848): n is a, c, g, or t
ctgtttggactctcagatacattcctgtgatctgttatttttctctcttttactctaactggacttctctgattttcttttatttcattcaactcactcttatcctacttttagatttggcccttttcttcactttgtttttatacttgtcttctttttctgaatttcttctgatgtctctctctttgctgttagatttatggtctttaactttcttctccttttcattttttctgtttggactctcagatacattcctgtgatctgttatttttctctcttttactctaactggacttctctgattttcttttatttcattcaactcactcttatcccccttgatccatctttcaccacttgataccctcattctttgagctctctgcatctcttgcctccaatgtggaggagtctcactacgtctgaaacgatcccttgatctggatctggaaggagttcgataacgccttggtcctcttcctttaattttcctgccagatctagtaactaaaagtcgtctctggtatgaagcaggctgggagttaggtggattacactctctttccctttctctctctctgtttttcctttccttctcatcagctttaggaggactttttctcattaggaatctattttcaggtataggagggatctcttctggacggacagtagactggggttgtgcttcaagattttcagcttcactctcactagatgcacnnnnnnnnnnnnnnnnnnnnnnnnnnnnnnnnnnnnnnnnnnnnnnnnnnnnnnnnnnnnnnnnnnnnnnnnnnnnnnnnnnnnnctcttcagtagcactttcggaatcagaggaatcagangaggactgagaatcacttgagctatctgagtcacta

SEQ ID NO: 121619 - DNA, 1739 bp, Homo Sapiens
  misc_feature (289)..(298): n is a, c, g, or t
  misc_feature (336)..(344): n is a, c, g, or t
  misc_feature (620)..(681): n is a, c, g, or t
  misc_feature (699)..(744): n is a, c, g, or t
  misc_feature (1057)..(1070): n is a, c, g, or t
  misc_feature (1518)..(1519): n is a, c, g, or t
  misc_feature (1523)..(1523): n is a, c, g, or t
  misc_feature (1526)..(1526): n is a, c, g, or t
  misc_feature (1541)..(1542): n is a, c, g, or t
  misc_feature (1551)..(1551): n is a, c, g, or t
  misc_feature (1553)..(1553): n is a, c, g, or t
  misc_feature (1569)..(1569): n is a, c, g, or t
  misc_feature (1573)..(1573): n is a, c, g, or t
  misc_feature (1575)..(1575): n is a, c, g, or t
  misc_feature (1605)..(1605): n is a, c, g, or t
  misc_feature (1664)..(1664): n is a, c, g, or t
  misc_feature (1698)..(1698): n is a, c, g, or t
ccgcgaatctgctcgggtaccatcttctagtcttctgctcacacgcacattggtttatgtcccccatagggggggtacaaataatatattatttttccgcacaggggggccgacggagaggtggcgtgcaatagtcaccgcgctgggcggggggtatacgggggggttcgtaagaccagcctgatcgttgtgggaggggggttaccccaactggtgtgcggagaagaaatgttctttaagaaagcagattccccaccctcaatctccattaaataaaagcggagaggtnnnnnnnnnncataaatatttataattgggaccctggcggtcgggggnnnnnnnnnattggtagaagtaccccgccggaagaccgcttggcgaacacccccacttgtaggtttttttcaaaaaccccgcggggtgtgtccccccgccgtcttctttttttgtgggttggaaaacccccccgcctatgtccttcgccccagagttttgctttgggaaaacacatttggtagcccaggtgcccgcttcccacagggggcccgcggggcaccaaaggaaatgggtttggaaaactttttttagggggcaagagggggtgaaccaaaagaatttannnnnnnnnnnnnnnnnnnnnnnnnnnnnnnnnnnnnnnnnnnnnnnnnnnnnnnnnnnnnngtgctcggattgtagtcnnnnnnnnnnnnnnnnnnnnnnnnnnnnnnnnnnnnnnnnnnnnnngctagttttctgttcagattttatttgaaatctaattcaaattgtcaaagctacaaaaggggggaagacatctgtattatttttgctaagtcacaacatcctaaaacaaaatactactactgtcagcagatccattatacacatttctgatgaaatccattagaacaataaaaatttcatcttgagaaatagccacaatgaaagtaatttacacaatataaaacaatgacagatctacagatgcagttgctcatgagtttacacatgcatacacaaacaaacaaaaaaccccaggaatgctctttcatttgannnnnnnnnnnnnnaaaaaacagaccgttcaggcacaaaacaaatcgcatttccaataagtgacagcatcttaaaaatttacgtcagtgtttgtttttctttgactttttatgagacctgtgtggagatctggactgggatctggacttctttcctgattttttaggagatctagaccgtgatcgcctagaccttttaggtgtccttgaaccagatggtgatcttttggcttttttgctaacatctctaggagaatctttgtgagatgacctggaccgtgagctctctttatgagatctttctgaacgctctgatcgctccgattttggtgatggggatttcactcgtctaccactgctactgcgagatgggctgggggatgtactgtgtcgcctcttcctttccttccttgtcggagtaactcatctttttccttcctgtctttggagcgagatccaattnntccntanctttctgtcccttcnncgtctcttncnactctttctcttctcncgtnangagttactctgtagtgtctactgctctganacctggctggttttagtcttccccaatcatcatctgaactcatacttgaccattcacanttttgctctgcgatctggctcaggcaatcccaangatcgataatcggacagcaactgttctggtgatgtacgtca

SEQ ID NO: 121620 - DNA, 1799 bp, Homo Sapiens
  misc_feature (167)..(217): n is a, c, g, or t
  misc_feature (459)..(513): n is a, c, g, or t
  misc_feature (1717)..(1717): n is a, c, g, or t
  misc_feature (1756)..(1756): n is a, c, g, or t
gctctgatcgctccgattttggtgatggggatttcactcgtctaccactgctactgcgagatgggctgggggatgtactgtgtcgcctcttccgtttccgttccttgtcggagtacactcatctttttccttcttgtctttggagcgagattccaatttttctttannnnnnnnnnnnnnnnnnnnnnnnnnnnnnnnnnnnnnnnnnnnnnnnnnntgaagaagtttatctctgtagtgttctacttgctcctgaaaactctggcctggttttttaggtcttttcccagattccaattcatcctgaaacttcataactttgagctcaatttcacgaagtttggctcgtttttcctcactcatttcagagtacttagagaacttagactcagtcatttcttctttgattggattagagtacaaatgatgttcttcagatttggaactttgagtatcttnnnnnnnnnnnnnnnnnnnnnnnnnnnnnnnnnnnnnnnnnnnnnnnnnnnnnnnatgctggtcaaataattcccatttagaagttgtaacagcctgtgcttccaattcagattcatccacagcttcccattttgatggggcaactttaaatataggctcattcttttttgagtccttcagttgcatccaaaaggcactccatcaagatcatcatcaagactttttatagggactccatcaagatcatcgatgggagtagcatcaataggaattccatctacatcttccagaggtgcaccatcaagctcttcctcgatgggggcaccatcaaggtcatctggaacatcctctgtttccttttcttcaataatatttacaagtcctaagaaaatattttgtagtttgatcaaaaatggttctggataaattgcccaatcttcccatgctctgaagcaagtcattacccgttgcttaaagttttcagattgtaaatggcccttgaattgtacgataggtggctttgaggtctggaaaatatctgacataacttgtgtttcaaaacattttctatatatatgaagcattagcaactttggctgaagagttgtacaaaacatcagaaaccaaatataatctggcaatctttttaggaaggggtgtctttaagatggacaacgactcagtaatgcaatccactatttcttcagcagcttcagcattattaagacagaaaaccattgcatctccaatatcatttttccttggagttaatccccgcaagatttcttccaatttatccctctgttcttccttaagtgctccctttttactaggttcctctacaaaagcttctgtttcttgctcttctgacattccatgcaagtacggatttaatggtggtggcctcccaaaaagatccatttttgaacatacgaaaatcttccgtccgccatttagttggagaatctccctgcagaatagaataaagcttccacctatagtaaacatgggctggtgtctggttttcaaataagaacctgaacataggattgttgatttctctgttcataatcatagcttcaaacattggcccttcacgtacaacaaactctatcattcgatgtatcagggcgagcaaattcctttctgttgggataaccactttgactatggcttgcgacagagtcttctcaaaatcctctttgtttttaggtggcggtaacataggagcattagggttttttaaccgctctctagntgcgcattaaaaggcagtccggatggaggtgggggaagngtatgttccatcatagaaggcggaatgtatattggatgtggac

SEQ ID NO: 121621 - DNA, 177 bp, Homo Sapiens
ggcacgagggctttggacatttgatagtttttatttgcatactattttttaatgagatttttcaatagtatttctcaaattttagccattcagctgaagtaaatcttatgtgactgcctctattcaaattgccactatataaaagaaactgaggtaccagagggtaacattttcacc

SEQ ID NO: 121622 - DNA, 713 bp, Homo Sapiens
caaggagctgaaatatatctcagtttataaattcaggtatattctttttgtctccatggcaaccataacttttgaaccaaaaaaaattgtttttacatctttatgctgaaaatgtgtttagattaggaatatggtcgggctgaatttgctgttgctccctaaccaaatccacctcttgttttccttgtgagtccatggctaaatcaaagctgcccctgagaagagacttaatccaagcctgattgtactagtggcatcacttagaagtaggctttccctcttcctagtagatctcaatgttttataattccttaaaacagctgaaaattgggacaacatactttacgcaatgaacagtagttaaataggaaataaactagttccatataagtatacacctagagttttaattacctttataatgtttcttaaaagtgaaacttagatacaattgtgattggatacttagatactaagtgaaacttagtgtaacaattttgatctgttaaattggattttacatgtacatttgaatgccagaatttctaaataaatcccctggttaggaaattttaaaagtcaaagcttgttttcttcaaccactaccttctacattggttgacttagaccgtaagctttttaagtttctcattgtaatttaccttctcatgcagattgctgatgttttattaaaccttatttttacaaaaatg

SEQ ID NO: 121623 - DNA, 915 bp, Homo Sapiens
  misc_feature (870)..(870): n is a, c, g, or t
  misc_feature (903)..(903): n is a, c, g, or t
aattggggcgggagagaatcgccaaagcccacttaaggtccattaaccccaagggttgctcccttagggaaagccagccttatgggccccatgattcccccttaccgctcctggggcccccgccgcccccaagacgaaatgggtcttaggaaagctttctccgagggcccgagggcggcccgccatgttcttttttttcttctggtccggttgggcggaaagcattaggaatatttttattaaattcagagaaagcataattgcgaacaaatacatgactttctccccaaaggccactttgtgataaagtacatacatatagtgttcatggtttctttaaagtgctagattgtctctggcttgagaatcatctattgctttaaaaggtctttcagcacaaccccagcactgttgtcaggtaacgctggcaaaggtgtaaatgtgggcaaaacatctgagatgggtttcagaagaagatgcccgggcccaccaggtccaagtccagctgggttaataagaggtacagctgccgagcgaggagccaaaaacggatttacatctgttcttctaccagacctggattctgctgtatctttaaaactttctggtgcatttgtatctctttttcttcttcctggtgaatccagaggtttcatatcatgaacagaaagctttggtggtggaatggatggatgagattctgtttctagaaatttaacaaaaagttctgaaaaagaactattaaccacagattgctgatttggtctcaaaggtgtgttgggaacactttttgatcctcctccaagccacccagtcatccacctggtaacaccgccctgatcgtcatgaaacaactgctccatctcctcncttctgacgcccaggatgctcccattaaccgtnacacttcatgac

SEQ ID NO: 121624 - DNA, 757 bp, Homo Sapiens
ttgactgcgaacactaaatatttattttcaaaacccctaaaacactggagtatgcttcacctagaaacagattacaggacgaatagctataatgaataagcaatacaatttgtatttgggatgcaattgtgttgtaaagtttcaaataatcaatttataaatttgttgcttttacttttacaaaaatattcatttaacccataacatgagttgcaaaattatctccagacttctacagatgattataaactgtaattgtgtttcagttacacagcaggtgaaaaatttaactgaaccgttacttcaaaatacaatgcattaaaaataattgttacaatataggcaccaataaaaagaattttcttggcatacaacaccacaacaactttctcaagtatctgtattatgtaaattaaaaagaggatgtaatggccactttgactaaaaactgtattccttacaggaagaatatctttcttttaatatttgacaattactcagatttttttaaatgacttttgtgcaaaaaccaaactgtgcagatccaaacaattaaacattagctatcaaaactaaatatcaataattctacaactactgaaatacagccccagttcagaacttaggcaggcataatatatgtactgggcttacaagaaaaaggcatcacccacactatagtaccactaatataagtgaaaattaactgtgcaatctaatttaacctttgtgtggacagaaatcatcctgtactatg

SEQ ID NO: 121625 - DNA, 967 bp, Homo Sapiens
  misc_feature (65)..(114): n is a, c, g, or t
cgggcagtgccaagctaaaattaacctcactaaagggaataagcttgcggccgcatacgcggtcnnnnnnnnnnnnnnnnnnnnnnnnnnnnnnnnnnnnnnnnnnnnnnnnnncaggcttgtaagcagctccatttatttgagtaaatatcttgtaaataaatcattggtaaacaatacaaaattaaatacattttcaaaagcttgccagtatacgcaaaattcacaaacatagtttttttaaaaaataaaatatgttcagagcacccttgatataaaatgcctgacccccatccttggacaaggccacctgaagacatcttatggtaggtgggtttctgtgggagtcagcgggggcctcctggagggaagggtttctactctcacctattacccatcccacattccatctgaattttgatccttctccaaagagctggtaactgagagggctagagcacgccaccaggcctagctccaagcacggggatcagggtgcacaattagggccaggagcacccagagtcctcaacacaagccattgagagaagccagaaatgcaatctccacacttccaaaccagcaactcagctcctagagcaactgtcttgagagaatgtgaggctttctcaccttgacacttaacactcggtttactcccactggtctgatactacccaggcacagaagctaccagaacctatttctaaggaagaagacactcgatctgctaactttcttttgatctgctttcctggagagagaataaacacagtactcggtggaaagcagacaattcactgctacacagtgcttcctttttccaatgcaaaataccactgagatagtgtggatatttctctagaaatcaagttagttcttcaaattaagggttcatacaactttaaaagactacaaaatgagacaataagcacatgacctggcaaagcatcccaaccaatgaaat

SEQ ID NO: 121626 - DNA, 762 bp, Homo Sapiens
cagacgtcctgccatcttctcattcagacttttcttagcaaaggtagtccatggcaagtaatgaattcccagtaactaggtctgtaacagaagtaaattctgtttttatgtttataaactcaaaaagtaacatgaagtgcaaacacctttagttccttcccctcggtaaccttcttttgatgaaccagtgtgcagcaaaccaggatgagttggatttgggtgggatccacacagtcattttcaggcagatgagacttcctaagttctatgtatagattcatattatcagttattttatgcattcatttctcctctgtcttcatgtctctcccttggcaaagttacttggaactggtgtacttggtgacggccttggtgccctccgacacggcgtgcttggccagctcccccggaagcagcaggcgcacggccgtctggatctccctggaggtgatggtcgagcgcttgttgtaatgcgccaggcgggaagcctcgcctgcgatgcgctcgaagatgtcgttgacgaaggaattcatgatccccattgccttggaagagatgccggtgtcgggatggacctgcttcagcaccttgtacacatacactgaatagctctccttgcggctgcgcttgcgcttcttcccgtccttcttctgagccttagtcaccgccttcttggagcccttctttggggcaggagcagacttggtaggttcaggcatcgtagcgttaatagttagaacactgttgcaaacacctgag

SEQ ID NO: 121627 - DNA, 1667 bp, Homo Sapiens
caaaatttaataattactctttatttaaaataaataagccctcttacttacagggaaaatatgaaagcaaactctgtcctcctggtctaagacagaaaccacattcagaatatgttcattgaaaaaggaaagatttgttgattatcaaacaaatctaggtacttcaatacacattgtttctttgaaaaataaagactgaaaggaataattcatttcaaaaagtcacaggttagaaaaccaattttccttctgaggctcattttagcaaatcctccaagtgttcccaaatcttttaaaaaagctacatcccctgagaaagggccctttccctgtagccctcttgctctgacaccagcagccctgcacccttctgccaagtggctccctgcaggacggtgctgttgccgggcaggaatggccctccatggcaacctccagcaggcaggagctcaccacctgctttctgcaaactcactcacttggctcagctattctgcaatggagaggaagtttccttagcagccaaagtattctaagtatcacattttccagtattttccagatccgtagtgtgctcagaaagccagagctgtatcaccaggcttttagagaagattaacacctgcacatctgagtgacctttaacaggctccgcagcactgaacgcctgcagacactgcttcatgtgccctttaatgctgatcaatttccagattcaacagttacacaaattacattgtcatgaaaaacagaagaaaaagccccaaagtctttttcagacctcccctccttacccaaaatacagacacacaggcaagaactctcataaattcaaattcatcatttgagaggttgaagcctccaaggattcttctagctccagggtacatccactgtatgcttccagatgttttttccagatttcaatgtagtgtggctcttctttttctttcagggctggggggccatcttctgcagggcagctggggccctgtgtgggtaggctgggaggtgcctgaggcctgggctctcccaccagctcctgctgcacattctccagcatggtcttgtacgcctgtcgggccgccactgtcagctcaaccatcttgtggaactgatcctgggccccatcatagctgaagatccccaccacactgacaggaactgccttattcaaactgcgccccagagctttgcggttgagagcaaacacaaagggaatgttctgctcacaggcataatcaataattgtgtgcaaagtgtcatccagcccacttggaatgtttacttggagctggtgtacttggtgacggccttggtgccctccgacacggcgtgcttggccagctctccgggaagcagcaggcgcacggccgtctggatctccctggaggtgatggtcgagcgcttgttgtaatgcgccaggcgggaagcctcgcccgcgatgcgctcaaatatgtcgttaacgaaagaattcatgatgcccatggccttggaagagatgccagtgtcgggatggacctgtttcagcaccttgtacacgtacacagagtaactctccttgcggctgcgcttgcgcttcttgccatctttcttctgcgctttggtcactgccttcttggagcccttcttcggggcgggagcagacttggctggctcaggcatct

SEQ ID NO: 121628 - DNA, 931 bp, Homo Sapiens
  misc_feature (400)..(454): n is a, c, g, or t
gtagagacgggatcttactatgttgcgtaggctggtattgcgttctttaacagcatgctgaagttgcctgtaaatcttttcatgtttcttgaaaaattcattcctaccaactatagtcttgtgctgctgttgtaaatggagtcatctctttgatatatgccaactggctgctgtgtgcttgtgccacaccccctcatgtatttctcatgctgttaggagtacttctcaggtgctgttgggttttccaggtgcatcacctgcacatggtactcatttcacctccatcctctctctggtgcaccagccttggctggtccctggcccagaagcagggtcagggagtagagggtggtgagccctcgggagccagacctgtgcctcgaccaggggtacaatgtgnnnnnnnnnnnnnnnnnnnnnnnnnnnnnnnnnnnnnnnnnnnnnnnnnnnnnnncagcatctgtctgccttttgggatttgggggaggacacaggagctaataggtggtaagtttcagtaatactaatagttaacttttcctgttaagacaataccagctgtgtgttttctttccatttttccccatatttttggagagttgattctgcaacttgctttctccttgtattttcaggggcatctgccttggatataaaatcatagatgggtgtgttgctaagaaaaagctctttgcaaccagtattaacaccacactccatgtgacatgtcttcctgtcattttttcattgtcctttgaccaggtgggctggatgacactttgcacacaattattgattatgcctgtgagcagaacactccctttgtgtttgctctcaaccgcaaagctctggggcgcagtttgaataaggcagttcctgtcagtgtggtggggatcttcagctatgatggggcccaggatcagttccacaa

SEQ ID NO: 121629 - DNA, 1720 bp, Homo Sapiens
  misc_feature (1169)..(1169): n is a, c, g, or t
  misc_feature (1541)..(1541): n is a, c, g, or t
  misc_feature (1627)..(1627): n is a, c, g, or t
  misc_feature (1636)..(1644): n is a, c, g, or t
gggacttcttttcttggctaagccgcgtttgtactgtgtcttaccatgcctgaaccggcaaaatccgctccggcccctaaaaagggctccaagaaagccgtcaccaaagcccagaagaaagacggcaagaagcgcaagcgcagccgcaaagagagctactccatctacgtgtacaaggtgctgaagcaggtccaccccgacaccggcatctcgtccaaggccatgggcatcatgaactccttcgtcaacgacatcttcgagcgcatcgcgggagaggcttcccgcctggcgcactacaacaagcgctccaccatcacatcccgcgagatccagacggccgtgcgcctgctgctgcccggcgagctggccaagcacgccgtgtccgagggcaccaaggcggtcaccaagtacaccagctccaagtgagtccctgccgggacctggcgctcgctcgctcgagtcgccggctgcttgactccaaaggctcttttcagagccacccacctaatcactagaaaagagcttgttcacttattcccttagtttcttttcataaagtaagttattttagtgtgaaggtcatgggaaatggcatacgtagctttttaactatttggaactcgaggtccccagtgcgtcattggatttgcttttgaatctagagcgtgtctttactcattgtgctgcttagccttcccaggagtcggttctcaattaggctgttgggaatccgccctctttacccgcccccactcccgccccacacgcgccctggtggctccttgggtctgtttcattctaaaacgaagtggctgagttcggctgtcatttaagagaactccaggacacaattcagcccgggttccgcaaacactgcgtgacagctctgtatgactgacgcttggcagcagcttttgtgtccggtcaccagttctgccgtgcgatggggcctcctgtggataccagccgttctgtgtattttggacgaaggccgcgcagccgggtcccagccttgtcctgattgggcgacaagaatattcaaaattctgcgcctttttctaatttgtagatttcagtttccgtcgttcactttgagactttgaaattcctatttctcaattttgttgataatttctgcatttaatggtctgtgctttaaatgggtaacngctacgggccccaggtcactgcgaggcactttaccatgtagatacggggctcaaaagtcacctctcagagacctacgtcatccactcaggaattcgcgcctctcatacttgcctgtctcattttatcttccttccagcagctgtctgaaattggttcgtctgttttcttgtttatggtattctcaagcccttgacagaccggctagtgtggttttcccgtgcatcttcagcctggcacattatggacacttaaatactacgtattgatctaatattgttgggttaatttttccatcccacccttttcttaatcgctttccgtggatggatgaagggtgctgttcattttcattagatgtatgtgaaggcacnagtgaaatggaaatgttctttggagctacttcctccaaatgtatcccttagtcacctcagtgcaaccagctggggaggggggccgngttaaaaannnnnnnnnggctacaaaaaaagaagtggggcaatgggtaaaattccaaccctttaaggcccttcctcagtttttaccattaaca

SEQ ID NO: 121630 - DNA, 857 bp, Homo Sapiens
tttttttaagagaaaaggcatacaaatttattaaggtacagggctgaggaccacagaatattaccccaaccccccagtggggtacagaagcttatatactctttctcagaggcaaaagaggagatgggtaatgtagacaattctttgaggaacagtaaatgattattagagagaaggaatggaccaaggagacagaaattaacttgtaaatgattctctttggaatctgaatgagatcaagaggccagctttagcttgtggaaaagtccatctaggtatggttgcattctcgtcttcttttctgcagtagataatgaggtaaccgaaggcaattgtgcttcttttgataagaagctttcttggtcatatcaggaaattccagagaaagtccctccttggcaagtttacttagcgctggtgtacttggtgacggccttggtgccctcggacacggcgtgcttggccaactccccgggcagcagcaggcgcacggccgtctggatctccctggaggtgatggtcgagcgcttgttgtaatgcgccaggcgggaagcctcacccgcgatgcgttcgaagatgtcgttgacgaaggagttcatgattcccatggccttagaggagatgccggtgtcggggtggacctgcttcagcaccttgtacacgtatacggagtagctctccttgcggctgcgcttgcgcttcttgccgtccttcttctgcgccttagtcacggctttcttcgagcccttcttgggcgcgggagcggacttcgctggttccggcatgttgaaggcgaactacgagcctgagacgagcagcagatcgagaaaaccctcgtgccgaattcgccacccagc

SEQ ID NO: 121631 - DNA, 402 bp, Homo Sapiens
gcataaaaaacacaatgatttaatttctaaagcacttatattattatggcatggttttggagacaggttattacagtccacataggtaagtatgcagtgcttctcatggaaaaaatgcttaggtattggccttttctctggaaaccatatttttccttttttaataatcaactaagatgtatatgtaagaaagcctcatcttttgatttttaatatacaagatgctttctttaagagagcaagattcaaaattgtttcgtgtttcaaaatttaaaaataaatttatctcctaaattttctaaagacatgtttcatatatttgaccatcccttattttggcaaaggattttaagagtctaactcaaacatatgtaacctctggtgtacctggttatatatacc

SEQ ID NO: 121632 - DNA, 134 bp, Homo Sapiens
tcggttagatgagaaagcatgtatattttctatatacaaaaacaagaaaggcgttttgagcccctgtgctcaggcccactcccacactgtggagtgtactttcattttcaataaatccccttattccttcctgc

SEQ ID NO: 121633 - DNA, 2187 bp, Homo Sapiens
  misc_feature (93)..(119): n is a, c, g, or t
  misc_feature (983)..(983): n is a, c, g, or t
gtttcacaatgtgttaagtcagttgttttattaaaaaataagcactatgcttgggtttcataaaatttatacatgaatatgtacacagacacnnnnnnnnnnnnnnnnnnnnnnnnnnncacacttgctttcaaggcagtggtcctggcaccccacatacataatcaacttttcctttaaagaaattgcttggcccaaggagaccacagttagagaaccactaataaagctgtagcccgttgcctgcaacattttcaattcgggtttcaaaaatatataaataatttaattacaaaacccaacattttttttctcttttggcacagtgaagcatcggtcaatagcaagaaatcactgaagagcctctgacatgtctctcacactcagtcatacctggaaatgccacatacgtacacggatgggggcccagaaaccccaaacagtagtcatatcatttatagtgtggaaaggttccctgatgtacttaggggggagggaagggacataaatcaatggaagttgcgacaaaaacagtagaaataagacgaagcctgggcgttaaagaaagacaaaaaaagtccttatgaagggaaggaggagcaggcttcgcaaagaaactaaaacaagaattgctttggtcctctgtaaagttataaaacacaaaggaaaatatcctggactaagtttaaatactcctgtcaaaatgctttagctttaaggcacgtttgatggagattttaaaaattcatcttcctctggattcaaagtgcaaagtcccgcgcgcgggccccgcgtatcccgcctccccgagggcgcgcactcggcgttcccgggccccgcggcgctactcaggctaggagcgtctccaccgggtacggcaggtgcgggccagggcggcgctggtcccctcagagggttcctgctgctgccggtgccttggaccctccccctcgcttctcgttctactgccccaggaagcccgngcgggtccgggactcccgtccgtgccggtgcgggcgccggcatgtggctgtgggaggaccagggcggcctcctgggccctttctccttcctgctgctagtgctgctgctggtgacgcggagcccggtcaatgcctgcctcctcaccggcagcctcttcgttctactgcgcgtcttcagctttgagccggtgccctcttgcagggccctgcatgtgctcaagccccgggaccgcatttctgccatcgcccaccgtggcggcagccacgacgcgcccgagaacacgctggcggccattcggcagctaagaatggagcaacaggcgtggagttggacattgagtttacttctgacgggattcctgtcttaatgcacgataacacagtagataggacgactgatgggactgggcgattgtgtgatttgacatttgaacaaattaggaagctgaatcctgcagcaaagcacagactcaggaatgatttccctgatgaaaagatccctaccctaagggaagctgttgcagagtgcctaaaccataacctcacaatcttctttgatgtcaaaggccatgcacacaaggctactgaggctctaaagaaaatgtatatggaatttcctcaactgtataataatagtgtggtctgttctttcttgccagaagttatctacaagatgagacaaacagatcgggatgtaataacagcattaactcacagaccttggagcctaagccatacagggagatgggaaaccacgctatgatactttctggaaacattttatatttgttatgatggacattttgctcgattggagcatgcataatatcttgtggtacctgtgtggaatttcagctttcctcatgcaaaaggattttgtatccccggcctacttgaagaagtggtcagctaaaggaatccaggttgttggttggactgttaatacctttgatgaaaagagttactacaaatcccatcttggttccagctatatcactgacagcatggtataagactgcgaacctcatttctatactttcacagtgggacgaaacgggttcacaaactgccaggggccttcattacagggataattaattactctttgtgctatcctatcccctgagtcatcaggtgattcacacaaatgcaataaatgttctctgtatatttacctgaacataatttaatacactttttgcca

SEQ ID NO: 121634 - DNA, 1616 bp, Homo Sapiens
  misc_feature (65)..(129): n is a, c, g, or t
  misc_feature (183)..(251): n is a, c, g, or t
  misc_feature (298)..(327): n is a, c, g, or t
aagagtcaggttctcactgtgccaccaaggttgtagtgccgtggtgtaatcatggctcattgcannnnnnnnnnnnnnnnnnnnnnnnnnnnnnnnnnnnnnnnnnnnnnnnnnnnnnnnnnnnnnnnnatgcaccaccatgcctaattttttagagatggggtcttgctatattgcccagtnnnnnnnnnnnnnnnnnnnnnnnnnnnnnnnnnnnnnnnnnnnnnnnnnnnnnnnnnnnnnnnnnnnnncagctaagctgtgacttttgaggcaaccccttcccttccacagagtnnnnnnnnnnnnnnnnnnnnnnnnnnnnnnacctagatatttttggaagtttcttccagttctaattgcctatgatcagatcacatctgttgcagagcttcctaaaaagcctggaaaagtgcaactctgccccctggtggtttgcagctctctattcaagatgctataaatccctcattggcttcaagacctccctaccattttggttgctgtacactgaagcctcactggattgcatggtggcttccccaaattccgtatgccttaggatatgatgcttggcacacagttttcctttagtgctccttttaataattttattagtatggccacaagtttgatgtctacagtacatgttaacatagctgagtacaaatatttgaaataagtgtggcaagttttaaaatgtcaactctgagttatcatgcatgtcccatgcatttacatctgcatctgcaaattgtacaattcaatctgtgcttatcctcactgggtctccctgtgtgcctcagctagggcagggcaggggctcttgtgcgttttttcagacccagattttcaagagcaacagtgttgaactctggcatgccatggtgcatggtggcaacaccgggtttagctttggttcaggtaaaaatgcagtgaccaactattgcatttgtgtgagtcacctgattccccagggcctgggctagcacaaagggtattttgatatccctgtatgaggcccctggcagtttctgaacccgtttcgtcccaccgtgaaagtctagaagtgaggttcgcagtcttctaccatgctgtcagtgatatagctggaaccaagatgggattcgtagtaactcttttcatcaaaggtattaacagtccaaccaacaacctggattcctttagctgaccacttcttcaagtaggccggggatacaaaatccttttgcatgaggaaagctgaaattccacacaggtaccacaagatattatgcatgctccaatcgagcaaaatgtccatcataacaaatataaaatgtttccagaaagtatcatagcgtggtttcccatctcctgtatggcttaggctccaaggtctgtgagttaatgctgttattacatcccgatctgtttgtctcatcttgtagataacttctggcaagaaagaacagaccacactattattatacagttgaggaaattccatatacattttctttagagcctcagtagccttgtgtgcatggcctttgacatcaaagaagattgtgaggttatggtttaggcactctgcaaccctcgtgccgaattcgccacccaggctcgctcct

SEQ ID NO: 121635 - DNA, 925 bp, Homo Sapiens
ccaaaattatgcaggatttggtccttcatgcacttttactatagcccagcagagcatcttcaaaggtacccagatgtgtcagattttaatactctggttccaatatcgttcttgtgatatcctttggtattcatcaaaacacatgcaacaggtgatttcggttccgggaacagagaacagttagaaatttcacctcaatctgtcccccatttcttctctccagcctcatacaggtcctgggcatcctgtctcacgagagcatcgtccagataatttccttcatccctcccaccagctgacagagacaccagcactcgctggaacatgaacgatgtgtcagagcgaatgtcatcttcaaggctccgtccatattgctgctggtaggtttggcttatgcgccggatctcctcaggggtccgggaggccaggatctcaattaggcagccctcatcagtgccggctcccttcatggcccttcgcagctcttgcacgtcatacagcaccgtgggcgtcatcatccccacaatcacctgctcgaagttgccactcagttctgacttcaggtcgtctatcaagtccctgccgatggtgctcttgtaggctgtcctgatctcctggcgctgggcggtgttgcggtaggcaaggacgctaataatggcgtcttcatcggtgccgagccctttcatggccttcctcagggtctgggcatcttccatggcattgaatcctgaagcagctttgacagtacctcctttggttgccatggccatgactctaggtcaagatcagagttcagccacccaagcagaagttcttcgaggccgggctgcgctcctcctctgcggctgcggaggtcacaccctactcagggccagaccggacgcgtgggtcgacgatatcccgggaattccggaccggtaccagc

SEQ ID NO: 121636 - DNA, 2257 bp, Homo Sapiens
  misc_feature (200)..(208): n is a, c, g, or t
tttttacaaagtgaactttttaattaaatccaagtacatcttcagaatgtttctggagttgaaaggcacagtgcaaatagaaattactacaatcaacaaaattgattttaaaaagtatttttagcacaaaaaagttttctttatatcatactaaattcagagcattacatcattcccagaatacctagtttgaagcttannnnnnnnnccattcacttgcaagctggattaagacattaactataataatatggaatgttcagcatttatgtttggtaaccagatgtatatggtttgtataaccatactttagaatttagttcagataaattggttttggtatactttgactacagaaagtgatttcaacataagatgtgatgaaggaagtctcccatgaaaaacttagtaaggatcaactgatgctatggacaaaacctaaaaaaagagatttgtagatgctttcaaggctttgactatgaaatatagaaaactggatgggcattcttactgaccggatgcttacaatttcaaatgaagaaactactagccactctaaaaattggattagggaaaaaagtgattttagaacagtcttccatttaaaaaatttttcactgaaaagaaaatatggaataatttaatatattcaatgtctgtgaaacacaaagtagaaagtaatcttttaaaaacatggaatacatatttatttctactttaaaatctccatttatatcttataagctttgaaatgcaagtacagctttaaagcatcataatgactaattataggtgaataataatacagacagtctatattctaggaggcagctgtaggcgttttaattggaaataagcattctgagataatgataatagcagtgtagaaaaatgaagttaaaaaaattcaaagtgttgagaatcctcctgtccttctgggatttttattttaatcatctcctccacagagaacaagcagtactttcctgtagtctccagatgtgtcacccttgatgaacgagtacagagactttccatagagtctcttgaagtgtgcccggatatccaacatgtcaatttctgctcgagaaaccatcactctgatgagggtgttatcatcggtgcccaagcccttcatcgatttatagagcttttcagcaaaatatgcagatttgttcctcatgcactttactatagccagcagagcatcttcaaagctaccagatgtttcagatttaatactctgttcaatatccttctgtgatatccttttgtattcatcaaacacatgcaacaggtgatttcggttccgggaacagagaacagttagaaatttcacctcatctgtcccccatttcttctctccagcctcatacaggtcctgggcatcctgtctcacgagagcatcgtccagataatttccttcatccctcccaccagctgacagagacaccagcactcgctggaacatgaacgatgtgtcagagcgaatgtcatcttcaaggctccgtccatattgctgctggtaggtttggcttatgcgccggatctcctcaggggtccgggaggccaggatctcaattaggcagccctcatcagtgccggctcccttcatggcccttcgcagctcttgcacgtcatacagcaccgtgggcgtcatcatccccacaatcacctgctcgaagttgccactcagttctgacttcaggtcgtctatcaagtccctgccgatggtgctcttgtaggctgtcctgatctcctggcgctgggcggtgttgcggtaggcaaggacgctaataatggcgtcttcatcggtgccgagccctttcatggccttcctcagggtctgggcatcttccatggcattgaatcctgaagcagctttgacagtacctcctttggttgccatggccatgactctaggtcaagatcagagttcagccacccaagcagaagttcttcgaggccgggctgcgctcctcctctgcggctgcggaggtcacaccctactcagggccagacagcgggtcttatccgggacggatccgccccactgtggggtggagactgagcccaagttcctggttgttcctctgcccacgagaccggaaaatccctctctaggggaagcgcacctggggccccgggccgggacgaccgcgccaggagctctcggagaggccggacgcgtggttcgacgatatcccgggaattccggaccggtacagcctgctttttgtaccactgttcattttca

SEQ ID NO: 121637 - DNA, 841 bp, Homo Sapiens
aaagtaatttttacaggagtcatgctcatcgtctctatgtccttccgattttagtacatgtgctgccctggcgggcactataccctcattttaagacgaggaaacagattcagacgcgagaagagaccagccaaggtcactggggctcaaaccgaagtccagctggctcctccgctgccccgaggacgggcccggaggtctccctggagcggtaggcggccggtccctggccctccagcactccccatcctcggccatacaccggggcaggtgacacaccaccgccacctggcggccaagtggggaattctgacgcgaacacgagatctttggggggagcagaggagccagtttggatttcagagtagatgttaccaggcctctggcttccagcctaagcttccttgagatccaggtgctcatagggtgtccagacccagaaccacctgcatgggggacgcggctttcagtttggtaggggcggtggagtgttacatacaatagttcagttccgttccaaaccgggactttggcataaaaccgactgggttcccatgctctcatagtatggctttgaacaggtcatttccctttcctcagacttggtttcaccatctgtaaaagggggtaataataagacctacttcctaacgttatcatgcagatgaaccagctgacatgcagaggcctggcacttagtggatgctcgataaatgtcactgtcatcactgtttgcatcattattatcaacatcattattacctgctcctccctacctgcccccccatgcaacagtacagctccacttggaagcagccccccagcattccccctcaaacct

SEQ ID NO: 121638 - DNA, 346 bp, Homo Sapiens
gttttggaagtgacacacttttatttccattcttttggtgattactcttttaactaaccatctagaacatagtacaaacattttatgtaacataacattaatatttaaccctccttttggacaatttaagaacttcagaatattttaactccagctatcccctttaatttacatgctgcatgctgtggttactccatatttcagttaggcctttaaaaattaacccacaatggaaacttcttggtcaaattttaactagctagtattatatttatatacagggtcttttttctttactgatgtatttttctactcatagccaaccaataaattcaatatctgtttc

SEQ ID NO: 121639 - DNA, 1155 bp, Homo Sapiens
  misc_feature (1041)..(1041): n is a, c, g, or t
  misc_feature (1144)..(1144): n is a, c, g, or t
tttttactgtatttaaaagcatttatttaaaatatgtcaacctccttccaaaagacggaagacacatgagcccattccttatatcatgaggtataaggtaacaacaacgaaaatcctaaatgcaaaaggaccatcagttgcctaaatataaaattgaactttggcaaagatatgagtgttatacagaataacagccaataaagaaatacattagtttacaccatttccccatatcatggccccgtccccctgcactcttccctttggaaggctgagttacaaccctgtcccagaagattcagaattttaaatacgtggtctgctgatcaacatttatttttcctcaaacctcagtactacagctatacaaactacacttctaaaatatttgaaacagatactgaatttattggttggctatgagtaggaaaatacatcggtaaagaaaaaagaccctgtatataaatataatgctagctaattacaatttgaccaagaaggttccactgaacagaacagtaaaagcccttgttactgccagtccgtatggtttattcagttcccatcaccctcatcaaagagctgtctgggcggatgtgacattctttgagcttatagtgcagataatgtgctgggttttgttacatgaatggtaaacaagagttagtccagtgcatcacacaatataatgtactgtgaataaagactagatacttttagacactacttcaacatacccagttattaaaatgtatgtaacccaaaaagaagagcaaagtgaacatcttaaaatacttgtttacggaatggtgaaggaacacctgctgaaggagttcttggaattatctgcaacatctgtactggacattctgagagcttcactgaaaaaacggtgctgtcattgttttgcctagcttggctttagtccttatatatgaccccaaaaccttacaagtcagtatggaaactagttccataaatttaaatagtacaaagtgaaactctaaaacttgaatattattattgagaacctgaatctcngaaagagctttgaaattttaatttaaacatttagaagtgcattccatccaatttaataatgtccctaagtttgaaagtgctaataatcccaagtaagttttcnctggttgtcat

SEQ ID NO: 121640 - DNA, 1001 bp, Homo Sapiens
ttttttaataggtgcattcaatgagaactttttatttcaattatccacaaaacaatattacaatactttataaaaatattaagtttaggctaccattattcatttaaaaaagtgtgctagaaggctgtttttgccaacttccttttttggtaagggttaacttccacattaagacactgaagacgaaaagctgttggaaaatatctccaaatttacaaagttgtttttcttggcaatttaaaaatacagaacaatttaaaatgaatacacattaagttagtgttttatccctactatacaattgttattatataaggaactgctccattcagttaaaacctaatgaataccatcaacttttcctgccttactttcctgattagatttagtacataaacgtaattttgtcacccttttgaatatgcttagaaaaattacaatatcatagttcacataaagcccttaaaaaatctcatgtcacaagttgttgataagaggaaataatgacagcactcttcttaggaagaccctcttggtagagagtgtcaatactaagcaggttacgtaaacagaaaaaacaaccacaatttttagtaccagaaccactgccaacttgcatgaagtccatcttcacattttaaaaatggtttgaatttgaacatatatgccatggcacagaatttcgaatctgatgattaaaatcaggtaaataatgatagttaagaattatatcctgaaaatagaggggcctaatataaggcttaatttaaagtgtgactatatgagagtattttaaaacatatacaccagaccttcattttattcatcaatttttcctttgctagacactcaaaccactaatgctgctattcaaatctgtattttgaaattactgagttactcttaaaaattagtcttattcgacgcgtggtcgacgatatcccgggaattccggccggtaccgcctgctttttttacaagctgttcatatgtccaatgct

SEQ ID NO: 121641 - DNA, 2719 bp, Homo Sapiens
ttttagtagtataaggttactttttttgaattgctcttaatactctttcctcttaaatatttgtgtaaaattacaaatatttattacatttcttgggttcactgaacacaaggcagtatatgaattgaaaggctgttactttgcttcctgttacacaagcatataaagatgcttagttcaaaatatcttagatttaatattatttctcacattttgacttattttagaacacaatataaagggtccaaatattaccatagatatttgaatattcccatgaaatatgtcacacccactgaggaattaaacaagttcactaaagaatatcaaattaatcatttcctcctataaatattttctttttatttgggtttagaagttgcaattttaggtactattaacagaaaatacataacaaaagcttcctaacaagtgaaaaaaataattataaatgctggaaaaattggcctcattaacatatttacagacttttacttaatacatacgcctttggaaattaattatctgacatttatacaagcatcaaaatttccaaatcactgagtagtgagcacttcagttctttattgtctatacccaaatttgaaagtcatttagtttctgaaagtagaaatgacaagtaacagaaatggtcaatctgagatactattgacatattgttctgttccttcgcctaaaggtgcttctgttgagtaagtgtccttatgctttcttttctctttgctctgatcttcctgtagcttcagaattatgtttcggatttcttctctttttgttctcattcttggtggaggaaaccagtttgccaaattcataggtagttcaaaactgagaattggattctcaaaaaagctctctacatactgcaatacatatacaccacagtcactgaagttgttttgctgtggtacttttggattagagcccttcataacatctttggaaaaacttcttttgcttccttttttaacttcccattccacttctaaatactctcttaaaattttgacaacatttgaccgagaagggcctcggagtgagtccataagtaggatacaaggttgtttacagatagtaggctttaaatgccactgtcctatttctgaactgcagttgtcatcagcgaggaatccatcgtcactgctatcatcctggttatcctgatcttctgagaagtcgacgagttcatcttcaagcattttaccagcttcaggtgattcatcgctatagtttagtctgattttgcttaagccatgcttcattaaggggtacaaaaataaattccttctcaaaaatatctacgtgccgggtccatgtttttactctcccatgccgtttttgctgtattgacagattagttgtttcatgatttctcctctctctctgattaaggcgtttatagggaaaagagctgaatatatgaattcggtcagcgtcttccgttcgttcagtgttttcagagcaccaagtgatttcaaataaaagtctataataacatcatttaaaaattctccttcatttagacagtgcaggtcctcattggtaacagagatgcctcccttagctggaggtggtggatatactatcaacttttctactgggccaatgaagatggtgtggttttctccagtttcttcttcttcatcaaaaaactgaaattcttgtttgcttctaagttgtattttagattcaaatgatacagttttaattttgttttccttttgcccacaacttcctttgatgctctcttcataggttcttgtacaggcaacaagtctgccattagcttcttcaaagggaattttcgcaaaaaaattggagatgttattctttataccaatttcattaatgatactttcaaataccatatttgccggaggatcaaggccattttgaaaaatgtgaaattatatattgttcttggtaaatgttgttaatgtatgttactccttgtacgaatcagttgccgaactttatcctccttattcatttgcagttggatgctcagcttttgataaactgctggaattgcttgaagaaacactacaggtaattttcggacattacaccattcacatttagttagatcagaggtatttaatataatctcgtacaggatcatggtctggttcgtctagctgtatccttgataaaatctaaacaaaaaattacaggctctattaacagccggaagagtgttcctactcgtatacttcgacagtttaaaatgacactgtcaaaggaactttggcagcttaaagctaaagcatctggaggttcttgagaaaacactttaagacgtttcagaggtgtgttgataatagaattgccaaactggtctttcattcttgcttttcttggcaatgtaactgtatttaactctgagtcttctggaatgcttcgtagttcacgctctgctctgcaagtattttcatttagcgctgcttctacttttccagtggatggtgcaggggaagaacatgctgaatcagcaggctgaggagatatgctttctcttctgttagttctgtcgttgtcatcatcatcatcactggacaaaatgattggatcatttaggtctgacaaacttgttttcctttctttcaagtttgtgattttgggtatttttgccccaggtaaaatgacttttccattagtctgtaaataagtgtgtttactgtcatcacaattcacaata

SEQ ID NO: 121642 - DNA, 733 bp, Homo Sapiens
accccttaatgaagctgcacactggtttttggctgttgtttgtttccccggtttggaaaaaccaaagtatgaacctaatcctcattaccatgaaaatgctgtcatacagaaatgttcaactgtagaggacagttgtatttcttcttcagccagtgaaatggagagttgttcacaaaactcttctgccaagcctgtaattaagaagatgctaaacaaaaaacattgcatagctgtaattgattccaatcctgggcaggaagaaagtgaccctcgttataagagaaacatatgcagtgtaaaatacagtgtgaaaaaaataaatcatactgcgagtgaaaatgaagaattcaataaaggagaatctacatcccagaaagttgctgataggactaaaagtgagaatggcctacagaatgaaagtttaagttccacacatcatacagatggcttaagcaaaatcagactaaactatagcgatgaatcacctgaagctggtaaaatgcttgaagatgaactcgtcgacttctcagaagatcaggataaccaggatgatagcagtgacgatggattcctcgctgatgacaactgcagttcagaaataggacagtggcatttaaagcctactatctgtaaacaaccttgtatcctacttatggactcactccgaggcccttctcggtcaaatgttgtcaaaattttaagagagtatttagaagtggaatgggaagttaaa

SEQ ID NO: 121643 - DNA, 1283 bp, Homo Sapiens
  misc_feature (1169)..(1203): n is a, c, g, or t
  misc_feature (1240)..(1240): n is a, c, g, or t
ttttttttatttataaccgtttttctttattctacttagtggggcacccagaaacttccctgggggaaatgcttgttcaaatagagaacacgcagaagatgcacttcaccggcctcctctggctgctgagcccgtactctctctttggctcaggctaggcctcttcttctccttggacttaacgtggcttaggtccctgagtcggccaagacctcccagaggagacctgcccagctgccaccaccaccattattgattggcttcccggtactggtgcagcaggtcactgacatctgtactttctactttcacccaaccatcttccttcatgtggtacatattgacaacgcctccagaatagctgtctctgtgagtggcataagcaatagccctgcggccaaggtcataggcctcttcagggctaagattaggccgatagccactgtccatgaccccgtaggcataagtgttcccactacccgtggagaacatatttcctgagagccgagtcccatgttcatccacgtagtagagtccaggacccttcttatcccagccacagatcatactgcccatagagaggcccatgccccggtactggcacatcatgttggacagcagcttggaggctgccgacactgaaatacgttctccatttcgcagatagtacagcctgcattccttggccagcaggcgctcccagtactgacagtctgctgcacagccagacatggtgccaagcaggtaagggttaatctcaatcaccttgttcacccgtaaggcactaatgtaggacccagctgaggcccgagaatccactgctgcaatcactccatgctggaacttgaaggcgagcgtggtggtgccatgggccatctcaatctgaacgttcctttctccgtccccacccagggactggaagaattctgtgggctgcattccccggggtaaagcgagctctggagatcgcatagagaaactgtagtgtcctgggtccgagcgacgcccgcttcccgcaaccgggagagccgattccggccgctgccctcggggggctccgcatacatctagtagcgccatgaccgcccagcacccagagatctgtccgctctcggagccccggccgtaatggccgaattcccgggcatatgtccggtaccgtcgactgnnnnnnnnnnnnnnnnnnnnnnnnnnnnnnnnnnncgccgcttcctcgctcaactacttcgctgcgctcgtncgttcggctaagacgagtagcgccctatatgattacaagtttt

SEQ ID NO: 121644 - DNA, 802 bp, Homo Sapiens
  misc_feature (408)..(408): n is a, c, g, or t
ccccagccccagatcattctgccccatagagaaggcccatgccccggttatgggcacatcatgtgggacagcagcttgagggctgcggacactgaaatacgttctccatttcgcagatagtacagcctgctttcctggccagcaggcgcttccagtacggacagtctggtgcccagccagacatggtgccaagcaggtaagggttaatctcaatcaccttgttcacccgtaaggcactaatgtaggacccagctgaggcccgagaatccactgctgcaatcactccatgctggaacttgaaggcgagcgtggtggtgccatgggccatctcaatctgaacgttcctttctccgcccccacccagggactggaagaattctgtgggctccaggccccggggcatccgcntggaaaccaggggtgggtagggtcgtgtcatctaaaggcgcagcttcaaccagaagactagaagtcagccaggagctgggagtagtgtcacgcggggtgggggttcctatgagcatcactttacaaaaccaggagggacggaagtgcgagggggcagagtcttggaaacaggtcctgggccaactgcaacagaatatacccgccgcgtgtaggggaaggcggcgccagggagagggcgcagtctctgaatctttccacggggtccatcctagggcccctccaggttcaacggtctcctaacctgtagtcacccacaagagcgtgccctttctgcccgcccttcctagcgttgctccctgcttggctgagcactgcggagtttcacgcctctccc

SEQ ID NO: 121645 - DNA, 1152 bp, Homo Sapiens
gtggaaggggcctcataggaattaaaaagcttaagggaaaaggtgatgcagttagggggtaaaacattgaggatgataaaagaggagacacccgcagctgaaaagtgcgctgcaaaaggcagtgggccgtttggtgtgccggaaacataagaaaccacagtacaaaacaccaattttattataaatatcaagaacctacagggtgtttatgggccagcatatgccttcagttatgttgaaaatagctgatcatctttccgtacattctgaacatttctcagtttcagagtgctggccacaccaaagcatcagccctggctctaaactccgttacagtaaggaattacaaatcctgtgtttgtactccaggaagtctgcattatcacgaggagcttggaaaggaggtaacacactcaaggcaaatttcaagtaactcatcctggaggcagctgcctactctgcagctgtggttctccaccacagagagaagaaaagggagggagatggagtgcgcaggtctgagaaggctttcattctggagcatctgcaggagcctgcaccatggcccagtagcacccctttttctccatgagctgctggtgggttcccccctcccggatagcgcctccttccagaaagaggatgtggtcagcctgctccaccaggctgaggtgctgggtgatgagaagcactgagcgggagtaccgctcagggctttcgtacaggagctgctccacctgtaactggctgtttgcatccagggcactggtggcatcatccaggataagtacacacggtttccggatcaatgctcgggccaacgccactgcctgtcgctgaccccctgacagctggctcccagcctcgtctacctctgtgtcatagccctgagggagtccagagatgaaactatgggccccagactttactgcagcagctgtgatttcctccatagttggcttctgggtcaggccataggcaatattttcttgaagacttcttccaaatacctgtggctcttgtcccactgcagccacctgcctgtgcaggtagcggtgctcatattggggaaggggcttcccatccaacagcagctgtcccccggtgggctggtacagattctgcagcagggcagccactgtgctcttccca

SEQ ID NO: 121646 - DNA, 1132 bp, Homo Sapiens
  misc_feature (932)..(932): n is a, c, g, or t
  misc_feature (1105)..(1105): n is a, c, g, or t
attgttgcccgcaggctaaaactcctgggcccagtgatcctccctcctgacctcccaaagtgctaggattataggcatgagccactgggcccagcccatcctagtcatattaatattaattaagctagtctgtttacatgcactgtcactcatttattcattaggaatccttctgagctaggcatttatcatcattctacagatgacaaaatggaggttaaaagaggttgaataagctgctcatatagaggtcatatagcttttgagtggcgcagccttgacccaaattcaggtctgcctgacttgaatgctcatctctttactactaagttatatttccttaaaatcgaatataaaaatgccaagtccatgggtagagaagaggactattcaatagtctttattcttctgtcacgtgtttcaccctagggttctcatttttatcctacttttgcacccttcatgtaaaacagtccttaatgaaacaaagggtttgcggagaagtactcagaatgggaaacgttggtgtccttggggttgttagcagagccagcagtgatcctgtgaggtcagtcccagccctggaaacacaggtgtctccctgggctgagggtagtccccggctctgacggtccgatgtctttcctcaggtggagcagctcctggtacgaaagaccctgagcggtactcccgctcagtgcttctcatcacccagacacctccagcctggtggagcaggctgaccacatcctcttttctggaaggaggcgctatccgggaggggggaacccaccagcagctcatggagaaaaaggggtgctactgggccatggtgcaggctcctgcagatgctccagaatgaaagccttctcagacctgcgcactccatctccctcccttttcttctctctgtggtggagaaccacagctgnagagtaggcagctgcctccaggatgagttacttgaaatttgccttgagtgtgttacctcctttccaagctcctcgtgataatgcagacttcctcttactgtaacccatcgccaagtgggcttttgaaggcgcctgttcctttctcgctttcttcggaagacccttgacccatnattcccccgacccccataacgggagag

SEQ ID NO: 121647 - DNA, 408 bp, Homo Sapiens
ccagagacaacttctaagtttctctttatttcttttggaaacaacctccattcttcatctctcaatgtagtcctggcctagtgaaaaagaaggcttttctttctggcctccagagactgcttcctttgtaggaaaaggaacaataaacacttcccattaggtttctgtctccagataccaatcagggaatgactggaaactgggcagcaagcagcctgcaaccacctcagacatcctggactgggaggtggaggcagagccccccaggacaggagcaactgtctcagggaggacagaggaaaacatcacaagccaatggggctcaaagacaaatcccacatgttctcaaggccgttaagttccagtcctggccagtcattccctgattggtatctggagcctcgtgcc

SEQ ID NO: 121648 - DNA, 993 bp, Homo Sapiens
  misc_feature (237)..(276): n is a, c, g, or t
gtttctgaatgtcactagacaattaaacttttattgaagcgtaaattgtggtacagaaatacatttcaactgatttaagtccaacaccagtgaaaggagaaattatggcaccaaaactttccctcttctatcatacgatgatttagattatgattcaaactacatttctcttttctaggctttgtcccataaaaatttgtgcagtttttcaacattagaattcttaattctattggnnnnnnnnnnnnnnnnnnnnnnnnnnnnnnnnnnnnnnnncagacctcaagtcaacaaatctattgggatattgtttacgaacaaattccaccttaagcattggtcctcaaaacagagctcctcaaaaatattaggtgctgtgctcattacagaatcaaactgatcaccactgattgaaaacttcctcaatgaaattttcaatcaacaaacatgcttcaaataaaagtcaaacagtgttccaaccacttgatttcaaaccaagtagattttaggtttagaaacactaaaaaaaggtgtttcatttataaatacggaaggaacaaaaacatcactgcatcaatccagaaattatcaaaatatttagaggacaagaaatataaaatttagtcaactttgctgttttctcagttccttaaaatcccagagaatctgcaaatatagctaaaaggtaccaactcttgaaagcctatattactagtcatttcccattgagtattttggaattttattattctatgttatcttcatattctacttatttatcaatgtattctgctttatgatcgtttatctgaataatctggacaaattctcattctgggcacgtcacttcatttcatgcctcatgaatgccatggtaagggaaacaccgtagttaagaggaacagatgaagtcggaacacctcacatgcatcacagtcacagacccggccgtaatggccgaattcccgggcatatgtccggtaccgtcgactg

SEQ ID NO: 121649 - DNA, 1353 bp, Homo Sapiens
  misc_feature (78)..(96): n is a, c, g, or t
  misc_feature (1237)..(1271): n is a, c, g, or t
  misc_feature (1274)..(1312): n is a, c, g, or t
ggtacaacgacggccacgtgccattcttcgaattaaccctcactaaagggaatacgcttgcggccgcggctgtaggcnnnnnnnnnnnnnnnnnnnaataagaaccaaaagaaatttatttacaaatttcttacttgaccagtagtgtcagccaagaaacagtataccaggaaaaatcaactaacaccccactaacagtctttagaccagttcatacaagggaatgaccagagcagctcctgactgttagactagaaaggtgtccttctgcgtatccttcaattgtacaagaatttacatttaaccaaaggggtctgtgcaagtagcaccgtggtacttgtagtctcaattgagtcatagcttctagagtgctgttccctgtataccttacatagctttttcaccacttttgttgatttctttggcagcttctttccctttttctcctcctttgtcagttttgtcttctctgttgattccttcctctttttcttctccactatcagctcctttctctcctccattcttggtgttctcttcttctccactgtcagctcttttttctcctccattgttgactcctttctctccttctttgtcctgaacactgatataaacagctttgttatagccttcccggttccgagcaatttcaatggcaaagaattgtatcctgggggcaaagatggtgttttcctcagtgtagccctgagaacaatctagtcgcagcaaagtaccatagttgaagtcttcaacaatcccattaaacttcaagcagaatggcctccacttctctttggctgattctgacttgagttcttctgggtccaacacatctatcctaagggtctcaaaatttttccggaactcagagtaaatttggtcatctactttggtgagtttcaggaactgtgggtcaactgatgaaatcagcttgtaatagacttcagcatgctgcattgctctcatggcccaagccatctcaatgtcaggatcgttgccatacgactctgctgggagagaaagcgcatgtgccacagacaccaactccccggaaaccggctcatcagttccactggtggccgccatcttgcaacccccgaaagcgtggctccttccgcagctgattggaaagctgagccggatcagagtccttctcaactggcggctccaccgtgcgctctcccccggccgtaatggccgaattcccgggcatatgtccggtaccgtcgactgnnnnnnnnnnnnnnnnnnnnnnnnnnnnnnnnnnncgnnnnnnnnnnnnnnnnnnnnnnnnnnnnnnnnnnnnnnntctgatgagagtagcgccctatagtgagttatacaggtctt

SEQ ID NO: 121650 - DNA, 915 bp, Homo Sapiens
  misc_feature (169)..(196): n is a, c, g, or t
  misc_feature (765)..(765): n is a, c, g, or t
  misc_feature (809)..(809): n is a, c, g, or t
  misc_feature (837)..(837): n is a, c, g, or t
aattccccaaaccctttttgttttcctgggccccccgggatttttccttttggggaaaaccagctttttggcccccatgttccccttttcccttactggggcccgccgcgccccaaaacgaaatggtttagaaaagttttttgagggggccgaggccgcccaacaaggnnnnnnnnnnnnnnnnnnnnnnnnnnnntttgccttttctggtgttttaaatgtgtagttgattgaagattcttccgttggaaaggaagcaaagagatttttgactttgctatctgaagactgttcgatatcagagttctttgacagttcacattttttaggttccactttgctttcagatccactctgggctactgaactagtttcactattgttacttttcaaaggtgcattaaaactaaatccaaacaaagacccagtggctgaactgttgccgaatgcaaatggttttgatttttcactactaaaaatgcttttaacagactctgaaccaaatacaaactttggaggagaaaccactgcttttggtgttgtttcagatgtgctagacacttcaacttctgaagttgcatctgctacatcatcaccctgaataacatctgtcctctctcttgtggtttcttctaatacagctacagcaattttgccacatggtgactctctgggagtgcttgaccgagaaacatgaggtgttatcaaagaatctttttcctgggctgtgttttgcttcatcaaaaattttcttaaacgagtctngcacatcctgtagtttaaaacgaacagctaaatgctctactttnctttctccatctgcaaatcacatgcagnccacaccctactctttctgtcccttcatattttgcaaagccatgtctggagtattctgtgattgggacaaggtttaat

SEQ ID NO: 121651 - DNA, 1405 bp, Homo Sapiens
  misc_feature (92)..(116): n is a, c, g, or t
  misc_feature (263)..(263): n is a, c, g, or t
gggtccccctggggaatgagttcccaggaaaaggccctccaggaacttccctctggggattggtccaagaacccctttcggtttcccccgcnnnnnnnnnnnnnnnnnnnnnnnnnattccaagcctttagtcctggccccgggattttccttggagaaccaggttatggcccatgttcccctttcccttgtggggcccggcgcgcccaaaagaaatggtttggaaaagtttttcaagggccgaggggggccgacaatttttntgtttggccccagtatgtcccggtggtggggcgggggaaataaggggtttgcagcaacttcccaggatggtttattccaaagctgtggacggtgaacattaagacgaaagaggtgactcgcgtggaacctgaaacacggacgcctttcttccaagaagggctgtggcgatcaggccactcaaggcagccagcccctcagcagggcacgatggctaatgctgcctggaccgcagggactttttgttcgatttcaagacaccagactccctctccttctcagggtcgaagacttttgggatctcgtggggccagtagtcgttgcagtgggggcagcgcggttcagcattcgactggaagtacttggccacgcagggtaagtgcatcctgatcccacaggtttcgcagctttgaccctggatgaggaggctgtgacagatattgcagatcttcaccgcgtcggggtacgtctcccggatgtattgctccatctccaggatggcccggccgtgcagggtgaactccccttccttctcaatcagccacttgttttgaacaaacttctgcagcacctgctccgcttccttcttcctcatcttcttgcctttaagttgatcaaccaggttcaatatgtttgtggaagacgcaaagccggtttctgagtcaataatcagttccagagcctttctaaacaaatccagttcattctctgcaaaatccgtagccattttggaaattgaagttgtagcaagattcaccaacgcataaatgggtctcccatcatcttccgtgactcctctctttatctcaatatacaaggactccaagacactgttaatgttgttgatgaagtcctccaacttatctacggtggcattgcggtcatggaccttgtagcagtgcgtctgcaagcgcttcacgtcccattcctctagcacgccatgggtcatcagcaactggaggaagcgccggtggacatcagtcatgacgcccattctccttgtgctgccctgcatgtgggaacgaacagggagcccaagcgcatcccaggccgcgctagcggatacggtcgcaaggtggactcttcttcctttccccggccgtaatggccgaattcccgggcatatgtccggtaccgtcgactg

SEQ ID NO: 121652 - DNA, 1011 bp, Homo Sapiens
tgcctccttagggaacctctcttctcccccaagtcgtgtttttcccccccggtttcactggcgtctacaggttctcctgactgaccgcctttccagaggctgcatccgccctcagcccccctcccgcccgatgcttatcctccggccccgggcttttgtcgattcagacccgccccttcttctcgggtcgagactttggatctcgtgggccattagtcttccatggggcagccgttcagcattcgactgtaagtacttggccccgcggggtaagtgcatcctgttcccacagtttccagctttgacctggatgaggaggctgtgacagatattgcagatcttcaccgcgtcggggtacgtctcccggatgtagtgctccatctccaggatggcccgccgtgcagggtgaactccccttccttctcaatcagccacttgttttgaacaaacttctgcagcacctgctccgcgttccttcttcctcatcttcttgcctttaagttgatcaaccaggttcaatatgtttgtggaagacgcaaagccggtttctgagtcaataatcagttccagagcctttctagaacagaatccagttcattctctgcaaaatccgtagccatttgtggaaattgaagttgtagcaagattcaccaacgcataaatgggtctcccatcatctgtccgtgactcctctctttatctcaatatacaaggactccaagacactgttaatgttgttgatgaagtcctccaacttatctacggtggcattgcggtcatggaccttgtagcagtgcgtctgcaagcgcttcacgtcccattcctctagcacgccatgggtcatcagcaactggaggaagcgccggtggacatcagtcatgacgcccattctccttgtgctgacctgcatgtgggaacgaaccctggtgccgaattcgccacccaggcctcgctaccttaggaccgttatagttactgccgtcgtttaacaagcctgctttttgaccctag

SEQ ID NO: 121653 - DNA, 1045 bp, Homo Sapiens
  misc_feature (415)..(415): n is a, c, g, or t
  misc_feature (902)..(936): n is a, c, g, or t
cgtctgtgtgttctcttctgcgagttcgtgtagcatgtcaacccccatctttttaattacgggcttggacctaggaaatagtacccatccttgtgttgaagatttcactcttcgatgtggttgcttgccaggtggccagaatcctgacccactgctgcttggtgtcacacaaatcttctggcccactatggtctgtatcttggggaggagtacagagtttaatgaagttcccttgtgcacttttggttctagaagtgccagcccatgctgcaaccaaggggctccatgggagctagaggaggaacgcaggtggaatgaggaacccagtgcagaactgctcctataggtgttccaggtgggagccatcctgacttcaagctaaagaaattgggttgttctgaataggcacccagtnggagagtgatgttggggttcactttttcccttggtgcctcagttttcccatttgggaacctttgtacattaagttaaatagtgcactctctgactctaggttctatgaggcttgtcccttgctccacaaggaagaacttcaggccagggaaggttggtgtgctgaactcacatcacagcttctttgggacacttgctgctggtgattcttctatagctcgcgagcctctgcactgagatcttcctattggtgaagttataacagcaggtgactggggcattgattgcatctggctgagcgagcccttgggggatgaaggtggctgctatgagcagcaggcacagaagggcggcagagactttcatgctggaggcgagagtgcgagcttcagtttgagaattggatgtttctgggttagtctcagcctctcggttcccccggccgtaatggccgaattcccgggcatatgtccggtaccgtcgactgnnnnnnnnnnnnnnnnnnnnnnnnnnnnnnnnnnncggccgcttcctcgctaccagctcgctgcgctcggtcgttcgactaatgccgcctggcgcaccattagtgatcgtatcgttttgtttggttctcgttggtttgttttgg

SEQ ID NO: 121654 - DNA, 830 bp, Homo Sapiens
  misc_feature (59)..(63): n is a, c, g, or t
  misc_feature (66)..(70): n is a, c, g, or t
  misc_feature (77)..(77): n is a, c, g, or t
  misc_feature (79)..(79): n is a, c, g, or t
  misc_feature (82)..(82): n is a, c, g, or t
  misc_feature (84)..(84): n is a, c, g, or t
aaacgaaagggtttaggaaaactttctccgaagggccgagggcggcccgacaagtttannnnnttnnnnnttatttngnggngnaacaaaaatatatttatttggtgtaatagttacaaaatattcatttccacaataatattttagcaatgcattggaatgttaaaaaaaattctttgtattaatgattcttgcaaagaccctcaaaacatcccaggggtagaactgtggttcaagaggaaaagcaatttccccaagtctctgtatctaaaaaacactagtaccatgaaagataaacttaaaacatcaataacttaaataagaattaacattacttaaggcataatgtttcacatcaacaaacaaaattcattataataaaataaaacagggtgtctggggaaagctaggggaaaataagttagctgcagattcttgggttgtggagtgagtgttcaagtcttcggagtttgggtttgcttgtccaggtggtccatggaatcctgaacccacttctgcttggggtcagcacagatctccttggccacaatggtcttgaagatcacagcttctttgggacacttgctgctggtgattcttctatagctcgcgagcctctgcactgagatcttcctattggtgaagttataacagcaggtgactggggcattgattgcatctggctgagcgagcccttggggaatgaaggtggctgctatgagcagcaggcacagaagggcggcagagactttcatgctggaggcgagagtgcgagcttcagtttgagaattggatgtttctgggttagtctcagcctctcggttcctccc

SEQ ID NO: 121655 - DNA, 1424 bp, Homo Sapiens
  misc_feature (206)..(206): n is a, c, g, or t
  misc_feature (1223)..(1233): n is a, c, g, or t
aggtagcgaggcctgggtggcgatttcggcacgaggggcagcagctttgctctgagtgcctacaaagctaatgcttggtgctagaaacatcatcattattaaacttcagaaaagcagcagccatgttcagtcaggctcatgttgcctcactgcttaagtgcctgcaggagccgcctgccaagctccccttcctacacctggcacanctggggtctgcacaaggctttgtcaaccaaagacagcttcccccttttgattgcctgtagactttggagccaagaaacactctgtgtgactctacacacacttcaggtgtttgtgcttcaaagtcattgatgcaacttgaaaggaaacagtttaatggtggaaatgaactaccatttataacttctgtttttttattgagaaaatgattcacgaattccaaatcagattgccaggaagaaataggacgtgacggtactgggccctgtgattctcccagcccttgcagtccgctaggtgagaggaaaagctctttacttccgcccctggcagggacttctgggttatgggagaaaccagagatgggaatgaggaaaatatgaactacagcagaagcccctgggcagctgtgatggagcccctgacattactcttcttgcatctgtcctgccttctttccctctgcgaggcagtggggtgggattcagagtgcttagtctgctcactgggagaagaagagttcctgcgcatgcaagccctgctgtgtggctgtcgtttacatttgggaggtgtcctgtatgtctgtacgttggggactgcctgtatttggaagatttaaaaacctagcatcctgttctcaccctctaagctgcattgagaaatgactcgtctctgtatttgtattaagccttaacacttttcttaagtgcattcggtgccaacattttttagagctgtaccaaaacaaaaagcctgtactcacatcacaatgtcattttgataggagcgttttgttatttttacaaggcagaatggggtgtaacagttgaattaaacttagcaatcacgtgctcagagcttttgcctgtcagttgtgtgtgtcccttatagtcccttcccccacagctcttgctgaaagagtttgccttgttttgttttgttgttttgtatttagccagaggatgccaaaattagtcttctcaaagctttgagtagagtaagtgtgggaataagccagnnnnnnnnnnnctgtttctgtaacttaaatgaacgggtttttttcccttgtatgccacttgtcctaacatgtccttaaggtgtttaacctgcctctgacctggcttgcaatgcataggtgaggagaagcagagagcttgtcatatgcaagtcctgtcaagaaaacaggtgggcatggtggctcaggtctgtagtctttgggt

SEQ ID NO: 121656 - DNA, 433 bp, Homo Sapiens
tacctctgtcaatgattcttttgagaaaagcacccataatttgctacttgaggattttattccctggattctctggatgctcattgcatgaaaagtggaaaagtttagatctatggaaacagaactgttgcctatatggaaaatcagtgccttgtggcaatacaggtaagaacagtgttgctcttgaaaaagtggacagtgggtggtctgaatgtgtcctggtccctggagtgggtttttagattgatgtggactcttcttagacttgtaagtaaaaaagttgtttcttcccctaaaagggaactgtgcgccttagacctggaattgctgggaaactgaaacattctgtagacttacttgtttccaactgtatcgcagcaagaagtctatgtgccccaggatcctggattacctgaggaagaagagatcaagg

SEQ ID NO: 121657 - DNA, 425 bp, Homo Sapiens
  misc_feature (103)..(123): n is a, c, g, or t
ggatgttaaaaaggaaatgtttattttcatgttataaggtgattacaaactcctctaaaaaaagcaaagatgaatttaaaatattgatatacatatttatctnnnnnnnnnnnnnnnnnnnnncccctgcaaaatacagggaatcatatcataaaacatttatacacaaaagcttgtatactgcaagactgaactacacaccaaggatcttgttcaaatacaaatgttcctcctcagaaaagtctcttgttggttgattttttgttttataaaagtttaaaatatcttaaaaatattttgaagttttaaaaaaatgtcctgatgagccagacatatttctggaaggaggcaagacccacattctcagctttctcttgtgctaaatacagagtcacagttgctagggattgggagattaattgggt

SEQ ID NO: 121658 - DNA, 3201 bp, Homo Sapiens
  misc_feature (252)..(262): n is a, c, g, or t
ctgggaaaagtttctttaataaaaaagttctagtacatatacacgattgtcctcacccttcatctatagcaacgcaacagggaaaataaaaaataaggggcaacctaggcacactcagtataaaaacgcagagatccatccgaatgggaggcattggggtctggaaaccagaaatgcaggacggccagtgggcccagcagctctgggctgcacttttgaagaactttctctaacgttttgaagatagcattnnnnnnnnnnnttaagcttgcaccaggaggcctaagaaggttccattccagagagaaagtccactgtaggtcagtcacagcaggcccaggcccaggacacagggttgagcattttacggcaggtaagaggcttctggaaacttggcctctgaggcaaccctggcccaggtggagaggttttcagtgctgaagtcaaactgcccacattcctccatcctgaaaggctaaggaagcaaccactctaacgtcagactcatagcctgtctccgccaagttgctacggccacttcctgacaagctccgaagtcctcagctgaagggggaactgagaccccttggagatgctctgtggcctgacgtttggtccccagccctgcaggcaggccgcctagtcgtcctccccgccaccgtacatgtctgccagcttcttgaagcggctgccccactcgttcagataatcgtaatcttggtcttggtcggaggcggaggaggtgagggagctcagggacgcggcgtcggagccgctgccctcatagtcgaacaccaagagggtgtcgtagggcggggctgtggggtctgtgttagccgccttcaggttctcaattataaagttgccgatttcatctgggttggctggccgaggacggtacatgggtgtcgggatgatggttggtgccacgtcattgcggagaaccacctccggcctggcctccagacctcggtggagctgggtgatgtcatagtcctggtcctcttcgccacccccctcttcgccatagtagaagacgttgtcacgggtgtcatcttctgggagtaggaggggctccttgatcttccgcttctttctcaccaacaaaagcagcaccagcaggaggaacagcagagccaggacagcccccagcacagggaggatgaaacctcccttccagggtccagggcaggtttcgacatggccatggcagtcgcacacagtggccctgatcaccgtcagctgctctttgttgccatggtcagacagagaaaggtgcacgtcatatgtatcctgcttcaggaacttcttcagggacaagaccactgtgtcaccttcctcgttgacctctgccgtccagtagatgtctgagtcatctgtgagctgggcctggaaaggggaggtgtggggagacaggtccttgtccgtgatgttcagcacctggcgcacagggctttggttgcagatggtgatctgacggggctcagggactgggccatggtcgttgacatcaatcagtgttagcagaagggttcccgtgccagtggtgggagggcttccattgtccatggccaagaccatgacttcatagatgttgttcctcacaaactgctcatcctcacggtcgagggtgcccacagctgtgacctgcccactgtctgggtccatggctagccaccctgctgggtctctcaggatgcggtagctgatcttttgattctccttgtcagggtcttctgcagtgtagacacacacaggctccccagtggggatgccctcctggacctcaacgactttggagggtgggacaaacacaggtgcctcattcacatcctccacgtggaccactatggtggctgtggaggttgggagcttcagcacaaaaggggcctcgttggtcacttcaacgtacagggtgtgctggtttttggcctcaaaatccaaacccttcctggttgtcaggatgccctggttgctctcagggtgggtggtgatggtaaaatggtccccgtcgtcaccgcccatgataaggtaggtggcacgccacgctggtgagttgggggcgtccagatcagtgaccgtcagcctctgcacctcatggcccactgcattctcaggcacatgggcctcgtacttctgggggtcaaacatgggagcattgtcattggcatcaaggatctccactactgccactgccgtggtggtggagccgtccccatccatgtctgtggcctggatggtcagtgtgtactcagggactttttcccggtccaggccactggagatgacgctgatggtgcctgtgctccggtgaattgtgaacatgaggtcgtgtgggtcctttggttcttggctatggatggagtaagcaaccaccccattgtaggtgtagatggcatcatcctcatccgtggctgtcacctgcatcacagaagtacctggtaggactccctctaagacactccctcggaaggtgtcctgggtaaacttgggcttgtggtcattctggtcggtcacgatgatggagatgttcatggggtcctccactgaggcaccattctctgacacagcgtggccaaagagctcatacttggcaatctcctcccggtccagtggcttattcaacaacaaccagcctgtctccttctctacagcgaagacaccctcaggggggctgtctgcccccggccccgtgatgctgtagaaaatcttggtgtctctatctttattagacttgagctgattcagtctctgggggaagggacccttgccattttcagggacagatattggagcaaccacccaatctctcttgtgtcttcgtaagatacgtttggatgggaagatcttcaatggattcctttccttcagtgaccttctttcctggactgtctcgccattccgcacagtgaagtcatcattatcagtgctaaacagagctggctcttgcccagggcagcccatgaatactttccccagcgcctggccgggctcctgctccgcgcctcccgcctccaaggtcacttcagcctccctgaagaccgcccggcacggctcggaggccgcgcactgcagccagcaaacctggagaaggaggagagacgcgagaggtccacgagggagccccatggctgcagagagaggggtgaagcagctgccgcgacggcgggccggtgttccgctcagctcttgcccctttga

SEQ ID NO: 121659 - DNA, 699 bp, Homo Sapiens
ccaaatgtatatacatgttcatttttatttttctctagctctgttttataaatacatgtgttcaaacaatcttgattaggagcattttaatcacgaagccaacacatgttactgcgtatctgtttaaaatctggtagttgcttaatgggacctaaggattaaaaagaagagttaactaaaagtacttggccaactttttgcatagaagaaaagaagccaggtttaccaacagcagcaatagctggactcctattataaatgtatttgggacatacttctcgaagtgtctcagcattcacaggctgaaatatggaagacactgtcattcagctgttcgtagtaaaaacaaagtctatacctggaactttttaaaactaaagcaagatgaaagatacatattctcagcttttgtaacaaggatctttttacacatgacccaatagtaactcaggactacttacatcaattcttgcttcaagctcagggatgggaatccttctattatagcataacatttgcctaccaatatcttcacaaattggaggtgaacctgtttcaagagaacgaagaattaactatttgtatacagatcaacgatatgaaaacagaacctatatcgttatttttaccatcgagctgcgacagcatgcttgtgttcagaagattctcggctcgtgcaacctaactttctgggacgct

SEQ ID NO: 121660 - DNA, 1784 bp, Homo Sapiens
  misc_feature (1647)..(1647): n is a, c, g, or t
gtgtgtgcatttttataataaaactgaaaatactgtaaacattttcattcttaaaattatactcatggtaataatttgaaagtatgctgcttccaacataatttctcagagaacaaagactgaccattaatacaaaacaaccttcagaggggtagtctttttatcctttgaaagtatgatacagtatttaattcaaatttccaaatgtatatacatgttcatttttatttttctctagctctgttttataaatacatgtgttcaaacaatcttgattaggagcattttaatcacgaagccaacacatgttactgcgtatctgtttaaaatctggtagttgcttaatgggaccaacagcagcaatagctggactcctattataaatgtatttggtacatacttctcgaattgtctcagcattcacagcatcaattcttgcttcaagctcagggatgggaatccttctattatagcataacatttgcctaccaatatcttcacaaattggagttgaaccatcaagctgcaacaacatgtttgttttcagaagatttctggctcgtgcaacctcactttctgtgacacttgtacagagtcgcatccattctttttgaacaacatgtagcatgtctgcaacagtggatgattcacaaaccatatacagtccccataatcctgtatctgtgtaggaagtgttgaaagactgaaagctatggcaaagattgccatgacaagtgagctgggccagcttgctagataaattcattcctcccccaaaagagcgatcccagttgccaatcagcgtgtttgcaaccatgagacagattgtatctggatgtgcccaaccaacagcttcaacagctattgcaaggtgcgccaaaggcatcttgtcatccctcacacgaatctcacttcctgtgaatttgcagggaggcagagctggtatttctcctttgtgtgtgcataaagagtcaccgaaatgaaactttgctaagtcaagcaattcatcatgggaaacacctccagcagcagcaagcactattcttggccccttataatgtgtggttatataatccactaagtccttacgacttatagatttgatattttcagttggtcccaaaattgtccgtccaagtgcagtattttgataagctgtggcatgaagataatcaaaaacaacttcttgtaaattggtttcaacttcctgcatctctctaaggattactccacgctcacgttcaatctctgcttctcccaatgtgctgttttgtattatatcagcaagaatttctacagctcttggcaagtctttagagaatgctttggcatagtatacagtctgctctctggaggtataggcattgagatgagcacccatattttcaatctcaagttccagatctaactgggatctcttcttggtgcccttgaaagccatatgctccagaaagtgtgctgttccattgttcttctcattttcgtatctacttccagcatcaatccagagtccaactgtgcatgttgagagcccagagtcttccgaagctactctgagtccactttctaaacatgttactcttgtttcaggaacattcagaacaacttgggtagcagcctgtgtacttcttaatctgttctctccanaaatataatgaccgtcccgcagcgcctcggattagaagactctcgctgaaaccccagagccgccgccgcgccgcggatgacaacaccactcgagccgcccctcgtgccgaattcgccacccaggcctcgctaccttg

SEQ ID NO: 121661 - DNA, 1053 bp, Homo Sapiens
  misc_feature (30)..(30): n is a, c, g, or t
  misc_feature (85)..(85): n is a, c, g, or t
  misc_feature (183)..(183): n is a, c, g, or t
cagtttgcccaaatcaggcgtgtttgccancccatgaggacagatttgtatctgggatgtgccccaaccaacagttttcaacagntattgcaaaggtgcgccaaagggcatctgtcaatcccttcacacgaaatctcacttccctgtgaattgcaggggaggcagagctggtatttctccttngtgtgtgcataaagagtcaccgaaatgaaactttgctaagttcaagcaattcatcatgggaaaccacctccagcaggcagcaagcactattcttggccccttataatgtggtggttatataatccactaagtccttacgacttatagatttgatattttcagttggtcccacaaattgtccgtccaagtgcagtattttgataagctgtggcatgaagataatcaaaaacaacttcttgtaaattggtttcaacttcctgcatctctctaaggattactccacgctcacgttcaatctctgcttctcccaatgtgctgttttgtattatatcagcaagaatttctacagctcttggcaagtctttagagaatgctttggcatagtatacagtctgctctctggaggtataggcattgagatgagcacccatattttcaatctcaagttccagatctaactgggatctcttcttggtgcccttgaaagccatatgctccagaaagtgtgctgttccattgttcttctcattttcgtatctacttccagcatcaatccagagtccaactgtgcatgttgagagcccagagtcttccgaagctactctgagtccactttctaaacatgttactcttgtttcaggaacattcagaacaacttgggtagcagcctgtgtacttcttaatctgttctctccaaaatataatgaccgtcccgcagcgcctcggattagaagactctcgctgaaaccccagagccgccgccgcgccgcggatgacaacaccactcgagccgccgcagccgccatttctgctagaaggccccggccgtaatggccgaattcccgggcatatgtccggtaccgtcgactg

SEQ ID NO: 121662 - DNA, 960 bp, Homo Sapiens
acgggtccaccaaacgttttgcgggccccaccacggtccacaatttgcgagccaccaaggcatctgcatcccccaccgatctcactccggggattccgggagccagactggtatttctcctttgtgtggcataaagagtcaccgaaatgaaactttgctaaatcaagcattcatcatgggaaacacctccagcagcagcaagcactattcttggcccctaataaatgtgtggtaaatataatccactaagtccttacgacttatagatttgatattttcagttggtcccaaaattgtccgtccaaagtgcagtattttgataagctgtcgtcatgaagatagatcggtgaccacttcttgtcaattggtttcaacttcctgcatctctctaaggattactccacgctcacgttcaatctctgcttctcccaatgtgctgttttgtattatatcagcaagaatttctacagctcttggcaagtctttagagaatgctttggcatagtatacagtctgctctctggaggtataggcattgagatgagcacccatatttgtcaatctcaagttccagatctaactgggatctcttcttggtgcccttgaaagccatatgctccagaaagtgtgctgttccattgttcttctcattttcgtatctacttccagcatcaatccagagtccaactgtgcatgttgagagcccagagtcttccgaagctactctgagtccactttctaaacatgttactcttgtttcaggaacattcagaacaacttgggtagcagcctgtgtacttcttaatctgttctctccaaaatataatgaccgtcccgcagcgcctcggattagaagactctcgctgaaaccccagagccgccgccgcgccgcggatgacacctcgtgccgaattcgccacccaggcctcgctaccttagaaccgttaggagttactggcc

SEQ ID NO: 121663 - DNA, 1122 bp, Homo Sapiens
gctgacgtagtacgtattttattgcagtgatattttcaggaagaattcatttccaagtgtcaaatatttcagggggtatgtgatgactgtaagctgacaacagtagccaaggtgagccttttttctttcctaagaaaaaatctcgcgcaaatattcaggaggtttgaaatcatcactttaaggaaaaaactgaaatatcttacagtgagttttaggtctacttgacagaggaatcaaaattaatttacagccagccattaatatgctactcacctgcatgttgttcaagaaaagaaaaatatgtcaatatacaagaataatgaaatgttttattttttgttgtcttgaaaacaattactaaaatgtaattcaggattttatttctctagcctggcttctcactggtatcatgaaggtcatggcacagacaataactgttccaaatatatgacgtattgttcctgtgctttctaggctgggtagataccctatatactctgtttttcccattatcccaactgaatagtattataatatattccctcccctgcccccaccaagtacatagcctcaatccaaaaggagaaagctggatcactcacctcttcccaatctacaccttttaagttgttttagaaacaataagagatgacctgccctctccattacactcgttggttctgacacacagaatagcaaacaaaaccaatttacgtgatgcccatgtctttatacttccacactctggaacaaacacacttgcaaacaatcagctcggggagtgttaaaaggccctcaaaaaattcagaatatctctaagtataaaataattcaaaaacatccagttccaaatagtccctgagcacactgttcattccagcaagaagtctccagagaggtaatgaatgaaaggcacattttctccaacttgaggaccgctgcatagtactagacggtaccagccaggctgatcaaaaagttctaattgaggacatcccccccttcccaaatttaaatcttgtatgctggaaaaataatttaatgtcagatgtaaacacaacactttcaactagaggagtggcagctgggcctcgtgcgaattcggcgataatagttttattg

SEQ ID NO: 121664 - DNA, 1496 bp, Homo Sapiens
aatctataaacaaaactttttattacagtgcgcttattgtagttgaaaacatgcagcaccatttgaaacaaagaagattcagaaacatggaaataagttttgtatctaaacataaatggatggtaaaaattaaagttttcattttttaaggaaaagcatattcatttttgtcaaacatttacagtaatccgggttaaaaagctatagttttcatgattctgttaagtctattcttcaaagtatgctatgtgaggttgacctagagaacacttgaccacatctacttctccacctccattctttgcccgttgaaagtgaatgttaattaaatcctccacaatttcttcatccatttgaatgccttccattcctgtcagaagcactgtcctcttagatgttcctgtatctgatactttttcaagtgtatttctgtgtatggagaaacagtaactctatggcaggtttgatttatataaagagggtattctttctttttcaaaatcttgtcagccactccaatctccacaaacgtgatgactgcactcccggactgtctgtcatagtccacgcggtccacctctccgcctccatttcgggactttgaaaagctcagctctagtttgtctctcatttgatcttcacgccatgtttcaggaatttcagtaacattgattttcattttagaaacttctacataaacctggaatcttgactcctgattttaatggaactggcttggccgtaacctccagatttacatcttttatctgtacatgatgtttactcatgcttaccacattttgagcaacttcttctttttcaaaggtgataagtgcttgtcctttttgtatctcataaggaactttcgagctcacttgaaacgaacaggagatatttgacaactggctgtcattctcaggagtttcaactgataagaatttcatctttgtttcaggaatatcctctttaatctggaattctttggtagcctcttgtaactccgtttcaagcttttggatctccttctttagctgaatatttttctttgtaatttcatcaattagtcccttattttgttcatcttttataaattcatctggcaaatgctccttaagaatttgttgtgtgtcatctttatcagcttccatgatcccccgcgtccgcccgccgagcgcagctccccaaggcccagcgcgcctgcccttcccggaaaacagcagcgcctgaaacgccggaacccccggaggcactgggaggggaaggcccgggttctcgaaactgtcgctgcctcctgcagaagcgccgcgggagagctgcggggtcttcctgaggaggtggccctcgcaggaacagctgggttccccgcgaaaagaaaaagacagtgaaaaagaaaactgctttaacggcgatttttctttagcatttaaccaatgctcaaatactaaacatggtgtctcggacgcgtgggtcgacgatatcccgggaattccggaccg

SEQ ID NO: 121665 - DNA, 678 bp, Homo Sapiens
  misc_feature (145)..(145): n is a, c, g, or t
aaatacaaaaagtttcttattaaaaaacttggaagccaacattgaaagcatggtttgtacacaacaacatttttggaaggacatataaagtgaatacaaccaaatatattaaaatggtttcaattaccagcattgaaacagtgcnaaaaaaaagccaaatacaattgcacagatagtggactcccttagatcttgaaagtgaacttgattcctgacctctcccattgtcactccaagtgaaaaatgaaagcatggggcttttcttgcttcttggttagtatgagacattgtgttcatctgagagcaaaatcaacactagcatcacagcagaagtgcccatttcagcaaatccggtaaaaattgtaagttggcatcaagggaaccaatggataccttagggcactgacaattctcaatacatagaaatgcttgagggttgtgtcggttcccctggccacagtttgtcaggttgtttagccagatgccccattggtaaggtagactgaaatctcggtttagggctgaccccaagaaacagtctggttcgtgctttggtatggtggactccagtgtgcatagcagctgctgtcttgctacaagttactcagcttaagttcagattgtgattggtggctcatttcacaagttttgacctcgtgccgcctcgtgccgaattct

SEQ ID NO: 121666 - DNA, 551 bp, Homo Sapiens
  misc_feature (392)..(462): n is a, c, g, or t
tttagtttgtaatattttattgcaaaaagaagggcagagaacagtctttttcttcgtacctgttcaccgcagtaatttttagcagctctcctgtgcaaagaagtctaatcaatgaatcagcgtataggccacaaataccttctcagtgcggtttcacctagaatacaagcactcagaagcacaaatttaactgaagtgagaaaccaggccattttgtagcttcagtttttctaccagtaatatattaatttcttgaaatagcctaataatttagttctactatcaaaacagaagcccaatctgggagaacaattattatagaagtcaaactaatttcaatcatattagtatacaaattcatattagcatagcctaataattcatattagtannnnnnnnnnnnnnnnnnnnnnnnnnnnnnnnnnnnnnnnnnnnnnnnnnnnnnnnnnnnnnnnnnnnnnnttcttttttttaaataaagaaattcagagaggagaaggaagcggactgatatgtgtctatccaaggacaaattttgtgtgcctgtacat

SEQ ID NO: 121667 - DNA, 751 bp, Homo Sapiens
gaggcaattatcaattgactttatttcctttcatatggtaacaccagcagtgtatgatatttgtaaataaaatacgtcataaaaaaatttaaccttattacctattatcagttaggttataccatcctgaataaaaaatatttgggccgggcatggtggctcacggttatgctaaatttttatccaaaataaaggcttattttgaataattcaaaaggaaaacaatttatcaagaaacaaaagtatgtaacagataaatgctaattcttacttttccccctaacagaaaagcataagcataaacatttcctatagcagtattaacacatacctgttttaggatgtattgaaaagaatccttgtggatttccacttgtaattttgtacatgagcttgtcattagagctcgaatctggatcaaatgcctcgatctggaccacagatacatctttaggagaattttccatgatttctgggtaataaacaggctctgatgtctgtggtgcattgtcattgacatcctcaacctctatgtagatctctatgaacgatgaaagaggcacgacaccctgatcggttgcaaagactgttagccaataatgggaggtcgattcacggtccagtcgatctgacgtctctatgacacctgtctcttcacctattttgaaaacaccaacgccagagccatctctaatggagtatcggatctccccatctcttctggcgtcctcatcatgagccgacaccgtca

SEQ ID NO: 121668 - DNA, 1490 bp, Homo Sapiens
  misc_feature (53)..(53): n is a, c, g, or t
  misc_feature (1021)..(1029): n is a, c, g, or t
aaaatctgacctcatcaaatagatgtcattcctaaaactctctttagatgtcntaccctatcagcagataaaatgggaaggggttgtaactaaaaacataaatgttaagcattagtataaagtaacttctgtaataaattatatcgcatattttttcagataggacagctcaaccttacgatgcctacctgatgccaggtgatgcttattttcttcctaaagtaggttactggtcatatcttttttccaaatattaaatgcaccttgccagatattctcctgcagctctaaggaaaggaaatcaatttaaaaataatttgtagaatctactattgagccaccaaagtataattccctaaaagtttaagaaaccctggcaattaattcagcataaacatatcctataaacagcaggagaggttcagctttctgattttactgtggaccttttcctaagggcattcatgaatgcagcaacagttttaactatggcttacatttattttaaatttcactaaatacaaatcttgattgtcatgccagttttagatcttattaattttcagaatggataaattcaaataatcataaattacggtaactttttattataccaaggtgttctaatgccatcatatgaagacagatgcttcaaacaacctgcattaaattatatttttaataaaattaaaatctatttttaacctatttgtagtcacaaaccgaaaacgtgtcgtctttaccttagagctaaaggcttactttatgcatacggtatatttaatagtctacaaatcaaagatttaaacagtcccttaaaaattccatatattctcataccaactcatctacatagaaatgaaaatctctattgttctcacaaaccattaccatgagttcactataacaactggatcaatatggcttgcctttcaaagttaaagaatcagaaaggggcctgtaagaagtcatttagcccaattccctcaccctgtgtgttttccctcaaagccagtgcaannnnnnnnnaaccaaaaaactggacatgtttaatacatacagtttgacaaatttggatttcactctttgttttgatgtagtaactcttttataaaagggaacagattcagacaagctcagtggcccaactgaagacattcagcaattaatggcaggacttcagtaatcagtggcaggactacaacatacatctcttcatgctagggaaaccaggctctctattataaagctgaccagggctattgttttccccttttctctcatcctaaacaccattcatatttttccgaggtcacattttagtgggatcatttacagagcccccagaacgtaatcatcatgttttaccttttttagtgaattatagacacctcttacaaaaatgcttgaagtaagttaacacctgtacatcaggacatcgcctgggtgagtaagaggaggagaggatcgagtcatgatcattagcacta

SEQ ID NO: 121669 - DNA, 671 bp, Homo Sapiens
ccacatttaaaacattttatgaggggataaaatatagtctttttctatcagtatgttcacacttcctggcctctcattgggaagctgtaagatgtccttcaataagatcctgaacacgcgacagaataatctcattagagctgctgcaattttctggaccatatggtgggtctatagtcaggaccccagccacacagagagtccttggagcgtctccctgttcagtgatggggatgtggttcttctcaagccatttctttaggctgttctttctctcttccagatcctctgggctgtatgctttgcagtctccagacgtgaacaaatgcatcagcttctccctcactctatggtccccttcattcatagtttcaacagtctgcacagcatgtcccataattccggtcacagacatgctgccatcttcaaggaagttcacaaggacaatattggcagagactgggtctgtagttaaaacccatcctttatactcattcttctcactggctgtcactcggacctctttgtaaatgtaatcttgccattctaaggggcctttcttcatccattcactcatgattgccacctggctaaatcagttaaaaaactcctcgcaactctgggtactcagcaaccatgctttgaggaaggatcgttgagcggagaccccc

SEQ ID NO: 121670 - DNA, 2626 bp, Homo Sapiens
ttttttaaaaggtaattcagttttaatttattttcatcactttttcttcataatccagatattttaaaatgcaaagaaaattaactttcaatgatatgttcagggactggcactaaaaaaaattttcagactgcaaatgagttatacaaatgaaaatatcaaatggagatccagttatcaaaatgaaagcactcaacatattaaaagttcacaagtatttgtattgagcacattacaaaagtcagcttgctaactgttgtgattttaaagaactattgcagaagtctgaagaaaatagatttattagttaacttataaagagattaaagaggctgaaacaagtattaaaaagaaatttgtgcctttattagaatgttaggctttaaatatgccaattttgataaattattgttgttgttttgttttttataagaaatgacactacagaactgcaatactggtccaacactcttgtctttactcttcttttaaagcaagaaacagaatgcgagtaatcagaaagcactagcaggcatcagttaatccaagatactagctcttagttccaaaagcacttgcaaagaaaaccttttggggggaaggggtggagagggatggaagcactccataataactggaatcccacgagtgtgtatgccaagtctcatgaggctattttttgaatttatcctttacttggtcatgtttttttccctcaaatacaatttttctttgacttttgtttcctcaaaagtataaaaagtatgataatataaacaagctcttgcactgcacacttagaagtgtacaattcaagcattatagagctatctacacactgataaatcccatcgaatcttggataattcattaatatacaaaatatcagggcacagaaagaactaaaacccacttctttttgttacacataagattcaaatattcaatctaaagaaaaacacaatcactttcgctctcttctacatctgcatggtgatacacttattaaaatattcctgtataatcatgtttggtgttactatttcaagtcaggtttaaaacctcaaaaccagccatccagacaaaacaggtaatcagaaagattatctcttccccacctccctaaccccaataactatgaagccaattttacgacatgactccaaacactggattgtgacgacaaatgctaggtccaatttcttcataatcctttttggtgtggcatacttggtagaactcaggcgtggaagccagcattgatcctccaaaccaaactgcatatcgctgcatgtggtgtgtaatgacttgtacatcaataggttttggcttcaatctaccaccactcaattcctcacttaatttcagccgggcatctacagttcttttcaaatctctttgcaagcgacgtccaaagtccctgaacatggttgaacctccagagaggacaatattcttgtagagaggacgtctgacatcaataggacaattctgaattacttcatctacaacttctgagataggttgtgtaaagtctggattagcaaactctggatgaaaaaagatttcaggtcccaaaaatctctcataaccaacatcgatagaaaactctttctttgagatagcattgattccagtatactgtttaatccattttgacccatctgtatcatacttgttaaattcttttactaaatctgggcagacataactatagcgctcctttactgccttagcagtttccaaggattgttctggagggattcctacttctcggtctctcagcagttgctgaataaaatatgttatatctcgtcctgcgattggaatgtgtttaatacagctgccaatcacatacccttcagccacaggaatgacatgagtgacaccatctccactgtctattaccgtaccggtcaacgtccgttctcctacttgtcttgaggtccaagatgcagctaaggcaagaacagcctgcacagcaatgtacaagcctggaacattgaaggactcaaacattatttcagcagtatattccctgttttctggagtattcaatggaggttcagtcaaaagaaaataatggtcttcaggttctgcccttaaatatttaaagatcacttgctccataaacctttccattaagtcccaatcttcaactataccatggcggattggccactttgttgcatatgtaggtttttctattgcttcatcaccaatgaagaagtctaggtcatcaacacctttcatcaccctcctttgagcttgatcacccacttttgctgactccttaatagcaatacaggaagggatgataaactgtggttctgtatttccagcatatcctagttttgtataccccgtgccacagtccaccacacaggccggcagccgtcccgccatcttcctcctcgcctgctgctgctgctgccgccgtctgctccgtgctgctaggggccagagattggcggcgggagacaagggctatctgaccatccacagctgggccgccttcaccgtccggggggtagccgggaagccgaagcagtagcaagaaagcagcaggctcggtcggcggctatcacttcccctcggccgaattacacacccagcctcgtactag

SEQ ID NO: 121671 - DNA, 1138 bp, Homo Sapiens
ccggagttgctaacagtaaagaaattgacgttcaatgaaacggtcgggatcggcacctaaaaaattttcagacggccaattgagttatcccgatggacgtagatccaaagggagatccagttattccaaattgaagccagtgcaacatggttaaaagttcaccaagtatatgtattggaagcgagcattgaccaaagtccagcttgcttactgttgtgattttaaagaactattgcagaaattctgaagaaatagatttattagttaacttatcaagagattcaagaggcttgacacacagtattagaaaagaaatttgtgcctttattagaatgttaggctttaaatatgccaattttgataaattattgttgttgttttgttttttataagaaatgacactacagaactgcaatactggtccaacactcttgtctttactcttcttttaaagcaagaaacagaatgcgagtaatcagaaagcactagcaggcatcagttaatccaagatactagctcttagttccaaaagcacttgcaaagaaaaccttttggggggaaggggtggagagggatggaagcactccataataactggaatcccatgagtgtgtatgccaagtctcatgaggctattttttgaatttatcctttacttggtcatggtttttccctcaaatacaatttttcttttggacttttttttcctcaaagtataaaaagtatgaaatataaacaagctcttgcactgcacacttagaagtgtacaattcaagcattatagagctatctacacactgataaatcccatcgaatcttggataattcattaatatacaaaatatcagggcacagaaagaactaaaacccacttctttttgttacacataagattcaaatattcaatctaaagaaaaacacaatcactttcgctctcttctacatctgcatggtgatacacttattaaaatattcctgtataatcatgtttggtgttactatttcaagtcaggtttaaaacctcaaaaccagccatccagacaaaacaggtaatcagaaagattatctcttccccaccacccttccccaagccttttccgcctttgccgcgaccagacatgattcctatcgcagtccc

SEQ ID NO: 121672 - DNA, 661 bp, Homo Sapiens
  misc_feature (565)..(565): n is a, c, g, or t
ttcatccaatttgaaacatttcttttattgaagaagttgaacttacagcagacagtgaaaggagttacagcactccaggacaaacacagacataaaataatacataaaacaagtagcgggaaactggaagatgccagggagtcctcttataaaagcagggttcaccaaaaccagaaggccaactggctccaggacagcgaaaggcacagtggctcctctgctcctctgccttctgccccatttgaaatgggggacttacaaatccagacttcagggcaggcctagacttgatgcagccactgcaatcttggtccatggtgcaatttggcagacaagttggtgaaaggtaagttgtctccagagatttcaatcagggacgtggcttccagatgttaaaagatacccagctaagtcacaaggaagtggatgttttcaaatgctaagtgaccaccaaacaaaacattctccctgggccttcaccactcagagaacaccaacatacaaaaacaaaagtctgttcccatttcatcaataatggagttttaaggattttgtcatagtgtanaatattaagaatggatgaataaaaagtcaaaaaaggtgcagaggtcctataaatcagggtttattagactagatattaataaattggaagggttta

SEQ ID NO: 121673 - DNA, 1353 bp, Homo Sapiens
  misc_feature (1236)..(1270): n is a, c, g, or t
  misc_feature (1273)..(1313): n is a, c, g, or t
tttagtcatttttaatgcatttttctctgtgcacaagagaaataactgatgaagtcaaaagacacactttcctttatacatagcagttaaaagtaatgcaaacatcacatgacactttcagtgaaagttacatttccaattacaaatcaaaatgcatattagggtctctttatgggagaagctgagaaggaagtcttaggtaaaaagcactttcctggcattactacactgatccttcaggctgcacaaagattaaggtcatatacagtcaatctgcaaatgttgacacaatgttacactgtaaattttctgtacaattaaatgtatacttagagataccaggataaacatttctactatattttaactgaacttgcctagccaacattttcactgagaagtttatcaaagatgctgtaagattctacaaaattgtgagacataactagctccagaaacatttcttgtattctttctcattttggttacacatattacactcagattctactgtaatatttttagatgtacagtgccaattgtgcttactgtactgtatacaaatatagcaaaaaagatcaatggtataaatcttacagcattttgctagcaaaaatacatgccaaagtcacaataagcaatatcgtaccacaaattagagagcttcaaataatttgcttctgtttttaatatcttcattctacattaaattactatcataggctaatgtttaaaaatgcaaataaattggacatctgtaggacaacacttgttcacccaactgtgaaggttgatacctgtttccaaaaatcacaataaatgcagaataaagagaagtgtttgcatgcaacacttttgagtgaaacagcattgattcccaccactcaaaacggctaaggaaggaaactaaaggaaataaggaaggaaggaaacaaagagggagggagtggggagacaagaggaagggaaggtaggaaaaataagcaaaggagaaagggagtgagggaagtaggagggagggactccatcttaaaatgcatcatattagacttacaactagacagatttaaaagaatcaaaatgaaagtaaagaacgattttgtgtgtgtgtttaaagatttaagagccattatcaaaaataagatacattttttttccaggtacagaaatgtgattacgatggctcccggccgtaatggccgaattcccgggcatatgtccggtaccgtcgactgnnnnnnnnnnnnnnnnnnnnnnnnnnnnnnnnnnncgnnnnnnnnnnnnnnnnnnnnnnnnnnnnnnnnnnnnnnnnnctgcgaaaggctagccgccctatagttgatgtatacatct

SEQ ID NO: 121674 - DNA, 1645 bp, Homo Sapiens
  misc_feature (1179)..(1239): n is a, c, g, or t
  misc_feature (1319)..(1319): n is a, c, g, or t
gggtaatccatttggcctccgtggggagtagttcctcctctggggaaggtacgcagccttcccgcacaagaaaatcgcgatccactacccaatccatgggcaccaccgccagctacccagagttctgcaactaccagcacgaccacaagcactggtagtgggtctggcaatagttccagcaatgctactgggaacaccgttgctgccgctaattatgtcgccagcatctttagtaccccaggcatgcagagcctgctgcaacagataactgaaaacccccagctgattcagaatatgctgtcggcgccctacatgagaagcatgatgcagtcgctgagccagaatccagatttggctgcacagatgatgctgaatagcccgctgtttactgcaaatcctcagctgcaggagcagatgcggccacagctcccagccttcctgcagcagatgcagaatccagacacactatcagccatgtcaaacccaagagcaatgcaggctttaatgcagatccagcaggggctacagacattagccactgaagcacctggcctgattccgagcttcactccaggtgtgggggtgggggtgctgggaaccgctataggccctgtaggcccagtcacccccataggccccataggccctatagtcccttttacccccataggccccattgggcccataggacccactggccctgcagccccccctggctccaccggctctggtggccccacggggcctactgtgtccagcgctgcacctagtgaaaccacgagtcctacatcagaatctggacccaaccagcagttcattcagcaaatggtgcaggccctggctggagcaaatgctccacagctgccgaatccagaagtcagatttcagcaacaactggaacagctcaacgcaatggggttcttaaaccgtgaagcaaacttgcaggccctaatagcaacaggaggcgacatcaatgcagccattgaaaggctgctgggctcccagccatcgtaatcacatttctgtacctggaaaaaaaatgtatcttatttttgataatggctcttaaatctttaaacacacacacaaaatcgttctttactttcattttgattcttttaaatctgtctagttgtaagtctaatatgatgcattttaagatggagtccctccctcctnnnnnnnnnnnnnnnnnnnnnnnnnnnnnnnnnnnnnnnnnnnnnnnnnnnnnnnnnnnnnagccgtttgagtggtgggaatcaatgctgtttcactcaaaagtgttgcatgcaaacacttctctttattctgcatttatngtgatttttggaaacaggtatcaaccttcacagttgggtgaacaagtgttgtcctacagatgtccaatttatttgcatttttaaacattagcctatgatagtaatttaatgtagaatgaagatattaaaaacagaagcaaattatttgaagctctctaatttgtggtacgatatgcttatggtgacttgtggcatgtatttttgctagcaaaatgctgtaagatttataccattgatcttttttgtatatttgtatacagtacagtaagcacaatgtggcactgtacatctaaaaatattacagtagaatctgagtgtaatatgtg

SEQ ID NO: 121675 - DNA, 993 bp, Homo Sapiens
  misc_feature (918)..(952): n is a, c, g, or t
aagaatcatctgcttatttattttacagagtaatgatttaaattgagtacatttgggcacagtagatatttgacacgaaaaatagttgtatcagaatgagcatcaggaaattagcgactcatcttacacataataactagaaaatattattctgtctgatcatttaagtgttacaaatcctgagaatgttatacattgaacaaattaggtactaccttataattaaatctcgcttggaaagaatcctttaaaaaatgctctgaggtacaaatcacctatgtattaaacatgagtctctgacattatacaaagagtttaaacaaatatatcaaacaattacaggccagtggctcttaaaacagctatcagtcaggttcaaggacacactgttccacaatttcccgtaagttggggttttccattgcagctgccactcgctctttgtcatttatctgcttattgatgtcttcttctgttgagtgggttccttcagaaatgtagatttccaacaataagagtcgccaaagagcaatgaggtactgttggcgtgaacctgataataaccagatattcttcttcatttatctcctgaacttccacacaactttccgagaccacttccagttcttctaaagtattgggcttttctgggtcccggatagttctaatcaaatcataaacctctagcgctttctcttccatgatccggggctgccgggcagctcccggctcagagaggccggagagccacaggactctgctcagcgtccaggagagcagcccggacacccgctgcatcttcacgctcagccatccctggcgactgtcccaatcgcgccaccgtctctcagcagcctcgggattgatcctggccgtaatggccgaattcccgggcatatgtccggtaccgtcgactgnnnnnnnnnnnnnnnnnnnnnnnnnnnnnnnnnnncggccgcttcctcgctcaatgacgtcgctgcgctctgtcgt

SEQ ID NO: 121676 - DNA, 772 bp, Homo Sapiens
tttttaagaatcatctgcttatttattttacagagtaatgatttaaattgagtacatttgggcacagtagatatttgacacgaaaaatagttgtatcagaatgagcatcagaaaaatagcaactcatcttacacataataactagaaaatattattctgtctgatcatttaagtgttacaaatcctgagaatgttatacattgaacaaattaggtactaccttataattaaatctcgcttggaaagaatcctttaaaaaatgctctgaggtacaaatcacctatgtattaaacatgagtctctgacattatacaaagagtttaaacaaatatatcaaacaattacaggccagtggctcttaaaacagctatcagtcaggttcaaggacacactgttccacaatttcccgtaagttggggttttccattgcagctgccactcgctctttgtcatttatctgcttattgatgtcttcttctgttgagtgggttccttcagaaatgtagatttccaacttatgtttaaatggtaaacatcgctgaagttttactcttaagcacagcccaataagagtcgccaaagagcaatgaggtactgttggcgtgaacctgataataaccagatattcttcttcatttatctcctgaacttccacacaacttttccgagaccacttccagttcttcctaaagtattgggcttttctgggtcccgggatagttctaatcaaatcataaacctctagcgctttctcttccatgatccggggccc

SEQ ID NO: 121677 - DNA, 919 bp, Homo Sapiens
tttccggaatgggagccttccagaaaaaaataggcaacttcattctttcccccataataaactaggaaaaatattattccggtccggttcatttaaggggttacaaatccctgaggaatggttatccattgaaccaaattaggtactacccttataattaaatctcgcttggaaagaatcctttgaaaaaatgctctgaggtacaaatcacctatgtattaaacatgagtctttgacattatacaaagagtttaaacaaatatatcaaacaattacaggccagtggctcttaaaacagctatcagtcaggttcaaggacacactgttccacaatttcccgtaagttggggttttccattgcagctgccactcgctctttgtcatttatctgcttattgatgtcttcttctgttgagtgggttccttcagaaatgtagatttccaacttatgtttaaatggtaaacatcgctgaagttttactcttaagcacagcccaataagagtcgccaaagagcaatgaggtactgttggcgtgaacctgataataaccagatattcttcttcatttatctcctgaacttccacacaactttccgagaccacttccagttcttctaaagtattgggcttttctgggtcccggatagttctaatcaaatcataaacctctagcgctttctcttccatgatccggggctgccgggcagctcccggctcagagaggccggagagccacaggactctgctcagcgtccaggagagcagcccggacacccgctgcatcttcacgctcagccatccctggcgactgtcccaatcgcgccaccgtctctcagcagcctcgggattgatcaacttcctggtcttcaaatgggccgagacaagcctaaaggttcaggagagcagagaaaaggcccc

SEQ ID NO: 121678 - DNA, 936 bp, Homo Sapiens
  misc_feature (277)..(564): n is a, c, g, or t
gggctaggtacgaggctgggtggtcgaattcggcacgaggcctgaaaggagccaggcagaaccttcccacatgctgagagcgaggactagaggcgtggaggccaagcagctgagccaaagaagatcagccgtgggccaggggcctacatgagcacaaggagacatgggctagggaaggcagaactggtgcccaaagagccacacgcccccttggtgaaggagaagacatggacacagttatggctgtgactgcacattagaaattgatttcactggnnnnnnnnnnnnnnnnnnnnnnnnnnnnnnnnnnnnnnnnnnnnnnnnnnnnnnnnnnnnnnnnnnnnnnnnnnnnnnnnnnnnnnnnnnnnnnnnnnnnnnnnnnnnnnnnnnnnnnnnnnnnnnnnnnnnnnnnnnnnnnnnnnnnnnnnnnnnnnnnnnnnnnnnnnnnnnnnnnnnnnnnnnnnnnnnnnnnnnnnnnnnnnnnnnnnnnnnnnnnnnnnnnnnnnnnnnnnnnnnnnnnnnnnnnnnnnnnnnnnnnnnnnnnnnnnnnnnnnnnnnnnnnnntaaattatttcacagaggatagcaagctccagaaggttctattacctttaaaaaagagtagttttgcccctcccagcaacctggtatgggtgccctaagaccagtctgaactcacactgtctgaaaggccacccaggatccaaatcgggccatcttcattgccatgagtgttcggacaggctctgcgtgccaggcaacagtgggcagacaaagggctccctggctactgggaagatacagaaccatcctgtgaaaatcatttcagcactggagaccttctttgctattacttctttcattaacaatgacctctaatttaaattgggccctgctggtttgttgatgaattgagcaactgagaacgtggcgggc

SEQ ID NO: 121679 - DNA, 1125 bp, Homo Sapiens
tttttacagtttgaaacagaaatttattctcagaataatgcacagaagcacaggttgaggctactcttgggaagcttccctccccttcctcttcctcctctccctcctctctgaatgccagggagaacacagttgaaggaaggaaacatgcaatcacaaacaatgaacaactctaaagacaaaaaggtttggtccaaaagaactcaacataattaatccaatgactgtgaagagcttcactgagtaggattaagatattgcagatgtagtgtttccacagggtggctcttcagtgcaccagcggggcctgcttgagggagatgaggactgagcgcatgcgggagacatctttggcctgcttgctagacttggggttaaagtcacacagccgggccacccgttcccactcagtgcctggggacgactcgtcaatgtcatttacaaaggcttcttctgctgccctgttgtttgcttttgttttctgtagctgctcgtcctgtcttgcataccattcttctagctcctttattgccttttctttccactctgcttcttgcttccgagaattggcatcaagggcttccaagcgttccatttgttcttctctccatttacggatactttcaggctctgactgcaatcgatccacttgtgaaatagctgcataactgtctgttggaccattactttcctggtagtattcaccattcattactccatcaacagcatccggaccccccggcggctcgccgtgcggctggggcccgggggcgccgccgtccaggatggcgaaggcctcgtcgttctcgatgcccgcaatctcgctctcttgctgcgccaagaaggccgcagccgggtcttcttcgccggcgccggccactccgttccccagcgcgggaccgccaggggcgccggcaggggcgccgaacggatccagctcagccatggcgggcaactgaacggcacggacaccaacggtgagacaaaaaccaaccgacccaccgacaccacgcccggcagccaccgctgtggtgccgactgggagaggaggacaagcgccaggaggagacggtaaagcgaagccctaccccctcgtgccgaattaacacccaggctctacctagc

SEQ ID NO: 121680 - DNA, 931 bp, Homo Sapiens
  misc_feature (13)..(13): n is a, c, g, or t
  misc_feature (44)..(44): n is a, c, g, or t
taaaaggaacctncaaccataatttaaatcccaatgacttgtgnaagagcttcactgagtagggattaagatattgcagatgtagtgtttccacagggtgctcttcagtgcaccagcggggcctgcttgagggagatgaggactgagcgcatgcgggagacatctttggcctgcttgctagacttggggttaaagtcacacagccgggccacccgttcccactcagtgcctggggacgactcgtcaatgtcatttacaaaggcttcttctgctgccctgttgtttgcttttgttttctgtagctgctcgtcctgtcttgcataccattcttctagctcctttattgccttttctttccactctgcttcttgcttccgagaattggcatcaagggcttccaagcgttccatttgttcttctctccatttacggatactttcaggctctgactgcaatcgatccacttgtgaaatagctgcataactgtctgttggaccattactttcctggtagtattcaccattcattactccatcaacagcatccggaccccccggcggctcgccgtgcggctggggcccgggggcgccgccgtccaggatggcgaaggcctcgtcgttctcgatgcccgcaatctcgctctcttgctgcgccaagaaggccgcagccgggtcttcttcgccggcgccggccactccgttccccagcgcgggaccgccaggggcgccggcaggggcgccgaacggatccagctcagccatggcgggcaactgaacggcacggacaccaacggtgagacaaaaaccaaccgacccaccgacaccacgcccggcagccaccgctgtggtgccgactgggagaggaggacaagcgccaggagggagaccctcgtccaatacacccagggccgtcgaccctatgcccgtatagc

SEQ ID NO: 121681 - DNA, 1006 bp, Homo Sapiens
  misc_feature (764)..(764): n is a, c, g, or t
  misc_feature (836)..(836): n is a, c, g, or t
  misc_feature (845)..(845): n is a, c, g, or t
  misc_feature (869)..(869): n is a, c, g, or t
  misc_feature (886)..(886): n is a, c, g, or t
  misc_feature (893)..(893): n is a, c, g, or t
  misc_feature (919)..(919): n is a, c, g, or t
  misc_feature (928)..(928): n is a, c, g, or t
  misc_feature (930)..(930): n is a, c, g, or t
  misc_feature (950)..(950): n is a, c, g, or t
gaatagcaaaagcaagattttattaaagtgagaaagcactctacagggtgggtgtgagccccagcaagccgcccaaggacccggttacaatgttttctgggttttaagtactccttttgaggttcctatcagctaccccttatctgaatgaaggatttggtccttggctaatcaaaggttgaggcgaattggtaccctatgcagatgaaggcatggcctgtgcttggcccacggccactccaaggcactgtccttttctatcagagaactggtacaagggggagggttgtagcgacagtcgctttcgatcctttgctactcgggtgtagatgaggtttttccttttggtttagatgtaggaagttcacgttaactggctttaggttccctgctcccagaccttggtgttttttcttgtaggaagtcagcacgaattggccttaagttccctgcctccaaaccctattctcctgcctaacttctgtgtaactcaatatcatcttacaacaaatctaactttaaataaaggaaaaaagaaaatcaatacttacagggtggcaagcatttgcaggttatttgtgatcaatctgtcctgagatcctgtctttaatgggtgtatatattactaacttataactgcataacactcccgaaacatactagctcaggattgagctggttagaaatttaggctgggctcagccgggcattcttctgggctcagtttggctcttcaagtgtgagtggttagatctggtgaatangtggtctgctctgtgagtgactgtctgtaactgaggactttggctttctcagatgctatctccagaaactanatgggctgntgtcatagagatggagattctganaagatacagagcattangactttnactcgtgcgatttctggctcgaggcnaatccctanangagtcgtataatcctatcangcaaactgttctggtgtgattgtttcgccacatccaacaaaacgagcggagaaaga

SEQ ID NO: 121682 - DNA, 526 bp, Homo Sapiens
tttttgaaacagcaaaagcaggggtttattaaagcaagaaagcactccacgggatgggtgtgagccccagcaagcagctcaaggacccggttacaaagttatctgggttttaagtactccttttgaggtccctatcagctaccccttatctggatgaaagatttggtccgtggctaatcaaaggctgaggtgaattggtaccccatgcagatgaaggcatggcctgtgcttggcccacggccactccaagtcactctccttttctatcagagaactggtgcaaaggagagggttgtagcaacagtcacctttgatcctttgctactcaggtgtagatgaggttttccttttggtttagatgtaggaagttcacgttaattggccttaggttccctgctcccagaccttggtgtttcttctttaggaattcagcacgaattggccttaagttccctgcctccagaccctattctcttgcctcacttctatataagtcaataccatcttacaacaaatttaactttaa

SEQ ID NO: 121683 - DNA, 1400 bp, Homo Sapiens
  misc_feature (140)..(187): n is a, c, g, or t
ttcctttttagaaatgaggtttattttcaaggctactcagtcctaaaagcctgcatatttactttttttccttcctccaggtttacctccaagtcaggatttcaaaaaccaccaacattcaggctcattcttattggtannnnnnnnnnnnnnnnnnnnnnnnnnnnnnnnnnnnnnnnnnnnnnnntcacacagttgtgggattcagcgccaaccccgggcgtttcattttggcaacaaaaccaggattccctttcaaagaagcttctggaaaatgctgtatttcctagatgaaggcccctggtttttcaacctcaaaatcacctactcaaaaagcagactcagaaacccaaggttttagaacatggtcccaatgtaccacatcataaaatcactctcattcctgcaactgtacaatgaatggctcccaaagtcattttatttaacaaaggggtcaaggcagaggaaagtttcccttaatatccccacaactgctccacatgtcttctgtggaaacacttcaccaggaactagctcaacactcttgctaacaatttagtgtctatacaggaaggctggtgtctctgttacaggtggcccgttccttaaagcctttagggttaatcgcagctgcactgagtggccaagcagaccctgttgggatgtgaaagcagtttgttaacagggcccctggccgggcccagaggctgtcagactcagcaagtaacactgaatgtccaaaaatacggctgtgttaaactaacaagccaatccttctgctcagatctctggatagaaatgatttttcttttatctatggggaatgcaatttcatcacagccccttacataaacgctcctgaaaccctttcagtagacagcatttcaattcagagaccaaagtgaaactatctttgaaaacagggacgtggctgggaaaccatgcacacctcggcgaacacttttccacccaccacgagcttggactttctgggaaggttgtcggttttctggtcaaaaacattcttgaagtcatcaggaatggaggaatggagactcggcatcccgggaaagtgagttcctggtttcatcgctgggattcaagagccgaacagcacaatcatgcagaacatcatgaagatgttccacagggcgatgaagattcgaaagtatctgaggctcagcaagaattcccggatgttgtcacctgtgctgggctccctggactcctccccaaagccctgcgtgtccttctttttcagcttaaagttcagcaccgccccggcattcatcagcaacgtcccgaacagcaggatgtctccgatcatcgttacggccgaagcgtccgtcccccggccgtaatggccgaattcccgggcatatgtccggtaccgtcgactg

SEQ ID NO: 121684 - DNA, 833 bp, Homo Sapiens
gctttatttcctagatgaagccctggtttttcaaccttcgagattcgacttactcaaagccagactcaggtaacccaaggttttaagaacaggtcccgagtgaccacatcatggaaatcactctcattcctgcaactgtacaatgggatgggctcccaaagtcattttatttaacaaaggggtcaaggcagaggaaagtttcccttaatatccccacaactgctccacatgtcttctgtggaaacacttcaccaggaactagctcaacactcttgctaacaatttagtgtctatacaggaaggctggtgtctctgttacaggtggcccgttccttaaagcctttagggttaatcgcagctgcactgagtggccaagcagaccctcggcgaacacttttccacccaccacgagcttggactttctgggaaggttgtcggttttctggtcaaaaacattcttgaagtcatcaggaatggaggaatggagactcggcatcccgggaaagtgagttcctggtttcatcgctgggattcaagagccgaacagcacaatcatgcagaacatcatgaagatgttccacagggcgatgaagattcgaaagtatctgaggctcagcaagaattcccggatgttgtcacctgtgctgggctccctggactcctccccaaagccctgcgtgtccttctttttcagcttaaagttcagcaccgccccggcattcatcagcaacgtcccgaacagcaggatgtctccgatcatcgttacggccgaagcgtccgtcccccggccgtaatggccgaattcccgggcatatgtccggtaccgtcgactg

SEQ ID NO: 121685 - DNA, 1090 bp, Homo Sapiens
  misc_feature (353)..(420): n is a, c, g, or t
  misc_feature (966)..(966): n is a, c, g, or t
tagttttattccacatttaatgtacgtaaaagggtgtttttgtaaatgcaaagattaaatcagacagcctctgaattgtagtcttgaaaacattagcaagttcttttaggtccagggtagatactgcagttcacttagccaactttctgcattgagacatccttgccagggatcctgtcagttatgcgaagatgcggcacgagataattcctcttgctgtgatggttcgtcctcaatgacaggtcccttatagtatttaggtacaacaaggtcttttgtgcttggaatgcccttgaaaaagctgcctcacctgtttgtgaagggaaccccaaagagaaagggagaggaagggnnnnnnnnnnnnnnnnnnnnnnnnnnnnnnnnnnnnnnnnnnnnnnnnnnnnnnnnnnnnnnnnnnnnaagtagttcagagtccatgacttgctcttgccatgggaaaaggcaaggaagttagtgtcaggaggtcaagtgcagagcatcttcagccaacctggacagtgagggagtagaaggatgcttctccctggactcactgctgtggcctaagcaggaaccgggatattcaagagcactgcagaggaagccgtgacgaggcaggttcacacagctgtacaggaatagtcttccacagcgacaccttgtaatagccaggagcaacagcaggaatgcgctcatcagacatgtcagaagcaagccccacgagcttggactttctgggaaggttgtcggttttctggtcaaaaacattcttgaagtcatcaggaatggaggaatggagactcggcatcccgggaaagtgagttcctggtttcatcgctgggattcaagagccgaacagcacaatcatgcagaacatcatgaagatgttccacagggcgatgaagattcgaaagtatctgaggctcagcaagaattcccggatgttgtcacctgtgctgggctccntggactcctccccaaagacctgcgtgtccttctttttcagcttaaagttcagcaccgccccggcattcatcagcacgtcccgacagcaggatgtctccgatcatcgttacggccgaagcgtccg

SEQ ID NO: 121686 - DNA, 853 bp, Homo Sapiens
tggattagaccaattttagggtgttattaccgggaaagggcggggtgtctctcgtttaccagggtggccccgttcccttaaaagcctttaagggttaattggcagcgggccatgaggtggccaaggcaggcccttgttgggatgtgaaagccagtttgttaccagggcccctgggccggggccccagagggctttcagacttcagcaaagtaaccactgaatgtccaaaaaattacggctgtgtttaactagcaagccaatccttctgctcagatctctggatagaaatgatttttcttttatctatggggaatgcaatttcatcacagcgccttacataaacgctcctgaaaccctttcagtagacagcatttcaattcagagaccaaagtgaaactatctttgaaaacagggacgtggctgggaaaccatgcacacctcggcgaacacttttccacccaccacgagcttggactttctgggaaggttgtcggttttctggtcaaaaacattcttgaagtcatcaggaatggaggaatggagactcggcatcccgggaaagtgagttcctggtttcatcgctgggattcaagagccgaacagcacaatcatgcagaacatcatgaagatgttccacagggcgatgaagattcgaaagtatctgaggctcagcaagaattcccggatgttgtcacctgtgctgggctccctggactcctccccaaagccctgcgtgtccttctttttcagcttaaagttcagcaccgccccggcattcatcagcaacgtcccgaacagcaggatgtctccgatcatcgttacggccgaagcgtccgtcagaaccggaagcccc

SEQ ID NO: 121687 - DNA, 939 bp, Homo Sapiens
  misc_feature (418)..(426): n is a, c, g, or t
  misc_feature (715)..(724): n is a, c, g, or t
ttaggagttttcaagggaaattgttatacggtaagcttttgtctgtgacataagccttttaaagaatgtgtttaactgtcacaatgtggaaaaaagttcaatagtacggatcgctgattcctgcgaacgcctgtcgagtaccccgatgctgaccaagtataatgtggtgagattcccaagaaatgtttgaagaagcaatgtcggttcctgtcaatgttcagtatctaaaatgtgctttttcagaggccattggtcaaaaagtacgcatttaaaatgaaccatataagttttaccagtaagaaagccgatagttaaggttcaattcaaattggagttcataaggttagtaatttaaatccttagaccaaggttacagaaagtgcatcttcttattttccatcgtcaaacaatgttaaannnnnnnnnggtgtttatacctgtttaaaaaataagaaacagccaaatacttaagcaatatgtacatttaaatttttggtggtggtttgtgttttaaaagaaacagcttccttacgatttgcctcaagttctggtggaaatgcttacaggaactagctaataaaccaaaaacatagagaagcacattcaaaatactgatttactttggtagcaaatggtttttctttgaagactaatgaagatagacaagacccattaaggtgaagtggactatttcaaatattcaacagtttacatnnnnnnnnnntcttttaagagctaagcgtctgtatccacggatagcaatgcaatacctagtttatgatgacttgaaacaaacaaatgcccataaggaaaaaagtctgtattttatctaaatttactttcagtcaatagcttcagtaacattttcttcccaatacatactccctctctctataaggctgttcctgggagcggacgcgtgggtcgacgatatcccgg

SEQ ID NO: 121688 - DNA, 376 bp, Homo Sapiens
ttttttttgtattttatctaaatttactttcagtcaatagttcagtaacattttcttcccaatacaatactccctctctctataaggctgttcctgggagccagacaagtttaggtaataagggagttaagagagttaactgcttgcagttttaaatagacagtaactttgcttccctcttaatgtgctaatagttgtgtctaaaaaaatatgcaattcttaaaaaggtaccatttctgatttctttattatctgtaacctttggaaactaatcacatgaaactacaaaattagcaaatgtcttgaaatctgtatataaaacataaattacctctaatttcaaactctcatttattagtgtaccactcaatctttt

SEQ ID NO: 121689 - DNA, 1292 bp, Homo Sapiens
tttttttgaaggagaaaacagataggagctttactcaaaatcacaaagacactatttttcattgagaaccagtgtgagagtaggaaaattggcaaatggccagttgcccccagcagccctgaagaaatcaggtaaattccgctccagagacggcagagctggtggcgccattcttcagggcagcacagcctttttctgctacacctcactcggccagggcaaagtttgtagactgcagccgctcagtctcctggcagatgttctgctccactgtgtcacactcggctaggaatgcctgaaccttttttaccaagcctttccttttcaatctactgtctttgaaattttctggcaggatcagtgtgtcaatctcctccaagatcttcataaactgctctattgtggcttttactctcctatcaagtttgcagagagcttcagcttgcaaatccttgggcagaaaaccctgctggattccagtaagctctttattcaactcttccagctggtcagctatcttctccacagacttctccaaatgtttcaacttctttagttcaacctcttcctgtggactgttctttttcccaattaacatgacccggcaaccatcttgtattccaagtgctgacaacggtgtttccatttccttcagagattttcccttaaatatgagtttctgaaaagactgtggaacccctatgacctcttcaacaacctgggccaggtcttggacaactggttcactgctgccctgctgggaggtaacatgaaggtcgtgcttctcattgctgtgggtgacagtcacggtgagcccagctgccgccatttcctccctggtcacctcctcgctccgggtcgactcctcgtcccgggtcacctcctggctccgattcatctcttcgccctgggtcgcctcctcactctgggtcgcctcttcactccaggtcgcttcctcactcagggtcaactcctcgctccgggtcaactcctcgctccgggtcgagcggcgccgggttttcttcttcatccgcggcctgcgagcgccggcggcggcgcccctggtgggtcggtcatgcccgctggcagtactccgggcaggtggacgccgagagggaggcggaccacgctgggccgggggctccgactggcgcggctcccggcctggccgaagggcgcgcagccgggaacccagccgctcccggtcgcctcgcggtctccgcgcccccccgcgctgagccaggcccgcacttgttgaccgcccagcgatggaagctgagcgcggcgtctcc

SEQ ID NO: 121690 - DNA, 800 bp, Homo Sapiens
  misc_feature (680)..(714): n is a, c, g, or t
tcattcacactttggaagaagcctcatgtttgactgttttcagatgcaacagagaattgttctgcttcgttcaaatgttaaaaatttcccctcgtattcttgaattctgggtggatttacacacaaagagataaactgtgtcatcgttgtctatgaaagtgctgatgccatgtggcattgaatgaggccaaatcaaacccacgactgattcttaattcccgtgcccttggtttttcttcttttagatccatcattagtattcctccaggcttatctggtgcaaagctgtggagtcctgggaattgttagacctgttctagcagccctcactcagaatacccttgtatctcctctgctgaatttggggaaggaagaagacactcaccacactaaaaaaagccagaccacttgggaagtatgtcaatatcttcagagccagcttcaattcctttaatcaggtggcagtgtggaaggtctacagattctacttctctggaggctttaagtcgatttctgagtgccagaagcctctcgcccaggatgcgccagcgcgatccccagcaagcccacagccaccagccgccccatggcgcgggagccgggcgcgctgcctcgctccggcctggccccccggccgtaatggccgaattcccgggcatatgtccggtaccgtcgactgnnnnnnnnnnnnnnnnnnnnnnnnnnnnnnnnnnncgccgcttcctcgctcactacttcgctgcgctcgtcgttcggctgcgacgagtgagcgccctatagtagtctatacatgttctttg

SEQ ID NO: 121691 - DNA, 1240 bp, Homo Sapiens
ttttttcctttttccctgctaacctcttcttttaacctaaacacccttctttgatttacacccccactttggcaatgcgttaatcccccaatacaattcataaattaatgtaattatcgccttccaccaaagtcaattagagtccccacacaagctcttgtataaagtgcgtaatgacaccttcccatcatacactgaggctacagaacttccttggagaacagacccattgttggcataaactgtagtcactgtaggcttctcagatagaatgttctggatgcggagaacctctgacgagggaggattgttcgggtcatacacgaagagcttctggccattaggatgacagcctacccagatgtcccccgaggaaggatcaatagataaattatccaccagtgtatccagctcaagtaccttcaactgagttaaattcatattagtgtgtttttcccaaacatgaatttcatgagccaatatgtcagcaacatagatatacttatcatcaggtgaaatattgatcccatttgctgaatcaaatccttctgctaccactttaacttcatttggactgtagtaaacaacatttgcccagtgtaagttcaagtatgtttctaaatactttaagaaaggatcagagaagtagtggtcatttgtggcatagaaatgtgccggtccaacagctgtgatgtcattcacacttggaagaagctcatgtttgactgttttcagatgcaacagagaattttctgcttcttcaaatttaaaaatttccactgtattcttgaattctgggtggtttacaacaaagagataaactgtgtcatcgttgtctatgaaagtgctgatgccatgtggattgaatgaggccaaatcaaacccacgactgattcttaattcccgtgcccttggtttttcttcttttagatccatcattagtattcctccaggcttatctggtgcaaagctgtggagtcctgggaattttagacccacactaaaaaaagccagaccattgggaagtatgtcaatatcttcagagccagcttcaattcctttaatcaggtggcagtgtggaaggtctacagattctacttctctggaggctttaagtcgatttctgagtgccagaagcctctcgcccaggagcgccagcgcgatccccagcaagcccacagccaccagccgccccatggcgcgggagccgggcgcgctgcctcgctccggcctggccagc

SEQ ID NO: 121692 - DNA, 1318 bp, Homo Sapiens
ccggtgaggggcgcctgtggtgagggggacctggggtcggtgccacagtgagccagcccgcgacgtcgcacggagtgggcggagcgcgcgttgcgcagagcgcgtgctggcgcgtctggcggtgtgctgttgccgtcgtgtggtgtattcttttgggattttagttagtctttaatataactccaactttttaatggtaaacaaagatgtaagtacaaaacatcaaaatacgttatcagtagttctaaacagccatagtagtcacagtgccagaagtgaggtcactcacattttaaggaaatataattcactctatttcagtggaatccatgttctggcagttggaaggcaaaggtgaggcttactttgtgcaaaatgtattcactttattcgaaagcagctttcttttctgtcccttgcttggcattttaaagaacctgttcattttccttttttgttaaaagtgctctaagaactaaaagggccgttccttactggaataaaattaactacacatgccatacatttctgggtcaatgttgctggttaaattccctcagaattagcaattcatagaaaattaattgttaagttatcgcactttcatgccaaaagtacaatttagagttcacaatacaaggctctgtggtataaagtgcctatgagcagcttcccatcatacactgaggctacagaacttccttggagaacagacccattgttggcataaactgtagtcactgtaggcttctcagatagaatgttctggatgcggagaacctctgacgagggaggattgttcgggtcatacacgaagagcttctggccattaggatgacagcctacccagatgtcccccgaggaaggatcaatagataaattatccaccagtgtatccagctcaagtaccttccaaatgagaaattgtcaaaatcttcaactgagttaaattcatattagtgtgtttttccaaaacatgaatttcatgagccaatatgtcagcaacatagatatacttatcatcaggtgaaatattgatcccatttgctgaatcaaatccttctgctaccactttaacttcatttggactgtagtaaacaacatttgcccagtgtaagttcaagtatgtttctaaatactttaagaaaggatcagagaagtagtggtcatttgtggcatagaaatgtgccggtcctacagctgtgatgtcattcacacttggaagaagctcatgtttgactgttttcagatgcaacagagaattttctcccggccgtaatggccgaattcccgggcatatgtccggtaccgtcgactg

SEQ ID NO: 121693 - DNA, 467 bp, Homo Sapiens
gacagaaaaggttttgaaagaggttttaaagaaaagtgcaggatattcattggtaaagatgttggtgagaggcttggaagcaaaacttcaggggaaaaagacaacatatggaattgaccacaattgaatttacaagtgaagtggctttacagaggaatcaggggatgtttctgagagaggaaattcattaaattctaacttgaatattttctgtttgcctttaagtcagagcaaaggctttgagtcccagcttcccagtttgtgaccttgagcaattgcttaacttttccaaagcctccaatagtcttcactagaagctggctctgaagatattgacatacttcccaatggtctggctttttttagtgtggtgagtgtcttcttccttccccaaattcagcagaggagatacaagggtatttgatgagggcctgccaaggaaacgaccttccccttcctcgcctctg

SEQ ID NO: 121694 - DNA, 651 bp, Homo Sapiens
  misc_feature (369)..(404): n is a, c, g, or t
  misc_feature (477)..(499): n is a, c, g, or t
agaaacaactagtgtattgattttggggaggagagaaggggtgcagatgggaaatggggaggcaagggctctttagcgtttgccaaaaccactgccacacccctccaccccctcttgccttcctcctccacggtgggtgccagcaggctctcccctttccagtgacctccctctccctcctcccagcaccccacttggcttcaacctccagtgactgcacagagcccacccagggtctaaagctagggaaggcagctcaaactcacctttcttctcccttcttccacctcccacctcattcccatctcttgtctaaataaaatacagaaaagcaagcgcagctggtacctgggagaatggactcacccnnnnnnnnnnnnnnnnnnnnnnnnnnnnnnnnnnnncaggcagaggaacctcagccaggtgtagtggaatcacagcaggccaagcccaggggcccggctcaagctgtcnnnnnnnnnnnnnnnnnnnnnnnggaggctggcctggcagtgagcctgccgtccagaggaggctggcggagaagcctctatgcctgcctctcaggcaccatgtcacagggtccccggggtgggggcagcagccagggcagaaaagcagaagctagcctctattaaagcacccctt

SEQ ID NO: 121695 - DNA, 494 bp, Homo Sapiens
acagcgcgcgcatgcccacagagtctgcacctcagtacacacagcgacgtccaccaacaaagacaccacagcagccaggggtagaaacaactagtgtattgatttggggaggagagaaggggtgcagatgggaaatggggaggcaagggctctttagcgtttgccaaaaccactgccacacccctccaccccctcttgccttcctcctccacggtgggtgccagcaggctctcccctttccagtgacctccctctccctcctcccagcaccccacttggcttcaacctccagtgactgcacagagcccacccagggtctaaagctagggaaggcagctcaaactcacctttcttctcccttcttccacctcccacctcattcccatctcttgtctaaataaaatacagaaaagcaagcgcacttgggtacctgggagaatggactcaccccggggctgggggcaagggttgggactgggggcggggcaagcaga

SEQ ID NO: 121696 - DNA, 829 bp, Homo Sapiens
  misc_feature (53)..(66): n is a, c, g, or t
  misc_feature (332)..(354): n is a, c, g, or t
  misc_feature (427)..(461): n is a, c, g, or t
ctaagagaagttattttctacagtggttttatactgaaggaaaaacacaagcnnnnnnnnnnnnnngcatctatctcatctatctcaatcctaatttctcctcccttccttttccctgcttccaggaaactccacatctgccttaaaaccaaagagggcttcctctagaagccaagggaaaggggtgcttttatagaggctagcttctgcttttctgccctggctgctgcccccaccccggggaccctgtgacatggtgcctgagaggcaggcatagaggcttctccgccagcctcctctggacggcaggctcactgccaggccagcctccnnnnnnnnnnnnnnnnnnnnnnngacagcttgagccgggcccctgggcttggcctgctgtgattccactacacctggctgaggttcctctgcctgnnnnnnnnnnnnnnnnnnnnnnnnnnnnnnnnnnnggggtgagtccattctcccaggtaccagctgcgcttgcttttctgtattttatttagacaagagatgggaatgaggtgggaggtggaagaagggagaagaaaggtgagtttgagctgccttccctagctttagaccctgggtgggctctgtgcagtcactggaggttgaagccaagtggggtgctgggaggagggagagggaggtcactggaaaggggagagcctgctggcacccaccgtggaggaggaaggcaagagggggtggaggggtgtggcagtggttttggcaaacgctaaagagcccttgcctccccatttcccatctgcaccccttctctcctccccaaatcaatacactagttgtttct

SEQ ID NO: 121697 - DNA, 917 bp, Homo Sapiens
  misc_feature (53)..(71): n is a, c, g, or t
  misc_feature (337)..(359): n is a, c, g, or t
  misc_feature (835)..(857): n is a, c, g, or t
ctaagagaagttattttctacagtggttttatactgaaggaaaaacacaagcnnnnnnnnnnnnnnnnnnngcatctatctcatctatctcaatcctaatttctcctcccttccttttccctgcttccaggaaactccacatctgccttaaaaccaaagagggcttcctctagaagccaagggaaaggggtgcttttatagaggctagcttctgcttttctgccctggctgctgcccccaccccggggaccctgtgacatggtgcctgagaggcaggcatagaggcttctccgccagcctcctctggacggcaggctcactgccaggccagcctccnnnnnnnnnnnnnnnnnnnnnnngacagcttgagccgggcccctgggcttggcctgctgtgattccactacacctggctgaggttcctctgcctgccccgccaggcagtctgcaacccgtgccccagccgggggtgagtccattctcccaggtaccagctgcgcttgcttttctgtattttatttagacaagagatgggaatgaggtgggaggtggaagaagggagaagaaaggtgagtttgagctgccttccctagctttagaccctgggtgggctctgtgcagtcactggaggttgaagccaagtggggtgctgggaggagggagagggaggtcactggaaaggggagagcctgctggcacccaccgtggaggaggaaggcaagagggggtggaggggtgtggcagtggttttggcaaacgctaaagagcccttgcctccccatttcccatctgcaccccttctctcctccccaaatcaatacactagttgtttctnnnnnnnnnnnnnnnnnnnnnnngaccgcgtatgcggccgcaagcttattcccttgtagtgagggttaattttagcttggcac

SEQ ID NO: 121698 - DNA, 708 bp, Homo Sapiens
atcttccatatcctatgctgcttgcacaggaagcagctcgctaaccccaggcacacctgctttcatctggagcgtctgcccatcatgattcctccccctggtcccttcacctggaaaactcctattcattcctcaaagcccagttcagatggcacctctccatgacttcatcagattccctacagaggtgctgattttctggtctcttgtgtttctgttgtaacacttaacatgctgtattataatgtgcttattttatttacaagtttgttacattgtacgtgctcgaggacaagcagccggtagtattcacctctgtcatcacagaagctggcgtggagccctccacatgagggcactgatgtgtttgctgagtgactgggacaatggtgggccacgtgagccccgaaactttcagtgggctctgaaagttaagaaaagggcattcagtactgaaatcacacaaaacgtaaatttaatgatataattgttccgaagctgctctataatttggcatgaatggagagcagtttacaaaaatgacaacaccactgttatataaacccaattcttaaataggttttcttctcttgctttgtatttcctcaagtgggtgatacttaatacagtggctcatgtaatcttaattactacatatgaggacacggacatgtacatatgatgctgattactgttatttttggaagt

SEQ ID NO: 121699 - DNA, 825 bp, Homo Sapiens
  misc_feature (137)..(137): n is a, c, g, or t
  misc_feature (149)..(232): n is a, c, g, or t
  misc_feature (235)..(236): n is a, c, g, or t
  misc_feature (242)..(245): n is a, c, g, or t
  misc_feature (248)..(254): n is a, c, g, or t
  misc_feature (257)..(257): n is a, c, g, or t
  misc_feature (263)..(264): n is a, c, g, or t
  misc_feature (266)..(266): n is a, c, g, or t
  misc_feature (732)..(779): n is a, c, g, or t
gcgccggggtttttccggggaaaacccacttttggcccccgttctcccttcccctaggggggcccggcggcccccaacaaaaaggttttaaaaaaattttcgcgggggcccgaggggccccccaccattttttcctntttcttttcgcnnnnnnnnnnnnnnnnnnnnnnnnnnnnnnnnnnnnnnnnnnnnnnnnnnnnnnnnnnnnnnnnnnnnnnnnnnnnnnnnnnnnttnntttgtnnnntgnnnnnnntcntttccnntnttaaggaaatccatgcataagtttgacatcaggggtaggaaaaggacaaaccccagagactgagaggtagttcataattcatttttcttttattttggtccttttctctaaaaaggtacaatttgatcaagctattaaaatgctataaaaatattaccagtttggtggtcttctaatgagaaatctaaagcacacctccccacccactcggatatctgtttctgatgatcacgtgacatctagcatatacgtctgtaggaaaagggaaaaagcaaacccatttcacaaatggctaaagtcaatgtcttcaattgtaaattcttcatctcaggttatttttttaagtgtctgacaggcacaaacactttcctcatatctattatatagctgaggtttatccatggaattaaatacctaatgagggctaaattattacagtttttttcacatccattacatttattannnnnnnnnnnnnnnnnnnnnnnnnnnnnnnnnnnnnnnnnnnnnnnncacacatacaaatctactttctaggggtcctcttcgatatgaatcc

SEQ ID NO: 121700 - DNA, 535 bp, Homo Sapiens
  misc_feature (43)..(69): n is a, c, g, or t
  misc_feature (442)..(485): n is a, c, g, or t
ccctcaactaaagggaataagcttgcggccgcggctgtaggcnnnnnnnnnnnnnnnnnnnnnnnnnnngagcagcagctgtttattgaatgaagcgaaaggaaagcttccacatgctggaaggggacccagaagggttgccattgctagcttgggcggctagagctcatatccctgttactccctcccctttctttctttttgtccattaagagtggttcttccttcaatccccccttggagtggttaattttgaatccttcattcgatcagttaagaactcaaaaccctgagtcatgggggtcttttgtaaaagtccccaaactggcccaggaagtcccgccaactccacccctcattaggatgcatcactggcctcgtgcaccggcttcaccagcactgcaccctaatcaaaacaggggccagcaaggtgcctcacccnnnnnnnnnnnnnnnnnnnnnnnnnnnnnnnnnnnnnnnnnnnncccagtgcaaaaccattctgggcaacatagcgagaccatgtctgtaaaaa

SEQ ID NO: 121701 - DNA, 1168 bp, Homo Sapiens
  misc_feature (1089)..(1121): n is a, c, g, or t
ccagaaaacaatgttatgtaaattttaatatataaatggcatccttttataaccacttgatattttacaacatgtgactatttggtaaatacttcaaaatagcttatgctgcggtcttgtaaggcagtttctgaagctcttgagattttacaacagttttcttcatactagtgtgtttctatgtggttaacaacctacgacatttagtctaacagcagcactgtgtatttcaatgtggtaacacactctgctgcctaacggctcttggattcggttataagttacatgatgcctcaaattgtttcaagaaaatgttagcttgcaaaatatatttttttctttcaaaattcaagacacacttaacatgtggattttacaatacagtttattagctgttctcctcttcttcataaatggaatggataatgttgataattctttacaaaccagtactcatttaagaaactaatgaggaggttgtcaaaaacacatatttaataaacaactccaaagagcaatgggaagccaaatattattattaatatgaaggagcagagaaactgatttgtgaaataatttctacctttcactaacatttcttaaaattgctcaccatgaagatttgtgcaattctagtgcagagcagtggatgaaagctgtctgaggggaaaacacacacataaatggggcttttgcctgccttcctattaataaaaggagaactagaaggaaagggcaaggaccaaaatcaaacctgatgacaagaacaacagtaacaacacggacaacaacaaaaaacctcaggaaccatttgaaaacctttgtagaaaagaggagaatatgcccacacttttacttataatctaatttccctaaatgtttcctcctcatgaccaccatgcccccattttcagttcacatgattaaggaagataagtctattcaattaatatttaatttaaaaaccaaacaaaaagttaggagtaggtggcacaagaaacaaaatatattttaaatatatatatatgtttgtgtgtgtgcgcaactatgtaaagaaaataattcccatagttacagtttacagaaagnnnnnnnnnnnnnnnnnnnnnnnnnnnnnnnnnacaaaataggcagctattgtgggtaaaatattcagtaaaatctgact

SEQ ID NO: 121702 - DNA, 1407 bp, Homo Sapiens
  misc_feature (770)..(802): n is a, c, g, or t
attatttaatgtcactattggttagtggccatttttcagaactgaagatggaatggcctgagcagctattaagaatgtggggagacgcagaaattgtggtaaaattccttaatgtttaagggaaagtaactttaagagatttttggaaaagctttatatacattcttttcaaatttcagtacaaatgaaaaagtggttttaatcagtgatttagtagactttgagcaactgtgcacgcttcagtttaatagcatggtttggccagtgtattactctcaagtccttttctcaatcaacttctatcatcaaagcaattgtttcattatagataaataaggacattttttaatttaaaaattcatgtctgagttgactttcataagggatttcattttttcctcaacattcttaaagccttttagtatttgacggttcttttttcccaggacatttgctaggaataacaacgtttcaatgtttttaatctacttgagcaacactatcgtgtcttacaaaagttgttcatatgtaaatgatcatcacatttcgtgaattgaggccatgttcaggtgctaaggaagttcgccttttacacagaagattgagaaaatttcctagatataaatacagataaatcagacgttacagtggtgacgtagtaaccatcatggcaatggaaaggagtccaattcatagcctaaaacttcaaatgtattcttaggagtcagattttactgaatattttacccacaatagctgcctattgtgtnnnnnnnnnnnnnnnnnnnnnnnnnnnnnnnnnctttctgtaaactgtaactatgggaattattttctttacatagttgcgcacacacacaaacatatatatatatttaaaatatattttgtttcttttgccacctactcctaactttttgtttggtttttaaattaaatattaattgaatagacttatcttaatcatgtgaactgaaaatgggggcatggtggtcatgaggaggaaacatttagggaaattagattataagtaaaagtgtgggcatattctcctcttttctacaaaggttttcaaatggttcctgaggttttttgttgttgtccgtgttgttactgttgttcttgtcatcaggtttgattttggtccttgccctttccttctagttctccttttattaataggaaggcaggcaaaagccccatttatgtgtgtgttttcccctcagacagctttcatccactgctctgcactagaattgcacaaatcttcatggtgagcaattttaagaaatgttagtgaaaggtagaaattatttcacaaatcagtttctctgctccttcatattaataataatatttggcttcccattgctctttggagttgtttattaaatatgtgtttttgac

SEQ ID NO: 121703 - DNA, 821 bp, Homo Sapiens
ttgggggacagcatgtgaatacctgatgcagggagggtacccctcctcccgttataacttgtgttaggaaatagcctgtttctggcagttaatcacgttagaacactaatgccaaagtgcattaatatatttattcacatcctcactgtcttaaatgtgtatttacagactccagcaggtaattatgtcagtactcctcagactcccagaaatttcaaatgatccaggcaactcttgtgaagatcaaattttcaaaatcctcaccaaggacatccttcaggtcacctttatgctcccagatggtattcagctagcagcagtctacacttcaggcatccatcttccacctgtagggtaggtgatcactcccgacgagcaccgcacgtggaaacagctgtaaccaggcacgctgcttttaagttattttatacgggggcagggcaagcataaagtcagttatacggtaaggccttttcactgacgaaaataaaaccaggcttatctggagaactccctggcatagtcgatgatgtaaacacaaatcgacgaagctccccgtttccaaacgtgggaacgcaggcctgaggccaggccgctgcccttgttcacggccccggacacttcggacacaggccgccgcagtcgactcaccagactcagggtggccgcgttcccccgcccggcgcccctgcgtgagagaccacgcggccacagccaggcgccatcccagaggacccagagcaaaaaccacagcaagctcgccctcgtgccgaattcgccacccaggcctcgctaccttaggaccgttatagtaccgtcgg

SEQ ID NO: 121704 - DNA, 322 bp, Homo Sapiens
tttttgaactttaaagatcagatttatttggagaaaacaaaaaacccacaacccaaaggatgggattttacatcaagacatctcccaggtaataagtctacagattacaaatcattttcatagaagatatttttgtacaaattttacatgtattcaggagcgggacattaatcaatccctgtttctattttaataggggggacaaggtaggggagagggaaaaacagttttggatataactatttggaaggagagtagacatgaagagggcaaaccctagcttttcattatctacaatcaatagtttgttttgtttttcaaa

SEQ ID NO: 121705 - DNA, 1150 bp, Homo Sapiens
ttttttttgattcttaaagtattctttattaagatcattaaaagttgtagaaacaactttatattataaaggcacagggagacagttcaataaaatattcaaattaacagtaacttacagtacaaaagacaattttaatgcacatacaaaccccaaatgtctgattcaaaaatattttactgcgtctattaatgggcaatgattaaaaatataaattgctgccatataataaatatctgatagtgaacatcttgatagcaaagtgaacaaaatatttattgcttttcacttacatatttttccctgtaattttaaattcctaattcttttactatcttctcaacttttcccaaagataaaataaatttcacataatttcatggaggggaaatggtagttgtaaaaaactacctcaagtagcaatcaccgctggcagtgttttctcactttctgttctgcaattgcaatcacacttccaaaaagaaaagcaaatgtttgctaaaccatagacagacaacctctttgtgactggtattataaggtttataatgaaaacttatcaaatataaaaggtgctccctcttgaaaatgtgtattttatttgaagttttgagtaagaggtgagtgtttggcaattttcaacactcccctcaaaaatctcccaaagttgcaaaaaagtcagtttagtaaaattccaagcacttaaatgcttcattgagggccagttgatatacgcaatgcactaatgtgtaaaaattaaccgaatgcaactattttataatggagagctcttaccttttccttccagtttttaaactggcataaactttattgacttcatcctcctatttttatagcaacctagttttagatggtacaagttgaatttctatcacaagacaataaaataacatgaaagcattatcctagttaatgctatttcaactgaagaaatatctacattgaagtatttgataataattgtaaagttacttaaccgtatgtcatgttcagacagtatgtagcagctagtaacgtgcctggcacagagttgatgcttaataaatagttgctgaataaatgaaaaagaaaaacctgcctttggttgtgcatactttaatcactttctgatttagaaaaagatcagtcc

SEQ ID NO: 121706 - DNA, 603 bp, Homo Sapiens
tttttactactgtgtgattttaatatccaatgttttttcttctattacaaaagtatctttacatacttatcttaccctaagccattgaaattgttccattttaagttgtactgacaaaggatccaaatttacagtttctgctcagctgtgtagcaaagtattaaggaaagggttacatgttcacactttgaggccaagtggtagtgactccaaggacaaaatgaacggtcaaaaaacagggctgtataatccatcccttctttccaacagtagaatttcctccaattatcaattctggagattctggggttattcaattaagaagagtagcacatacttcagtcacatgaggacactctcaaaatacaagttgaaaatacaaaactcctcataacaatgtcaagtgccaacaatgatttttaaaatttaagtagggctgaactgtgtgtaactggtgaaatgttcaagttaacaatccttacacacgaaatctctcacttcactgacttaattcattatttgctgaataaacaataaacttccagtcagtagtcaagagttggcaatctagctggtaggacataacatataatcatgaaacag

SEQ ID NO: 121707 - DNA, 1322 bp, Homo Sapiens
tttggatatgaaacaaaacaattttaatttcagaatattacaagaatataaaagaaagacaatgcataggatcgtttctttacaattacatatacatagtcaaataagaatgaaaactttaaccaaaacacttaagaaaccttgtttctcttgttgagcaagctcagggataggacaaaggcaacccttgctctgcagaaagaaccctggggtgagggaatatttcccccaacaggttctatctgtccccagacatggccaggggagggctccatggctctttagcacaggctgtggcctcacacactccagtctccatggtaacccaagcactcaggctattatgtcccacacctcctcgctggcctgcttctgtcaactctacgctggtagaagatctcggcattagctgtctggggaagctaacttcctacagtgggttttagttgagttaatcaccactggtgtaaaacgcttgtgcatcttaggaacccaaatcttccccaaattctagacaatcccacaaaatgctagtatctaggtttagatctaggtcctgtcttccgtttgaagccttcagggtaaaggagggcagagataaggctctctcctggggaaaggagttctacacaaaaatgacctcagaatgggggccattagcctcaagcatctgtgtgaggccttgtaggaaaggagacagagtctagagacatctattcctaaaaatcacctggttgcatggccagtcactgtggggcacgttcccagtgaccacaggttctcctagacggcagtattttcaactgcatgctaacacagactgctgtgagggaaactgaacagaaacgttcctactcaggaggagagaatggctctgttctgacactctaggatcgactgcttccttacaggtcaacagaacagatacctccggagcaccccaggtgtcaactgcagtcaacagccctccactagcccaatttcccaagggtgttcccttgtccttcctgaatgactctggaaggacattctgggtaaagagctttcctttgcggaggatcaactgtagttttggttacgattcattacctgctcctttttttacggttcgttacctgctcctgttttggccctcaggtacagtcagtatctcctgatgctctttcactactacagcagggtttttcacaccagattcattggtcccaatgcaaaagtctatcattgtaaaaggtgagaaattccaacgcctatggttctcactaatttagtcagtggggttcacacagtacagtctggaccaggaaggtggcctgcagttt

SEQ ID NO: 121708 - DNA, 967 bp, Homo Sapiens
  misc_feature (600)..(619): n is a, c, g, or t
  misc_feature (889)..(923): n is a, c, g, or t
aaaatctgcttacaaagtttatttttaaagtaatttaaaacacagtgtaaccatacattaaaaatattggggcaatttagattaggaataaacatgaggttatttacatgttggcatatgtatgtgtgtatatatacacaaagtgcagataaatacagaacactacaaaataaacaaaaaattcaatgataatttatggacaatcacttttatatttattacttaatttgtcatgttaatgactgcaaagaagctcctagtactgaaatataatatcttaacatccgacttttatataaactatagtacctcaaattttaacagtatataaatagggttctgaattaaaaacccaggtgtcttccctgccaaattccctatttgttaaggtttcagctcagaaatcaagaaggactctgaaaatcccaacctttgatatgtggtggtatattggattttaagcatcaatcatgtgcagacagtgttcttagaccagttcctgtggggatcgttctctgcaaaaaggaggcagttgagggtacacgggcagatataaagcctcaaaaatgctgccatatagagattaaaagtgtgcatttnnnnnnnnnnnnnnnnnnnnctgccatatagagattaaaggtgtgcatttttatataaaatgcatctttatataaaatgcacatttttaatttataagactgagtaaattcaaggcaaattgagttgttgtcaactctggatgcaaaaacaccatgggaaacactcatgaaagatggcagatggtccaaaggggagaaaggggttatcctactgaggaggttttgacaccttcagcccccccggccgtaatggccgaattcccgggcatatgtccggtaccgtcgactgnnnnnnnnnnnnnnnnnnnnnnnnnnnnnnnnnnncggccgcttcctcgctcactgacttcgctgcgctcgtcgttcgg

SEQ ID NO: 121709 - DNA, 763 bp, Homo Sapiens
actttgttctttcttttttatttagtcacaacacatcagtacaacagaggtcaaacccagttcagtggaggtcgtttaactacacctgctaaaagaataaacctgaaaaatgatattttatagcccaaatcaaattaaataaatcaaagagaaggaggcaggaaagcccttttaaataccttggcaaccacagttccatgcaccaaaaggaaaactcacataaaaatttccagttaaaagaaaatatggcagtcccaggaaaattaggttatgcatttaacagtttccactgtactactcaattgaccactcgcacaccatgatcacttatccatgttaacatttgtgaatttgagatccgtgtgattaaaaattctttgtgttgctggggctggtaaatgcaggcgtattctattcaattaccttcagtttcctttccaccaacactccaaatgagacctaacctatcagcggctctctcctaactaaatcagaactgccagtcctggcagataccagcagctggtcagatggattcagggccaccaacagtttgtacattcacctttctgctataggaggcagacaatttactagtcttctttcttggataaagctgatcatctgatttgtcaacgctttgctcagaaatataaaattcaatatagttcccctccccccaaaagaatattatttatacaacaccttaatctgtcaaaatattaacaaacagaatcatgttaacattaagcatagtggtttg

SEQ ID NO: 121710 - DNA, 396 bp, Homo Sapiens
aggtttctccaatacaatttattattattacattttagcttgcatttactaagtgtcgtggaaatattatactcaaaataacagagctccagagaaagacagttaactaagaaagaacagtttcactttcttagcttgtcaactcctagttagcctgcttgcctccgcaccacagatgcttgtcttcttgtggttgttaccacaagccaaagcttgaatttacatgggcatcaggccaagtctgtaaatccgtgaagacaggccatcaactgcattgagggtacagccttgctgaagggtcctttcttgacagtcaatgatgatgaatctggaaaaactgtctattctcttaggagaagaaaatataccccacctaaagtcgcagctaccattaac

SEQ ID NO: 121711 - DNA, 732 bp, Homo Sapiens
  misc_feature (230)..(230): n is a, c, g, or t
caaaaatacatgtttttatattttaccatatgttcacatttacaagaagtctttataactctatatggctgtaagttactatttcctttcattcaacctgaattcctcccttcagcatttctttgagagaaaaaataggaaaattagtgattggaggtccctataaaattttcttacatctcaagtgttcctgaaatcaggtgtttggctttatgaaattctgagtaacnttttttttaacaataagagttttataaaaatggatggtgaagaactggaaaaagtccatagcagatgtactatttacaaatgactgacctaatgattatttcacatcttgaaaaaagagttacacttgctaaagagatttgaaatatgaaagtttgcttaagcgttacacacttcactactaacttttaacaaaatgtcaatcttttcttgacacttacatcagtcaagtttatgagatgtgaaattatcattccatagactcagaaagttaaggtagaacaggatggccatggtttacatgagatttctttgagacatgctaagtgtgaatgtccattagactttaacatggagatgcagagttcacattgtgatcttctattgcagaatttggaggaaaaatctgagctagaaatatttttagggggatttttcagcctagaagtgatatttaatatttaatgcagagaatatctaagatcagcggaatgatagaagacg

SEQ ID NO: 121712 - DNA, 1129 bp, Homo Sapiens
  misc_feature (30)..(30): n is a, c, g, or t
  misc_feature (81)..(100): n is a, c, g, or t
  misc_feature (330)..(340): n is a, c, g, or t
  misc_feature (843)..(843): n is a, c, g, or t
  misc_feature (1029)..(1029): n is a, c, g, or t
  misc_feature (1098)..(1098): n is a, c, g, or t
  misc_feature (1112)..(1112): n is a, c, g, or t
ggttggtaacgaacgggccagtgtccatgnccgaaattaaccctcactaaagggaaaaagcttgcggccgcctgctcaggnnnnnnnnnnnnnnnnnnnncaaaaatacatgtttttatattttaccatatgttcacatttacaagaagtctttataactctatatggctgtaagttactatttcctttcattcaacctgaattcctcccttcagcatttctttgagagaaaaaataggaaaattagtgattggaggtccctataaaattttcttacatctcaagtgttcctgaaatcaggtgtttggctttatgaaattctgagtaacnnnnnnnnnnnaacaataagagttttataaaaatggatggtgaagaactggaaaaagcccacagcagccgtactatttacaaatgactgacctaatgattatttcacatcttgaaaaaagagttacacgtgctatagagatttgaaatatgaaagtctgcttaagcgttacacacttggctacgaagttttaacaaaatgtcaatcttttcttgacacttacatcagtcaagtttatgagatgtgaaattatcattccatagactcagaaagttaaggtagaacaggatggccatggtttacatgagatttctttgagacatgctaagtgtgaatgtccattaaactttaacatggagatgcagagttcacattatgatcttccattgaagatttggaggaaaacgctgagctagaaatatttttggtggatttctcagcctagaggtgatatttaatgcagagaatatctaagatcatcaacggaatgagagtagaccagaaataatcaaaanattggtctagggcctccaagtttatggctcttccattttatagaatagtacttacagaaattgtgagctgaaactgctggatgctatcactcgagacatgctgagaagatctcgatggggtacatgctacacatacgactatgggagtaatgtgtagaaatgtgccaaggtaaacatgtcttctanatgcttgatcatagacagaatatccagttcaaaatgtttctaacgaacagtctcagatactgatgatantcctgaatagtaanaatatgcttgtaagttg

SEQ ID NO: 121713 - DNA, 690 bp, Homo Sapiens
acatcaacaacagtggtatatgttttaatagttttcagaatataagctgcatagctttttagaataaaaaatgatataacttcaggtacatgctttgggacacttggttaaacaaggaatctgtgtctttgatgaccacctcaaaagggtcgcagacttcacagtgtaacttggaaacagacaaggagatagatgattacatcatgacatactgcctacaaaagaacattctgacagaacattaagtagaacagagcacacagtttcaagtattcagcactgctttctggccaagtaaaaactgcctaaagatcagtttctttcgactggaaaaaatagatggagctgctgagttctggacacagcgtttctttcccagaatgagactggctcagtccagcttgaaagcagtgtgaggaatcactcttccccttgactgggtaagcaatgtgaccttctgaccacagttaagtctcactttggactcttctttctgttctatgggtggtcagaggctgtcaccaactcaaaccactgtctgagggcatcgctgagtgtctcaggaagtgcgtttacatctcgaagaatgatatagtatgggaattggaactcttccatgtaggattcggattcaggcatctctccaggtcctttaaatatcggtactttaatgtccatgatagaatcctt

SEQ ID NO: 121714 - DNA, 1265 bp, Homo Sapiens
  misc_feature (17)..(17): n is a, c, g, or t
  misc_feature (27)..(27): n is a, c, g, or t
  misc_feature (43)..(43): n is a, c, g, or t
  misc_feature (55)..(55): n is a, c, g, or t
  misc_feature (67)..(67): n is a, c, g, or t
  misc_feature (87)..(87): n is a, c, g, or t
  misc_feature (99)..(99): n is a, c, g, or t
  misc_feature (108)..(108): n is a, c, g, or t
aaaaagcttttgggcanacactatggncttggcaaaggaagancttagaacaggntcaaaaggcagntcccttttaatcctttatanaaaggactgtanaaagtcccnatgctccctggcagcatctccctcaaagaacaggtgccccaagatcccctgcaaaaataaaacaggcaagctgggctccaacggtggggtatgacctcctccccaggccagggcttccaaggcagggaagaaggataactcttctctagttacgagttcaggcacctgctgctgcttccaggtttggtataaaaacctcagcccaggcaaagccgggagccagagagcattctgtaggctgtaagatcacgttgtaaaataaaaatattacaataaaattttttgtagttgtccaaaagggagcacctgggtaagcaatgtgaccttctgaccacagttaagtctcactttggactcttctttctgttctatgggtggtcagaggctgtcaccaactcaaaccactgtctgagggcatcgctgagtgtctcaggaagtgcgtttacatctcgaagaatgatatagtatgggaatggtaactcttccatgtaggatcggatttcaggcatctctccaggtcctttaaatatcggtactttaatgtccaagatagaatcccgtgaactgggattgtccaatacaacaaagatgacaaagatatttgcattccgggcagcctgaactgctgccgggactctttctttgccctcaaggaaaaggcctcgcccatcagagactaccaggaggagttgtgcagtttctgaactgatgttctgcgagagctgctgatcagctgcaaacatgtttgcaacagactctagaaactgagcaatcttggttttcttttgttggaatttgcagagacgtagaatctgggacccagagtaatcactgaactgctcatgaaatgggtgtaacagctttacagattctccaaaactacacactgcaatctgacccacttccaggagggttagagcatttccaatcacagccaaagattcaaatgcaagctgcttggtatgattgtctaccatactagaagagtcatcgatagccaaacaatctgatactggcgtttactgggcttggtccttcgaagccaaatcttgtctttccgaaattgactagcaatgtatggaatgactttccgtatgttagtcgtttcccagttcgatagtctcctttcagccctcgtgccgatttgagcccgacct

SEQ ID NO: 121715 - DNA, 875 bp, Homo Sapiens
  misc_feature (98)..(98): n is a, c, g, or t
  misc_feature (101)..(101): n is a, c, g, or t
  misc_feature (104)..(104): n is a, c, g, or t
  misc_feature (111)..(111): n is a, c, g, or t
  misc_feature (119)..(119): n is a, c, g, or t
  misc_feature (122)..(122): n is a, c, g, or t
  misc_feature (125)..(125): n is a, c, g, or t
  misc_feature (130)..(130): n is a, c, g, or t
atttacccctatttgggggcccccggcgccccccaaacgggaattggtttttagaaaaagccttctcgaaagggccgaaggccggcccgcacaaggtnttnttnttttgtngttttttnttnttntttcnggggaaggcaggagtttatttttatccttttgtaagtattaactcggtaatcacaacaaacacggagcaatctcaatgctgtttatccggaggacagtctgcggggtcgtgacgattcttttcttcttgaagtttttccttttcctgaatctcataatgattcttggccatgattctgtcttttcaatgactgtggcttctactcgaacaagatcctttccgaggagtggcttgccaagcagcgtgaagttgtctgccccaaccagcaggaccttctccagtcgaattctctctccacacgcaaggtctagttcatttccaattaagatcaggtcttcagaggtcaccttccactggcggctggcaaagtgcaccacggcaaagagcctgccatactgccccgtgacgatcatctcattcaccttcttcacgacctctgcatggtgtctggtctcctcaactgggtctggcagaacaacttctggccaaggtggtgaactcagggatgttttaggaacatatcctggtagatatgaagtgctctgtgaattgaaccttcgagaagcagaccaaagggaggctgctccgggccccgaaggtctcaggatgctgtggctgcacgcggacgccagccgccctaaggtgaccgtcagggaagatgctgccatggccgccgccatcttcccgcagcctcccccggccgtaatggccgaattcccgggcatatgtccggtaccgtcgactg

SEQ ID NO: 121716 - DNA, 756 bp, Homo Sapiens
tggtattcagagacgttttattccttggtgagaaaagagatcacacgcttttgctttatcacagaaggaagggtcaagagaacgtctacccaaaggtaggcaggggaggtagcagagggcgtagggagttgctgcaggccaggctggatgaagatctggggggccgcttcacacagctgcccacatgccactctggagacttccagaaggacgggagcccgaccatgccttgtgcacccacagagccaggccccgagaaacaaggaccctgtgaggctatggctgagggcgggggccggttcctggggtctcccctccagaggggcgagagccacccctgctgggaggcctgggagaggcacaggctgtccagggcctctgacacgcggcccacctgtgcttctgggaaggccaccttaccccctctggctgaggagaaatcaaatacagttgagaacgttaatcctgagacgggaggaccctgcccgtgcaggcagctgctctccccagagtccgatacactcccctctccctgccaagattggggccaagatggcgtcccggcaggctggccggctgtgggttgaccagcagttcctgctgtcacacacgtcacagcccttcttccagcttctgattaagtctctgggacacacagccagcgtcagggtagagcttaggaggaaagggtcaagtaagtgtcaaagctgccgtgcgtgggggatcacctgagcccaagagtttgagaccagcctg

SEQ ID NO: 121717 - DNA, 500 bp, Homo Sapiens
  misc_feature (227)..(258): n is a, c, g, or t
aagtgcttcaaaaatacagtatttattgtaataactacagtagcaagaagaaaaaaacgaagtggaactacgtgtttagcagcagagctgaataattatgaatataaacaattactattgggagaaaatacattacactcattgcttggaaccatgaataatacttatatatgtacgaaatatagaaaaataaaataggttaacataataaggatataggcaattannnnnnnnnnnnnnnnnnnnnnnnnnnnnnnnccttacaaactggggtagttaggagacctgataatagcttttttattttcttggcaccaaagcaacttacttatgtgttccttcttgcattatctgttccagatcatagtcaagttttccaattcgttttactaagctagcaaaattttttataccaaaaagagtaaaatcaaaacaaatgctcctttgtttatagatgaaaatctggagcaaaataacacaacattaaaaaaacaaaacag

SEQ ID NO: 121718 - DNA, 2319 bp, Homo Sapiens
  misc_feature (337)..(337): n is a, c, g, or t
  misc_feature (449)..(459): n is a, c, g, or t
agagagtgggggaggagtggttttctgtgtaagaggcgcgggagagaaaaagcggctgtgtaaagagaaaaggtggggaaaagggggggtgaaataatgcgttcacaagaacacccgcgcggtgggagagaaaaatagagagggcgccccaaaaaagtgacacgcctcgtgggagggggtgagtgtttataaaaaagtccccccaaaccagaatgtgagaggtcccgcggggtgccccggtggtgagaagagtatttgttccgagagagtcacatgtcccccgaggagagccgagaaattttttcaaagaccgggccgagaacaataatggcgggantgaagttttgagcccacctttatacccctctaaaaagattttattatattttccccttgaaaggccttctaaaatcttctggtaggggagggtgtgttccacaggtaaagtnnnnnnnnnnnagaaaggaaaggtttccttccacaaaaaggtgcccaaggttaaccaggtttttcccactgccccgacggttttaaaaaacgggcggcccagggcgctaggtgtataatgcggactccacattagggggcccctttttacacaaaaaagtggggtatggcgtaaaccttggggcccctcgaagggataactttaagaacgggcgccccccgtgtggtaattatgaggttgtgagatgtattaggataatgagtagaataggataggggtgagagggtaaagggtggggtgttttttttggagggtgggcagcactcgctttattgtccagcattccacatggatagacgcaggacagcaggccagggtggtgggctaagaggcagcctgccgggcctgatgctgctgggcaaaccgctgcatccgctcctcgagctccggccgaaagtggcggatcagaccctgcacaggccaggcggccccgtcacccagagcacaaatcgtatggccttctatctgcttgctgatctcccacagggagtcgatctcggccggccgggcatcccccctcacgaaacgtgccatcaccttgttcatccagtccacaccctcacggcatggggtacactggccacagctctcgtgcttatagaactcaatgaggcgggcgatggctttcacgatgtccgtcgagcggtccatgacgatcaccgcagctgtgcccaggcctgtctgtgcctgcaccagcgcatcgaagtccatcagcaccgtctcacacacagacttggggatcagtggggtagacgagccgccagggatcacagcaaggaggttgtcccagccgcccgtgacacccccagcatgcttctcaatcagttctttcaagggcacagacatctcctcctccacagtgcaagggtggttgacatggccagagatgttgaatagtttggtgcctgagttgcgttctctgccaaagccagcaaaccaggtacctccacggcggcagattgtgggggacactgccactgtctccacgttggccacagttgtggggcagccaaacactcccacgtctgcggggaaggggggcttcaggcggggcttgccctgcttgccctcaatggactcgatgagcgctgtctcctctccacagatgtaggccccagccccgcgcaccacaaacacgtcaaaatcatagccagagccacaagcattcttgccaatcagacctgcctcataggcctctcggatggccacctgcagattggaggcctcattgtagaattcccctcggatgtagatataggcagcgcgggcgcccatggcccggccccccaccaggcagccttccagcagcttgtgaggatcatggcgtaagatctcccggtccttgcaggtgcccggctccccctcgtctgcgttcaccaccagatacttgggcctgccatctgagggcttattcatgaagctccacttgaggccagtggggaagccagcgcctccacggcccctcaaacccgatgtcttgatctcgcccaggatccagtcgggccccttcagcaggatctcctttgtcttgtaccagtcacctcgactcagggaacctttcagcctccagtcatggcggccgtacaggttggtgaaaatccggtcttcatccttcagcgagccaaatgaggttttcttgggtgctgtcgtgtcgccgctgaaacgcacagatacccgcgcgggaagcgaccagccgagcagccgccgtgttgccagcatcgcggcgggccagatgggtcacctcacgctgtcaccttcatagcactgagctgcctcgtgccgaattcaacacccagtcctccgtactggag

SEQ ID NO: 121719 - DNA, 1100 bp, Homo Sapiens
gagagcacacaaccacaggagccaccaccgagacgctaaacgtcaacgccaaccagcgctgtcccgcagacaccgtaacagtggaaggtaagcccggatcacagggtgcccccgaacccgcactgccaacattgaaggccaaaacccccacagcaggtgtacagcccagaaatggatatggcctgatgcgtccctcccagccacaaccagtacctcccggcgcagattggggacactgccactgtctccacgtgcccacagttgtgggccacccaaccactcccacgtctgcgggaagggggcttcagcggggcttgccctgcttgccctcaatggactcgatgagcgctgtctcctctccacagatgtaggccccagccccgcgcaccacaacacgtcaaaatcatagccagagccacaagcattcttgccaatcagacctgcctcataggcctctcggatggccacctgcagattggaggcctcattgtagaattcccctcggatgtagatataggcagcgcgggcgcccatggcccggccccccaccaggcagccttccagcagcttgtgaggatcatggcgtaagatctcccggtccttgcaggtgcccggctccccctcgtctgcgttcaccaccagatacttgggcctgccatctgagggcttattcatgaagctccacttgaggccagtggggaagccagcgcctccacggcccctcaaacccgatgtcttgatctcgcccaggatccagtcgggccccttcagcaggatctcctttgtcttgtaccagtcacctcgactcagggaacctttcagcctccagtcatggcggccgtacaggttggtgaaaatccggtcttcatccttcagcgagccaaatgaggttttcttgggtgctgtcgtgtcgccgctgaaacgcacagatacccgcgcgggaagcgaccagccgagcagccgccgtgttgccagcatcgcggcgggccagatgggtcacctcacgctgtcaccttcatagcactgaggctgaggaactggcgcgatagagacgctaggtggcgcgcaggaaagacgtcacgcgcccgacgccagcgccg

SEQ ID NO: 121720 - DNA, 974 bp, Homo Sapiens
cgactctcccccccttgttaggttcccggcgcctccccacactcccggtggagcgccaggtccgcgcgccccgttcacttttagccatcctcccacagggtccgacaattgaatgtggccggtctttcccagcacaccgtccccggcgcaattgggacccccccgtcccacgtgccacatttgggcaccaacactccacgtctgcgggaaggggcttcagcgggcttgcctgcttgcctcatggactcgatgagcgctggtctcctctccccagatgtaggccccagccccgcgcaccacaacacgtcaaatcatagccagagccacaagcattcttgccaatcagacctgcctcataggcctctcggatggccacctgcagattggaggcctcattgtagaattcccctcggatgtagatataggcagcgcgggcgcccatggcccggccccccaccaggcagccttccagcagcttgtgaggatcatggcgtaagatctcccggtccttgcaggtgcccggctccccctcgtctgcgttcaccaccagatacttgggcctgccatctgagggcttattcatgaagctccacttgaggccagtggggaagccagcgcctccacggcccctcaaacccgatgtcttgatctcgcccaggatccagtcgggccccttcagcaggatctcctttgtcttgtaccagtcacctcgactcagggaacctttcagcctccagtcatggacggccgtacaggttggtgaaaatccggtcttcatccttcagcgagccaaatgaggttttcttgggtgctgtcgtgtcgccgctgaaacgcacagatacccgcgcgggaagcgaccagccgagcagccgccgtgttgccagcatcgcggcgggccagatgggtcacctcacgctgtcaccttcatagcactgagcctcggccgaatttacaccagcctcgtactagcctat

SEQ ID NO: 121721 - DNA, 1068 bp, Homo Sapiens
cgcgctgcctatatctacatccgaggggaattctacaatgaggcctccaatctgcaggtggccatccgagaggcctatgaggcaggtctgattggcaagaatgcttgtggttctggctatgattttgacgtgtttgtggtgcgcggggctggggcctacatctgtggagaggagacagcgctcatcgagtccattgagggcaagcagggcaagccccgcctgaagccccccttccccgcagacgtgggtaaggcctggcgtaaccctgggtcagactgtgtcctgtgacacccgggatctggctaggctccctttggattgttcttagggatttctgagtggcttcccggctggggccagatagagagtaggctggcaacaacacacaggctcccccagggccgcctgctgtccctcctcctgcctcggtccccgccgcaccagtgctgctctgtggctccaccttcacagtgcctgttctgaggctaagggcatggggtgaacaaggcaatgggcatctctggagtttggggtccagcagggataagaatgataaggggatattagagcaggggctctgccatgggtgcaggaccctgggacacacctccctgccaggaaacttgccccaccccctagcagccaccagttctcttcccatttccctgaaggagtgtttggctgccccacaactgtggccaacgtggagacagtggcagtgtccccccacaatctgccgccgtggaggtacctgggttgctggctttggcagagaacgcaacctcaggcaccaaactattcaaccatctctgggccctgtcaaccacccttgcactggggaggaggaaatgtctgtggcctttgaaaaaactgattggaaaaacatggttgggggggtcacgggcgggctgggaaaaccctccttgccggggaatccctggggggctcggttctcccccactgatacccccagtctggggtggggaaacgggggctgatggaaacttccaatgcactgggggccagggcacaaaacagggcctggggcccaccccttggcggggaatc

SEQ ID NO: 121722 - DNA, 360 bp, Homo Sapiens
ggacattttacagactacgggtagtgtggagactgatagtagctacttcgtttttattttcctggcagcaaagcagtttacttatgtgttccttcttgcttatctgttccagatcatagtcaagttttccaattcgttttactagagctagcaaacattttttatacccaggagcattaggatgcttcacccgtgggagtgcctttcaagggcttcatgactcctgaagttataggctgactcctgggctgggggtggtctgggaaactcacacctttgtcctgcaggtggccatccgagaggcctatgaggcaggtctgattggcaagaatgcttgtggctctggctatgatttcgacg

SEQ ID NO: 121723 - DNA, 736 bp, Homo Sapiens
  misc_feature (537)..(611): n is a, c, g, or t
  misc_feature (713)..(713): n is a, c, g, or t
cacctgcagcttccactctttatttccaaagaatcagtgtcacacatgcagatcacaaagcgggtctccctgtgctgcttccttctgtgttttctagtctctcccccaggggctgcccagggccctcaggaactgagtgtgggcaagacactgctgggccagagggcacgacgcccacgtgggcccgtattgcccaggccatttggcagtgcagagcccccccagcctccagcaggagccccctggcatgagctctcccctcaggggtcctgagcaacgtccctgccagggctggtgggtggcagcgggggggcagacacctcgctgaggtcctgcagcagagcttgcagccgctgcaggctggggtgcacgttttcctccagccactcctccacggcatccgggtagaaagccagctgcagggcagcctccagctcctgcacgagggtgctccactgtgccaggaggctgcaggtgagggcgccatgaacgcacagtctgcacacttgggacttgccctcagccccatggtcagtnnnnnnnnnnnnnnnnnnnnnnnnnnnnnnnnnnnnnnnnnnnnnnnnnnnnnnnnnnnnnnnnnnnnnnnnnnncggtgacagctgcacatctgagaccagagggccttttacaactaggggctcaccctctgctctctagttgagggacatgtcagcaacagcagcagttctcangggaaccatggctgcacggccta

SEQ ID NO: 121724 - DNA, 1362 bp, Homo Sapiens
  misc_feature (49)..(106): n is a, c, g, or t
  misc_feature (1082)..(1094): n is a, c, g, or t
ccggtggttgccccggtgttgtgccccgcctgttggtgcggggcgcggnnnnnnnnnnnnnnnnnnnnnnnnnnnnnnnnnnnnnnnnnnnnnnnnnnnnnnnnnnttcaaactagttattttattaaacgatattaacacacatttcaaaaggatttcattgttgttgcttctaaagcatgtacttgttttgttttccacaccgaacacgtgagaatatcaatccaacatatctattttagatcttaacaggcgcccccgcccacttaaaaaaaatagtgggggaactggggaaagcagtaatttacagcggcttcaaaacagtaacagctgaagctcaattctgcaggaaccggtaacttcaggattgagagtgaatatcctgccattaggaagtttatcgtattcacattatctcgataggtttgctggacccatatatatcacaaacattttattcctggtattggaaagtataaaagtcctattctctgcttattttcccctccctggaatcaaaccaaattctatttactctcaacttttgagagggtagaggggagcagggagagagctctcatctaagctgactgaagagtaaactctttcaaaatacttaaggaccctatttctgaactgtatcactgaactttaagtggtactagtgtattcacaacccctaccaattctctgtctgtgattttacagtgagtaccaaggaccttacaacttctcacattctgcttccatatgaatcatgtccttgctaagacacactatgttatgctttctttaaaaaatatcttgtttatttgtttaaactcaggttgaaatacaaaagtcagagcatggtcacggagttttaaatcacagacacagaaagaataaaacccctttctttcacgttatgaataccagaactgtcttttctgtttcactatttatcacatatatacacactgtcatcttcatttactgatgtaaatgtaaattttaagatttccttaaaattaatagctgacagtctcatacaaatcctcacttccatcctaaaacaaacatattggggattttgtggcttnnnnnnnnnnnnngtaccccacaaaaacccaactccttaaaagcccatcttcgaaactgtccaacaaagtcttcctttcatgtattaaccatcatacttttgaggacaattatcccgccccaacgttcaggaagccactttcctgacatccccacattttctgataaaaattaaatggtcagagagccttatcaagtaaacactacttttagcttaaacaagagcagcaaagagaattcacattcttttattctagaatgaaaaacatcccatttaatttt

SEQ ID NO: 121725 - DNA, 1572 bp, Homo Sapiens
  misc_feature (167)..(242): n is a, c, g, or t
  misc_feature (1359)..(1359): n is a, c, g, or t
gatattacagaattatgaatactttccttaacggtaattatggtacaatggctatatgatattgtctatattgtcttcatgtttggttgatacacacgttgattaaataaagggtaaagtgtcatgatgtctaaaacttattctcaatggtacaacaaatatacaannnnnnnnnnnnnnnnnnnnnnnnnnnnnnnnnnnnnnnnnnnnnnnnnnnnnnnnnnnnnnnnnnnnnnnnnnnnaacccacaacaagtatcaactaggtttaccatcttttatgggcagaatttgtggtatcccaaagcaattacaatagcaacatcaaaaatcactggtcattgatcaccatgatagatatataacaatgaaatagtttgaaatattctgagaattaccaaaatgtgacataaagacatgaaatgcacacctgacgttgggaaaatggacctgatggtcttgctcaccacagggttgccacaaaccttcagtttgtataaaacacaataactgcaatgcacaattcagcgaggtatgcctgtatctggtaaattatttcatagggagtatattgtgaacatgacaactaccctatattcctcattcaaagactttctcacaagaattatcttctccgaactctaaggtatttagtgtggctataaaacgccccacattccttacactcaaagatttctcagaagtatgaatactcagaagttgagcaaatcccaggccatgatgaaagttcttcacacattcttttatgttcacaagatttctcatcaatatgagctctctggtgttgagtaaatttttcgtacacagtgaaggcttgtccacactccttattgtcacaaaatttctaactattctgaattttctgatgttgagacagctgatcatccacagcaaatgctttcccatattccttacattatagcgtttctcaccagtatgaattttaacatgttgaacaatgtttgagctacaactaaaggtcttcccacattctgtacattcacagggtttcataccagtatgaattctttgatgtgcagtcaggaccaaactaaatctgaaagttttcccacactccttacattcatagagtttctcaccagtatgaatactctgatgttgaacaaggtttgagccactattgaaggccttcccacatttctcaaattcaaatggcttctcgccagtatgaatgacctgaagtccagcaagctgtgtcagaaaactgaaggcctttccacattctttacattcaaagggttttttaccagtgtgaatttggtaatgttaaataagtggtaatgatatctaaaggtcgtcctccactccttgcatacanagagtttctcactggaatgaattttctgatgctgaataacgtttgaaccacaaatgaagcctttcccacaccccttacattcacatggttttacaccagcacgaatactctgatgttgaacatggtttgagacacgattaaaggactttccacattccttacattcaagatgccttctcacctgtgtgaatgttcttatggcgattaagctgg

SEQ ID NO: 121726 - DNA, 1077 bp, Homo Sapiens
  misc_feature (138)..(533): n is a, c, g, or t
  misc_feature (563)..(580): n is a, c, g, or t
ggttccagggaacgcctgttcttatttccttcggttcccaccttgaatgacgtcgatttgtatgctgtcagggggcgaccctttgaaaaccccagcacgcggcctttttaggatactggcctttggtggcctatgccnnnnnnnnnnnnnnnnnnnnnnnnnnnnnnnnnnnnnnnnnnnnnnnnnnnnnnnnnnnnnnnnnnnnnnnnnnnnnnnnnnnnnnnnnnnnnnnnnnnnnnnnnnnnnnnnnnnnnnnnnnnnnnnnnnnnnnnnnnnnnnnnnnnnnnnnnnnnnnnnnnnnnnnnnnnnnnnnnnnnnnnnnnnnnnnnnnnnnnnnnnnnnnnnnnnnnnnnnnnnnnnnnnnnnnnnnnnnnnnnnnnnnnnnnnnnnnnnnnnnnnnnnnnnnnnnnnnnnnnnnnnnnnnnnnnnnnnnnnnnnnnnnnnnnnnnnnnnnnnnnnnnnnnnnnnnnnnnnnnnnnnnnnnnnnnnnnnnnnnnnnnnnnnnnnnnnnnnnnnnnnnnnnnnnnnnnnnnaagaattcggcacgagggcggctgtaggcnnnnnnnnnnnnnnnnnncatgcaaggttgtttttattaagctttatattcagtttacagctaaatattacagggattatttcttttgacaagcagacatgacatcctaggaaacttttcaaaacagtccaaggactttataactactgggaacagagcaatttactctgcagttaacgtgtatgttaagtacttcaagagtcactaagggaaagaagctaaatgcaactgttccttttctataaaattattatcctgcaaaagtagctacaaaggaaaatcacataactatgacaaagctagagagatcatacatccgaatttgtctttttttatttaggataggacttgggggtcacatttcagaaggcaaataattctttcagaagaagctacatgtcaagttttctatgggtagtattaatactaatatgatttagcttatgtttaaaaaaatcaggaaaagaaaaatttgggctttaaaatctactatattagtgcctgtaaggagatgc

SEQ ID NO: 121727 - DNA, 2759 bp, Homo Sapiens
  misc_feature (133)..(134): n is a, c, g, or t
  misc_feature (143)..(143): n is a, c, g, or t
  misc_feature (146)..(546): n is a, c, g, or t
  misc_feature (588)..(588): n is a, c, g, or t
  misc_feature (602)..(626): n is a, c, g, or t
ccgcagtcaacggagaccaggaggactccagggaaccttgatctatgtcctgtgggtcccacctttgattagctcgatttttgtgctctccgggggcgacttatgaaaaaccccacacgcgccttttacgtcnntgcttttgntgnnnnnnnnnnnnnnnnnnnnnnnnnnnnnnnnnnnnnnnnnnnnnnnnnnnnnnnnnnnnnnnnnnnnnnnnnnnnnnnnnnnnnnnnnnnnnnnnnnnnnnnnnnnnnnnnnnnnnnnnnnnnnnnnnnnnnnnnnnnnnnnnnnnnnnnnnnnnnnnnnnnnnnnnnnnnnnnnnnnnnnnnnnnnnnnnnnnnnnnnnnnnnnnnnnnnnnnnnnnnnnnnnnnnnnnnnnnnnnnnnnnnnnnnnnnnnnnnnnnnnnnnnnnnnnnnnnnnnnnnnnnnnnnnnnnnnnnnnnnnnnnnnnnnnnnnnnnnnnnnnnnnnnnnnnnnnnnnnnnnnnnnnnnnnnnnnnnnnnnnnnnnnnnnnnnnnnnnnnnnnnnnnnnnnnnnnnnnnnnnnaagaattcggcacgaggtaccattctgatgttggagcggccngcggcttgtaggcnnnnnnnnnnnnnnnnnnnnnnnnnaatcatgcaaggttgtttttattaagctttatattcagtttacagctaaatattacagggattatttcttttgacaagcagacatgacatcctaggaaacttttcaaaacagtccaaggactttataactactgggaacagagcaatttactctgcagttaacgtgtatgttaagtacttcaagagtcactaagggaaagaagctaaatgcaactgttccttttctataaaattattatcctgcaaaagtagctacaaaggaaaatcacataactatgacaaagctagagagatcatacatccgaatttgtctttttttatttaggataggacttgggggtcacatttcagaaggcaaataattctttcagaagaagctacatgtcaagttttctatgggtagtattaatactaatatgatttagcttatgtttaaaaaaatcaagaaaagaaaaattttgtctttaaaatctactatattagtgactgtaaggagatgcttagctattgaagagcttctctccactcttgtattttctttatgagttcttctgagagattttcactgtgactgttttgacctctgtatattcatggaaaccgtactctcccagttctcttccatttccagacatcttgaatccaccaaaggggcactgggcacttaccacgccatagcaattcacccacactgttcctgcctgcagagcagaggagattgttatggctttatcaatgtctttggtaaacactcctgctgataagccatagaaagtattgtttgctcttttgatcacgtcatctaaagatttaaacttcatgatttgctgcactggtccaaaaatctcctctttggcaatgcgcatctcatctgtaacattagagaacactgtgggctggacaaagtagcctttattcccccacgggcctcctccacattccagtttggccccttctttcttcccactctcaatgaggtcaagtattttatcatattgttccttgtcaatctgagggccttgagtgactcctggggtcagaggatttccaaggatatacttcttagcccgctcaacactccttcgaacaaactcatcataaattgattcttccacaaaaatcctggatgcggctatacaacactggccctggtggtagaataccccatggtgtgcaaattcaacagcattgtccaagtcggcatcagctaacacaatgcaagggctctttcctccaagctccagggtcaccctcttcagattgcttttcccggcagcttctttgatcaacttgccaacctctgttgatcctgtgaaggctactttgtctatatccatgtgagaagaaatggctgcccctgctgtaggcccataaccaggaacaatattcactactccaggaggaaaccctgcctcttttattaaagatgccacgtggagagcagtgagaggagtttgctctgctggtttgacaaccactgtgtttccacagctcagtgcaggccctatcttccaaatgagcataaccaacgggaaattccaaggaatgatttggccacatacaccaataggttcatgtcttgtatatgtaaaaaaatttccatcaattggtattgtacggccctggatcttgtcagcccaacctgcacagtagcgcaatgttttgatgcagcctgctaaatcattcagatatgcattggaatagagttttccaccattcattgactccattgtcgccagcagcagacgatctctttcgattaaatcagccaacttgtataatagtcgccccctctcggaagcatccatagtacgccacggggatccaatctgaaaagcctgtcttgcggccttcactgccttgtcaacatcctccttatctccttcttctacctggcagagctcctcctcagttgcaggattaaagacaggaaatttcttgccactcactgaatcatgccattcattgtttatgaagatcttagtatattgaatcttcaaatcggtgagtaggacaggtaagtctggcgtgcctgaggatgacatttctgattcggctcctggaacacaggtgactggctcagcaattcggacgcgtgggtcgacgatatcccgggaattccggaccggtacc

SEQ ID NO: 121728 - DNA, 960 bp, Homo Sapiens
  misc_feature (850)..(884): n is a, c, g, or t
ttcctgtgaaggctactgtgtctatatccatgtgaggcagaatgtctgcccctgctgtaggccattaacccggtccatattccactactccaggaggaaaccctgccctcttttgatgtaaagatgccacgtggagagcagtgagaggagtttgctctgctggtttgacaccactgtgtttccacagctcagtgcaggccctatcttccaaatgagcataaccgacgggaaattccaaggaatgatttggccacagtacaccgataggttcatgtcttgtatatgtaaaaattttccatcaattggtattgtacggcctggatcttgtcaggccacctgcacagtagcgcaatgttttgatgcagcctgctaaatcattcgagatatgcattggaatagagttttccaccattcattgactccattgtcgccagcagcagacgatctgcttgtcgattgaaagtcagccgacttgtataatagtcgccccctctcggaagcatccatagtacgccacggggatccaatctgaaaagcctgtcttgcggccttcactgccttgtcaacatcctccttatctccttcttctacctggcagagctcctcctcagttgcaggattaaagacaggaaatttcttgccactcactgaatcatgccattcaattgtttatgaagatcttagtatattgaatcttcaaatcggtgagtaggacaggtaagtctggcgtgcctgaggatgacatttctgattcggctcctggaacacaggtgactggctcagctatttggttctgatccccggccgtaatggccgaattcccgggcatatgtccggtaccgtcgactgnnnnnnnnnnnnnnnnnnnnnnnnnnnnnnnnnnncggccgcttcctcgctcactagactcgctgcgctcgtcgttcgctatcaaccggcccctatatgatctatcatttt

SEQ ID NO: 121729 - DNA, 959 bp, Homo Sapiens
cccctggcccaaaagggtttccaaagggggttccaacccctttcttttaaaggatttggttttttatccccgggccaggtttttcttttggattaaaacttttgccagcaccttcttggtggattccgggtgaaagggcttacctttgttttaatattccccaggggaagaaggaaaatggggtggctcctgctgttagggccccataagcccgggaccaatattccgctactccagggaggaaaaccttgcttcttttattaaggatgccacgtggagagcagtgagaggagtttgctctgctggtttgacaaccactgtgtttccacagctcagtgcaggccctatcttccaaatgagcataaccaacgggaaattccaaggaatgatttggccacatacaccaataggttcatgtcttgtatatgtaaaaaaatttccatcaattggtattgtacggccctggatcttgtcagcccaacctgcacagtagcgcaatgttttgatgcagcctgctaaatcattcagatatgcattggaatagagttttccaccattcattgactccattgtcgccagcagcagacgatctctttcgattaaatcagccaacttgtataatagtcgccccctctcggaagcatccatagtacgccacggggatccaatctgaaaagcctgtcttgcggccttcactgccttgtcaacatcctccttatctccttcttctacctggcagagctcctcctcagttgcaggattaaagacaggaaatttcttgccactcactgaatcatgccattcattgtttatgaagatcttagtatattgaatcttcaaatcggtgagtaggacaggtaagtctggcgtgcctgaggatgacatttctgattcggctcctggaacacaggtgactggctcagcaattcggacgcgtgggtcgacgatatcccgagaat

SEQ ID NO: 121730 - DNA, 1313 bp, Homo Sapiens
aatctggaatgggggctaccctttttaatagcaaattctaagaattcatatatcaatgtccttccagattaaaaaaatggtattttattataacttttaaaattgcggaacatcagactgaatatcatcagacacatacacaaaaccactcatctctaaagtcattttctataccctctcaaaatttggccagtgagttttgcctcagggaattttccagttcaaccccatacaccaacatggaataaatggaaacactagccttttggttttgcccacagttccaaagtgctattacaggtggaatatctgctgcaggaggtcattcttgctgctgtgggtgtgagtaaaatgcttagttccttctaaaatcataattgcaatatggacttctgcttcacgctgcatcctaaggcacaaatcaggtaacctacatctcccaaatgatcaacagagcactccatcctattttaccctcaatgctgagaaattactcctgggcccagaagttgtcacataggtggcttgggttacttggtgctcaggcaacaactgccacaggccccagcttgatgaacaccatcaatttctttaaatatgttgatactaagatggaggcctctgctcagaggaagcaaggacgtaaacgctgggacagactgcactgagggtcactacactaacagacccagatgacacgatggaacgtgaatactgaagctgacaatcttctgaaaaatctctttttcaaaacccatacgcctaatcgagaaatcagggacagggaaacattcgcataattacccaccaacatgttcttcttaacagaagtgaagattattttaagaatatgaaaagtgtttcaagacatctgttttcagggatagaccagagcagcagaagtacttttcagagctggttcattttaaagtctatctcaagaacaagggcagcctgctttcacaaggtaccaagacatgttctggcaaaaacattttcactttaagttatatgctgtcaagttcaactattttatacatatctgatccttttctgtcagcaaaaaaggtacaatttttttaaaacttgaaaatcaataatttctgggtaggatgaaggtagaattttggttgtattttatacttcagaacacagatgaaaccaaaaggtctgcaattgtctctacattcacatctttcaaaggtccttttctccttttctccttttacatgaattcatctgaatcattgccatcctgatttgaagacatattttcaactttcattagtgatgaatagctcctaagttcatcc

SEQ ID NO: 121731 - DNA, 807 bp, Homo Sapiens
  misc_feature (175)..(180): n is a, c, g, or t
  misc_feature (182)..(184): n is a, c, g, or t
  misc_feature (188)..(188): n is a, c, g, or t
  misc_feature (191)..(193): n is a, c, g, or t
  misc_feature (196)..(197): n is a, c, g, or t
  misc_feature (200)..(203): n is a, c, g, or t
ctttttttattggggtgagaattcccaagccccctagttcaatggccccgggattttcttagggaaaacagttattggcccatggttccactttccctactgggggcccgcggcgcccaaaaggaaatggtcctagaaaagcttcctggaggggccgagggcggcccgacatgtnnnnnntnnnttgnggnnntgnnggnnnnggggctttttttctcattcttctcttcacgatctctgcattctttctctgctgctaggtcctgggaacccgctcggactttgggtcttttctaatcggttcaggatctcatttactttcttctccactgtcacaatttttacatccttctgcctgtgaaagcctatctgccccacatccatgtcagctgttttcttcaggttagaccccggcgtatataccacattaacgttgttcatcttgcagccttgaatgctattggccttcacaaggtgggcacagtccatcagcacttcctttgggatgtcttctatattctctcccttatgtaatcgaaggtatacatgagccgaagagagtttgtccacatgaaaccagatatcttcaggccagccatgcttgatcagatcttcattttcatatttatcttttcccatgtaaatagtgtaggcagatgaattaacgctgctgctggtgaagtagaacaccatgatcccgggagcggtgcggtgactccaccgcggagcagcagcgctcaactcacgaagctcaggataccagactcgcggcggccgcctggcccccagaactcctccgtgcactcc

SEQ ID NO: 121732 - DNA, 983 bp, Homo Sapiens
  misc_feature (71)..(102): n is a, c, g, or t
tggtgatctagaggatcctgacggtctgttacttgtgaaaggggtggtactactacttgaacccaggagcnnnnnnnnnnnnnnnnnnnnnnnnnnnnnnnnggggaggagagatgaataatgttcttccctcatttgcaatagctagcaagaaatgggagaaaaggacaatcttggccttgggagaaattgatcttcagaaagaagagaagctatctctttaaaaaggtccttaagtggttagattccaaagtgtctaaggagaagttgtagttgcttcaattttactttagaaattctctgtaactgatggtctgaagcaagatttcttttaagaaggtgccttgttctactataacctttaggttttatgctctgaaacagaacccccaaacaactctgaacaataaggatttgaaaatttattcaaaacagtatgatatgaagggatgtggtggctgcatctcccaaccagagggtagaaggcaggtgttctagaaggttccagggacacaagaggcagggttcagtagggaaactactgtacttcatttacacttaagctagagagtttaggatcttaatttatttaaagccatagattcagtttagctttaacctagacagaaagtgaaaagcattttacaagtagaagaggcaatgagaaataaggcaacagataatacgtcaaagctggaacaagggcagaaatcagaacgtgtctggctatcagctttgtttttgactactaaggccaacctttttattcctctggatggtctgcagaccaagttcagaatttaggcaaaaggatttccaaatggatccctatacatctcagaagatacaggttgagaagaagccacagaggcttgtgatgaaccaaaagaatctttaaagaaagggttctcaaatgcattgtcagtagatttggtaactggcagggaaacttgtctgggagctgcctttggtggttcattgat

SEQ ID NO: 121733 - DNA, 1386 bp, Homo Sapiens
  misc_feature (46)..(107): n is a, c, g, or t
  misc_feature (129)..(138): n is a, c, g, or t
  misc_feature (445)..(454): n is a, c, g, or t
gtatttttagtagaggcagtgtttcaccgtgttagccaggatggtnnnnnnnnnnnnnnnnnnnnnnnnnnnnnnnnnnnnnnnnnnnnnnnnnnnnnnnnnnnnnntgagccaccacgcccggcctcnnnnnnnnnnagctgccaatctttttgaaggaatattcttacctctactttgtcaccttctactggctccttaactaaaatctgccatttggctctctggttaacagtcccttcctgtaaagtctaaaatcttaattctaaatccacagtttaattcacaagctagtacttgactttttttctgtatttgacatttttgacaacccctactttaaagatttattcccttgacttcttacattttgctcactcctgaaccaccccccaccttttggcctcttcatttattccttaaatgttattcctcagacctccannnnnnnnnnctctcttaatcacaacaccacttctcacgcttgggtaattttaattcagcagttcctaaatccttatctttagccagactcctcaatccatctgcctgttgcacttttcttggttgtcccagagacacctgtgtgtgtcttaaaacattcattctctgcaaaacctactctaatgcctgtgtcccttactttggttaattttagaaccattatattctaagttttctaggctcattcctctcctccaccttcccctatcatttagtgtctaagttttactgattttatctccacctctctgatacatcactctttcatcttcattgctattattaataaatacctacagtactaacctgcctcctatacctagctggtctcctctctgttgctcaatgttaccacagcaggctttctagaagcactctgacagtgttactccctaatatccttcagtgacttcaggaactttcaggagaaagccaaactcctctgtttggtgtacaaggtcttctgatgtgtttcctccaccgaatgttctggtgaaacagacttacacttcttcagaagccacatttggccaggcctcccgccttggtaaatgctgtactctttgcatcaagtgtgctagtcatccttccccacttggaaaattcctatgcatcttgcaggcctgacataagcatttcctctgtgaaacctcctttgctccactcaaggagagtcatctaacttccactttcgtgtcaccactgtaattacaacctacctctattgtatgtcacttaaatcgtactgtattgttttatttttcaaaagtctttactagaatgtgagctccttaagggcaggaaaaggaacctttttattttttgcatctccatagcatagtttttggcatatgaatgtttaataaatgtttgttgaataaa

SEQ ID NO: 121734 - DNA, 1244 bp, Homo Sapiens
  misc_feature (291)..(324): n is a, c, g, or t
  misc_feature (809)..(817): n is a, c, g, or t
  misc_feature (1115)..(1128): n is a, c, g, or t
gggaatgttctggtgaaacagacttacacttcttcagaagccacatttggccaggcctcccgccttggtaaatgctgtactctttgcatcaagtatgctagtcatccttccccacttggaaaattcctatgcatcttgcaggcctgacataagcatttcctctgtgaaacctcctttgctccactcaaggagagtcatctaacttccactttcgtgtcaccactgtaattacaacctacctctattgtatgtcacttaaatcgtactgtattgttttatttttcaaaagtnnnnnnnnnnnnnnnnnnnnnnnnnnnnnnnnnnaaggaacctttttattttttgcatctccatagcatagtttttggcatatgaatgtttaataaatgtttgttgaataaattgattttaaagtgacatctttattatattagaggtcctacctatattccaaatactttcactcccttcactttacagcaagggtcagtagagtcccaaggatttgtagactttagggggtcaataaagctgaaattgtattcaagatttggtgtggtttttggtgggtcatgaaaggggtctattcggggaaaaaaaggaacttctttcatgggaaaaggcagcatcattgaggaatttcttgaataatcaaataataccttcctaggattataaggtagataaatggattcctgtttaagattctgaagggaaggggagaagtgttataaattatttcatacaacaatttttcttagcttaatgtttgaataaataaaaatgttggtacccgaacccgacctctnnnnnnnnntcttttaatcttgtcgggccgcctccggccctccagaaactttctaaaccatttcgtttggccgcgcgggccccagtaaggaaagtgaaaattggcccttagctggtttccctaaggaaatcctggggcatgaacttagggctttggaattcctccccaaataaaaaaacggcccggcggggcaaacccgagcggtttctgaaccaaatcccaaaatgggagtttcctgaaggccattaacctggatcctaatcaacaggaagtcccaaggcccaagcttccaatattcaaatttaannnnnnnnnnnnnntggcccaccttctatcccaagaaaccggggtggaaaatttcaattaaagacatttctttggcggaacattggcaaagccccttccacaaaaccggggattgaatggaaacccctga

SEQ ID NO: 121735 - DNA, 672 bp, Homo Sapiens
  misc_feature (581)..(581): n is a, c, g, or t
gcatagggaacgaattaattgtatttttaaatgcagcaatcttttaatgaaatgttttcatcacatagtacttgttttctgtatgaattcagaacttttgagcaataaaagtgctctgcataagtttataaaatatgctttctggatttaaaatttaacagaaaaatttccaaacaagtcataggtatgattctaaaatattatgtacataatatatgactacaggaggaaattcctcactgtagtacaacacagtgtacaaatatgaagcacagtgtttagtttaatttccctttaggttttcctcacattggtgcataagtggctgactacatgacacaacatgccccattctacttgttgcatacaaagtagaagaggaatgtgaggacaaatttaaagtagaaaatgaaaataaatggcaaaaatacagtgcaaatgctttaaacagtgcactttataaaatagtttgctttattcatacttttttataaagtgcaatattacttaaaacagagagacatgtaccttaatattctgcaataaccattaaaacaaattgccaggaaagagcagtgcanaattaaaaacatacacatagcttagcatgcatctcagatggatcccgaatacagagtatgggaccttgagttcttatatctcctcgtgccg

SEQ ID NO: 121736 - DNA, 2559 bp, Homo Sapiens
gtttttgtgtttggtggtgttttttctttatatctgagtttgtttattgttctgatttactgaaacttaaaatattccatcaaattatccaggaaaatccaggtggcagaaatatataatatgtccatttcatcaagaggtctcaaataaattttaaaaggccagaaaatgatatatatactatgccatttaaatcacttctatcttctgtacttaagaactcaagtatagaaataaactgtgggctgaagtaacattgtaacctgctcccaacatgactgcataggtgtctaaggttaagtgtgaagattactgtgaggtctcaagttacttgactaatcaatcccatttgaatttcaatccaagcagcatattttacacacacctgaaggaaatatcttcagtgtgttcatgtgtgtgtctatgtgcatgtatgtgtaggggataggtgtaattagggaagggctgaccgaacaacattgataagtacatgctagaagtctgctgttgttggtaacacagaaacatacacagtcttcatattcaaagtcttcacggggatgtcttctgtaatttcctgcgtttgggtctcattcagaaacagctttagcttcctgctccgaaggccaaacaccttggctgcttcatacagaagaccttggtgggtgagtccattctgcccaagtgggttttcaagcaggagagtgcccactgtccccattaaacactcttgtggctttgcattcaggagctgtaggttgatatactgacaaagaagagtactagaactgttgatcagagagggagccgatcctgcagtcacacaaagtgtttttccactaagactcagtaagtcagtttggttttgtatttctgtttcatcatggaagacagccagctctgtatttttcacaccaaaaatgctagtgacaacactcttcagctttaaaaggtccaacctattgtcaccttttggattttccaggagcaatactccaccttgttcactgccatttgcacaaatgttaagattgacatatgcacaagcaggaccaggaagggaagatcctctggtgagtgtaatttccagttcagatcccttcaactgtgttttttcttgaataaggactttatccgatggagaaactggatatggtttcaagggagcctttatggtggtaaatatgaactctgtgtggctttcaataacactattcagatatgttccttcagactttgctttatagtacactgtgatttcatcagttggaaccagattgcactttttgcgaagtttctgtatgcgattgatgacttcccgagccattccttcatctaccattgactggtcaggagtgacatctaagaggaccaaagcctgagcatctgagtgtgcttcaaattgcgcagtcccacctgtggcctgatcaaaggtgtacatgaggcggatgtcttcatcgtgcaattcatggccttccacaacaatggtcccagtcttctggaactgctccagctcctcactgctcaactgcttgatggacgtcatcactgccttaaaggctcccttcagacgcttccccaggaccatgtgatctggttctgcccttagccgaatgccatacttgtttttatctgtagacagtgtaacttttcgaacattgagttcctcaatgatatacttctccaaagacttgatatctttaagagcttctggatcttgatggataaccacaatttcctttcaaaggatactttatgggaatagtttttcggtctctgatcactcttccaagttcaatcacagactgcatctgagatactgcactctctgttttcttgtcaatcaattcttctcgaacacggggcagcatgaggtagtgaatgctgagtgtgtcgttgtcctgaacagaaacagggtcaatcagcacctttagattctggtacatcaattcagtgagaaaaggtgtgtagggagccataagtctgcaaagagaaagcagaacactaaacaaggtttctagggccatgacacaatcctccatcccattttcaccctttaatcttctgcggttcattctaacataccaattggtcagaatatctacaaacttgaccaggcgaggcaccacagtataaagcctataagctgccatttcagtctcaaagaagccaatgagagactgcatgaaggacaggatccaccggtctgtaatgttggggctttctctaaccgtgttctcattgtagagaaattctatttcttcctccttctggaaaaacaaaacgttctggattaagaagcgataggcattgtaccatgggagcagtacatccttaaggacgtcccgcacaccctcttctttaaagcggaggttttctgctctcaccacaggggagttaatcagatataatctgagggcatcagcaccatacttctggatgatggaaactggatctggataattctttttccgtttgctcattttttggccatcacttgccaggacaagcccattcacaattacgttcttgaaaggcggttgtccaaagagggccgcc

SEQ ID NO: 121737 - DNA, 859 bp, Homo Sapiens
  misc_feature (784)..(818): n is a, c, g, or t
accattgaaactgttttaatgttgttgcaactccaaaatgcaacaatcatcagcttgtaaaagacccaaatttcaaaaattcattttaattactcctttatacctattttacaaaataaaggtaagacacatttaaatcctccttgtcctaattggctatgttcctaacttgttttctatcactacagtgaatgctgcaatactgatataagaaaaaataaaataaaatagtaacctctgcttcaatgtacagtttccagaatctgccagaactggggaactgggcaacaaggcgttcataagtcttccgtgctttgtctataggttgattctaaaattgaaaaccaataaacagcatttacaatgttaggattatgaaaatattattcactgcagaaccaagtagtgtgattggacccatagagaaggaaatgtaatcctatatcactaaacctgtgcctctcgaatgagaatgctccaagcatcaaggtcatatggattctcttctaatttcttttccgctttcttcaccttctctgggacatactcagctgcctgctccgtggctccgtctcctgacatggcctcagctgattacaacgtgcgcactgaccgtcgatgggaagctagaaaagaaaaattaaactaaaaaaccacccccaaatcagtaaagttaccccctgcccagctgagccagaccgccaacaccatcgccaccgcccactcaaatatccccggccgtaatggccgaattcccgggcatatgtccggtaccgtcgactgnnnnnnnnnnnnnnnnnnnnnnnnnnnnnnnnnnncgccgcttcctcgctcactaactcgctgcgctcgtcgttcc

SEQ ID NO: 121738 - DNA, 727 bp, Homo Sapiens
  misc_feature (600)..(600): n is a, c, g, or t
  misc_feature (610)..(610): n is a, c, g, or t
ctttctccagtttcctcatgttgtccaacattattttggctttttcctcattattatttactacttccaatgcctgttgatgtttttggtagagtgggtgtcttctgtcaggcttaaaatgtgatttctttttaactagatcttcaagttcaaatgttggtgaactggtatccaatagttgtgaaatatgtggcacaaatatgaaaggcttaaaaacagatctctcaggatcaggagtccctgtaaagaagtgaatgcaaggaaggctggagtcttgaggtaaaatagaaaccatgcttgcagtggtcaggaattctccctccatattaatgccacttggtttatctcgaagaatttccatcattgtttcaaaagttatatttcctttgtgcttatttagaagcttgtagccctcacagtatctgcctgatgaagtcatcatcttggctgtgtcaagataggaatatgctgcagcaaaatcaaactcctttttaccatcccaccaacctttccgcttagcatagtttctcatgtctgggtgttcccgggcaatcttggttgttatggaaagttgattagaaatattacgaactccctctntgtacttttntctgctgcccagtacttccctgcagtctccagaatccaggcttcattcctatcagctatcaggaaactgttgtgatagctaaatacattctaccctctgtgcatttccaccctggca

SEQ ID NO: 121739 - DNA, 1431 bp, Homo Sapiens
  misc_feature (1153)..(1172): n is a, c, g, or t
  misc_feature (1196)..(1300): n is a, c, g, or t
cagaagagaaagaggtttaatcatagggccaccaaacacagataggaggaaacctcaaattcgtctccaggaggactttgagtctcaggttcttaagggttttagagtggtcccaagtgtggagatcattaattggctgaagagtacagggcgaagtcatgggacagcgagatgaagaagctgtattctcatgctgattcccttcttctgtggcaggggtcttcaagctggctggcatcagctgtttcgctggaatttggcgtctttgtgcttatttagaagcttgtagccctcacagtatctgcctgatgaagtcatcatcttggctgtgtcaagataggaatatgctgcagcaaaatcaaactcctttttaccatcccaccaacctttccgcttagcatagtttctcatgtctgggtgttcccgggcaatcttggttgttatggaaagttgattagaaatattacgaactccctcttgtactttttctgctgcccagtacttccctgcagtctccagaatccaggcttcattcctatcagctatcaggaaactgttgtgatagctaaataccattctaccctctgtgcaatttccaccctggccatatttttctagtaagtcaacaatgacattgagggctttttcagctgtatcagctctttcaaggccaagtctgacaaggtccattcctaatagtgcttcttcatcacaaacttcttctcttccccatacagcttcattcccaatgcaaactccatgctcattggctcccatttctgccccccacaaccacgctgggcgactcaggacaacagcatatgtttcaggaacttgatcaatttctatatatgtacacttaagacgttctcccaggttatcatgaactacagcaggaaaataaaccacctcttgtacttcatcatagagtctatctgaattttttccaaaaataatcctgttatcgactgttgctggaggtaatgccacgaaagtgtcacaggaaaaaggttccattttttttaactaaaaattatacagatgttttaaaataaaaagaacacttttaagtatataaaaataaagagttttactcaatgaccaaaggatattattgccatatctaattaaggatgttcattaaagctttgannnnnnnnnnnnnnnnnnnnggagacaaggtctagctctttcannnnnnnnnnnnnnnnnnnnnnnnnnnnnnnnnnnnnnnnnnnnnnnnnnnnnnnnnnnnnnnnnnnnnnnnnnnnnnnnnnnnnnnnnnnnnnnnnnnnnnnnnatgagtgaccgtgcttggctgttcattaaagttttaaattttgtatactacagcctaaaaatcagtaagaatatgacttgggactcaatctggtactacaactcagtaagaaaatggcaatgagaactacc

SEQ ID NO: 121740 - DNA, 743 bp, Homo Sapiens
  misc_feature (77)..(89): n is a, c, g, or t
  misc_feature (713)..(713): n is a, c, g, or t
gtttagtgcactcaattttacttcactgtctcatcacttgagagactggttaaggcaagaaacccatttcttaacannnnnnnnnnnnncaaacatttgaaaagcaacaccaaaacgtatgcagttaattcctcaattctttcccttagtatagcactttttaaattacaaaaccacacttacatgtattctatctcactggatccccacaacatcactgtgaggtgggaagatcaggaattacaaaccaccgcttacagatgaagcaataagcttacagcagccaaatgccttgctcaaacacagacggtgattgatagcaccaagactcaaatccaggtctccagacaccagtgccaacaccctttccattacatcatcttgctcaagtgaaatagcattctgtacagactggaaaagtaagagcagttgttaaaatggaacagagcacaaacatgtcagacacagctgaaagaatggaaatagactggtagagagaggaaggcactgagccacatgaaggtatgtgcgtaggttttgttcagtggaaatagactggtagagagaggaaggcactgaaccacatgaaggtatgtgtgtaggttttgttcagtggaaatagactggtagagagaggaaggcagtgaatcacatgaaggtacgtgtgtaggttttgttcagtgacttcttcagtgtctcagccagctgagcanataaagacactacataggcatagttcatgt

SEQ ID NO: 121741 - DNA, 625 bp, Homo Sapiens
  misc_feature (556)..(568): n is a, c, g, or t
ttttcagtatttcacatggttttattacaaaacaagccacaaaacagttttagaaaatttttgctacataccaattaggagatcacataaaatgagaagcgtaacagtttccatgcactcagcctagagcttacagcgagtgcatttcacagctgaaacatcactgctttaaaacacagaatcatgctaccccttcataagcagagggggaggaggtcaaacagtatgtttttgccaaacgtttgctttatctgaactctatctagtatgaaggactggctgccgcaggcaataacacagagaggaaaaggaacaaaggaagaaaagggtgctggcagacaagatttaacaaacctgtccacttccgacattttgaaagtttataaacaaagctcacttggggacactcaatttccaaaatgctgtgacctccacatgttatctaatttatactgaaaacaaacctactaaactccactcctcaactactgaacctgctatttattcatggggtctttttagcccatataagagtatatttatattcagaaatatnnnnnnnnnnnnntttgcttcaagtagactaagaagctggaccttaaaactactttctttctcgtgggag

SEQ ID NO: 121742 - DNA, 722 bp, Homo Sapiens
  misc_feature (634)..(634): n is a, c, g, or t
ttttggctcttaggaattgtcattttatttctgctacaaaatttaccagaaaaaggtactgcaacaatcttgtataaagcaaatctttaacgaaagaacatggtatagactttctaaaaatattcatactttatcacaataactacaaggaaaaattcaatttctatcatcagaaccaagctgcagtttctgaggtagtagagacagatgacagaaaagtttgaaacaaaacccctaaaggaaatagtcaacttgtttaaaatgtaaaaattaatcgaatatctatgaaagggcacaggaagctagatattttaaggaaggaaggtacgctacttacaaagttaacttgtaaccacacaggaggtgtaaagattctagagaagagcactttggttaactctatacgttctgtggctctacccattcataaacgagtcgtctatgcataaatgagtacacgaatagttaagattaccaaatatatttcaaaccctaaaattaaattatccaagttgtggtccttttattcaaatggtaagtatatccatgcaggaagtccaaatatcttaaaaggaattaaaattaaattgcatatatcatattccttcaatagtttgaggtctattgcttttancaagattagtattattccatttttatacgtcaggagtacataaacacaagtacacctgaaatacaccagtgttttaacttttatttca

SEQ ID NO: 121743 - DNA, 439 bp, Homo Sapiens
  misc_feature (370)..(380): n is a, c, g, or t
ttttggtctcattttgtatttaatattatcgaaggctttattaatgccttaaaaaacacaaaaagttctgaacacacatttattatctggaggaataaatgcactccaaatgcttatcatcagaactctggaaaaagacatataaattctctccagtattttaaaaattggtatctaaataatttcattttgaactaggttagcaacctaagttgtcttcattcagcttttaaaattgaaaaaaaattgcttcaaatataataaagacttaagtacacattcaaaatttattttctgttacagttttcttgccaaaaggagttgaagaatttttttgcttatcttacttaggacaaatgttgtcagattnnnnnnnnnnntaacagaatagtagttgtaaagactaactctatatgaatggttttaatcatagcgcacc

SEQ ID NO: 121744 - DNA, 724 bp, Homo Sapiens
  misc_feature (373)..(386): n is a, c, g, or t
  misc_feature (391)..(536): n is a, c, g, or t
  misc_feature (539)..(555): n is a, c, g, or t
  misc_feature (560)..(560): n is a, c, g, or t
  misc_feature (617)..(617): n is a, c, g, or t
  misc_feature (619)..(621): n is a, c, g, or t
  misc_feature (623)..(624): n is a, c, g, or t
  misc_feature (659)..(659): n is a, c, g, or t
aaggaaacaatttgcaaatttacacacctgacaaaaccatatatacgcacatatgtatgcatacacacagacagacacacacacccgaagctctagccaggcccgttttccatccctaagtaccattctctcatttgggcccttctagggttggggccctgagcttggtttgtagaagtttggtgctaatataaccatagctttaatccccatgaaggacagtgtagacctcatctttgtctgctccccgctgcctttcagttttacgtgatccatcaagagggctatgggagccaagtgaacacgggggattgaggctaattcacctgaactcgaaaacagcgcccagcttcctcaccgcaggcacgcgtcnnnnnnnnnnnnnncctcnnnnnnnnnnnnnnnnnnnnnnnnnnnnnnnnnnnnnnnnnnnnnnnnnnnnnnnnnnnnnnnnnnnnnnnnnnnnnnnnnnnnnnnnnnnnnnnnnnnnnnnnnnnnnnnnnnnnnnnnnnnnnnnnnnnnnnnnnnnnnnnnnnaannnnnnnnnnnnnnnnnagtanaaacagggtttcaccgtgttaaccagaatggtctcgtctgactgggggaaggagcgncnnncnncctcaccgcccgggccctactgcaccagtcgtgtnccctcagatcctcgcgccggatccctacaataacacgatacacccaaaaatcaaaggactaacac

SEQ ID NO: 121745 - DNA, 1176 bp, Homo Sapiens
  misc_feature (170)..(170): n is a, c, g, or t
gttggggggggaattccaaagccccttggtcattggcccggggatttccccttaaggaaaccaggttagtggccccgggtttcccgttaccctactggggcccccccgggccaaaacgaaaaggtcttagaaactttcttgaagggcccgaggccggcccaccacggccnccgcactaacgctacgggtgggtgggcgcaaagatagggtcatttattcacgttatattatttaattttaaaggcaaaaatacagttctgttttgaacaccaagatcagacacagccccctacacaatggtaaatacacacatttgcatacacaggaaatcaaaatacacagcacaacaggtctctgggacatgaaagccgtcatcctggctatgcagagcccccgcccctggcagtcagcagagaccctgtccaggctgaaggccagcacagcatctcctttactgtcctgtgccacctctgccctctctgatctttcccaaaggccagttcacacagagtcaccagcaataggatacacagaaacagaaaagggcacggcacatgacaacttcgcggtcataactcccaggaaaaggaaatgctccctgaacccccagccctgaaatccccagtaaggaaacaggacccgcggcatctcacggaccaggcaaacatccaggcctaactgtgccctggctgtgccttgggcccaggtgagcccatgagagcactacgtcagcaaatggggggagcagtatttcccttggttctaagaatgaaccacatacttgacatgaatgagaaggtaaccatcttagtgttcaccttcttctcaccgtgaaagtcttaagtccgcgggggctccaacgcccgggctgaaattctgggccccaagggccacattccctagatcgattccttttactttggtatcatgccatcctttttccctggttaattggcaccgccaacattacacaaattctctcggataacacgggagttttggggctaaggctgcctcttacataatttgttcctctacggtcctttcacttggaatctttcgaatccctaacttctgtcatccccgatactcctttgtatggctcctccccttctccactattcccgtcgttctcctctgccctgatctcccatcgcgtacttctcatacggatcg

SEQ ID NO: 121746 - DNA, 1047 bp, Homo Sapiens
  misc_feature (23)..(23): n is a, c, g, or t
  misc_feature (25)..(25): n is a, c, g, or t
  misc_feature (44)..(44): n is a, c, g, or t
  misc_feature (233)..(260): n is a, c, g, or t
ggtcataactcccagaaaagaantntccctgacccccagccctnaatccccagtaaggaaacaggacccgcggcatctcacggaccaggcaaacatccaggcctaactgtgccctggctgtgccttgggcccaggtgagcccatgagagcactacgtcagcaaatggggggagcagtatttcccttggttctaagaatgaaccacatacttgacatgaatgagaaggtaaccnnnnnnnnnnnnnnnnnnnnnnnnnnnncaacaagaaaaggtagagtttgggttttaaggagtaaaataacacagaagttaccactcagggcatttgtctgatttcttttaaggcactttggaaaagtcaggatctgcggacagaaagagaggctttcattcttcttatttcccacaactccctctcaatgcagtcatttctagttttaataatatccttggtatagagtggggaactgacagagaaatactttttgcatagtccagctgcttctgcaatggaaaataatttttaaccaatacaaaggcttctggaaaaagaaccaagttagcatctgagatgcgcaaagcagtaaaggcacagataagactggggccaggcaccagctcagcctccacactgagggctggtacccaggagggcagtggtttggggtccgccacgagcacaaggctcaaccctgggattaggcagctgagtcttggaacctgagcccaggctggacctggcaaaggcgctcagtggtaggagtgccttgtgtcatctcatcccaggtggctcaatagctcccaacagaggtgggtttgtgacagacagccctgtgggtgggagcctcaactggggtgggagcacctgtgaaaacctgaggtggaacaggaggctttaggcaccgaagttcttgggagggagttggggtgtgggttcggctgaacttctttctagatcactaattaaaaggcacattcatgctggggaatggatagtctgtttgaccctgagtgccacagtcaagttttagggggcaggcaagagg

SEQ ID NO: 121747 - DNA, 625 bp, Homo Sapiens
gattctaacaaaatttattatgcagtaattacaaaggttaaagactcttccatctcaaataaaaataacagttataattacacacataatatagtaccttatagaatgattccaataaatatcacaggaaatacagtgcattttcaagttggagagacaaatactttctcattcacagtgtttgacataggaaagcctatttacataacaatctgtataaagtcatgctcttagtaacagtctatacagagctgtgccaacacaattctttcagaatgtgaagtacggggcaaaccactcctggcgctggggatctggagaagccactggagaagcttcactctgagcaggacgtctttggggaaaattacaaggcacgcaacaatgtgtaatggaaactccagtagtcatgttccttgagctcatgcacatgcatcttactgatacctcaaaaatgtcttgggccctttaggtggcactggctgtggaagtggtttgctgctgttgaactcaatatcgtggactgggggattaggaatgggatccaggcggttaggatgtccattgcccactccaccagattccagggcacttagattgggaacactcacaaacctgtttgttg

SEQ ID NO: 121748 - DNA, 699 bp, Homo Sapiens
  misc_feature (553)..(553): n is a, c, g, or t
  misc_feature (601)..(601): n is a, c, g, or t
  misc_feature (631)..(631): n is a, c, g, or t
  misc_feature (672)..(672): n is a, c, g, or t
ttgattctaacaaaatttattatgcagtaattacaaaggttaaagactcttccatctcaaataaaaataacagttataattacacacataatatagtaccttatagaatgattccaataaatatcacaggaaatacagtgcattttcaagttggagagacaaatactttctcattcacagtgtttgacataggaaagcctatttacataacaatctgtataaagtcatgctcttagtaacagtctatacagagctgtgccaacacaattctttcagaatgtgaagtaccgggcaaaccactcctggcgctggggatctggagaagccactggagaagcttcactctgagcaggactgaattcataaaaagagagacatgtaacccagcattaagtcattttgcaaaatgaaggcaaaagcacataaaacatcagcatagattaccacaacgggttccccatgttgtaagtcgtgttttaaagatttgctaccccctctatactagaatcggttctccactccatgagagcataagagtgcatcagcagctcanatgaagtcagttaaggaggagccacatcacaacaatcacaaagaacanaaaacaactgcaaaaatgtcaccttctttngataaaaaattcagtaagaattgtgggaaacgagagaatanataatggtcctctctttcagcactttt

SEQ ID NO: 121749 - DNA, 573 bp, Homo Sapiens
  misc_feature (563)..(563): n is a, c, g, or t
ttttgattctaacaaaatttattatgcagtaattacaaaggttaaagactcttccatctcaaataaaaataacagttataattacacacataatatagtaccttatagaatgattccaataaatatcacaggaaatacagtgcattttcaagttggagagacaaatactttctcattcacagtgtttgacataggaaagcctatttacataacaatctgtataaagtcatgctcttagtaacagtctatacagagctgtgccaacacaattctttcagaatgtgaagtaccgggcaaaccactcctggcgctggggatctggagaagccactggagaagcttcactctgagcaggactcaaaaatgtcttgggccctttaggtggcactggctgtggaagtggtttgctgctgttgaactcaatatcgtggactggagaattaggaatgggatccaggcggttaggatgtccattgcccactccaccagattccagagcacttagattgggaacactcacaaacctgtttgttggtgatttatcattcttcttcttttgcttnagcctcgtgc

SEQ ID NO: 121750 - DNA, 1718 bp, Homo Sapiens
  misc_feature (1611)..(1645): n is a, c, g, or t
aaaaaataaactataggaactttattattttaaaaattttaatgatattcatcgttgtatatgacaatgtcagaaatttcattaggacaacaattaataaaagcgcctatccacggcaaaaatgaaagatgagttttcacagcaggaaattagtgctgaatcagtgactcctgaagtcgttacagcagcgcttgcgagatgttgcattttcctctgctagggcacactgcttgggcggtttaatattgtttttttctcccttagaatttgatgttatcaaagctaccattaacattttacttaaagtttttaggagaaactcttcacaaagttaatagtgcagatcttctagtaattaagatcatttcagatgtgcctgaaatgagtaccacatgtggatgagtttgctttttccattccattaagttcggtagaaattttaaagagaggaatgccagttacctactgcccaattttttaattaaataattttagcaattacgtagaaaaataatttttaaacattgtcgtaaagaacttttctggaactggtgactgatttaagacattggaagatcatgataagctgcatatcttccagtcacatgatggtaaatctgcctctcaatgtccgagagcagagtactggcacctattcgaaagagttctggcttcagccactcatctccaagctcctcctttacaagagagagccaagcaagggaatcctttgcactgcggatgcctcctgctggtttaaaccctatcttgtttccagttttccagaagaaatctctaatggcccgcagcattactatagctaccgggaaggtggcatttactgtttcttttccagtagaggtcttaataaaatctgatcctgccatcattgctatcatactggctttatagacattagtaagagttccaagttctcctgtcgctaatatagttttaagatgagcctccccacaggccttgcgaaactgacgaatctcatcatacagggcttcccactggcctgtcagcaccaagcttctgttaattaccacgtcgatttctgtagctccatcttccacagccaatctgatctcttctaatcgtgtcttcaaatgagtctgtccagctggaaatccagcggccactgatgccacagggatattacagcctgcagccttgagtgcttttacagcatcacacacccgggcgggataaacacaaacggcggctgtagtaatgcctttatcatgcatatttaaagcttttaagagatcttcccggattgggtatttggctttataacagagcctttgaatgttggaagatgtatcatcacctgaaagtgtagtaagatctataaaggtaacagctttcaggagccaagcagcctgccactcctttttcacggttctgcgagcctggatttgttccgcacgcctcagaactgccgggtgattcacttgtattttggagatccagctaaggtcgagctcggtgccccgattgtgcgcggacatggcgcgggcagctccggagctgccggctggtaggccgcccgcctccccgcccgtaatgccgaattcccgggcatatgtccgtaccgtcgactgnnnnnnnnnnnnnnnnnnnnnnnnnnnnnnnnnnncgccgcttcctcgctcactactcgttgcgctcgtcgttcgataaaccgacctagcgcccatagtattatcatt

SEQ ID NO: 121751 - DNA, 454 bp, Homo Sapiens
tactgagcaaatagaccagctataaaagtttattaaaaaaatagacaacatatgtaaacatatttttcagtcacaaggcttcataatacagcacattaggcccaggccttaaatctctgcagtgagagtaccttaattttttactaacagtaattgacttatctttcagtgaacattaagcctacacaaaaataaataaccagattctgctaagtttactaacacagaaaattgcaaatgtacaatagattgcagcaaaagttaactatctgcagtaacatgtgagattgaattgttatattacaattattttaatacagcttcattttgaaattcatcataatgtagagttgactaaaataaagctaaaggggaataataacagagataaacaaacacccagatcacatacactccccaacacacacatgccaacacacatttactaatatgc

SEQ ID NO: 121752 - DNA, 621 bp, Homo Sapiens
agattttaaaaatttaatgtattattacattcatttccagtagaatacattcacggcactatcacatctactattcttttgaactggccattccttctatttacatagcttttcacctctcagaggttggcaatttaagagttcttattaaaataataatttacctagatgctgattttttcccaagtaaggattaaatatccaaaacaaaatgtataactacacttgttgatactttatattctactttcctattttaacattatgaaaacctggaattttacaatgtaatcttagaatctgcaagtattaaaagtacatttagagtaaaactgaatttcaagatgctctatttcataataatcaaggtacattagtttccatatacttatgtagctcgaattttattatgtatctaaatgtcctctgtcagttttaatttggtttaaattcttgataccaataagccttcatcaattcctaagaaaatcactgctcattagtaaaataaagttttatctgacagttatcttttatttaagttaaataaatgttaagtatctaaaattttaattaacaatatttggtaaattaaatttattcttatcattccttctttta

SEQ ID NO: 121753 - DNA, 1027 bp, Homo Sapiens
  misc_feature (923)..(923): n is a, c, g, or t
  misc_feature (955)..(955): n is a, c, g, or t
  misc_feature (962)..(962): n is a, c, g, or t
  misc_feature (980)..(980): n is a, c, g, or t
tttattaataattctctatttattaaaaagggtcctacagctttacagccacagcaccggacacggccctggacagcgacggcgagcccggccaggggccgctttgcaacttcaatgccaagctcacgtctggctgcgaccgtggcaggctgtggcatccccgacagcggccggtggcggaggtatgggggcgggtggcaccgctcactcgagattcacagaacatggcaagcccgcctgactggcatggcagtgaatcgtcctgtacagcttcatttcaagaaaacagttacagtagagttcaagtccgagagcaggaatgtatggtcactgaggacaaaaggcagtggcctggcccgtggcccagaccccgcttcagttctgccttctgtcaccctggcggctaggcacaggtcggggccctggatgcccgacaagtgacaggggaggggcgggccagaaggtccactggtaagcacctcggccttttccgtcaacaggtgccactgccccctgctgggccctgggccttcagcacacatggcacgtgaagatgaggtcccacaggggtgggggaagagcaggtgcagacggttggagtgcagccccgtccctcaatcccatggggcgggctttcgccaaacccctaacgttgcccaccctgaggcccagccaccagccacccaggggcagaggatattggctaagggtagcctgggtcaaggcggccggacgtcttgaccacctgtaacagggcaatgaacttggacaagcccttcagagaaagcagagccggggccttgcccagcccctagcaggtgtgagtcccggcacctggggaagctaaggcacagcacggacacccgaggggggggcaccgtgcactgggctgcacaaaggaatgcatccactcatcggcattncgatctgctcagacagtactgcatttttatanattcccntgatgtctgggatgtcanaagttttttcatatactcgtgccgatcttggctcgagggcaatccta

SEQ ID NO: 121754 - DNA, 942 bp, Homo Sapiens
aacggcaatggccgccggcggagcagtctgagcccctcaatcagatcggggacgggagctgagcgtggaggcctcatgatggggcaccctggcatgcattatgccccaatgggaatgcaccctatgggtcagagagcgaatatgcctcctgtacctcatggaatgatgccgcagatgatgccccctatgggagggccaccaatgggacaaatgcctggaatgatgtcgtcagtaatgcctggaatgatgatgtctcatatgtctcaggcttccatgcagcctgccttaccgccaggagtaaatagtatggatgtagcagcaggtacagcatctggtgcaaaatcaatgtggactgaacataaatcacctgatggaaggacttactactacaacactgaaaccaaacagtctacctgggagaaaccagatgatcttaaaacacctgctgagcaactcttatctaaatgcccctggaaggaatacaaatcagattctggaaagccttactattataattctcaaacaaaagaatctcgctgggcccaaacctaaagaacttgaggatcttgaaggataccagaataccattgttgctggaagtcttattacaaaatcaaacctgcatgcaatgatcaaagctgaagaaagcagtaagcaagaagagtgcaccacaacatcaacagctcagtccctacacagaaatcgaccacaatgagcacatgctgtgcgaagcagagtgctgtgttgcaccagcagcaggcgcggcgcagagtgaggcaggtatggtccctctgtctataggtgggacgggcccggccggcccagttcccgggcggggaagaaacgcttctggggaaccttcccttggaggggtgccgggaaacaccgggtccacgagggcccatagggtaaaggactgtcctacatattaaccgtcgggaa

SEQ ID NO: 121755 - DNA, 1035 bp, Homo Sapiens
  misc_feature (467)..(523): n is a, c, g, or t
ttccgtctggactttataggcattaaaggcttgctttttttcacttaactttgccaaagcactgtatcgtggatcattaataatcattttcatagcctgctcccatgaagcattcgatggtacccgcttttctttcaataattctttaaaagcttgctttgcctcttcctttgtattccaagtgtatgttttctttgctggttggctctcctcctcttcttttttgggagtaaaatcagctacagtttcttgcttagatgtttcttctccagtattactggatacttccacactttgatcctgaatagcaggggtactagtaagttgtgcttgttcctcagttgaaatagttactgtattctcattatctacaacagtagcaacaatggaagtaacttcaggctcaggaacaactggaacagttccactgacagtattagaagcagaagtggaagcattagcattgnnnnnnnnnnnnnnnnnnnnnnnnnnnnnnnnnnnnnnnnnnnnnnnnnnnnnnnnntcggcagcagccatggtgctcattgtggtcggaatttctgttgtagggactggggctgttgatgttgtggtgcactcttcttgcttactgctttcttcagctttgatcattgcttcaagatcctcaagttctttaggtttggcccagcgagattcttttgtttgagaattataatagtaaggctttccagaatctgatttgtattccttccaggggcatttagataagagttgctcagcaggtgttttaagatcatctggtttctcccaggtagactgtttggtttcagtgttgtagtagtaagtccttccatcaggtgatttatgttcagtccacattgattttgcaccagatgctgtacctgctgctacatccatactatttactcctggcggtaaggcaggctgcatggaagcctgagacatatgagacatcatcattccaggcattactgacgacatcattccaggcatttgtcccattggtggccctcccatagggggcatcatccc

SEQ ID NO: 121756 - DNA, 487 bp, Homo Sapiens
cagtcgacggtaccggacatatgcccgggaattcggccattacggccgggtcgatttgaattcttgattttaatttaaacttagttttcatttgttcatactcaacccactcaaaatgagtgtttttttcaaatctatgtataggcctgaaggctgtccagcaggcattccaaggcctgggtcctggtttctccggttacacaccctatgggtggcttcagctttcctggttccagcagatatatgcacgacagtactacatgcaatatttagcagccactgctgcatcaggggcttttgttccaccaccaagtgcacaagagatacctgtggtctctgcacctgctccagcccctattcaacaacagtttccagctgaaaaccagcctgccaatcagaatgctgctcctcaagtggttgttaatcctggagccaatcaaaatttgcggatgaatgcacaaggttggcctattgtggaagaagatga

SEQ ID NO: 121757 - DNA, 1010 bp, Homo Sapiens
aaaatgtaagccgcgccggaaaataaggttccaaaattcccaaccccaatcttggagttttattttccatccatctttcttctccaccaattagggggccccccctttgtgccatttcatcccggcaaaattttggattgggcttccagggattaaccaacccccttgagggaggcagcatttctgattggcaggcttggttttcagctggaaaactggttgtgaataggggctggagcaggtgcagagaccacaggtatctcttgtgcacttggtggtggaacaaaagcccctgatgcagcagtggctgctaaatattgcatgtagtactgtcgtgcatatatctgctggaaccaggaaagctgaagccacccatagggtgtgtaaccggagaaaccaggacccaggccttggaatgcctgctgggcagcttcaggccttgagatgttttcccatccaggggaagaaaggttccgaagaacttccctttgccttaaaccatcacttgaggaatcctcaggatactgtccccgattagaaccagcaggctcctctgtggattcagccaccttggcgttgatttctggcatttttgaaggactcttcacattgcacaccagatgcaaaacatgccgtttttcctgctttggaagcaagtccctgagacattggtgatccaacaacagcttcccagaataaattaacctctggtcctctggacgcggacgctcggggtagacgcggctcaggtgggccttgaggtggcccacactccagccgcggtcgccactcagctccaagtcgcggtggcgctggttggggctcttcaccaggagcgtgacgggctcgggttcggtctcggactccatggcggcggcggcggtgtcggggctccgctgcgctcctaggtgccaggcaggcggcgtctcagccgcccgcaatctctgcaacgaccgttcacgcggacgcgtgggtcgacgatatcccgggaattccggaccggtaccagc

SEQ ID NO: 121758 - DNA, 1926 bp, Homo Sapiens
tttcagggtcattcatagtaaaactttattgaacagaaaacccagcaaaggttttcacctccgcaaagttccccttagtttaaagtaaagcactgcattttaaaaagcaattatacataagtctttcctagaaaagtcctgctaaaacatgtctagcaatttcattgattatataaagtagtacacttagtgtaatttaaacattccaacaggaatcaaatcgtaccagcagaaccacttctgcatctatgacttctatgtacaaacacacatgcagacacacacatttggaaaagttcctcaagcatagacatgcaacacctaaggccttctacgtacagtgcttattaaactacatagagtatatattaaagctcttcagaataaagacatgagaagccttgggcattttttgttcaccaatttgtatcacggcttcacgtttctgcttttgcttgctcacaaaagcatatcatcatccacactgttttttaaaaactcatcattgccatgtccaggagaggcaatctagctggagtcaggtgatccagtccattcctgtcaaagcctccaacagctacagcacaaacaccatcagtttgcgatggctggggggccttctggaagaagagaggcaaagaaagtcttgaagacaagccatgctgtgctcataaaggaggggctggtctgctcgccatctagtacatccctgtctggagggaggtggttggggtcttcagtttcaggatcagtgccttcctgtaagttattgttggggtcctgatttacaacgtcaggaggaggaccatcatttgggaagttctgaaccggcctcggtctaaatggaaaccacccaacgtgatgcaggtacataacaacggtggcccccatgaccatgaggaatctgctcagggaggagtagaagtagaggatactgagaaaaacagaaaatgtagctgctgaataggtccaatccaacccattctcgatttatttcatcatcttcttcccacaataggggccaccttgtgcattcatccgcaaattttgattggctccaggattaacaaccacttgagggagcagcattctgattggcaggctggttttcagctggaaactggttgtgaataggggctggagcaggtgcagagaccacaggtatctcttgtgcacttggtggtggaacaaaagcccctgatgcagcagtggctgctaaatattgcatgtagtactgtcgtgcatatatctgctggaaccaggaaagctgaagccacccatagggtgtgtaaccggagaaaccaggacccaggccttggaatgcctgctgggcagcttcaggccttgagatgttttcccatccaggggaagaaaggttccgaagaacttccctttgccttaaaccatcacttgaggaatcctcaggatactgtccccgattagaaccagcaggctcctctgtggattcagccaccttggcgttgatttctggcatttttgaaggactcttcacattgcacaccagatgcaaaacatgccgtttttcctgctttggaagcaagtccctgagacattggtgatccaacaacagcttcccagaataaattaacctctggtcctctggacgcggacgctcggggtagacgcggctcaggtgggccttgaggtggcccacactccagccgcggtcgccactcagctccaagtcgcggtggcgctggttggggctcttcaccaggagcgtgacgggctcgggttcggtctcggactccatggcggcggcggcggtgtcggggctccgctgcgctcctaggtgccaggcaggcggcgtctcagccgcccgcaatctctgcaacgacagttcaccctcgtgccgaattcgccacccaggcctcgctacctaaagaccgtggagtagttactgcc

SEQ ID NO: 121759 - DNA, 943 bp, Homo Sapiens
  misc_feature (173)..(173): n is a, c, g, or t
agctgccgggataggtgtcccaatcccacccaatttgcgggttatttccatcatcttcttcccaccaatagggcccccttgtgccattcttccgcaattttgaattggctccagggattaccaccccctggaggagcagcattctgattggcaggctggttttcagctggaanactggttgtgaataggggctggagcaggtgcagagaccacaggtatctcttgtgcacttggtggtggaacaaaagtccctgatgcggcagtggctggctaaatattgcatttagtactgtcgtgcatatatctgctggaaccaggaaagctgaagccacccataggggtgtgtaaccggagaaaccaggacccaggccttggaatgcctgctgggcagcttcaggccttgagatgttttcccatccaggggaagaaaggttccgaagaacttccctttgccttaaaccatcacttgaggaatcctcaggatactgtccccgattagaaccagcaggctcctctgtggattcagccaccttggcgttgatttctggcatttttgaaggactcttcacattgcacaccagatgcaaaacatgccgtttttcctgctttggaagcaagtccctgagacattggtgatccaacaacagcttcccagaataaattaacctctggtcctctggacgcggacgctcggggtagacgcggctcaggtgggccttgaggtggcccacactccagccgcggtcgccactcagctccaagtcgcggtggcgctggttggggctcttcaccaggagcgtgacgggctcgggttcggtctcggactccatggcggcggcggcggtgtcggggctccgctgcgctcctaggtgccaggcaggcggcgtctcagccgcccgcaatctccctcgtgccgaattcgccacccaggcctcgctaccta

SEQ ID NO: 121760 - DNA, 1005 bp, Homo Sapiens
  misc_feature (414)..(414): n is a, c, g, or t
aagggatcccgctgatctccgaagcccagatccttcccggggttgtgttctgcaatcgcttgtttgtttcccccacacaataagggggcccccgccttttgccatgtcaaggcccccccaaagtttgtgagttagggcctcccggggatttacacaacacaccctcgcaggagacctctcctttcggaattggcccagggcgtgtttttcagcccggaaacctggtttttcaatacggacctggagccaggggccagaggccccccaggtatctcttggtgcccgttgggggggacccaaaagccccttgatccggcagtggctgctaaatattgcatgtagtcctgtcgtgcatatatctgcgggaaccagggaaagctgaagccacccataggggtgtgtaaccggagaaanccaggaccccagggccttggaatgcctgctgggcagcttcaggccttgagatgttttcccatccaggggaagaaaggttccgaagaacttccctttgccttaaaccatcacttgaggaatcctcaggatactgtccccgattagaaccagcaggctcctctgtggattcagccaccttggcgttgatttctggcatttttgaaggactcttcacattgcacaccagatgcaaaacagtgccgtttttcctgctttggaagcaagtccctgagaccttggtgatccaacaacagcttctcagaatgaattaacctctggtcctctggacgcggacgctcggggtagacgcggctcaggtgggccttgaggtggcccacactccagccgcggtcgccactcagctccaagtcgcggtggcgctggttggggctcttcaccaggagcgtgacgggctcgggttcggtctcggactccatggcggcggcggcggtgtcggggctctgctgcgctcctcgttgccaggcaggcggcgtctcagccgcccgcaatctctgcctcgacagttccccctcgtgccgaattcgccaccca

SEQ ID NO: 121761 - DNA, 2575 bp, Homo Sapiens
  misc_feature (1192)..(1202): n is a, c, g, or t
  misc_feature (1793)..(1793): n is a, c, g, or t
gggagttcaataatattttattgtcaatagcataggagaaattcaatattgaatctcagaacaagaagaacctatttacaatgcatgtcaaggaagagatgggagaaggaatgtcacaaaattttttggtaaatacatattttttatagagaagtaatccatgaacctgcaacatggatagcttatccaaccaactttacaaattactattaatataagttacatgcttgccatctaaagtaactaaacccatagactgaaaaactatgtgtcaaggtaacgtgagcactttaatcactttacttatattttctaaaggcagtagtttcctctccttttcccgctatcatattagatgaagagacaagttccttcaacacaaattctgatatcggctattgtgagaatccctgtgcgagtcagctagaagcccctgccaccagtctagtgccaaccaaatgaccagatgggacagctatcaaaaatgaaagtgaatttatattaagatctgaacttcctcttggggtcttgcatttcagctactagaggtctataattccttatccaacattccacaatctgaaaagctctgcgaacgaagtgtttttgtaagttggtggcatacgcatttggcagcaaaatttgaccccttatgggctacttagtctttatgtatccattttgtctgaatattctacattttgttgcagcatattaaggtgttgatttatagggtgctgccccagatctgatccatggagttctataacatacagtgtatgtaaaatattatcttttgaaaatccccaaaattcagaattttaataaacacctgcctgccagggcttaacataaggacttctggacctatagtagcctgagcatgtgcccaagtttcactggagccagggcagtttcgtgggtcccatgcactacactttcttcagtctttcagggaagcgagaatgtctggaacattctctatcccaaagaaggaaagcatagtgctgggaagaagagcttccaaatcttccttataggaattttctttgtggaagactgtatttctgccaactaccccggacaatttgacaaataatgaataaatatttttcctctaacgtgattccttttcattaaaagcgtatgtcattgtcttatgggaaaaaaggaaacaaaagatagaattggnnnnnnnnnnnggtctatctgtgtgaaggctacatatgacaagtactggcggcttcctgatccagcaacattagcaatttattgtatctagaaaatgaatctctggatgcagagtttacagaaatcggcatccacagaaaagtcagggaggacttaacatgggctatgccacttaaggagaacagaatttgccaaagaaaatgatgtttcgagttttgttgtgcctgatgatgtaaataaagggatggtcagcattcaattcatccttgtgctgcaggatccgtgctcctggcacctctatggaatccccaccatcttcagttatttctaagcacactttgtggataacatttgatagggccactcccttggtctctgacattccagagaaatcagatgtgtcttcgctgaagatatgtttcagccctagattttccagacaagccttgggatcaatcatcttttccaccttaaattttggaatggagagtttgaccttggcattggccatggtgctgggattagtccactgtgacagtgactctgagttgagttgtttttcaatcttctccaagcctgtggactcatcctccacatccttngggtagtaggatgaacatgctgagatgcttattttgaaaaggaagctctatgatcttacaattgatactgtcaatgtttcccatacagaacgtggcctccatgttcatcatctgcactggtttggtgtctgtcttgttgactctgaaaggacattcttttgtttctgattcaggaaatttcttcatccactttgcaacaaagtaggcagcattaaccacaaggattttggtctggtcgttcacactgttgtcagctaaaatgttctcaaagtggccatctgtgagatccttaattgagttgttgatctgacctttcgtttcttccaatttatctttgaagtcaacagtttccaattcctttgcatagggtctcttcgtagagctgatgaactctgtagaaagattcagagatttgtctacgtagagccgcttgattagtttcagtgagtaaaaggaactaagtttgtttacatccgatgttactgtttgaaatccaaagggtacatctttgacattttcaaaatgaagaacctgtccaatttcatttgcagtgtcacctttagcacccacttgagcaagtgacagagaggtggagagacagattggagagaagaggacattgcccagtggctccttttcacatagttgtttgaacagatcaacggcaaaagccgaatttgctagttgcagggcatccattgcgggcctggagtcacagttatcctggaaaatgcgtgcggacgcgtgggtcgacgatatccggagaattccggaccggtcca

SEQ ID NO: 121762 - DNA, 528 bp, Homo Sapiens
taagagtttctagagtttttattattcaaaatgagtttcatttcaattcaggtacttgaaagaaggttctagtctgttactttgacacagcacaagatcaatagtttattctgatgaagtattccacccaaatgaaagcataacatgcaagtagtcatttatttcaatcactcctatttgaaggtccttatttttggagaacagtcaggcattttattatccactctttccattccttaaaggcttccttccacgggtttcagtaaattcccattatcctcacgactgtgttctggagttgctccaggtgtgccagaagattcatcatcaatccacctcaccagtgccatctgtcaaagaggcctgtccaaagacaaaattccacaagtctcttgggtaaagatcaatcattgttattcccacaacacagaaggcatcttcaggtttcttctttttcaagaacttcaggatgtcccctgcatgaatttgtaggttttgtgtgttctcattgactctaaaggaacacct

SEQ ID NO: 121763 - DNA, 2198 bp, Homo Sapiens
  misc_feature (82)..(92): n is a, c, g, or t
  misc_feature (127)..(217): n is a, c, g, or t
gtgcgtgggggcgcccgccccccacgagaaggcgagaggggggaagatataatagggagggaaaggccggatggggcgggtnnnnnnnnnnncaggtggttattggtttgtgttgggttatggtgannnnnnnnnnnnnnnnnnnnnnnnnnnnnnnnnnnnnnnnnnnnnnnnnnnnnnnnnnnnnnnnnnnnnnnnnnnnnnnnnnnnnnnnnnnaagagtttctagagtttttattattcaaaatgagtttcatttcaattcaggtacttgaaagaaggttctagtctgttactttgacacagcacaagatcagtagtttattccaatgaagtattccacccaaatgaaagcataacatgcaagtagttatttatttcaatcactcctatttgaaggtcctcatttttggagaacagccaggcattttattatccactctttccattccttaaaggcttccacgggtttcggtaaattcccattatcctcgtgactgtgttctggagttgctccaggtgtgtcagaagattcatcatcaatccacctcaccagtgctttgtatctttctacaatgctgaagccaacagcacactgcaacttgtgcaaacagatagggcaaaggtttagagggcgccggtcagcttcttccaagtggttggagccttgcatgaggcatgcaagccactggcagtgtcgcagtccaaatatgtgtccgatctcatgggttaaagtcttacaggatcgaagtagtaaaacactagttatttctggaatataatagttgtcgaaaattgaatagtcacttgaagatgttttcttgagcttcttcactttgcctttatagtgcatgctataaaaatcactgccatacctggcaaagctgaatatccccacaccatctgtcaaagaggcctgtccaaagacaaaattccacgagtctcttgggtaaagatcaatcattgttattcccccaacacagaaggcatcttcaggtttcttctttttcaagaacttcaggatgtcccctgcatgaatttgtaggttgtgtgtgttctcattgactctaaaggaacatcttgttacagaaacaggaactggttctaggagttttactctcaagccatagaaatatgctttacagtagcccgtgagccatttaatatattcttcactgataattctggtgtttcctagagagccaatggactgtatataaatgctgcgtttgtttggagagggtgtctttctgtaaggatcactgaagaactgttcaaagtcttggggagcctcagggtgggaggtgatccaatctgatggagaatgcaaggtaatgggtccaaagagatcactggctggctggaaggcttcattcattaaacgttgttccccagcatctaatttctcatactgtgatacaagcactgggttctttgagatgagagctgtttttagtgtctgttcggagtgccgtattatttgcatcttgattaggttggaagtcttccattgacatctttttccttacatgtacggagttttctggtccttcctcttgaaaagggtcagatgttccaccacgagacttgattaggaaggaaggctcccatggaagcttttatctcacaaggacagacatgtctgggcctggccagaaggaagttgtggagtgtgccttcatctttatattaacgaaggcagtgagaaaagtcaggaggcctccccttgcctcccaagcctaatctagggaagctgcgggagaagatgggcagggggcgcacaatatggtcactgtggtgggctggaggcctgggacgctgtggtcccaaaaccagaacatctcgggccaaccgggagaagttggccaccctagctggttgcctacagcaactcgcactgtgggctctggtccgtgcaggcacaacccaggctccggctgggggtggagctagggcttaccccggggactctcgcttcgcctcttcttcccccaggagcctctggaaaggcctccactggctccccagaggcactccgcccccgcagtccccgcaggcttccgcacacgtcacgtccctcctacatcctcatccctctccaccgaccgcgactggcgcccgcctatacgacccggctgccccgcccagctctgacagcacgtgcgaaccgcatcccgaactccgagccgtacagcctg

SEQ ID NO: 121764 - DNA, 641 bp, Homo Sapiens
catgtacatggtcattttcttgaccttttgatttttggttttctttttccactgaggatctgatcttctcatcctccttatttttcaacatggaggactttaattcattgtcctgactgctttgttttatttttgagaagggactttgatctctatcagcctttttttccctgctgttatttgagctattatgatcacgacttttagagtacattcttttctcactctcagaattttcttttctgtgtgagctcttactctcttggtttctgtatttgtctttgtttctgctttgactttcttctctctctgagctccgtgagtctctcctccttctcctcctatctttacttcttgatcttcctggtggtgttcttctctctcggcttcgtgaccgtcctcttctcctgtattcctgttctctgtatctatggtactccttgcttctgctgcgatctctgtcatgggttcttgatcgcactcttctgcttctgtccctacttctgcttcgttctcttgttctgctattataactgtgtttacctttagttatatcacattctctactcctggattgtgcgcgtctatccttttccttacttttactgtgatcatgctcattactctttgattctaactgt

SEQ ID NO: 121765 - DNA, 1287 bp, Homo Sapiens
  misc_feature (87)..(141): n is a, c, g, or t
  misc_feature (263)..(324): n is a, c, g, or t
  misc_feature (753)..(1180): n is a, c, g, or t
  misc_feature (1204)..(1204): n is a, c, g, or t
ctcatgtcgagtttattaaaactttagcagtacaaattatccagattgcagattatcaaaaaatcaactcaatgaaatccacattannnnnnnnnnnnnnnnnnnnnnnnnnnnnnnnnnnnnnnnnnnnnnnnnnnnnnntaaaggagattcattagcaagtctctcaaacttaaaatccgaaacagaatggaagtaagtttatataactcactcatccgcttttgtcttcatctgttccagggcttgattcatgatcaaannnnnnnnnnnnnnnnnnnnnnnnnnnnnnnnnnnnnnnnnnnnnnnnnnnnnnnnnnnnnnccactgaggatctgatcttctcatcctccttatttttcaacatggaggactttaattcattgtcctgactgctttgttttatttttgagaagggactttgatctctatcagcctttttttccctgctgttatttgagctattatgatcacgacttttagagtacattcttttctcactctcagaattttcttttctgtgtgagctcttactctcttggtttctgtatttgtctttgtttctgctttgactttcttctctctctgagctccgtgagtctctcctccttctcctcctatctttacttcttgatcttcctggtggtgttcttctctctcggcttcgtgaccgtcctcttctcctgtattcctgttctctgtatctatggtactccttgcttctgctgcgatctccctcgtgccgaattcttnnnnnnnnnnnnnnnnnnnnnnnnnnnnnnnnnnnnnnnnnnnnnnnnnnnnnnnnnnnnnnnnnnnnnnnnnnnnnnnnnnnnnnnnnnnnnnnnnnnnnnnnnnnnnnnnnnnnnnnnnnnnnnnnnnnnnnnnnnnnnnnnnnnnnnnnnnnnnnnnnnnnnnnnnnnnnnnnnnnnnnnnnnnnnnnnnnnnnnnnnnnnnnnnnnnnnnnnnnnnnnnnnnnnnnnnnnnnnnnnnnnnnnnnnnnnnnnnnnnnnnnnnnnnnnnnnnnnnnnnnnnnnnnnnnnnnnnnnnnnnnnnnnnnnnnnnnnnnnnnnnnnnnnnnnnnnnnnnnnnnnnnnnnnnnnnnnnnnnnnnnnnnnnnnnnnnnnnnnnnnnnnnnnnnnnnnnnnnnnnnnnnnnnnnnnnnnnnnnnnnnnnnnnngggcgcgtgctggcgttttcatangtccgccccctgacgagatcacaaatcgagctcagtcagagtgggaaaccgacagactatagatcagcgttcccctggagtcc

SEQ ID NO: 121766 - DNA, 529 bp, Homo Sapiens
  misc_feature (118)..(118): n is a, c, g, or t
aaagaaatgtgaagagagtgattctgagtcacctgctactttcagtaccgaagagccatcattctacccctgtacaaagtgcaatgtgaattttagggagaagaagcacctccacagngcatatgatgtatcatttagatgggaatagtcactttcgccatcttaatgtcccaaggccatatgcttgtagagaatgtggacggacatttcgagatcgcaattcacttctaaaacatatgattattcaccaggagagaagacagaagttgatggaggaaattcgtgaattgaaagaacttcaggatgaaggaagaagtgcacgattacagtgtcctcagtgtgtgtttggtaccaattgccctaaaacatttgtgcaacatgctaaaacccatgaaaaagataaaaggtactactgctgtgaagagtgtaacttcatggcagtgacagaaaatgaattggaatgccatcgaggcattgcacatggggcagtggtaaaatgccctatggtcacttctgatattgcccagag

SEQ ID NO: 121767 - DNA, 1345 bp, Homo Sapiens
tgaagttttcacaatctttttctttttcttccggggctggtcatagctgaggtaggattcaaaagacatggttggctgctcgaattcatcctccatatctgtctcctcaactttagggagggagcccagtgactttctatccaaattagttttgactttcccttctggagtctttaggttgttagaacccttctcttttaccttgggcaacaggtctcctgctccttttcctgtgtcaaagctgtccagaccttgcttgcttttgtccaatttggctttctctgggtctctgtgctttggctttttcaggtggttgtctgaagcggcctctgagggaggcaaacacttcttcttcaggctgctgccctctctgtccttctctttctttacgccactagagggcggtttctcccttgcattgtcccctgagggtggccttcggttctcctctttggagagggccttgtgtgatttctctctgctcaccacagaggccttctcatcactcttggcatccacggggcgtttgtccttgtgggaagatttgtgctccttgttttgactcacaacccctttcccatggggttcacccaggtgtcgttcttggctggccccgagtctgtcctgaaaggcattgctgtggcctttcccaggcttctggtgtgaaacaatgggctcctggtcctcctccagggatctgtagtggtcgacgtacatctgatgaggactggtacaagatggaggggattgaacatggccataatcagaagactcagggtctgaagagtaagttggtgacattctgtgacacctctttctctcatctctcctctcatgaccgtgagacactttgtgaggtctctcgagctccgagagtttcctatgtttcttctgcctgtggtcagggctataggatcggctccccgtggctttccaggtttcttggtagtccccctccatctcctcctccttctgcagggcatcccgagggcgctttcgggaattgctcttctcaaagtcctgttcatcaggctcagcatttcgttccacaggaaccagcttcttccactgggccactaggtccctggcaaagcttccaacatgctcgtgttttcgcaagctatttactgttttcccaaccccagtctccgcaagaatgtctactgtaataggcagggtggagagtttcttcaaatatttcaatagcttcttagggtccgggttcgcggccaggcgcgcctgcagcttctccacaacttggagcgccgactccgccgccatcgctgtcactggcgcggcctcccctcgtgccgaattcaacagcccaggcctcgtaccttagccg

SEQ ID NO: 121768 - DNA, 996 bp, Homo Sapiens
aaaaaaaattatagctttattttttaaaaagattttataagtctgtcacaacctcaaacacatataggtgaattatttattcctctcttccatcagatgaggcttatcgtgtcaaatcctctgaaaaatataagtaaaaattatttttcacaaatatatatcccctatattactcaacttagttctgaaattttctccttataaatactttaacacagctgctagtggaaggactgtgttgtgcagctgcacatagctataattttataagtctgctttacttttgctagctccctggttcagctccaaggtccaaatcttataaatggttaactgggctgccagaaaagcccactgaatgcatcctgtagtgctctgtgacaagcaagagaagaagtatagcctccagcaaggtcctgtggtgaggcagctctgacatggtttaaatacctaaaacaaaacaagaagtgtagcattgatatacaaagcaaatataaataggtaacattttaaaaagcaatagtaaaactgattcaagttttaaagaggaattccgagattgaaatattcagacttttattataaatagattattatctttcaaaaggaaacataccaactgtacatggagtgcctaaactagtattaaaattacatagcaaattaccacggggtctaaaaacagttctgaaagaggtttcaaaaataattctaaaatattcactgcttcacgattttcagagctgatttgttttgttggctgttttttggacacctaactaatgctctccttcctggcatatgcttaagaaatacacagtatcacaatactattatagtactgatatttctacataaatttgttttaaagcaaaccctcaatagctaaacaaatggaagaggggagaaaacgtatgagttacttcaaaagtactttaatattcccccggccgtaatggccgaattcccgggcatatgtccggtcaccgtcgactg

SEQ ID NO: 121769 - DNA, 1406 bp, Homo Sapiens
tttttaatataaattatagctttattttttaaaaagattttataagtctgtcacaacctcaaacacatataggtgaattatttattcctctcttccatcagatgaggcttatcgtgtcaaatcctctgaaaaatataagtaaaaattatttttcacaaatatatatcccctatattactcaacttagttctgaaattttctccttataaatactttaacacagctgctagtggaaggactgtgttgtgcagctgcacatagctataattttataagtctgctttacttttgctagctccctggttcagctccaaggtccaaatcttataaatggttaactgggctgccagaaaagcccactgaatgcatcctgtagtgctctgtgacaagcaagagaagaagtatagcctccagcaaggtcctgtggtgaggcagctctgacatggtttaaatacccaagtcttcctagcatctcaagctcaggaacatgtggtccatatgtctctatctgcagtggctggtattcatacagagcttcttcaagcttgtgaataggtgccagtgaaatatgttgacccattttgatgcctgtggaaaacgtcactggttttacaggtttgggtttctcaagttgcatttctaattgggtagatctatctttatgctgagccaaaagcagagcaacagggagatcagaactctccagctcatctaaaaaagcctgcttattcttcctttttagaatctgctgcagttgttcttctttttgtataaataatcttctttgttcattttcctgtcgttccacttctaaagcttcttccagttcttcctgttctcgagtcagctttaatttatttttctgaataacatctttgttttccttttggtatatctccattttctttttggtgttgtccaaatccacattgttggtcaagttgaaaacaatttcttccacttcttccaagaaatcattgtattctcttagactaggaaaatcttcttcccttttattgtatatctttagcacttttttcctgatctcaacctccttgtcaacagtgggatcttcaaagagttgtaccctgaagttgctctttctgagtggagtaccacactcagggcagtttccagctcctctcacaaacagtaaatctacacaactttcacagagagtgtgtccgcacacattcaccatcagcttcaaggaggggttccgatatttggtggtcttacaccgagggcaaccctgatcgtccatggcggtttccctcctacagactctcgcaggcgcctgtttcagccagagccacctacaagccccctcagacgcgaccaagcaggttcctaccccccggccgtaatggccgaattcccgggcatatgtccggtaccgtcgactg

SEQ ID NO: 121770 - DNA, 411 bp, Homo Sapiens
tttttggtgttgtccaaatccacattgttggtcaagttgaaaacaatttcttccacttcttccaagaaatcattgtattctcttagactaggaaaatcttcttcccttttattgtatatctttagcacttttttcctgatctcaacctccttgtcaacagtgggatcttcaaagagttgtaccctgaagttgctctttctgagtggagtaccacactcagggcagtttccagctcctctcacaaacagtaaatctacacaactttcacagagagtgtgtccgcacacattcaccgtcagcttcaaggaggggttccgatatttggtggtcttacaccgagggcaaccctgatcgtccatggcggtttcccttctgtcgtcttctcgcagccgtatagtagtagtagtaggc

SEQ ID NO: 121771 - DNA, 1375 bp, Homo Sapiens
ctaatccaacctgttagattttgcaggtgaagtcagcagcttaaaaatgtctttcccagatttcaatgattttttccccctacctcccaaaatctgagactgttaaaacattttcttctatgaacactgctcagacctgctagacatgccataggagtggcgtgcacatctctctctcttccagcaggaggagcccgtgagcacgcacagctgccctgtctgctcacccgaaggcaccgggctcacctggacctcccaggaaagggagaagagcctcagaaactgctctgtgtttagaaggaatatttttaagagtccagctttttcatttccacaatttcctatatccagatttgttttgacaatgtagtttggaagaactaagattctaatctctgaagaaccttatagggccttctaaaacataagagtttcctttgttgcttcaaatatttgaacattatgttaaagatcaagtattaattttagttgtactctagaaagctaaagtgccacattcggggctatttttatgattcagcaatcttttctaaattgtgtagcatgtgtatgagactatttatacccaaggatatgaaggaacataagtgactacaaggctctaataagccacggtggcaggaggttcaagcggttctgttcactaaatttttctcctgtaagctttgaatggaaacttctgtatcacatgatgtgtttcacttatgctgttgtgtatatacctaatatttctatttttgattttattttaatacacctcgtccaataacatctcaagctttttatttgcatttacattttcagctgtggtcagtgtaaaaattggtcatcagctgggggcggggtggttagaagtgattcaacagagctacatgctttaaacttgcccaagttctacctccttcctttgaacatttcagattggagaaccaaggagttgattgcctgaacacctgaacatccgtttatgggggccagatagaatttgttttcaaataggcttaacaggcatcattaaaatttcattctgtgtgttttgtttaggcttgaggtgcttagaagatgggataaaatattctacttttttctaaattttaactttgtttcctatgtgatttttttaaatgtcctttctaaaatattctaaaattattgattcacaagtgccatgttcagaactatagaatattactgttacataatgtctgcacagctggtcccttgattcagtggtaaagtttttgtgtacacccccctgcttgcattttatttcagaaccacaagtattacccaatatgtttacatggagaggaactataaagaatccctaaggcaaaaaagaagtctccaaaaa

SEQ ID NO: 121772 - DNA, 955 bp, Homo Sapiens
aaagactttagaagatcatacttttcaaagattttactaaatcatttttttaaacaaaatatacattaaatctcagatttacagaatatagaaataatttatccaaagaaatttgcatttaaaattgttaatattgcacccaacagtatgtctttgacacatttgcattgtcaatctttcccacaatttgcaaaaacaggagagaaatctgaaactaacagaattacacaagctaagttttctgtaagaagagaaagagcttacaattttttatttacaagttaaggaaaagttgtaaacgttcaggattttacttccacagaataaaaagccatacattcttttatcatacctagaaaatgaacatatacacattgtgattacctcataggaattcaacaggactgatattgtgaacattcacagcccaatggtaaaaaacagaattctcgaactatggaaactagtgtgtgaaagacacagaatgagaaaaatgtctggaaaaaaattactttctcctctttgaggagtttccataattacctaaagttatcttcaaatttaaaaggacacaccattccccagtcttaggaatgtggctgccaataaccttttctctcgacataagacaagtgaaaaagagtgaggtctttgttcaagtccctgataaaatactttgcatataggcaggcacaaaagtttgctttccaaaagaaagctttgcaaaatattctgcaatttattactgatatcctcagtttttaaaaaccccctttttaagcccataaatatttatatgctttaaaaaatgagagtagggaatcaaatcatttggtactatgggaagctgctaaaataatatttgatagtaaaagtatgtaatgtgctatctcacctagtagtaaactaaaaataaactgaaactttatggaatctgaagttattttccttgatt

SEQ ID NO: 121773 - DNA, 1962 bp, Homo Sapiens
  misc_feature (130)..(138): n is a, c, g, or t
  misc_feature (224)..(261): n is a, c, g, or t
aaaaaaaggcacagggcgggggggaaaatttatattggaggcttccttgggactcccggggggaggagccccaaaagaaccccgaaaaccctttgagatttgttaaaacgccccggttccccccgggggnnnnnnnnnggggggaatcccaccctttttcttgtccgggtttctttgggaaaaagtttggcccatgttcccttccctttggggccccccgcccnnnnnnnnnnnnnnnnnnnnnnnnnnnnnnnnnnnnnnaagtcaaaaatgcttccttttattacataaagccaatactgctacttgtaagttcaactgtttgtgcatctctatatcgttcaaagtgttacgcccgtgatattaacaatgaccgcttccaagtgtcagtgaacagtggctccctgtgagtgtcatcatggtacctctccccattgcacacaagtcaacaaactgctctagaaagttaagttctcccaggcccagagtaaacatatactcaatattcttccatactttattataccataagaagcaaacttctgaaggagatacaattaaagataccacaggtgtcctagcttgtcaatattctgttttatcattttcattaacaaagcagattacaatgtagccctaatttgcattataattagttgttacaagacactgcacattctcctgaagacacacaatgatttccaagatgccaggtcactcttccaatcagtgaatggcgagctcactggcaggtgcagggctacttcctgtattccaatgatgtgcctgaaatagcgctttgcaagatgagcgtggattatgtggacacaattttgaggcaatctccattacacatttggtagaagactgcctaacttaatcttactattagtgtattagtgttgttatattatgaagacatattatattccattattctgcttagctcaaggaagaataaagaatttggaccaaaattataaccagattatgagcaatttcctaagcaaaagaaacaaagtaaatgctgaggttaataaagatgtaataattctcttcacatggcctttactgtttgtgaactgtgtaatttaaaatcctgagcttaacaaaaatctttataaatcaactcatcaaaacaggcatttggccaataagaatttaatttcacatcaataaaactttagactttagatttatttagggctgtttgcatatgtttatagaatagtttactctaaaagatgacaagacagctccccctcagtgagaccctggcctaaatatatttgctttatttatatagcaagaggataacattaaacatggaagctttcaatttgtggcactgaataatctacacagggcatccttcaaaggctacaattaaggatccacctaacttttcagcaatacaagcccgattgagatcttctggtccatttgcttgacattcatgttttatgccttgaaatttctttttaattgcatccttggagcttgcatagatcattttacttttcagaggtgctagttctggtgcccacaaaaaaaacatcaactcttcttttctggattcttttgtttcaaagcttgcatcatacaaagcatagcgacaatctttttcaggaagcattcccacaaaatgcttgaaaggatcagttatggttacaccaacatctccaaccaagatctctttgccttcttctacaatgatgcactttttgtctgcactgagacaaaaaatgacagccttctttcttttcttgatttcttctggtgtggagcatttacgaactttcatgtcataaaaaatgcgacatacttcatcagctacttgcactcctgaggccatcttcgccgcggcggtcgcagggacgcgggggagggagccggcgggcagcgagtatgcggacgcgtgggcggacgcgtgggtcgacgatatcccgggaattccggacc

SEQ ID NO: 121774 - DNA, 1031 bp, Homo Sapiens
gttccacatggccctctttaccggttttgtgggaaaccggggtaaattataaaaatccctggaggctttaccaaaaaatcttttataaaatcaaactcattcaaaaccaggccattgggccaaataaggaatttaattttcccatccaataaaactttagcctttagatttatttaggggctgtttgcatatgtttatagaattgtttactctaaaagatgccaagacagctccccctcagtgagaccctggcctaaatatatttgctttatttatatagcaagaggataccattaaacatggaagctttcaatttgtggcactgaataatctacacagggcatccttcaaaggctacaattaaggatccacctaacttttcagcaatacaagcccgattgagatcttctggtccatttgcttgacattcatgttttatgccttgaaatttctttttaattgcatccttggagcttgcatagatcattttacttttcagaggtgctagttctggtgcccacaaaaaaaacatcaactcttcttttctggattcttttgtttcaaagcttgcatcatacaaagcatagcgacaatctttttcaggaagcattcccacaaaatgcttgaaaggatcagttatggttacaccaacatctccaaccaagatctctttgccttcttctacaatgatgcactttttgtctgcactgagacaaaaaatgacagccttctttcttttcttgatttcttctggtgtggagcatttacgaactttcatgtcataaaaaatgcgacatacttcatcagctacttgcactcctgaggccatcttcgccgcggcggtcgcagggacgcgggggagggagccggcgggcagcgagtatgcagaccgtcctcctcacggctgcgggaccgagagacccagcgctgagctgacgcggcggcgcgagcttaccccggggcgggcgcgcctcaggacgggacgccctcgtgccgaattcaacacccaggcctcgctacctagacctgag

SEQ ID NO: 121775 - DNA, 744 bp, Homo Sapiens
  misc_feature (161)..(170): n is a, c, g, or t
ttttttaatagaatttcattttaataagtatatttaaagtttatcgcttccaaaaaacagcactttaattacattcaagttgtattcattttaaataccaacaaacccatcatttacatatagagctagatattacaaaacagatggaaatttaaacaagnnnnnnnnnnaagtccttccaaatttagaacattgtgaactattaagtacatgcctaaaaaatgtacacattatcagggaaacacaagttgctctaataggaaaagagccataatacacatacagtggaatataattcaaataggttcaatttacaggtatgtcttaaagtacaagaaaaccccaaagctaataactagaactataggcaaaatcatagctgactttctaaactaatgcaccactatataatgctttcccagagaaagtagaaggttctcaagattttatgttgacccatgatttttcacgtgttctcaaatataaaaccagagttttctttttgtctttaatttacactcatgtttgcctgtttgcttttataagaataactaaaatgtatcatgagaagtgccatctaacctgtctatttagagctcagtaaccaagacatttctttcatttttccctgttgctctattttcccttcaaaaagtctctaaggaaattttataaacagtggtggtaaaaagataattctgagatggcaaagaaatatgagacttggcacaagcacggatttac

SEQ ID NO: 121776 - DNA, 1468 bp, Homo Sapiens
aaatcaagcccattttaagctccctggagatgacatacggagacacactacacagtacagtattagagcagaatataaattatttacaaaaatcatttatagtacaatcaaatttctatttcaacaaatataatatcagattaattgtatctttgattatttgttgctgtaagtttattcataccagaaaaatggtcacatttaaaattctcaaaatagttttggcacaggtcacatcttctcattttgctaagtccctgagcactttgaacaggctgactttatgcatcggcctcttccccagccaccctggtcccctctttccacaatgccttgctacctgctctggcctcaaggctacctttactcctcccactattaactctagatgaacatttaatgctatcacctttctagctaactgtgctctgcagaaaccatgcagcttctctgacaagaagatctactagagtccctgccccaaagaggacttcataccatcttcccgatgctgacaaggaaggggaaacagataagggtacgttttgtgtatccttcttcttgttcataaaattgcccgtaatggtcagtgttttaatgtctccaaagctttgtgtctcaaatgctcatccaaacactggatggcaaagaggtcaacatccacgtcaaacttattggcaaacaagtggtgtttgcgcagcatccagttcaagtcaccagctccgaaaatgcacactgagcgcacatggactccatcgcagggcgggtagggagcacccttggagacatcaccctcaaagtactgccacttgacaaacctggcaactgcttgcatgtcagacagatcatacttatggctggcagggagtgagcccgggacttcaggaatcctttggatggtggcccagagatactcatcagggctgtatgtgtcttgtgcccactccatcaacttttggatttttttcattctgtagtacataccccacatactccctactgaccacgaagtaggcactgccagaaaagagaggtgtttcgagtggaggaagcattcttgacagtccctgtgtcttgtcagctttccattaagcgacctcataccgcgttcttcgcaccgtttcttcgtcttatgggatggcatcctctccgtttccaggttgttttctcccattaacaacttgagcgttccatgacaatttctaggttggttttaatgggaaaatccataccacaaagagtttatcaagtacttccagtttgcactcattgcatagagatccttcatgcagttgaggtcagcctgaacccggctccacgatgcataaaccacactctccaatacggctggccacgaagacattactaaaacaggaagcgatgcccatcactgcagctaaataggaatcctcggattttgtgtccaccctcgtgccgaattcgccacccagcctcgtacctagccgta

SEQ ID NO: 121777 - DNA, 883 bp, Homo Sapiens
  misc_feature (700)..(715): n is a, c, g, or t
ctgaaacatttctctaaaactttatttcaaagttattcacctcaccgttaataaggtgtatgattaatgctctgtgccagtatttgcaggcctgcccattgccggcaatggactttgagaaaacccatttcctggcacccaaaagttaaattactcttttcaaaacataccgatctccccaacacttgcaaaagtattacatgcaccattttgccaccattctttaaatcagaacttacattattaatctacatcagtgaatgttaaatgaagtcattttaacaaattatgactgtacaaatcaaaatactactagttaatattagacaagagtatcttacaaacactactattacatattaccttgcaatctgaaacattatatttcatatttgtgtatatttattttagataactgaaacttcacagaatttaacagcaaataaagtttaaaaaatttagttctgtacattagttccaactatccctattttacaatctataaggctcatgtcatagttcagcaccaaaaagatctacacaaaactgtttaaccaatcttcttatctatcctgtgtgatagttttgtttgttgttgttttttaaggtaaaagtcctacttcagaccttgaagtggaatacttctagtcagactaggtaaaaacttgggtcataccttattttcattgaacagataccnnnnnnnnnnnnnnnnggaaaaggaaaagagctgtgttacaccatgaatttaggttgtcagcctctatgttgaatttataacactgaagcatcagaaatagcctaataatgccctgcccctattcttcccttccattttaaatttttaaaaaagtaaccagaaaaatgtttcatttattctttc

SEQ ID NO: 121778 - DNA, 1182 bp, Homo Sapiens
atgcccacgggttgataaataaaaccctttctggccaggagggtgttaaataagccatatttatatttaaaataaatccctccccgtgaggaaaggtgggaattccatgcgccttttacttggaaaggctaaggaaaaaaagctattctgtcaaaatttttataagccagctcccccaatattccctttaccgggaaaccatcaggtatttcccccatcacaattcacagttccccaaaaggactttaaaagtcttcaaaaattcccgggtcttcttttggcctggcttctcttcttgattcccccccagggctttattaatgggttcgcttcatatcatcgtctccatcttcataaattttctttagaacattcatcaatccctcactaggatctgtttcagtgtcataggagggcttctctttttctttgcactccttttcaacctgggtcaggtaatcccaccttgtgttttccactttctttctacacaatataagaactgtatcagtcttgactttttttgaactgccttccacagagatgggtttcaagagattgttcacaatcatggagtaactcttcccatttagattctttaccaaaagatcaaatgacctctctgtgaaatgcacctgcacattctcagtgggaacttgatgaactccagttaaggtaatgtagattttcacaaacttatctgactgatcccatccataattactgattttcaccgtatagcccgttgtaatgggagcaaccacagcagctggtttttcattatcaagaagttctgctttcttctgtgatttctgttgcatcttgttcttgatttctgtctcaatcttggatttttcagctgtaagggcatcacgtactcttttcctagtagccttttccagcaacacctttacctcttctagatctttctgtagctcttctgaagccatgggggctgggtcaggccgaagtcccgagctgcagccgcgcagaagaaggaacaggaaaccccgcgccgagccctcaaaccgagcgcagacgcctacccgcacgagtcgcggcgctgcagcctgcgcccacaccgaccctgcgcaagatcgcggcccgcctcccgcacgcgacggatctcgaaccttcgcgaggccctcgtgccgattcaacacccggcctcgtacctagccg

SEQ ID NO: 121779 - DNA, 1620 bp, Homo Sapiens
  misc_feature (74)..(78): n is a, c, g, or t
  misc_feature (81)..(83): n is a, c, g, or t
  misc_feature (86)..(87): n is a, c, g, or t
  misc_feature (89)..(101): n is a, c, g, or t
gggcccggcgcggccaaaacgaaatgggtttaagaaagctttctccgagggcccgaaggcggccgaccatgttnnnnnttnnnttnntnnnnnnnnnnnnntttgtagaaaaaacttaactttattgagcataggaatagacgggctttcaaattattttttgctttatggttattacttttataaaccatctgatccacggcaaaactaactggtaccatacaaagatatgtctattattgtcatgtttagattttctattccacattcattgacaaatatatttaaatctagatagaaacacctgtgattgaattagtgcatggtaatgcatggcatatacattgcttaaggtggtaataaggggtcagatgctctacagcaaccttcaagcacaggcaccgatttgcattttatgcaaaacttcaggttttactcaatttttacactggtggaagctgatgtcagtaacttaaaaggcaagcaaatacttttccaattcttagctgaacaaaaaatacacacaatgtagcgtttttattgggcaagacttgctttttatatttcacgtgagaatgcaatataacccttccttgaacaaaatgaccagggtactaataaaaccatctttgcaggagtgtttaataagcatattttatttaaataaatcctccagtaggaaatggagaattcattgcctttacttagaaggctatgtaaatagctatctgtcaaatttatatatgcagctcaccaatattcccttactggaaacatcagtatttccacatcacatcacagttcccaaaacgactttaaagtctcaaaattccgtgtctcctttggcttgcttctctcttgattccacccaggctttattaatggttcgcttcatatcatcgtctccatcttcataaattttctttagaacattcatcaatccctcactaggatctgtttcagtgtcataggagggcttctctttttctttgcactccttttcaacctgggtcaggtaatcccaccttgtgttttccactttctttctacacaatataagaactgtatcagtcttgactttttttgaactgccttccacagagatgggtttcaagagattgttcacaatcatggagtaactcttcccatttagattctttaccaaaagatcaaatgacctctctgtgaaatgcacctgcacattctcagtgggaacttgatgaactccagttaaggtaatgtagattttcacaaacttatctgactgatcccatccataattactgattttcaccgtatagcccgttgtaatgggagcaaccacagcagctggtttttcattatcaagaagttctgctttcttctgtgatttctgttgcatcttgttcttgatttctgtctcaatcttggatttttcagctgtaagggcatcacgtactcttttcctagtagccttttccagcaacacctttacctcttctagatctttctgtagctcttctgaagccatgggggctgggtcaggccgaagtcccgagctgcagccgcgcagaaggaggaacaggaaaccccgcgccgagccctcaaaccgagcgcagacgcctacccgcacgagtcccc

SEQ ID NO: 121780 - DNA, 2824 bp, Homo Sapiens
  misc_feature (43)..(43): n is a, c, g, or t
  misc_feature (183)..(185): n is a, c, g, or t
  misc_feature (187)..(187): n is a, c, g, or t
  misc_feature (189)..(199): n is a, c, g, or t
  misc_feature (202)..(208): n is a, c, g, or t
  misc_feature (2145)..(2160): n is a, c, g, or t
ttaatttggtggaaggattccccaagcccctttagttcatggncccagggattcttcctaggggaaaccaggttatgggcccacgtttcacttttcccttctgggggccccgcggcgcccaaaacgaaatggtcttaagaaagctttcttcgagggccggaaggcgggccgaacatgtttttnnntntnnnnnnnnnnnttnnnnnnnagtattttaaaagtttatttctattttaactagcccacagaccccattctttgagggctgatctgatttctgacaaatggtctatagaccctcctctcggaaacttactatccccttccaaaaaagtctgcaccttccatcatgatgcacattttaagttaaaattgccaatacaacccttaaaatgcaagtttattgaataaagctgagaagagcagtaaacagacaaaaaatgcatccacctaaataaaaaaattcacatatttacatagttcagtaactgttaaaagttttcacatgcagaggttaatgcacaggaaaatgttggtaatagcgtctggatgtcttgaaatgcggaaagcaatgtatagacacacaaacacattaaggtttagctataggtcaattaacaaacctatgcagtccccacagagtcacacattctagttccaattcctccttttaggcacaagcaagttgccacattctttgtaatggttcacactgaccattaatggtgttgaacaacagtagcaagtttaaatatcccttcatttacagaaccatccatcccaccagggtagtatgcaacatgcttcaaagaataagaagagaaatttaaaagcccagattctactcataaaaatatgaatggagaaaagcaagtagtgtctgtgcaacacagtgcagtatattgtacagaatatttttaaggccatggcagtctataaattaaaactgatattcattaaaagaacttactgttgactacactctgagtgctcaacacatttggaaatgcagtctacataagtgctgcttaacaaaagaaacaaaatcacacacagtgtgaggcaacacataagcaggtgtaccatagagttttatctactacagtggtctatatgaataataatttacaaatgaaccagtattaatatgtccctttatgtatacggaagtcgctaaactaccaaacatgtccctttgaagtttttagacatctctgtatcatagaagccaaccaacagcatcagttcctcagttctctgtgtgactgattattaaaccacctgtagaccttgagcatgattacattagataaagcaggcaggtctagagttgtcacaataatcaagatgtctaatggcaccagtcaaaagagtgccaaagcttacatcagtaagagagaaaaataaaaattttttatttgtttataagtatcttttgtgctgaaagtcaactttatgactggatataaaaagtcaggagttaagagtgtcatgcagcagcactgatttaatgactggagatagaacaaacagatgtttgaacaaagactgacattcttaacaggttttattatattgggtggaatgctctaaattcatgaacgcttttggaaaatcttcaattctcaaccccttaaaaaagtatcctgaaccaggaagaaaaaacaagagacagaaataatgatctggacagatacaaaacaggatgctttagttcctcccatatcccaactgccatctggtgatagagttctcagaaagcaggatatctttaatattcatcaggcagaatctcaccagtgcaaagaaccaacattgatctggtgcctccgctcactctctgcagaccattttggattcctaagatgtaattatacatttcacatgcatttgtgagataaaataaacattatgtttacatatatcccacatgagtcattcacgcctaaaggttttctaaatactgtgtgtggcactagaaacttcatgctgtatcaagtcagtgtcagtattaagctactggactctataatgaaatattatagatagacatttactgaaaaccaatataaaaatctggcccagaaagaccagaatggaaatatgcaattttcttgatttaagatggtcataagtatatggggnnnnnnnnnnnnnnnnacagctctacacatggtttaagacaggtatgtgtaagaagcctttttgtgtgtgctgactttatcatgacaactctagctgattctttatgaaggattagggatattcatcttcagcagtgcacatgagaaataaactctgaaaaaggcaatttctggggtttaggaaggaccgtattctgggaattacttcagaggaacggacaataattctaggattatagccaagaaggactggaagacttcaggagatgcttcagcttcttctagattttgaatgctgaataagccactgaagtgtgatatctatattatccttttctttgcaagaaattgaatagcagcaaatttctctatcctgaatagcagacagattcattttttcaattagctgtttctcatccaaggcattaggaagatctctcttgtttccaagcactagcactggaattccttgtaactgtggtttatctagaagattatgtagctcatttcgggaagcttctatctcttcacgatctgcagcatctatcatgtaaacaatatcattgactcctctgcataccggtccacatgcttcgaaatcggggttgtcctcctatgacccagatctttatagtgacgttagctttagtcaccttcctcatgtagaagcccactgtggg

SEQ ID NO: 121781 - DNA, 1906 bp, Homo Sapiens
  misc_feature (614)..(624): n is a, c, g, or t
gaatttgaaataggtaatgttttgaatagattttttagttttattgaaatcttacatgaacaagaaattggaaatacaatcacatcaaagaacaaattgtcacggcttttgacgtttaagccaaacaaattttgtagggcagatttcaaaaaggtgtgaagttataacaatttaaaaacacagttaacctacttctaggaatgcaaaacatacaatcataggttattttcaatacaagaaaacttaaatttgtttgctttaatttcttaaaactactaagacaaagcactagcttgtatttttatttacagcatactccatactcctatgtaatctatcccaaatccaaaaaaatgaaactgtccaaaaccaaaggttctgcaaaatcatgatttaacagtgtgcccagcttgttttgaagctaaaatgaagcctgaaacgataaaagcattgtaatccccagaataagggaactctgcaagcccaataatgtccaagagcatttatgaaaagaggaaaaataaaaagacttgagtatatacacaatagtgatttcttcagcccaatacaaatggcagcaaaatgctacttaaagatgaaacagttaagccaannnnnnnnnnngaagaatgtagatctagagccaatcgtatcttgccagtatcattttcaagcccttacttgtctacttccactgttgcccataagtatcctgataaaattcctggttgtcattattgtaaccatagttaccagaatagtcaccaccttgctgaagcggctgctgagcgatgggttgggaaccccagttctgttggttgttggtctgacgacgcttggaatcaggctggttgtacccatctgcctttctcttgcctcctacattgcccccacgattgccccgagatccacgggaaccacggcctctctgctgttgagcaggaccccctctgccacccctagagcctcttggtggtcccaaaggtgcccccctctgtgaatagccagctctacctcttggaggtggtgctcccctcccccttggtggtggtggagcacctcgccctccccttcctcctcctcttcctcttactgcatagccatcatcatagccgtagtagggatcttcatagcctccacgatagtcgtgataatcataaccatagtaatcatcatagtaatcttcatagccgtagtaatctggagggtagccatatccacctctccccccaccacgaccccgacctctaattggaggtggcatgcgaggaggagggtggtagtaataatcttcatacgcagtgcttctggaggcctgtctagcagcttgggcgctctttccttttcttgtctggtggcttggctaagactatttcaatttcttccccttctatttctttgccattcatttcatccatagccttaacagctgctcctctgtcttcaaaatgaacaaatgcataatctttcaacttctttactctttcgagttttccaaattcagaaaatgacttttccaatatttcttctgtcaccgtagtagccaagtttctcacaaacaaaacttttaccttagccatgacttctggatctggttcttccacagggtcagcccattcaactgtaactacatttccccacacttttacttttccactcatcagccggcgtctggcttgtgctgctgacttgtgatcctcatattcaaggaagcagaacccccgattcttctttttgtcatcgggttgatgatagagaataacgtccaccaaaccctctgtgactttactgaattcttccaaaatgttttctttagtcttattcttcggaatggatccaacaaaaagtctgttgtttgccacagaaatgcacactccaaggtgtttaccagggcgaatttcatagc

SEQ ID NO: 121782 - DNA, 1203 bp, Homo Sapiens
  misc_feature (907)..(908): n is a, c, g, or t
  misc_feature (1085)..(1085): n is a, c, g, or t
atcgtagagtacgttctgcattttatttttgcaggcaacactttgctcaccagcaagaacacagcccaaggaagggacccaataacctttcaaaacccaaactgcttcctgcggtgagggcccagggtcctccacggagaggacaggcatcttcctttcccaccaggaaggagtcagcccggagcctctgctatgtgcaaggcggtgtgcaagcaccggctgcggctctttgctgtctcttctttctctttggggctgggctgggtgtgcgttctggtgctgatgctttggcctgtgaggctgagcttggcacctcgacccgttcaattacagcaacgaagaagccactgctgagtgtggtctcaggggaggcccggaggcagtgctcggcacccgggaacgtgctcaggcctcggtggggccaggcaggcagggcgggagctagcctgaaggcgcccgggttctgctgcagcgcatctcgcaccacgtcttcattctcctcctggcagagggagcacgtggagtagacgagccgctgcagggaagggaaagtgagcgcgtggcacagggctcgctgctggaaccctgccagggcatgcagacgcaccgggctaggtgtgcctgccccgggctcctccagctgtctgctcggcatacccgagccactgcaggaaggatccagcaggatgtagtggacctcatggtagcgtggatccgagggggagaccgccaggaagtcctcctcagccagctcacagcaggagacgccagcccaggccagcagcgtggcccatggatgccagccgcttggcatccaggtcaaaggcaaagatcttcccttggttcttcagaagagcagccaagtgactggtctttattgcctggggtggcacaggcatcgatgacnnatgggagcctggcggggggtccagcagcatggctgggagacagctggccctgtcctgcagaatgaggtgtccggcccggtacagtgggtgttcatgcagatctgtctgggcgggaaacaccagcagctccggcatcaaggggtccaggagaaaatgcttccccttgagggcttgtanagtcatcgaggctgatgagatatcccacagatgtggaggggcaggccacccccctcgtgccgaattcgccacccaggcctcgctaccttagaaccgttatagttactggctcgttgct

SEQ ID NO: 121783 - DNA, 1105 bp, Homo Sapiens
  misc_feature (37)..(37): n is a, c, g, or t
aagccatttatcaggggctaagggttagcgaggcccntggcggcgtggtgtttaatatcggcacgagggctgttatgctgcagtctgcaggcgtgttggccggcgtggagagccgccaggctctatcaaggggttggtgtactccagcaacttccagaacgtgaagcagctgtacgcgctggtgtgcgaaacgcagcgctactccgccgtgctggatgctgtgatcgccagcgccggcctcctccgtgcggagaagaagctgcggccgcacctggccaaggtgctagtgtatgagttgttgttgggaaagggctttcgagggggtgggggccgatggaaggctctgttgggccggcaccaggcgaggctcaaggctgagttggctcggctcaaggttcatcggggtgtgagccggaatgaggacctgttggaagtgggatccaggcctggtccagcctcccagctgcctcgatttgtgcgtgtgaacactctcaagacctgctccgatgatgtagttgattatttcaagagacaaggtttctcctatcagggtcgggcttccagcctcgatgacttacgagccctcaaggggaagcattttctcctggaccccttgatgccggagctgctggtgtttcccgcccagacagatctgcatgaacacccactgtaccgggccggacacctcattctgcaggacagggccagctgtctcccagccatgctgctggacccccgccaggctcccgtgtccatcgatgcctgtgccgccccaggcgattaagaccagtcactttggctgtcttctgaagaaccaggggaagatctttggctctgacctggatgccagcggtgcttcatggccacgctgttgccgggctgacgtctctgctgtgactggtgaggaggcattccggcgggctccccctggtcacgctactgggtccctatccggtggatctcctgcagggcggtgtgcgcgcacagtgagggcccgggggccctacccggggttgtgccggcggtcgagctggcccgcctgcctccggggctccagtctccgggggaggggcgcgccccgccccctgcgcgcggggggccgcca

SEQ ID NO: 121784 - DNA, 1350 bp, Homo Sapiens
  misc_feature (118)..(118): n is a, c, g, or t
gtcgtgtgtgtggggggctagcggcgtagggaacagggcgcggggacgtgatagcatcgggaaggcggaccgcgggagcggcatgcgcggcgggtgcgatgcgggtcggcggggagtngcgcgggttgcgccgggcgggcgagaaagtgacgcggcgatggagtaagcggggagctcgtaggcagggagaggcgaaagtcgaggggggttggcccaggggctggcgcggctggagccctgggcaggggacggcaggcggcgccggggctagggtgggcttgcccccgggctcctccagccgtgtgctggggcataccggagccactgcaggaaggatccagcagggatgtagtggccctcatggtagcgtggatccgagggggagaccggcaggaagtctctcctcagccagttcacagcaagagacgccagcccgggccagcagcgtggccatggatgccagccgcttggcatccaggtcaaaggcaaagatcttcccttggttcttcagaagagcagccaagtgactggtcttattgcctggggcggcacaggcatcgatgacatgggagcctggcggggggtccagcagcatggctgggagacagctggccctgtcctgcagaatgaggtgtccggcccggtacagtgggtgttcatgcagatctgtctgggcgggaaacaccagcagctccggcatcaaggggtccaggagaaaatgcttccccttgagggctcgtaagtcatcgaggctggaagcccgaccctgataggagaaaccttgtctcttgaaataatcaactacatcatcggagcaggtcttgagagtgttcacacgcacaaatcgaggcagctgggaggctggaccaggcctggatcccacttccaacaggtcctcattccggctcacaccccgatgaaccttgagccgagccaactcagccttgagcctcgcctggtgccggcccaacagagccttccatcggcccccaccccctcgaaagccctttcccaacaacaactcatacactagcaccttggccaggtgcggccgcagcttcttctccgcacggaggaggccggcgctggcgatcacagcatccagcacggcggagtagcgctgcgtttcgcacaccagcgcgtacagctgcttcacgttctggaagttgctggagtacaccaaccccttgatagagccctggcggctctccacgccggccaacacgcctgcagctgcagcatacagccccatgttcccgcgcgcctttacggctctgtggcaaaacgccctcgtgccgaattcgccacccaggcctcgctaccttagagaccgttatagttacttggccg

SEQ ID NO: 121785 - DNA, 1086 bp, Homo Sapiens
  misc_feature (458)..(472): n is a, c, g, or t
  misc_feature (476)..(619): n is a, c, g, or t
tggtataagcgcacaaaaggggtgaaagaggaagtgtaaaaccggaaggagggggcgattggtatcatgggcgtcccaaatcccgctagtgggaggagcccattttgccgaaaagggtatcgatgcctttaacccacgtgggggaataaggggattcaaaggcgcggaagacacgcctgaaggcaaagagggtattgaattgccgtgggaggtgatgtgtaaaagggggcccggcacgcgggaaatggctagaaagagatccccgggggtagatgggtggcagataaaggggggggttccttgctcaaggcccacgccagggattaactgcgcagcaggattcgggacctggagtctcgtttcccaaccttagaccctttccccacagatgttcaccagtaggcctctgcacccaacttcttgccaacattaccctttcgtgggtgtgggtttggggnnnnnnnnnnnnnnnagannnnnnnnnnnnnnnnnnnnnnnnnnnnnnnnnnnnnnnnnnnnnnnnnnnnnnnnnnnnnnnnnnnnnnnnnnnnnnnnnnnnnnnnnnnnnnnnnnnnnnnnnnnnnnnnnnnnnnnnnnnnnnnnnnnnnnnnnnnnnnnntccttactgtctccgctactactactttgtacttcggttatttaatccttcaaaacactcgaagttaaagcattttcatcccatctcaattcgtaacccagggaaggtctgctcatactcatttcaggtgagcgacttgctccagtcccgccgtgcacggcagcggggctgaaaccagatgacaaagcgctgaccgtcggggttcacttccccgccccgcccctacccttggccaggtgcggctgcagcttcttcgcactgaggaggccggcgctggagatcacggcatccagcacggcggagtagcgctgcgtttcgcacaccagcgcgtacagctgcttcacgttctggaagttgctggagtacaccagccccttgatagagccctggcggctctccacgccggccagcacgcatgccaccgcagcgtacagccccatttcccgcatcccgggaattccggaccg

SEQ ID NO: 121786 - DNA, 1064 bp, Homo Sapiens
  misc_feature (198)..(198): n is a, c, g, or t
  misc_feature (238)..(238): n is a, c, g, or t
  misc_feature (291)..(291): n is a, c, g, or t
  misc_feature (301)..(301): n is a, c, g, or t
  misc_feature (411)..(411): n is a, c, g, or t
  misc_feature (503)..(503): n is a, c, g, or t
tcgaagcttttgtctaattgccaagggcgggttgcaaggccccgggttggcagctttttgctttcttcttttttctttgggggctgggctggggtgggcgttttgggtgctgatgcttggccctgggaggctgagctagagaaatttagatgttagaagtgccagtaccatcctgggcctccaaagcatgccccccanccattcacggttcgcatctggacccgttcaattacagcancgaagaagccaccgctaagcggtggtctgggggaagcccgggagggcagtgcntcggcacccncgggaacggttgctcaggcctcggtggggccgggcaggcagggcgggagctagcctgaaggcgcccgggttctgctgcagcgcatcttgtaccatgtcttcattctcctncctggcagagggagcacatggagtagacgagccgctgcagggaagggaaagtgagcgcgtggcacagggctcgctgctggaaccctgccagnggcatgcagacgcaccgggctaggtgtccctgccccgggctcctccagctgtctgctcggcatacccgagccactgcaggaaggatccagcaggacatagtggacctcacgatagcgcggatctaagggggagaccgccaggaagtcctcctcagccagctcacagcaggagacgccagcccaggccagcagcgtggccatggatgccagccgcctggcatccaggtcaaaggcaaagatcttcccttggttcttcagaagagcagccaagtgactggtctttattgcctggggtggcacaggcatccatgacatgggagcctggcgggggtccagcagcatggctgggagacagctggccctgtcctgcagaatgaggtgtccggcccggtacagtgggtgttcatgcagatctgtctgggcgggaaacaccagcagctccggcatcaaggggtccaggagaaaatgcttccccttgagggctcgtaagtcatcgaggctggaagttgctggagtacaccagccccttgatagagccctggcggctctccacgccggcca

SEQ ID NO: 121787 - DNA, 960 bp, Homo Sapiens
tttatcgtagagtacgttctgcattttatttctgcaggcaacacttttgctcaccagcaagaacacagcccgaggaagggacccaataacctttcaaaacgcaaactgctgcctgcggtgagggcccagggtcctccacggagaggacaggcatcttcctttcccaccaggaaggagtcagcctggagcctctgctatgtgcaaggcggtgtgcaagcaccggctgcggctctttgctgtctcttctttctctttggggctgggctgggtgtgcgttctggtgctgatgctttggcctgtgaggctgagctagagaagtgtagatgttagatgtgccagtaccatcctgcgcctcccaagcatgcccccactcactcacgtcggcatctcgacccgttcaattacagcaacgaagaagccaccgctaagcgtggtcttgggggaagcccggaggcagtgctcggcacccgggaacgtgctcaggcctcggtggggccgggcaggcagggcgggagctagcctgaaggcgcccgggttctgctgcagcgcatctggtaccatgtcttcattctcctcctggcagagggagcacatggagtagacgagccgctgcagggaagggaaagtgagcgcgtggcacagggctcgctgctggaaccctgccagggcatgcagacgcaccgggctaggtgtccctgccccgggatcctccagctgtctgctcggcatacctaaggaaaagcgtgtctcggttacacagcttcacaggctgcctcagtcctgaaatcctcgctcctgaaatccttgcctcacagaggagaacttttgctccagggtcccaagcccattaaagtgtcagaactaagaccataacagatgactccaggtctaagctgctgtggacctccgagtccctcagccacgccttctcaccatctcacccgagccactgcaggaagg

SEQ ID NO: 121788 - DNA, 970 bp, Homo Sapiens
  misc_feature (234)..(256): n is a, c, g, or t
  misc_feature (261)..(305): n is a, c, g, or t
  misc_feature (741)..(779): n is a, c, g, or t
tttttttcttgaatgtgcttcgcaagccaggctatcttccaaggaaggcagacagtgggagagcagagggactgactgcaggcaagcacattgaagaaagacactggcgggtttccccaccctcaccccaaagcagaaaactagcagacgtcagctcagccccgtcctgggcacagacactacacaaggagacgctggaagttaagcaatactttaatactgtaatatgttggnnnnnnnnnnnnnnnnnnnnnnnctacnnnnnnnnnnnnnnnnnnnnnnnnnnnnnnnnnnnnnnnnnnnnntccatccctcttgtcggggacctgcaggggggcaaccttaatccaaacacctggctatcaaataatcagaatgtattgtctcagacaggatttcagttccgggaggcaggggcatgatgggggagggggccggaggctgagagacaaaagttccagagcctccctcgaaggttctctactactgtattctgtacataatgtaccatcccatgtggaatctgtgagtgtcctcttaagtagcgtgggctagccaatctgccgttcatggtgtattgtaaactccgaattccatatgtaataggatgcaagtctaagcgtttcatgtggacataaatgtatctaaataaaactttccctagcactgtggctgacctcacccttacttttatactttagtatgaaactgatgagaactttggtagtgagtatttttttnnnnnnnnnnnnnnnnnnnnnnnnnnnnnnnnnnnnnnnctcaagcatctttcaggtctttgtgtgtggctttcttaaagccctgttgtaaaaaattactatgtggatggcagtctctcacatcacagatgtggaaagtataattttatatttgtattttcaaataaataagtttgtgaaaggtttccatcctctactgtggtccagaaatcaatgtgtttgtctgacaa

SEQ ID NO: 121789 - DNA, 2812 bp, Homo Sapiens
tttgtcatttttataatatttattaagataacaaatttataaattgaaagactcagaggcacatagtttaaaaggccaataccatgggaataatgaagtcaacacagaaaagtaagaagatatgaacagttacaaccaatagaagattttctttaaaagccacattcccctggtgaacacatcataggaatcatccttcaaaattaccatgataaaaagttatttccttcaaagaaaaataattctttctgcctaccgagcctagaaaatcctatttacaatgcagtgtcctgcctttcatcagtattatttaatatggcctcctctattctgccattagaagtatggaaaattttatagctactgtatttacaaatgcacataatatttaaatttgctcttcattgagaacaaccaaatatatacttaatcaaatcacaatacaaatgctttatagtgttgaagacacatcttatgggggaaaggtgtatgggaagaggtttatttagaattacggtgtttctgaaggattactaggccaataattctgataaaactcaaggcagtcacaaaaacaggtctttgttgatgaagagtttaatttatttctgttttaactggacacactggacttcttcagtcaaccttcaccacactgtatattttggtaacaaaccaaaagcatgcaaagaagccaattgttcctgtaaaaagaaagaagatcaaaaccattatcatggtataaccaaagtacagaattgtgcttgctgttcccgtgatctgcagttttgaaaagaagtagtgtactgcatagattaagaaataaactgcagtaaagccactcgtaaggaatgaacgccattgccaatgataatcctctgcacataggtggaaatagcaaagaagtatagttgcttcagaacaggtaataaccaaaatgataaacaccagaaataggaagccaaacatgtaatacatctggtgtgaccaaatactattcagaatgaagaaaagttgtataaagatgcagccaaagggcaaaatccctcccatgataataccaggcaagggcttcgtgtagaacgactgttcaggaatctgacgtggaatctgattggttcgaactgggtgttcaatggcattcttcttaaaaccaaagtatgcaccaataaacgtcagaggcacagatatgcagaaccaaagggccaatatggcaaccagtgtcccaaaaggaatagctgctgaagatccttctccccagaggatcagattcattataaagaagtcagcaaatacaatcccaggacaaagaaatgatgttaataaaacatttgttttccacttctcacctccaaaggacttatagaatctggcagcaacatagcctgcaggggtgcccagcagcacccacaggaccacagcacacgtcatcagcgctcctcggttggcaggtgacaaaaatcccaggcaagcgaaaaatagagtcacaaaggtcataattaaaatctgtgtcccggatcctagaaagactgatagcagcatcccttttcttggaggacggaatatatcaccatgaacaagtttccagccaaattcttcctgggcatcttccgtagagtccatctgattatatctagcaatatctttgtgcagtgtccgtaacataatcatagctaccattccagataagaagagaacaatgaccagggaattcataatgctaaaccactgaatgtgggtatgaggcatagactccagaatatagtcccatctagacgcccatctgatcttatcatcttcctcgaagctaacagagtaagtataggcaatttttatctccccagaagccttgttacttatgtccatggggggccctgagcagtctggtttatctatatgggtatgtttgaagcttttcggttcaagtttagcagccactaatcttgctcccatggacccagtttcaacaacatgatagtatattttgatgtcaacatggttgaagatgtaaaatgtatctctttcatggaaatctgaactaataacacaggcatcttttgcatggcctttatctgtaatgtaacagccaataggaaatccaggattacagaacctctgaccatcttcaacatcgtaacaccacgttacaggcatattatccacaatccagtgatgttgataattcaataacatgctttttttcaagaattctaacttttgtttgtcttcagctttctctgtatggtatgtttttgtacaaacaagcttacaggtctccttcttattaaacgtaaacttatatggtgaaggttcaattctttccccgaatagtacctgaccaagattttcagatgggcgctttccttctgatgcttggcaaaaatcaaacgctgtgtattcataaggaagaactgattccactgaatcaagtctgttcacaaatagttctatttcggccttgcactcgtcgctctttttttcttcgtcgcagaagttgacgggcgccaggccgggcaggtagaaagcgccgctccggcgcgggccaggaaccgcccccagcaggagcagcgacagcagcaacagccgcggccaccgaggtggagacaacaccggcagcctcgcgctcatgatagttgtttcggggaaagggcaatcaaacctagggggtcaagagggaaggaggggtggggagtctcggagacgactacaaggccgccagagataaaggaagccggcccccagaaggctagttccggttgcgctaggagacaccccgggtcccgcaacagaaaccgaagcggaccgcaacccc

SEQ ID NO: 121790 - DNA, 496 bp, Homo Sapiens
gggcacaaaacacaaattacatgctttattagtatgttctgtggtaacctcaaaaccacaagtgtttacatgcgctgcacacatgcatctttggggctttttaatagcgggttgacaagagattaaaggcagaaatatggcattttattaaagcaaacatatcagcatgcctaccatgataaaatgatctagttttcttcagacaccgaaagtttctgttgagtgatacctttgcaattccttgagggcaccctattattcactttcctcaacagagagcagctgcaaatggcctccaattttcaaagagtgttgcctggtcattctttacaagaatgattttgatgaaaaatgatatagttggggtcaacaagaccgctctttgaggctgccgaatgttttccacaccgcagttttagagctattggagaagcctccatcgtgtcatcctcagaaagccatcaccagggctgtgtcctacttagaaccctcgtgc

SEQ ID NO: 121791 - DNA, 840 bp, Homo Sapiens
  misc_feature (71)..(127): n is a, c, g, or t
cttgttgttcttcttcttggcattcttgctgtcgccctgactgccctcagtggtttcactggctgcagtgnnnnnnnnnnnnnnnnnnnnnnnnnnnnnnnnnnnnnnnnnnnnnnnnnnnnnnnnnaacacattgggccagaaatcaccttcaaaatagggcagttccttggcactggtgagcctgtcttcagttgcttgtttgaaaatatctttgtagtcatggatgatccgctctgcaaacgccttgtccagcatctttttgtaccactcctgcagtcgttttggcttgggtattttttgatcaggtgggtggcaatggaagatgtaatcatctccttcacttggaggacaggcccagatgtgccctgtcacataccctaatttcttcacatactctaaatatccaataaggatctcatggtaaacggctgtgcggaggcaacgtggccggaagaaatgaatactatccagataagaaatgtacacacgcctcgtgtttggaggggggcaatcagagccgtattcttggacgtgcattccaaaaaagcagacatccacgccgtcaatttcctcaaaagcaaacagagctttggttcgatatgggaaagattcagacatttccccagaatccacaaaccgtgacttcatcccgggcttgacctccaccgtcttgtctgagctggccaccactcggacaaaaacctccccggcttcagggtgattctggcgccgcaaaattttgttcactcggtcttccaagtggtttcccagtcttgtggtctgcagcctcttagcactgaatttgttttcttttcgaggtctgccagttttcttccc

SEQ ID NO: 121792 - DNA, 758 bp, Homo Sapiens
  misc_feature (727)..(727): n is a, c, g, or t
tttgcttaggctaaaaaagtttataaaaagcttcaccttgattccattatgacttcttattattcagtttcccgcctgtacctactcattatgaactacagtactggtgtcacttattcgttatcatatttcttcatatctttgcagcactgcagatgacaatctacgaagaacaagttacacagcaaaatatcagtccataaaatgaaatccttccttatttaggttagctcagtgattaaggatcttcttccatatcatctggattaggagccataatgaagtgctttgggtatacaaggttatgtgtgtatgcatgtatttcccagcgagcatcatcactttcatgtgtaatgtaacgttctccaatgcgagtttcaaattctctaaggtcaagccaagtctgatagtcctgtagccagggatgactaagagatttgtcaacactgtaacgttttctcatcttcacttgaagcagattgtttatcagatcaattgcttcaccagaaatttctctccatggatttggtgggtacataaatgcagcattttggatttggtcatttatatcttcatcctcattaaaaggaaatgtgccactggggctcacatagatgataacttccactgaccacatatctagggaacggttgtaacctttgctccggagaacttcaggggctaagtatgctggagttcctacacagatctcctgaatgacttttcnacaatgatgcgtgcaatccaaatcacacagc

SEQ ID NO: 121793 - DNA, 1317 bp, Homo Sapiens
  misc_feature (752)..(763): n is a, c, g, or t
  misc_feature (1103)..(1124): n is a, c, g, or t
  misc_feature (1204)..(1238): n is a, c, g, or t
tttttgaaatcatttgttcatttattcattgacttgtcaaattcagttttctatacactatgatgtttattccattttgtactattagatatacatatttaaaaaattatttaacttatttttatgaagaaattaaatattttctgaaaaagaattgttttattattgttctctagcaacaaacctcaaacaattctcatccaactcaactaactcatttaaataactttgctcaatggcaacttctctaaagatctagtttacacaattctattctacataacactgtttaccctgttacatagtatatagttaaagaacatttttgtaataaacatgtttctctttgatatgatacataacaatattttcacacttcccagcaatcactcaaatatattaaaaatgtatccttctttaaaaggcacacacatttacaggttcaaatctttattgttttaaaattgtacagttcttttacaatacaatattttgttatttaaatgacctctaaatggttaatgtgcaatgaatatcttttgttctgaaactcaaccatgaattacgatttcatcaatatgattattctagagtcataaagatgttgggaaggtttgagtctgcatttgaaatggttagtagcacagactcttccctttagaacccagatgaccaatccactgaaagtgcttttgaagattgctgattacttatggctgatcttaaaatcagtcaatcaaattacagttccnnnnnnnnnnnngaaacatcaaagggcatttaaaaaaactgaaacaatttgctttagtatctactgaggcaaactcaaaatgattatcagcatgcaataacactcctctttattttaaatagttctgaataatttatacatgtttataaagaatgtgttaaagagtgcaagtattcgtgatactgatttcacaaaaggacaaatgctggtaataataacatttaacatctaagttcaagctagtgtatatttaacaggcaattaatatggctcatcataagccacaatgcacaaggtatgccctttgagaaaatgaagtagtttggtccgcatttttagagttgtctgggtnnnnnnnnnnnnnnnnnnnnnncatgtcggcccgcctcggccctctagaatcccggccgtaatggccgaattcccgggcatatgtccggtaccgtcgactgnnnnnnnnnnnnnnnnnnnnnnnnnnnnnnnnnnncgccgcttcctcgctcaactactccgctgcgctcgtcgttcggctacaacgaggctagcgccctatagtgatctatcat

SEQ ID NO: 121794 - DNA, 562 bp, Homo Sapiens
  misc_feature (72)..(106): n is a, c, g, or t
  misc_feature (186)..(210): n is a, c, g, or t
atctgactatatgggcgtacgtgtttcagcgaacgacgagcgcggcgaagtagtgagcgaggaagcggccgnnnnnnnnnnnnnnnnnnnnnnnnnnnnnnnnnnncagtcgacggtaccggacatatgcccgggaattcggccattacggccgggattctagagggccgaggcgggccgacatgnnnnnnnnnnnnnnnnnnnnnnnnnacccagacaactctagaaaatgcggaccaaactacattcattttctcaaagggcataccttgtgcattgtgggcttatgatgagccatattaattggcctggttaaatatacactagcttgaacttagatgttaacatgttattattaccaagcattgtgtcctttgtgtgaaatcagtatcagaatacttgcaactctttaacacattctttatacaaatgtattaattattcagaactatttaacaataaagaggagtggttatggcatgctgataatcatttggagttggcctcagtagatactaaagcaaatttgttctcagtttttttaaatgccctttgatgtttc

SEQ ID NO: 121795 - DNA, 903 bp, Homo Sapiens
  misc_feature (785)..(819): n is a, c, g, or t
  misc_feature (822)..(861): n is a, c, g, or t
gatgtgtggtgacaagaccaaaagtgtggtgaggagaagacctcctgaatgggttgatggcgcacacgaaaatctgtgtggttctggcaagctccacccctggagtacgaattgtcatcccataaagattagtctagagtcataagagatgtctgggaaggttgaatctgcaattgaaaaggttaaataggccccagactctgtccccttaggacgcccgatggagccataccctggaagtgcttttgaagattctgattacttatggccggatcttgaaatccggccatccgaattcaccgggtccctgttgtttggttttgaaacatccaagggcatttaaaaaaactggaacgatttgctttagtatctactgaggccaactccaaatgattatcagcatgccaatacactcctctttattttaaatagttctgaataattgatacattttataaagaatgtggttaaagagtgcaagtattctgatgactgatttcacctaaaggaccaatgctggtaataatgacatgttaacatctaagttgcacagctagtgtatattgtaacaggcgcattaatgatggctcatcataatgccagccatgcacaaggtatgccctgttgagaaaatgaagtagtttggtccgcactgttttagagttgtcctgggtaaaaacatcataacctacaagacaaagtaaacatgtcggcccgcctcggccctctagaatcccggccgtaatggccgaattcccgggcatatgtccggtaccgtcgactgnnnnnnnnnnnnnnnnnnnnnnnnnnnnnnnnnnncgnnnnnnnnnnnnnnnnnnnnnnnnnnnnnnnnnnnnnnnnctaagaaagccgcgaagcccctatagtgagtctatcagtctt

SEQ ID NO: 121796 - DNA, 653 bp, Homo Sapiens
tttcctattagattcatctgtatatggttgtttctcaaaactcagagggtaataaaggaggaggcaagatagagggtttttattgaaagtaggttatgcaaacttggcttgaaaggtacttatcattttaaaaattatgcctaatgatgcatcaaatacaaaaacatataatacatcaatagtcaaccctttccccataaaggcaaagttactgagaaatgtttatttttcctctggtaatggctaatccaggtaataatatgaaagcaaatggaaaattcacattgcttctttcattgcttctgtcccttaaacctgttaatctttcagaaccacattactgaggtgctggcctgtgcatggaaacccaatgatatccaggtcttacaggtccagggcccagtggacagacaggccctggtcctccacgctggccaccatgtcttcgatggcattccagtccagcttgctgaggatgctgccagtgctctcagacacgctgtccacaccgcccaccccaaaaggatgctctggctcttcctcttcagttggagacaagtcttgtagaagggaattgtgactctcatgaagaatcttatggatttctgaaggtatcgtccagggactcaccacagtctcctctctcctcgtgc

SEQ ID NO: 121797 - DNA, 665 bp, Homo Sapiens
  misc_feature (546)..(562): n is a, c, g, or t
gcacgaggtttttttggggatttcccaatgattttattgaggtaacttttcccaattttatacatatatgcatttatatatacttaggaaagctaaacaatgttctaaggcacttggaattgtgcacagcaaagtatcctctaatattatacaactaaatagagcagaattttgctttttaaataacacaaataccagtacggaattaaaaaagggaatacatagtctttctttcaggttacaatagtggaatacaagtacatatgtgtgtatacttgtagatatttatacccacatactataatacagtacagataagaacaacaaaagagaaactgtcatgttaatcagtgtacagttccagttatttacactcacagatattacacctgtgtaatacgtagaactagatcactcactggaaatcagaaagcattcagtcagtctgataatgatcacagtttaccattgttatcactttaactgaagtgtgaaataacaaaagaatgcatatagtccgttatttaaaaatccctgttacacagnnnnnnnnnnnnnnnnngaaacttgtttgaatttttaataggtcctaaatctggtgaaattggtgtaaatgttttgaacacactggcacatttctaagccacagaagaaatgtttttttt

SEQ ID NO: 121798 - DNA, 856 bp, Homo Sapiens
  misc_feature (592)..(619): n is a, c, g, or t
ttttttatagatgtaaaatattttatttgtaaatggtgatcttctaaatctgtgtccacaaattccaaaacccataacactctgtatacttcaaaaaattcaatttttgccaacattagatactattatacagaacagaaaacaacaaaaacccggtaggacaaatactggtaggatgtcaggatattgtacaagagaagaaaaatattcaggaaacaaatttcatacagctatttatcaagagaaaaatatatacaattgatttattctgtaagataaaaatacatcatgccatatacaagttcagaactgcatcactgaatataccaacagtttacagtccacttgaattgtgcacacaaaacttcattttatacttagcctgtgaagtgtcagtaccagaattttaagtacaaaataaaaagctaacctggttcaaaatgctgattaagtttctacaagcaaacacaaaacagtgttttttttattaaagaaatgtaaacaaacagttcatacaaacacattttaaaattacatcttccaaaaaccctattgccagagtcctgcagctgtaagcataatcacatctccnnnnnnnnnnnnnnnnnnnnnnnnnnnngtgttaaatagaaggctaaagggttagatttaagtttctgctacatgatcctattacgtttacatgattctctgtggctgaaacaaagttctaatcaaaactacttttgctgaagaaaaaattcagcctccatttgggtgtatttttaagcagttattcacagttatcacaaattgtaagcacaaaaaaacctgactgaagaagtagggatgcaacaatataatatgaaaaaattag

SEQ ID NO: 121799 - DNA, 1133 bp, Homo Sapiens
attaaagaaatgtaaacaaacaggtcatacgaacacaatgttgtaaaagtgacatcttccgagaaccctattgccagagtcctgcagctgtaagcataatcacatctccttgttttgttttaactttttcaaatttttgtgttaaatagaaggctaaagggttagatttaagtttctgctacatgatcctattacgtttacatgattctctgtggctgaaacaaagttctaatcaaaactacttttgctgaagaaaaaattcagcctccatttgggtgtatttttaagcagttattcacagttatcacaaattgtaagcacaaaaaaacctgactgaagaagtagggatgcaacaatataatatgaaaaaattagtttaaattaccaaaacagctataaaagttgtagtcgtagcatacgccccgctctgtcagaagtaaggtgtataaaaccattgagtactaatagactgcggtttccaaaaaacccccaacactctaggttgaaattttggttattacataattataatggcatattttataacacaaaattatattgtaacatccctatgaacattttataagcccccgagctgctgcagagcctggtagcatttggtcaataactatttttatactgtattttttctcaaaatatttacatatctgtacaaagtaacagggtttgttagttctgcaggtaacagcagcagcttggctttcttctaactttatttaaaaatagcttcattcacttattcaataataaatacaaaagtttctcttattttacagaaatcaaaaactacaataaactgactcatggaatcaagtatttaaatgtatttagtgcaagttattatcccttagctctatccctaaggaagtcatttcagtacattccttgttcagtggtgtctactttatttaaaaacattttgaagttagagggcctgcccctttttaataaggccgtggccagcactctctgtccccctcgctggtgatttcagtcttacattcataggaaggcccctgcccggggcagggcagccatcggctctttgccccagtaaaagtttctccttagtgagactagaaaaccaaaacaatgaaacccacccacagggg

SEQ ID NO: 121800 - DNA, 1083 bp, Homo Sapiens
aaggtggacaatgactttattttctttacgtaagttttatattttattatgacattcattttttctacatgaagacacaaataaaaattataccaactacataaactattttgtactttccttgctaaaccacagatgtatttcatggaaagaggggcctttaaaggcacttatttatcattgtaggtgtgtctaaacaattgatattcaaaaacacaactttttgtgtacaaaattttacaatttttaacaaaagcagtgaagacactaaataacccagtggcgacctcttcaaagtgcagtgtccttggtcaccaatgcagatgctactggggcagccagcgggctcagagggtccaactccagacactgcatccatggctgtcctagactgagttgcacttgtaaaagagatggtcccacacctactaaaaaaacaagctactctagtatcaatatgacatcactcttttaccatcaatcatattgcaaaaccatagtatttaacgaccaataaacagccaaatacctaatgccacattgtcgttcaatttacctggctggttaatatcagtctgtgtttgagtatttcttttgagcacacaaaaacaaatgtatagtcacttgatgaggaaattcttcactttgactcaaatggattcaccatgctgtcagttatgaaaacaactctaattttaatctccacagggcaaccttcacttttcacagcagttctaaaactgacctacagaaaagttcaagattttttaaaaaatttggctaccatactatgtttcttatttaattttctctaatcaatactactcttacgttccaaatatttcatgggaaatttttccctcaaacttaatatgtttcttaaacaaattgaagccactaaagttcctgtttaaaccactgataactgccccagttaaaataataataatttaatatgattacacttcaaataaaggtactaaaatcacgccccccaaatttgtaagcgcttttgttgttattgggtactcactgtgaatagaagtaaatgtacttgacctgtatgagaataaacattttatc

SEQ ID NO: 121801 - DNA, 1279 bp, Homo Sapiens
  misc_feature (50)..(50): n is a, c, g, or t
  misc_feature (95)..(95): n is a, c, g, or t
  misc_feature (314)..(314): n is a, c, g, or t
tagttactatctagcgggcgtatgatgtaatcttctcaggagcgctgganatacatgggtgagatagatataagtatgtgaatgctgcgaggganggaaggagggggagtgttaatataaccgcgtgggtcgtctggagagcgcgtgctggttcaaaataagggtaggacgctgggcaaagggcaggtggagaaggatgagaggactgggagttacggatgcagcgtgggttgtgttggattgtgaatatagggagggtgacatggtggtcgattcagtaatccggggtaagagtcaggtcagaggaaaaaggngagaagggtaggtgatgaaggggaggaggagggagaagtgtatagcgcgtgagggtgaagggcatgtactggagaaagtgtagaagtgcagaggggagaggagctgaggcagcatcgtgaaaggttgtatatggatatgaggggggaaggtgtgagcagaggatagggaggcggtgaggttctgcgtcgggcgagggggtgtggataagtacaggagagcgaggaagcagggaaggtagtgtgggagcgcgagggtgggggggaggaggaggtggaatacagaatggcagggctgaataaggggaaggaagaggggtgaaaaggggagaaagcagggagggagggagagcaggaagacgagcggagggctgtagagaaaagttagtgagaggtacagtacaagcgtatgagcgagtctgtctaataaaaacagtagaaccaggctcaagtgcacaccctgtgttacaaacacatcacatatcaggattataaatcatagaaataaagacaaataatggcatgaagggcatgatagtttatttttaaaaattgtaccacactgatcatgatgaccagcatacacatgataatggcttttctcttgggtttaacattgcagtagttttgcatactgcaatgtttcaataggaccaagaacgttagagaataaagatcttagatgaaaatgaacactaataattctagtgtcctcccccatagaattaatgtaaatcccgtatgaatcagtggcattataatgttatgtggttatgaagaatgaaatttctcttagaagtaggcagcatgaatttatacttacataagtataacttatacttccttgtactttcatctttagtttttataatttaagctatgtccaccctggctaaagtacaatcatacaatataccctcagataatttccatggctaccattgcacaagtttagtgattttactatt

SEQ ID NO: 121802 - DNA, 1193 bp, Homo Sapiens
gaatgggcagcaagcaattccgggccccccctgagggggaggggttgaaatacattggacgggatccaggatcttcaaactgggggattttacccttttgggtttcatccggcatcttttgcaggcccatagtgagagggttcttaccaggttcacccattataagccccatgttcttggccatatgattggccagaggccacccatttattggccctgttcgatgaagtggcgcacagccccaggcatccttatccacccatcacccactggcaaagccttggtagggcatgtcaaagacgcaaaagagattccttttcttccccactgttgctatttccttccactgttccggacgcgggtccactcccgtgggattgtgggcgcaggcatgcagaagaagaacactctgctctggtatttttgaaatatcctccacagcgcctgtgaagtcaaaaccgcaagtcttggggtcataataccgataaccttgtagctgcatgccagcatccctgaagatgggtgtgtggtttccccaggttggtttgggcagaaagacatctcggctgaacttaaaaaatctttgcagaaaactggctccgatccttaaggctccagttccagaaatggtctgcacagtgacaaaccggccactcttcaagacttcgctgttctcacccagggctagttctgcagatgccttgcaaaattcagccagtcccccaatgggcaggtattccttgtccaaattttttgcggcaatctgggcctctgccttgcggacgctaggcagcacgtaaggctttccgttatcatcccggtaggcaccaactcccagattcatctttttgctattggtgtccctcttaaaggcttcagtgactcccagaatgggatctggaggtcccatttccacatgggtccaccaggagctggctctggcagaggccgcggcggcgaggcccgggtggaaggcggcggcgatcccggggaggacgcggccggagtgcagcagggccatggtggaccgtaggagggcagtgggcagccgcaggacggagcagagggcgagcggacacacacacagggaaccggctcctgcggacgcgtgggtcgacgatatcccgggaattccgacgcagtacagcctgctttttgtaaactgttcatagtcacaaatgttgtggggggtc

SEQ ID NO: 121803 - DNA, 2777 bp, Homo Sapiens
  misc_feature (82)..(82): n is a, c, g, or t
  misc_feature (100)..(100): n is a, c, g, or t
  misc_feature (395)..(427): n is a, c, g, or t
  misc_feature (465)..(474): n is a, c, g, or t
  misc_feature (494)..(524): n is a, c, g, or t
  misc_feature (622)..(637): n is a, c, g, or t
  misc_feature (648)..(692): n is a, c, g, or t
  misc_feature (706)..(706): n is a, c, g, or t
  misc_feature (712)..(804): n is a, c, g, or t
ctcctcccacacacgcagtatctacacacacacgcgggggggcggagaatatatttattctgtctgccgacagatggggggngtcagtaacgtttctttncctcccctctgtgggggcgcggggttcttccccgtttttctccctcaaccacagacctttttttaagagaggtatttctcccccacatttggttcggcaggaaaggggttcgtaagcggaggggcgggggcgccgaagttttctttgttatataaaagggtgcgccccgcgggcgggcggcccctctttttatttttatatattccgccgggggttgggccgccggcaaagacccctctcgtttgggaggagtgttcgtttataaaaaacacccccccgggggtttctcccgccnnnnnnnnnnnnnnnnnnnnnnnnnnnnnnnnnaggagacccaccccccccggaagttttcttttttcttnnnnnnnnnncccgccggaaacacccttannnnnnnnnnnnnnnnnnnnnnnnnnnnnnngggtgggggcgcccggcgccccccattggaaatattttttttaaaggggcctcttccgggcccaaagaagaggggtcacaaaaaaatatttttttgtnnnnnnnnnnnnnnnnccacacaaaannnnnnnnnnnnnnnnnnnnnnnnnnnnnnnnnnnnnnnnnnnnnctcccctcttcccncccacnnnnnnnnnnnnnnnnnnnnnnnnnnnnnnnnnnnnnnnnnnnnnnnnnnnnnnnnnnnnnnnnnnnnnnnnnnnnnnnnnnnnnnnnnnnnngggtctacagtaattttattgtaacagagaaaccaggccgcaataagtctacatggttagagcagatggtggttctttccagtgggtgaagcctgaacccagctagcagcacgcaaagcctagaatatcctctttcctggtaccaccctgcgccgctggactcacagtgtgagatgagaggctgcacaccacattcaacaaagggaggaggtccaaccgggcagagacaacatcccaactggagaaacttgcactatcattcaagaggatgccgagataaagtacagtttcctactctccactattctttgctgaaaagggtgagggtacggcatcagcagaaaattatgttcttcattcttaaataaatctcgataggatggagttgatggtcaatcaagcagtagaatgggatgaaaatctgcaatagttaaaaaatctttgcgtgtaaggaaaagaacggcaatgacaagggagaaaagagagccttctctttttcttaaataagacaggaaactgcattatttcccttgctggagtggcagcagcctcattggttttcataaaacatcatttctgcagtgcggcctgttgataaggttgttccaagatgggaggacagacacgaggccgactactcatgacagaactaggccttctctcaaagcctctaacgtgtgctgtttctcacgaggaacctgacacttcagttaaagcttctgaaatattgcaatggcataattgacaggttttttggtgcgatgactttcttgcacatgtaaactctttgagaaaagttggagaaaaaaggaccggggagagtttggtttaatattccagacgccagccatggatgcctctgccctgtgtcactacatgttcttttctgagaaacattcaaatgctgagtgttacacactgtggctgaaagaaatgatccactcaccaccatccaccctctctcattgtctgtgtgaagctctcaatagcagaggctgaagacagaaaggttgtctctgtttcctcgcaccagggacattacttggtgacctggtgaatggcatgggcaaggtagcccacgttgctggaggtgacccctgccacagagatgcggccatcttttgtcatgtagatggagaactccttgatcagccgctccacctgttcaggctttagccctgtgaaacagaacatgccaatttggtcggtgatgtgttgccaattgtgggtggaaccctccttcttgaggttggagaccagttgagtccgcatgccaatgatgcggtcagccatgcctttcacttcttgcagccattgttttcgcaaatctggggtgttcagaatggcagcagcaatccgggccccattgaggggagggttggaatacatgggacggatcaagatcttcaactgtgactctacccttttggcttcatccgcatctttgcagaccatagtgaaggctcctacacgctcaccatataagcccatgttcttggcatatgattggcagagacaaacattaatgccctgttcgatgaagtggcgcacagcccaggcatccttatcaccatcaccactggcaaagccttggtaggccatgtcaaagaacgcaaagagattccttttcttcaccactgttgctatttccttccactgttccggacgcgggtccactcccgtgggattgtgggcgcaggcatgcagaagaagaacactctgctctggtatttttgaaatatcctccacagcgcctgtgaagtcaaaaccgcaagtcttggggtcataataccgataaccttgtagctgcatgccagcatccctgaagatgggtgtgtggtttccccaggttggtttgggcagaaagacatctcggctgaacttaaaaaatctttgcagaaaactggctccgatccttaaggctccagttccagcctcgtgccgaattaacacccagcctcgacctagcgtat

SEQ ID NO: 121804 - DNA, 1373 bp, Homo Sapiens
tccaaggtagcgaggcctgggtggcgaattcggcacgagggtccgctcgccctctgctccgtcctgcggctgcccactgccctcctacggtccaccatggccctgctgcactccggccgcgtcctccccgggatcgccgccgccttccacccgggcctcgccgccgcggcctctgccagagccagctcctggtggacccatgtggaaatgggacctccagatcccattctgggagtcactgaagcctttaagagggacaccaatagcaaaaagatgaatctgggagttggtgcctaccgggatgataacggaaagccttacgtgctgcctagcgtccgcaaggcagaggcccagattgccgcaaaaaatttggacaaggaatacctgcccattgggggactggctgaattttgcaaggcatctgcagaactagccctgggtgagaacagcgaagtcttgaagagtggccggtttgtcactgtgcagaccatttctggaactggagccttaaggatcggagccagttttctgcaaagattttttaagttcagccgagatgtctttctgcccaaaccaacctggggaaaccacacacccatcttcagggatgctggcatgcagctacaaggttatcggtattatgaccccaagacttgcggttttgacttcacaggcgctgtggaggatatttcaaaaataccagagcagagtgttcttcttctgcatgcctgcgcccacaatcccacgggagtggacccgcgtccggaacagtggaaggaaatagcaacagtggtgaagaaaaggaatctctttgcgttctttgacatggcctaccaaggctttgccagtggtgatggtgataaggatgcctgggctgtgcgccacttcatcgaacagggcattaatgtttgtctctgccaatcatatgccaagaacatgggcttatatggtgagcgtgtaggagccttcactatggtctgcaaagatgcggatgaagccaaaagggtagagtcacagttgaagatcttgatccgtcccatgtattccaaccctcccctcaatggggcccggattgctgctggcattctgaacaccccagatttgcgaaaacaatggctgcaagaagtgaaagtcatggctgaccgcatcattggcatgcggactcaactggtcttccaccctcagaagaggtttcacccacattgcacactcacgaccaatgggctgttctgttcccggtaagcctgacaagggagggtggtcaagagttcctctctgagaaaatgcggttctgtgcggggccccccacgggtactgccgctcccaggcccgttgtctggcgggcagacactctttttctcttttagccccca

SEQ ID NO: 121805 - DNA, 660 bp, Homo Sapiens
tttttaatgtttaaaaggtttttattaaattatacaaaaacaggcagttagaaattgtgttttcttcctgccccattgacatttctaaggccctaatgcatttgttctgaggtttgacagttgaagcccttcaccagtgctagggaaataaagcctcctcaaccttaaggatttcagtgataagagtctgaaagtctagcacttcaggtagactttggatgaactaagaggttccacagtcaccctgtcatataactgtctgacagaaataggggatgaggtctataaaatggaaagggtggtatttcgtttttattggtaatgaatgatttggaatagaagcatacagaactgcaaatttcaaggacgttagtgtacatggcctggcctttgaaatacaaggagaaagttgggtgcagaagaaataggagaaaactacaataatttctgcctcattgagtctgtgaagtagacccacttatggcacatacgttcctgtcttagaggcctggaactagcagatctcgtggaaagagttctttcccatggaaatgacaacacaggcaggtcatttgagtggaggcttaaaattcctcaagatactggatcagggtaaaagctgctccttatattccagatgagaatgtgtatggtgtgttc

SEQ ID NO: 121806 - DNA, 1253 bp, Homo Sapiens
tgttttgtcttcctttattacatttttgcttttgagatacaaaccaacctctcataccacacaaagaacatccattcttgggatttttaaagtgcatttccccttgaactctgtgtacaaaaatatttatcttttaaaacatgcaaaaatttcttgacaaggcacttttaggtataaaatgaagatgagtccttggttctacattcacactgaagtaatagtgaaacatcatcacagctgcactctcaaagccctcagaggtccagcagtctctaaaaactcgtcaacaagactaaaaacattcacggctttacaatgtgggttacagagctttacaaccatgaccaggaaaaactgctcgtaacaacagctgtccttcccagttccacatgtgttgtctcactgcaggaaattaagataagctgccaaattgtctttgtgtgaccctataagatcccatcatccatgtaacttcttgtctccgatttcagtgaacatgtcaggagagacgtgatcgggactctcccaggactacattcaggtgagaaattttagaagaggaaacaaataaaaggcaaccaaggttttcatcccctatccattgagagggaagatccagaaaatgggcagttccaaaaaaggaacacttttttgattgataagcatatatggcccatttaatgtccatgactacaactaatgccttttttcaaaaagaaaatggtttgaaaagatcaaaaccacggagcaatctcctaacagttccaaatttacatcttctaagaatgtataattttgccaccattaaaatgaaatcttaaaggtaaattaaattctcccattgactctgacattgttttaatttctggagaactgtacagcttcattatttctcaccagctccagtagaataattttttaaataaagaaacccactcaaatgcttcatgtcttccaatagatactgaaagcttatttattaaatatctttgtataatccagcttatttattgtacccagtttgcaaatgctcctcagggcacttgagggaataaatataaaacaaaaatgaagttgcttccctattgccggacaactgcacctgtgacaggtggctggtctttctggggcaacctgggaaagattctgggactcgggggccacttgttaccataaccaagagctgtctgaaggcaaatctaccccggccgtaatggccgaattcccgggcatatgtccggtaccgtcgactg

SEQ ID NO: 121807 - DNA, 941 bp, Homo Sapiens
tatttattgttagaatataaaagaattgagagcataggtttaatttcatttttataaggaagactacatttacctgaaaaagaaatatggcatcacacacaaacacgcttcagggaaggagtatatttaagaatatggtgtcattctgaatgctaaaggaaaagtgatccctgtttactattaaaatatgtagtgtaaaattctttaaaggaaacaactcactaaatctctactaggtaagttattgtgaatttagttttcaaatcacagtaatccacataaccattattaacagctctgtttcatagaactgcaacaagccaacaaacatttaaatgcacttcacatcaagagtatgtaaactttattttttcctcttcaagccttcagaaagttaggggctatttcagcagccaatctggtcagaacctctgaaggcaaaatttcagtgcctcacagtgtatatgaccatctgttgcactgcacacatctggtagtgaagtgtcccctatcagtggcttccagtaaggcctagagtttaaggttaacataaaaaagtgccacctttgttttagattagtgatggagtctgacaagataaaataaagttattctgtatattgttatacttacaagcagctccaatcctgagtatttacggtaatatctaaacatacaaaaatgtatgtacatttttctccactttcttgtaaacagttgtcagtatactgttttatccctttatcattgaaacatgcaaatcatacatacaagtataaatacacaaaagaaaacaatttacactcattcaaaagccatgcaacataaaatagctacagtattcaaatcataaataatgaatgcttgaggcatcttatattcctagaagcagccagccattcatcctaatgttcctagctgcaattgtcctcgttccgaat

SEQ ID NO: 121808 - DNA, 341 bp, Homo Sapiens
  misc_feature (320)..(320): n is a, c, g, or t
tttattttttaaacagagtttattgtatttaatacattataaaatttgaaaaattgtaggaaagcagcagacttgaactggagcaattctaacaaggaataattctggccccttggcaaaactgatcagttttaaaacaaagtaaagttcacatctgtgaggtggacaaaaaagtgtgacttctgtacaaactacatttaaaatttcatgtctaacatctttgcaatgtgctcatgagggtttttctgaagtcctgcctggtccctgcctaaagaaagacgtggaacctccatatacaaacaaacttgattcaaggtgtntttgtttgttttgtgttttta

SEQ ID NO: 121809 - DNA, 1185 bp, Homo Sapiens
cagtcgacggtaccggacatatgcccgggaattcggccattacggccgggggagacaacacaaggaaaacaatgtttaaaagcaaaatagcctgtgtaatgttaggtaatgtaatgcccaagtgaataaaagatttttcgtcaagcaaactactgtttctactttgggggaaaaaagtcagttttacatttgtaatttaaggaaagaacagaaagcacaaaggtttttcttttctttattaatggcctactagaaatgagcagtgcaagagtctacctgtactattctaatacagtaagatattggacacaaaatggaggtaactttttaaaatagattggcttggaagttgaaatgtagattaatggatataacccaatagaaagggattttcaaataaaaccaaagtctatttttttattttactttctaattttgaacagatgactcagtcctaaatctttgcctttatttcctataaaatgtaggtgatacttgtaactcgacttcctggagttaattcttcagcaagaggtgaccctgggagcgtactttaaaataattgctgtacagccattgagtactaacatgatgataggttttcaaaatatctttgtagtggatgctgcataattacattcacttctcttagactgtaaaagactttcttgacttgttttaacagtagagatagcagtacaatttgaatttatggtttaggctctgcaattagaggaacaattgcagtttcctcctacccttcatatggtctgtgtaaaactgatgtttgcttaacttattttaaaagttgattacgttttcagaaaataaagataatcacttttgccatggttataatcaaatctaagctttcagacttgagagccatggtgtaaaactcaaggaggtttatttaaattatgctgactttgctagaattggataaattctgtataagccaagtatgagttcacatgtactcgaatatacagttttcacaaagctattactctcatcagtcaggcttgtatgatctattccttaccacaaaagaagtagacaattgccacttttatttctaatccttaagttgaatgtttcttcttggatgtaagttcaaataaattgatctggataaattttcatttctacttaattaaaacttcctatgtaaaatccaaaaaa

SEQ ID NO: 121810 - DNA, 523 bp, Homo Sapiens
gttgagaaacagcacagttttataggagaaataattaggtcaagtttcaggaagaatgacaattagatctttaagctctgaatgtcaaggaggcagctttgtgactggtgtgacttgtgacctgctccgcactgatcagatctgtgtttgcctccttctctgtagactgccatttctgtacctgcagaacccgtaggccctgactgaagaattcactccagagcacatcctcctgtgactctcgccaaagtgtttgtaaccaaccgttaaattcagatggttcctctgagcttgggaaaatacgttttattgctctgtgccttttgagagcttggaaaggtggaggtcttgtggagttgtggaaacatctgtagagtacgttgtttgcaggctctggtctgtgctgagaatagagcagtgaccgtgaaggatgagatctctgccctcacagagctgatgttctgctggtgagtgtggacaggcttcctgctgtgccaccagagagtcctgtgactcctcgtgc

SEQ ID NO: 121811 - DNA, 611 bp, Homo Sapiens
caatacaaacttagagtttatttactcacatttataaactaactttaacattagaaattctccaattcttaaaaattaaaaattgaagactacatggaatcaatttttttcaaatatactgtctgtaaaattcaacattaatgtgttcatattactttcatacctaaccaattgggcatcaagagactttactaatcatctctgtcaattctaccattcctagtcattcttaatattcaagttagaattttgggccaatctatcaaaaccttgttagcatttttgcttttctcaagcaaacacatttttacctacccacacctctcagtgctagggagcaacttttagaagcactagcaaactaccaccagtggaatcggataaatgccaatgattcagataactccagcaaagatttaccctcctgtgattttcctaaacatcagggaaagaaaacacatatatcctgtattactgttacttgaatgcctgatttatatagcacactaatttctcttttccactagtttccataaatactaaagtatcaaaaagtactacttttttctaaaagttttcagaatgcccattatattttcacactatttaat

SEQ ID NO: 121812 - DNA, 1780 bp, Homo Sapiens
taacggtctaggtacgaggctgggttgtgaattcggcacgaggggggccacagcctccccttcttgtggtgagactgaattttgggctcagacaccagcaacagcctcttgggatgccctgagttgcttcccatttcctctttctagccgtccttttctagtgtgtgctcactcttcctaggaacttttaagacttcttggtacctatgaacataggtcctcccctcaccccaactctaggtttccaggcctcacagccaagctgaagcttggagaaaactctgcattcccatgagggcaaaggcagctgccctccctgaccctatagccccaggcctcatggggggtatgtggggaagggatggggtatccccatggatgctgggatgaggacagaggaagacctgatggggtctcctattccagggaataagccaaattaacactaaaaacggatcaaagctcccacgccagtccactagggccccagtagttgacagccttgctcctctcccaagttctccttcagaacctagttgcttttattcttccagctaccacttgggcacttcacagccagcctagggtcttcggcacctccaagagctgaatctccctccaacccttcttgcctactcctcactgccagctgggacctaggctcagtcctgtgtggtgcccatgatccttctggtgggggaagagtttaagttatagggcatttggctcaaattttaaaaggccttttgtttacctatatttctggaggctcctgtattctagaacccaatctctcacctgcttggttgcaaggctccatatttttttgtacctttcctatagattctgtagcatttgagtgtggcaatattttaattgtgtatagatttctaaggaaccaacactactcagtctcctgctagtctgactcctgaagcatcagcccttgtcatactgtattgactgtgtacgtgcctttcaccttgagcatgcttcaggattttttttaaaaccacagaacttgaatacatgagggaaccagagttcaaagtcctatgcaaccttaggagggggttagagagtctgttttgattgatgttttctgaggccctagaggagtttgtatcaatttgtgagtattaatgtcagtactaccagcactttgccaaaactgtcagagggacccgtttctagagtgagtcccagttacatcaaacagtgacttccagttattccccagtaagtctgagtggttccttcaagctgggtgtctttccagcctttgccagtctagccccagcagggcaccgtgtatgaatgcagtttggtgctgttttagagtatgcctgctccccagccccctgcctggaaccctctgagcaacttgctctgacctataatgtcttaggtgcaacacggaccccaccagagctcttggatacccccctagatccatgtggctttatgtgaggggactgaatgcagacacaccatagcccccttctactactttccctctcgccctgccacctagttccacatggaaccaacaagttgagtgcatccctgttgggtgttttgtgttgagactggctgaaatgaggagactttgaccatgtgacgtgtcaacagactcaaggagacaaccacctcaactgggtcatgtggcatgcctgtgtatgtgtgtaacagaattctgattgttagactgtaatgctattcctctatgggagaaacaaattaatataaagaaaaacaaataaacatatatttaaagcca

SEQ ID NO: 121813 - DNA, 648 bp, Homo Sapiens
  misc_feature (184)..(198): n is a, c, g, or t
tggggtatcagatatttattatatacagtatatgtacacatataaacatacacacattatatagccaaaagattacacttcaaaattaactggaaatggtatttcgagtatttttagcacaaactaactagaggatgtgctctagctgtccaagcagcaataatcataaactctgaacttggcnnnnnnnnnnnnnnngagattctattcatagaatcattcttcgaatgccacattcacagcaaaatttggcccattctacagggtatttagtcccacactcatggcagaattttggtaagtttccaggtgaatgtccttcaatgcctttaatatttccaccattaagggaagatgcacagtccccatctggcctggctatgtagctctcagtatatgtttttcttttgtttgtaagcacacctggggcaggatttcttgccaaactaggtggtgtggaatttcggggtttgacattagctctataaaaaagaggaaaaataatggaaaagtattgaacagtgagcatgtatttctcaaattacctattcacatgactagaaagaatacttagaagcttcagagaagttcaaaagattaaagtcccaataattattttaaatctgaaagcaaatagtagttaatatt

SEQ ID NO: 121814 - DNA, 1262 bp, Homo Sapiens
  misc_feature (184)..(198): n is a, c, g, or t
gggggtatcagatatttattatatacagtatatgtacacatataaacatacacacattatatagccaaaagattacacttcaaaattaactggaaatggtatttcgagtatttttagcacaaactaactagaggatgtgctctagctgtccaagcagcaataatcataaactctgaacttggcnnnnnnnnnnnnnnngagattctattcatagaatcattcttcgaatgccacattcacagcaaaatttggcccattctacagggtatttagtcccacactcatggcagaattttggtaagtttccaggtgaatgtccttcaatgcctttaatatttccaccattaagggaagatgcacagtccccatctggcctggctatgtagctctcagtatatgtttttcttttgtttgtaagcacacctggggcaggatttcttgccaaactaggtggtgtggaatttcggggtttgacattagctcctgcatgaggggctgctatccctttatgagagggagacaaggtctgaagtttgtttcccaaagagctgctacttgaagacactttacctgaaggaacacctacaacagttttgccagcgccacttggctgcggtaatcgtgaagatcctgatgatgcagttccaggagaatttgactttttaagtgcgggtggcttatacacctgtgtccgagaagttggttttcctttggtatctgtagaaaatttccctttattactaatacgtgctgcctgttctttacagaaatttatatgtctatcagctgcattttcattgaatctcctctgacaatatggacattgaatataatcaggatcataagaaggtggaggaggaggaggaagtttgccaccctctttgagggcctgatcaaggcctttagctgctcttatggtagcaatgaattcttcatgtttccttctccaattagatggtttctttggtggttctggcctcggtttgagaggttcttactgttggaatatcagttccttcagctctctgtctgcttgaatcacaaagtcttccgttttttagttgcagtcttctggcaaatgggtccatgtttttttaatgctactggaaagaatgttcttccacaaatcttgcaaggtaacaattctccaacttggacaacacctccattctcttccagtccctccatcgcgccacctcctcgagctcagcccccggccgtaatggccgaattcccgggcatatgtccggtaccgtcgactg

SEQ ID NO: 121815 - DNA, 624 bp, Homo Sapiens
ctgcttcaatgctctttatttcattaggaaagtagctgggcaggggtgttcccctgggggatggagtgggggtacagacagtagcctggctcctgtcccctaggattgacaaaccaagggctcagggctcagctgtgtgccacgcagcggctgctgtgaggtgtgttctggtagaaggggtcagctgaggtcagggttcttcccacgtggggatgcaggtgccgcaggctctccatggggtttggggtggcctccatgcagctgaccggctggctgagggcgtagcctcctggcatctggggctggatgccacctcgagtccagccttcctggtctagacccttggggatgttctcaaagtacccttggttgtaggtggtcaggtatcgctgatccctgtcaggatcacaggggctccggacatacatggggttgttaaggctgaaccctgtgggctcctttttccccacagtctcccggccaagcagggcaacgtttgtctgttgcatccgatgaagtggttgaaactgctggtgactcacgctgctgggttctgggcagggagggggcactctggggttcacaatcctttcattccctcggctgaaggctgtttctcgcttg

SEQ ID NO: 121816 - DNA, 779 bp, Homo Sapiens
gtcatttaaggacgcaagcagcaccattaactgttatcagactttggtttattgtaaaatttagcaaagtttttcttgtaatccctgacccattgctctgaaaacaaaagcaaaaacataattattgcttattcttttccccctactttgtttgtgctactgtaaaagaagggagaaaatcattgtaataaataaaaaatagagatgtaacagagaaaaataaatcagctcagatgagaagtattaggagcaacagcaataccattaagcagtttcaaaatcagcttcttttaaaaaggtcatcttattaaaataaaaatcacaccaaaaatatagcagcggagaagaaggataaatacaagttcattgcacaccagtcccatgcaaaaaactgtcactagccaaagcagtagtattcagaatccaatttaggacgcttgtgtagtgcctgtgagtcctctatgagggagctgtcactgaattggtccaagtctgaaggggtctgatggcctgggacatcatccgccaacgtgtccagataacttcccacggaaatgccatccagcccatcactgccatcgtgtaggctgttgtagctgccacgtaaggaggtgctctgactctccaacaaactgcacaggctgccactgaggctgctgcctctgctggtaatggtggctttttcttcgatcatccacttgatggactcgatgctctcattgattacaagcaactggcgcatgagcctgacgtctgtggctctgaggttaacctgttag

SEQ ID NO: 121817 - DNA, 1328 bp, Homo Sapiens
ttttgggctagaggtttgggctttaatggcagctggggtaaaaggaaacaaaaacagtaattctgaagagcacagggaacaggcagccaggaccagcctggcccattccaggccagctgagctgaaatgctgattctgtccagggggctgctgtatgtgtagactggtggcagtcttggggactgaggcctcttggagagaagggaagactgtcggctcagaagtccatggagctgtgggccaggtagtccttgcgaccgatgttgctgacctgcttggtctgcatagcctcgagtttggggcagtcagtgatccgatgacccaggcccccgcagaaggcacagccgcgctctcctccaatgtccagcatggactcatccccgcaatgcagcacctgcagcacgggcggcaccttctgcttggcttctagcagcagcgctttgaggtccatcagcactgactcatcacacgctttgttgatgaaggtagtggcgatgcctgtgtttcccgagcgcccggtgcggccaatccggtgtacatagttctcaatctcctctggcatgtcataattgatgacgtgctggatggcagggaagtccaggcccttggaggcaacgtctgtggctactaggacatccttcttgccctcccggaatgcctcgatggccttagtccgttcctcctggtctttgcccccatggatggctacggcctcaacccccttgagcagcaggtactcgtggatggcgtccacgtctgccttcttctctgcaaagatgagtacaggcgggggtgtcttctgcaggcactcgagcaggtacaccatcttggcctcctccttcacatattctacctcctggatgacatccaggctggcagccccagcgcgccccacattgatggtcacaggctttacaagggcactcttagcaaagttctgaatcttcttcggcatggtggcactgaagagcagggtctgtcgctggcccttgaagtaggagaagatggtacggatgtcaccctcgaagcccatgtcgatcatgcggtcagcctcgtccagggccaggtagcgacagatgtctaggctgaccatcttcttctgcagcaaatccatgaggcgccccggggtggccaccatcatgtgtacaccgtgtcggatggtctccatctgctctttcacggacatgcccccaatgcagagggcgcagcgcaggagtggtgagctgtcctcctgcagcaggcggcagtagtactccaggatgccatgggtctgccgggccagctcccgcgcctcgtgccgattcacacacccagcctcgtacctagcc

SEQ ID NO: 121818 - DNA, 889 bp, Homo Sapiens
tacagcggcatattactccggatgccagggttcccgggccagctcccccgagggcagatgatgagtcatagggcccctcgcgctttgagaagggtaccctcttctcttgttccagcagaacatgatgacgggcaacgtgaacaccagtgtcttgcctgaacccgtgaaagcgatgcctatcatgtcacggccagatagaatggtggggatgccctggatctgaatgggtgttgggtggtgaatgcctttcttcttcaggcctctcaggatggctgcaggaaacttcatttccttgaagctcttgatgggtggtgggataccgtctccctccaccaggatgtggtatttcttccgcacgcgctcatgtcgctcttcagacatgctcagaacataacggggtggagtccagctggttttgatggggtcatcatacgtaatgcccttagccatctccttcactgacatcaatgctcggccctcggcaacactctccaggatcttctcttcttccttcagctgcttctccttggcagactctttgcgcgcttcagccttctctttaaggtgctggtgctgatccaggaggctgacgttggactgagggcctagcgggatgtcgtcctcatctccccggggttcactaccgctgtcctgctgctcttcctccgcagctcccttgcgtcttcgctgcagcagcttctggagcagtagctgccggcgctgccgtaacggcacatagggcacgtagtcctcgtcgtcctcatcttccgcctcggagcggcttcctccggcaggcacctcgtcggtgcgagcccgcttccgttcgggttccgactcctccattctcctcgtgccgaattcaacacccaggcctcgtacctagccttta

SEQ ID NO: 121819 - DNA, 1227 bp, Homo Sapiens
  misc_feature (11)..(11): n is a, c, g, or t
  misc_feature (58)..(58): n is a, c, g, or t
  misc_feature (75)..(75): n is a, c, g, or t
  misc_feature (123)..(123): n is a, c, g, or t
  misc_feature (126)..(126): n is a, c, g, or t
  misc_feature (144)..(144): n is a, c, g, or t
  misc_feature (1174)..(1174): n is a, c, g, or t
  misc_feature (1183)..(1183): n is a, c, g, or t
  misc_feature (1199)..(1199): n is a, c, g, or t
ttgccccttgnaataggaagaagatgtacgggatgtcacccttggaagccccaatttngatcatgcgtcagcctngtccaggcccagttagcgacagatgtttaaggctgaccatctttcttntgncaggcaattccatgaggncgccccggggtggcccaccatcctgtgtaccaccgtgtcggatggtctccatctgctctttcacgggacatgcccccaatgcagagggcgcagcgcaggagtggtgagctgttcctcctgcagcaggcggcagtagtactccaggatgccatgggtctgccgggccagctcccgcgaggggcagatgatgagtccatagggcccctcgcgctttgagaagggtaacctcttctcttgttccaggcagaacatgatgacgggcaacgtgaacaccagtgtcttgcctgaacccgtgaaagcgatgcctatcatgtcacggccagatagaatggtggggatgccctggatctgaatgggtgttgggtggtgaatgcctttcttcttcaggcctctcaggatggctgcaggaaacttcatttccttgaagctcttgatgggtggtgggataccgtctccctccaccaggatgtggtatttcttccgcacgcgctcatgtcgctcttcagacatgctcagaacataacggggtggagtccagctggttttgatggggtcatcatacgtaatgcccttagccatctccttcactgacatcaatgctcggccctcggcaacactctccaggatcttctcttcttccttcagctgcttctccttggcagactctttgcgcgcttcagccttctctttaaggtgctggtgctgatccaggaggctgacgttggactgagggcctagcgggatgtcgtcctcatctccccggggttcactaccgctgtcctgctgctcttcctccgcagctcccttgcgtcttcgctgcagcagcttctggagcagtagctgccggcgctgccgtaacggcacatagggcacgtagtcctcgtcgtcctcatcttccgcctcggagcggcttcctccggcaggcacctcgtcggtgcgagcccgcttccgttcgggttccgactcctcgtgccgaattcgccacccaggcctcgctaccttaggaccgtatagttactggccccgttcngtttttaantaaagccctggcgggntttgtaccaactaggccccccctcggtt

SEQ ID NO: 121820 - DNA, 759 bp, Homo Sapiens
  misc_feature (572)..(585): n is a, c, g, or t
  misc_feature (609)..(713): n is a, c, g, or t
cttttggtcaaaattaactttatttttcaacttcatagggatgtgataacaaaattggcacacacaaaaagaatactgatattgggcctgatttaaaaaatgcctctggccaggttgtaaaaaagtgaaagtaacaaagataaacatagaagttggagttgtaaaaaagtgagttggaattcatgctgccatgatctacttgaccagaggcagcttttcctctctaagcctattttatatctgtcagtggatttgagatcactcattttaccattgtaacattccgagccttttgtcactgtgtgtccctttgtggccatgtaagagaccacactgctgtaggctgagaaggccacagtggttcaggtgctttgaggacttggtcttggctcaatagagcctcactggtgtttgctcagattgggcagcctatgcccaaagctacttggctaaacaggctggtgacaccacacccaaaaggtggcaaagaataggaataggaaggatcagcacctattttggagtgaggaagccaatggaggtacaactcctcaattctaagtttttgttgnnnnnnnnnnnnnngagacagggtcttgttctatcacnnnnnnnnnnnnnnnnnnnnnnnnnnnnnnnnnnnnnnnnnnnnnnnnnnnnnnnnnnnnnnnnnnnnnnnnnnnnnnnnnnnnnnnnnnnnnnnnnnnnnnnnnatgagccactgcatccagcttgcttctaattttcctacccaggctg

SEQ ID NO: 121821 - DNA, 1204 bp, Homo Sapiens
  misc_feature (1049)..(1112): n is a, c, g, or t
ggcaagaggagaatttgtcctttttggttttatacattcacaaacatatacatttttcttgagtctcaaggtattttatatttttagtcagaaaaaataatttttcatttcagttttccataaactgttacacaaaatataaacctaacgtgtatttttcaggactgcgtgatcgtgcactttgtgtggtaagaggtttgagtagtcctatatgtcacctagggaacagacattatagcttcctagcaaatgaatattcatgccttgtttttgatacctcctggcagcttccatgtcaccacttgttcatacctgcccagagctagttttagacatggcaaaatagaaatcatctgtaatttattagctaacaatgtaaaaccatcttttaaagccttcagactgtcaagacgacatgagcagctcaccatatgataaaaatacataaatttgacattccctcttccataaacctttgtttgtagatttaatgttgaacagtacttttccataaagttctagtcacttctgttggcctgagccaccagattatgatgttgccagaattcactcaatttgaataaagatgaacagtatttgttttcttgtttccatgaattataatcagtattctaaaacatcgcttcagaaaagagaactgtttatttctgcaggcttcctgtccttttgtggtatggttttttggccttattttcactggcttttccttctccaaactttgaggcgtgatttcattcattgaagaatcaatacatattttgtttcaaaatgtttgaaacaaaagacatagatggtagacttttattaaaacatatatggatgtggaaagcacatatattaatgcagtcatcccttttcaggtgggaagagagcaaaccagttgattttttaattcatccttagtacacagagaatatacttttcctcaagtaatatacctgtttgaagctttaagagagatgtttttgggtaactatttcattttcccaaaggaagtttgctattcttgtggtaaattgtgtataccnnnnnnnnnnnnnnnnnnnnnnnnnnnnnnnnnnnnnnnnnnnnnnnnnnnnnnnnnnnnnnnnaaaaaggggcaagggttttctgaaaagatgcatatttttaagactcaattccaattggccacggggctatcctggaactaccaataattttt

SEQ ID NO: 121822 - DNA, 1332 bp, Homo Sapiens
  misc_feature (785)..(785): n is a, c, g, or t
ggtcaaatatactgcagattaatgaagataattctcctttgtaaaattagctatgtggacacatacccttgtagggctgcgtttatctaatagtacttgaatgttgtatgttttcactgtcactgagtcaaacctggatgaaaaaaacctttaaatgttcgtctataccctaagtaaaatgaggacgaaagacaaatattttgaaagcctagtccatcagaatgtttctttgattctagaagctgtttaatatcacttatctacttcattgcctaagttcatttcaaagaatttgtatttagaaaaggtttatattattagtgaaaacaaaactaaagggaagttcaagttctcatgtaatgccacatatatacttgaggtgtagagatgttattaagaagttttgatgttagaataattgcttttggaaaataccaaatgaacgtacagtacaacatttcaaggaaatgaatatattgttagaccaggtaagcaagtttatttttgttaaagagcacttggtggaggtagtaggggcagggaaaggtcagcataggagagaaagttcatgaatctggtaaaacagtctcttgttcttaagaggagatgtagaaaaatgtgtacaatgttattataaacagacaaatcacgtcttaccacatccatgtagctactggtgttagagtcattaaaataccttttttggcatcttttttcaaagtttaatgtgaacttttagaaaagtgattaatgttgccctaatactttatatgtttttaatgganttttttttaagtattagaaaatgaccacataacacgggcagctggttgctcatagggtccttctctagggagaaaccatgtgttaattcaaataagctgattttaatgacgttttcaactggtttttaaattattcaatattggcctgtgtttaagtttgttatttgaatgtaatttacatagaggaatataataatggggagacttcaaatggaaagacagaacattacaagcctaatgtctccataattttataaaatgaaatcttagtgtctaaatccttgtactgattactaaaattaacccactcctccccaacaaggtcttataaaccacagcactttgttccaagttcaaagttttaaattgagagcattaaacatcaaagttataatatctaaaacaatttatttttcatcaataactgtcagaggtgatctttattttctaaatatttcaaacttgaaaacagagtaaaaaagtgatagaaaagttgccagtttggggttaaagcatttttaaagctgcatgttccttgtaatcaaag

SEQ ID NO: 121823 - DNA, 1217 bp, Homo Sapiens
  misc_feature (168)..(184): n is a, c, g, or t
  misc_feature (354)..(369): n is a, c, g, or t
  misc_feature (569)..(584): n is a, c, g, or t
  misc_feature (586)..(648): n is a, c, g, or t
  misc_feature (669)..(692): n is a, c, g, or t
  misc_feature (737)..(1028): n is a, c, g, or t
  misc_feature (1118)..(1118): n is a, c, g, or t
tttacaagtctttaattaaaaaactcaacaaaaatatataattgagcattttacataatgcatacattcttaatatctgcaggtaagataaacaacagaaggcaaaagcagatatgctgtattgcttctttggcaactcaccaatatcatcccctgcagaaacagagnnnnnnnnnnnnnnnnnaaatccatggtcttaaaataattgtcccttagtataaacaaaatatttagcaataatacagtagacggattcttcaaattcacaacaatttataatactttataccacaagggtaaactagtaagctgctttctaaaattaaggcagcagcagtgtttagagggggagtnnnnnnnnnnnnnnnngacatcctttttctagttatatcctggctctgccttctttgttgttgtttttaaataacgtcacattcaagctctacgtcttggatgacattcctaaggataataaaatccttttccctgtacataaactgtgtttcacttccagatcagtctgacactctccaacaaaaccaaatacatttcgtatgaggcaacacaannnnnnnnnnnnnnnngnnnnnnnnnnnnnnnnnnnnnnnnnnnnnnnnnnnnnnnnnnnnnnnnnnnnnnnnnnnnnnnaagagcaaaacccttgtctcnnnnnnnnnnnnnnnnnnnnnnnngcctacagccgcgggcgctccaacatccctcgtgccgaattcttnnnnnnnnnnnnnnnnnnnnnnnnnnnnnnnnnnnnnnnnnnnnnnnnnnnnnnnnnnnnnnnnnnnnnnnnnnnnnnnnnnnnnnnnnnnnnnnnnnnnnnnnnnnnnnnnnnnnnnnnnnnnnnnnnnnnnnnnnnnnnnnnnnnnnnnnnnnnnnnnnnnnnnnnnnnnnnnnnnnnnnnnnnnnnnnnnnnnnnnnnnnnnnnnnnnnnnnnnnnnnnnnnnnnnnnnnnnnnnnnnnnnnnnnnnnnnnnnnnnnnnnnnnnnnnnnnnnnnnnnnnnnnnnnnnnngctgcctcggtcgttcggtgcggtgacggtatcagtcactcaaggcggtatacggtatcacagatcaggggataccaggaagacatgtancaaaggcatcaaagcatgacgtaaaagccggtgtcggggtttcaaaggtcccccgtgagatatcaaatatacctcattcaaggggaaccgcagatataa

SEQ ID NO: 121824 - DNA, 603 bp, Homo Sapiens
  misc_feature (569)..(569): n is a, c, g, or t
  misc_feature (590)..(590): n is a, c, g, or t
ttctttccacctccttcctgatctgaatttcttggcggtgatgggctcggtgttgggcttttggcctttttgaccggtacagctggtgaccagtttgtagacggtgactgagactggacgggggatggaggtgctgggggctttttagctgctggctcaggagacccggagacagatcgggaggatgagacccttcttacagactgtgggcttggggaagcagccttttttatctttttaggttccggagtcctggagactctcctaatgggcctagtacttggagacggggactgccttctttggggtgatgacgacgctcctcttcgaacgggtggaggacttgaggaggtctgaggagctcgaggccgtggtgagggcgaatgccgtttgtttggttgtggtgatcgggcctcccgggtagagcggcttggggaagaccctttcctatgcttggatgataatgaaggtgaacgtctcttggtgactgggggagcttctttgtttgggaggtggagaatgggatacccgccgctgtggtggtggagatggtgatgctcttcgtttangaggggggagaagtgagccgntcttctctttgga

SEQ ID NO: 121825 - DNA, 2018 bp, Homo Sapiens
  misc_feature (53)..(90): n is a, c, g, or t
  misc_feature (274)..(305): n is a, c, g, or t
  misc_feature (613)..(613): n is a, c, g, or t
  misc_feature (616)..(656): n is a, c, g, or t
  misc_feature (1190)..(1273): n is a, c, g, or t
aaatttaaaaatttattctgtttaatccacaagctttatatagctttagtttnnnnnnnnnnnnnnnnnnnnnnnnnnnnnnnnnnnnnncagggaaaccaaaacactattccaaagtctgggcccttccagccttccaaatacaagaggctctgaaagttgtttataccaattggaagaacaagacaaaaatatgaacagagccatgacatttcattaaacaaattgtatgtaactgaaggatcctttctgggactagctcattgcctttacnnnnnnnnnnnnnnnnnnnnnnnnnnnnnnnnccagaataacagaatgagagtccagtgttccaaatcaacttgttacacatcaatataaacccacagtgtcctggcaaacaacatgctttcattttctgtctcatcctagagctcgaatcctgattcatttcagcagagactccacaggcaacaggaaagattgtggcattaaaatattcatttatacttttgtggtagttcaaaacagtggtcttatttctgggcaagcttacagaccatacaaggtcagaagcataacttaaatgggagctaagactcaaatgaaaaaaataagaagaggaaggaanaannnnnnnnnnnnnnnnnnnnnnnnnnnnnnnnnnnnnnnnncccctctgggaatagctagggcatttaaaggaaccataaaaatgccaacagtatttaaacccccttttttaaaaagggaattttttttggcttaaaatatttcactcaatgaattatgtcagctgtcaatgaaagaatgtcactaatacactgtggacaccttttgcaatgtaaatccatgccccctttttttacatgttgaacttcaacctagcaattattacaacaaatgttatagtctaaagctcaaacacattttagcaattttgaaattgaactgcgtacaaaccaaataaaatttacatcataacaaacatttccccctaagactgtggggacacttgggccttcctcattgatctcagggccttttcacgcaggtgcttttctaaatcatcaaggttatcttcagcttcactttcagtctccttcttcggctctggcgctgccactggctcttcctgtgctaatgtggttgtggcagctgcaatggctgcaggggtcacagcagctgcagcagctgcagccacagcnnnnnnnnnnnnnnnnnnnnnnnnnnnnnnnnnnnnnnnnnnnnnnnnnnnnnnnnnnnnnnnnnnnnnnnnnnnnnnnnnnnnacctccttcctgatctgaatttcttggcggtgatgggctcggtgttgggcttttggcctttttgaccggtacagctggtgaccagtttgtagacggtgactgagactggacgggggatggaggtgctgggggctttttagctgctggctcaggagacccggagacagatcgggaggatgagacccttcttacagactgtgggcttggggaagcagccttttttatctttttaggttccggagtcctggagactctcctaatgggcctagtacttggagacggggactgccttctttggggtgatgacgacgctcctcttcgaacgggtggaggacttgaggaggtctgaggagctcgaggccgtggtgagggcgaatgccgtttgtttggttgtggtgatcgggcctcccgggtagagcggcttggggaagaccctttcctatgcttggatgataatgaaggtgaacgtctcttggtgactggggagcttctttgtttgggaggtggagaatgggagacccgccgctttggtggtggagatggtgatgctcttcgtttagagagggggaggaggtagaagccgttcttctctttggaggtggagaaggagagtatctcctctgtattggaggagagtatcttctaggagaaggttagcgccgacgtgggggaggagaaggagtccttcgtcgtggtggtggtgtgggagtcctgcgccgtcgaggaggaggggcgggagaaggag

SEQ ID NO: 121826 - DNA, 767 bp, Homo Sapiens
  misc_feature (241)..(249): n is a, c, g, or t
  misc_feature (330)..(398): n is a, c, g, or t
  misc_feature (678)..(709): n is a, c, g, or t
ggtagggggaaatgtttgttatgatgtaaattttatttggtttgtacgcagttcaatttcaaaattgctaaaatgtgtttgagctttagactataacatttgttgtaataattgctaggttgaagttcaacatgtaaaataagggggcatggatttacattgcaaaaggtgtccacagtgtattagtgacattctttcattgacagctgacataattcattgagtgaaatattttaagccnnnnnnnnnttccctttttaaaaaagggggtttaaatactgttggcatttttatggttcctttaaatgccctagctattcccagaggggnnnnnnnnnnnnnnnnnnnnnnnnnnnnnnnnnnnnnnnnnnnnnnnnnnnnnnnnnnnnnnnnnnnnngagtcttagctcccatttaagttatgcttctgaccttgtatggtctgtaagcttgcccagaaataagaccactgttttgaactaccacaaaagtataaatgaatattttaatgccacaatctttcctgttgcctgtggagtctctgctgaaatgaatcaggattcgagctctaggatgagacagaaaatgaaagcatgttgtttgccaggacactgtgggtttatattgatgtgtaacaagttgatttggaacactggactctcattctgttattctggnnnnnnnnnnnnnnnnnnnnnnnnnnnnnnnngtaaaggcaatgagctagtcccagaaaggatccttcagttacatacaatttgtttaat

SEQ ID NO: 121827 - DNA, 597 bp, Homo Sapiens
  misc_feature (12)..(12): n is a, c, g, or t
  misc_feature (54)..(110): n is a, c, g, or t
aaacccaccggntacttgaacaacacctactcccaaaagcaaaacaatgaatgnnnnnnnnnnnnnnnnnnnnnnnnnnnnnnnnnnnnnnnnnnnnnnnnnnnnnnnnngggagggcactcaaataattaatgctacaggtctcagaccttttagaatctttaaaagaaacaaattattgctatcaacacgcacatttcattttcctttctcgttttttacaatagtctctacttatttgaaaaaactacacgaaactaaactaaagtaactcaacatctcaaatgatctataaattcatcaagaaatactctgtcgctcaagttctcatagataataccacactgctgacgacctggggcaatgccaccgccgccaagtctctacagtcgatttgctatcggctgcttctctgtaacactaacattctctttcatgagtataatctcttctcactgtatcagagctcatccaaggttcacatctcttactgcctctgctgctagtcccaaatatttttctcctttaagtggaaaaaagctaatttttaaattcctgaaaattcactggttattatattatttgccatgggagggg

SEQ ID NO: 121828 - DNA, 1459 bp, Homo Sapiens
  misc_feature (50)..(51): n is a, c, g, or t
  misc_feature (85)..(164): n is a, c, g, or t
  misc_feature (183)..(321): n is a, c, g, or t
  misc_feature (344)..(364): n is a, c, g, or t
  misc_feature (1282)..(1361): n is a, c, g, or t
aaaaggggtaaaattataaaaagggcaatttatttaaaaaaaccatgagnncccaggtgcagtggctcacgcccctgtaacttgnnnnnnnnnnnnnnnnnnnnnnnnnnnnnnnnnnnnnnnnnnnnnnnnnnnnnnnnnnnnnnnnnnnnnnnnnnnnnnnnctctgtctcttactaaaannnnnnnnnnnnnnnnnnnnnnnnnnnnnnnnnnnnnnnnnnnnnnnnnnnnnnnnnnnnnnnnnnnnnnnnnnnnnnnnnnnnnnnnnnnnnnnnnnnnnnnnnnnnnnnnnnnnnnnnnnnnnnnnnnnnnnnnnnntgacagagtgagactctgtatcnnnnnnnnnnnnnnnnnnnnncatgaatcttgattcagatataatttttctttcaacaagttctgaatgttttaaaattaataaatcacaattctgtattacttttaagattgtttaaaaatgacacatttcaaaattaaccaaagtatatttctgttagaggttagtttatccacgtaacttaagaataaaccacagcgtagctcccttaaccaaagagccaggttttaatgacaagtcagttgccagcaatggacgtgcaggtaactatcgaagaagtcgcaactacaaatcccaaactgcttctatcaatggaaaagccctttgttgagtcacaagcctgaaacgaggcgttggcacatagtcagtgaggatggtctttgacttaggagggaagtgcctctgagtacatgaggatcacagtcttctcatctcgttggttttctatttcattggtagcatcttctttatcataatccatccaactgtttacaaagaatggtaaaatttggaactcaggtggcactgcagctttctgccagaaataaaccagtttctataattcagtaatagctgtagaaggccaatatattccagagaaaaatgaaatcaagaattatattgaaaacagagaccattaagtgctctaaatatgtttcattaattattttactcatttttctgaaaatcttgccttatcaataaaaaacagtcacttctctccttataattgcatcttatcatagatatagtggaaataaaataatggaaataaaacctgccagtttctccaatgtatactacaacagcaaaattattttttattcatgatttatactactgcaggatggcaagcaggggggaagttaatgggggaaggggatggtgggaacaaaatgccagaaccaaaccacagatacttgaacaacacccactccnnnnnnnnnnnnnnnnnnnnnnnnnnnnnnnnnnnnnnnnnnnnnnnnnnnnnnnnnnnnnnnnnnnnnnnnnnnnnnnngcactcaaataattaatgctacaggtctcagaccttttagaatctttaaaagaaacaaattattgctatcaacacgcacatttcattttcctttctcg

SEQ ID NO: 121829 - DNA, 971 bp, Homo Sapiens
  misc_feature (197)..(197): n is a, c, g, or t
ttagcaccatgaaaacaggtaatattttactatgattttgatttgtattttcccagttattagtgatattgagcatattttcatatacctgttggtataagaaataaattctttgctcattttaaaatggagttatcagttccaatatgcttctaaagattagttggggctttgctgtaacatctagacatgtatantctgatttggaacaaatccacttcctctctgtgggtagtgcctggcactactggcacccttttgtcattcaaataggcacactctcctgctcccaggataggaaacctgcaagagaagaagcagaatcagttggccactgaacatttcttcaacagcagagagaatgaagatgagaaaatgagaaaactaacattaattcagcctctaaaaataatgctgtttttccttgtgtagtggtgactaattagtcagtgggctttgcttagcaggagatgttataaatcaactataggaatactgcaaagtcctgaatcaaacctatttcatgtctgtaagcataatattctttcaagtacatccaaagccttagctggctgatgggagaagtctgacacgttttctttacacagtttcccaatattttgcttccttaaataactgaagactcagcagctatttctaaaaaccatgcttgattttattcctcctacttccctggtggttttagtactgaaactgcagtgctatttagctgagtttagatggcttggcacagatattttaggtcagcatttggattataaatttttcctctttgctcattggaataactatcatctatgatataatttgctaattgttgaaacttgttagaccttaatcatataatattttacatttctttaagtgatgagcagtttccaaaaactggttagttaataatatatttgatccttaaaatattttgagaggccaggcatggtggctcacac

SEQ ID NO: 121830 - DNA, 1039 bp, Homo Sapiens
  misc_feature (51)..(112): n is a, c, g, or t
  misc_feature (977)..(995): n is a, c, g, or t
ttctttagggaaacccggtgttgggaccaatggtgcggttggcgcttaatnnnnnnnnnnnnnnnnnnnnnnnnnnnnnnnnnnnnnnnnnnnnnnnnnnnnnnnnnnnnnngacggcccgggcaaatgtttgtgggggaaagaggttgatattaggagaaagcttttcctagaattttgaatggggagttgggcccggtgattagggatagtggagcatatttttcatatacctggtggtattaggaaataaatttttgggtccattttaaaaatggagtatccagttcccattatgtttctaaagattagggggggttgtggggtaacatctaggacatgtatatgtgatttggaacaagtccacttcctttctgtgtagtgcctggcactactggcacctttgtcattcaaataggcacactgtcctgctcccaggataggaaactgtcttgtccattcagtaccatttatccatttccatggttggccttgttctctgctcagcccaatccagtgatcagatgggcctttatatctcaacaggaaattcagttcttggaagctttcaacgtgagcaagatcagcatcttgtgagtcacaaagcctctgacttgatgtccagttcttggtgtcatcagaaaaatagaaacactttctttgaaaaccaatccagctttctgggcatgcagcttgaagacatactgatggctcttgatggcagttagctcttattgcacttaaagcagcaaccattccacacactatgattgtcagaaacatggttaagaaaaataagcgcccaaattagggtagctttaatagaatgctcttttgaatgcacacaccctgggtttgcaggcaattcagatggtgtaatgtctttctccacattgttactgtcatgcattttgcctccagtttctatgagtgatctaaaccacagtctctacgttttcaaccccaagaatgattcnnnnnnnnnnnnnnnnnnngcccaacgactaaaacgtgtaagtgtgtaaccgccccagtcccc

SEQ ID NO: 121831 - DNA, 828 bp, Homo Sapiens
  misc_feature (82)..(82): n is a, c, g, or t
gggggccccgcggccgcccaaaggagaatggttcatgagaaaggttttttcagaggggccgagggcggcccgacccagggtnatatttattgggcggggttcgttgctccgggggattctgaaaaggtctttattacccactggccaccaacagtttcccagccacatgctgggccctctaggtctctccagcccactctaaggacccaagaaatgcagccacagtccatctctcttttttctctccttccgggggaccaaggtaccttctggggcatacaacatggcagcagggcctcgggaagaggggtaggaggaccgagcagcattctctgtagaggaagacaggaaaggagaccctcttggcacacatttatggagggttgtccctgaagagaagggcaggtgggagaggttccctgttacttaagagaaggcaccagtggcaaagagcacaatgaagaggatgatgataaaaacaatcacgcagataaggacaatcatcttcacgttcttccaccagaattttcgagccaccttctgcgatgtcgtcttgaagtgctcagatgtggcttccagatcctctgtcttgttgcggagatgttccaagttttccccccgggccaggatccgctccacattctgggtcataatattcttaactccctccacctcactttgcaggttccgcacacgatcatttcctccaccttcactggcttcctccatgtctcagagcagcccaggccggtcagtaagtgaattcgcctagtcggcttcctcccagggtggccctcagttcacttcctgcttgctccaactttcccc

SEQ ID NO: 121832 - DNA, 771 bp, Homo Sapiens
ttttgcctggcaataaatattttaatttgtttcatttttatgatgacaaataattttcaagtttatttccttatttaaatacaaagctaaaccacaaacaggtataatcaagacattgtgtctcacatttacactcccatcggatcctcttccaatttgctgaccactgaccaggctagcggggggtgggagggaagactttcttaggtagcaccgtcgtgaggcccgaggtggggttgggggggaatcaaagacgaggacagcctctcatacctgtctccattcacatttacctgggaccagggtgggcaggagacaccaggtcatggctcctgagccccggccccctggactgaagggacagtgtgtgagaatcagttctgtgaagggcgggaggaagcagtcacctattcctcctgccttcacagttaaggtgaaaaccttagccctatccttgattcctgggggctgccgggccctgtgtgctcccctgcacacctgggtgcctttctgaggctggcagcagcggccggggtcaggggtcctgggctcctaggctcacacctcagctcacagttgcgtccttgcaggaggacactgggtgtctgacaaacacaaggcctcgacagcaggtctggaactttcaaccccagcaggatgagggggaatgggggtggatgtcaggtaagtaatttctggtcccactacaaaactttatttttgattagagtaccattctcaatctcttctacaaaaagcaagtaagagcaa

SEQ ID NO: 121833 - DNA, 663 bp, Homo Sapiens
  misc_feature (404)..(434): n is a, c, g, or t
cctttcagggttttgaatgtatcatcctactctcttctgatctgtaaggtttctgctgtgaaatccactgctggccttagggtggttcccttacatatgacaattcacttttcccttgctgttttcaactctctctaacttagaatttgattataacttgctttggtgtggatcttttcgggttcatcttatttggtgttctttgggcttcctggatttggctttctatctccttccccaggcttgggaagttttctgacataaggcttgggaagttttctgacataatttctttgaatatattttatttcttctttttctgacatatcaataatgcatttgttgtccacttgatggtgtcccacaggtctcataaactatctttaaactatccttttcattcnnnnnnnnnnnnnnnnnnnnnnnnnnnnnnncagtgacctgtctttgatttcatcgatcctttcttctgcttcattgaatctgctgttgaatacctccattgaatttttttagttcagttacagtatttttcacgtctttgatgtctatttggtactattttatactttctatctctttgtcaaagttcttagtttgttatttcattgttcttttgacttcagtgaacatctttataaccattatcttagattctcctcg

SEQ ID NO: 121834 - DNA, 814 bp, Homo Sapiens
  misc_feature (291)..(346): n is a, c, g, or t
ttcaatttaatgccctttattttctgatgggtgccaagtcacttactacataaactacaacaataccaagttttcagctaattgtttgcttaaagaatcacagaacttacattcaagatttcatttacatacaaaattcacttgaggttttctggttgaaactttcaatagctttaagaattatattctctaatttttaaatcacttgcagtttaagctcatttgagaaacttttttctccttcagagtaccgtattcatttatcacagcaaaaacccacctttaaaggtnnnnnnnnnnnnnnnnnnnnnnnnnnnnnnnnnnnnnnnnnnnnnnnnnnnnnnnntaagtatgatactgagggcagaaacaatctgaattccatattcgggttcacagggtatatatattttttctgttagatacacactccttaatcactgccaggaagtgtactcttgatcatttagaaataagaaagtgtaggggacttaaacaaaatctatcattgctattgaacaaaacagttgaatcagcatgttctgctttcaacaggaaagtggtttataactactccaagtgactgttttagtcaattcagactgcttcaacagaaaaccacagactagatggctaaacaacaaacatgtatttctcacaatcctggaggctggaaagttcaagatcatggtgtaagtagattcagttctgttgagggcttgcttcttggtctgcagatggccatcttcccattgtatcatccagtggtagtgagcagagattggaggtagtgaggttccatcgccctcacgag

SEQ ID NO: 121835 - DNA, 920 bp, Homo Sapiens
aaaaattgaaaaggcaaatgtgattgaatatctgaaaagctttaaaagtggcctttctgttacgtctgtggcacaaatggctcatgagcgcaggacacttatggtcttgtgtcctatacttcatgtgtgatgccaccagaaatgttatggattccgtattgaacacactgagagtggtatgagccctcaggactgcaccacagagtaaacacaaccttgatatggtggcgaatatgtgtgtctttcttgtttcatttgtggttggggacaaaatcgatgtatttgtctaaatagtcgatattcatcttaacatggttggttgtgtaatcaccagctatattgtgaactgtgcaataaaacagaagcgtttgtgtatataattacctttggatacctgaaattcccaagcttggttacaatgtaatgctcagtataaggctgtgcaaacatgtaagggaataatggtggtcgatgggatatatgaaatgggatctagagggcttcgagtgaagccaatcatgttgaacgaacactggttcagtgtagatgaagtagagtgaggcgtatgcagtcataaaatgaagggtggacaggagattacatttgaagaaaggataagcactcagacttggtctcttttaaattaaaatatttcttttctcatgtgcaaatgtatatcaaagacttgaacaggtattctcttgaaatttgaggatttttagtttttaatgctgtctttgcttaatattaaatatgtgttgcctattggctcccaaattgtgtgggagtctctaaatgtttcctcttgaaggttcattattgaaagtggttaagtgcacaatgctatttttgtttgatagtttgagttttatgaccctatgagtttaaatgaaatctgttaaatgtttcagagttaacac

SEQ ID NO: 121836 - DNA, 738 bp, Homo Sapiens
  misc_feature (633)..(643): n is a, c, g, or t
aacatttgtgaccagttaactttaattttcaaaataaatctgcagtattttgcatgttagtaatacagtgctggtattgacaggtaaaatcatcatctgcttacatagaaaccttcattcaggagcacaccgtaggaggggaacggatacacaataaaaagcaaacgcaggccaagcagcgagccctagagcgtaacaggctggatgtcagatttaaggattatctaatacaactgtttagctgccaatctgataaaggggaagctctcaaccaggttacaaccagaagggaaaaacgtactctgccttttcgtagagcagtggctgtcgtgccttcaacacctggttgaatcagttcatcaacatcgaaactcaattccagttccaagacacagaatttcatcacacaacctattcggtaccccttttcagtggcccacccaaaaccccctcctgccatcgactctctccctcccaaaagaagacatgacgtggctttattattgcagacaagcttcttaagtgaataaagaatgcatacaaaatagtattttaactgaagtcatacaatgaagtctcactcctgtttattatacaatgaattgataaaacaattacttctagtatatatcnnnnnnnnnnnagaactaatactttcagggttctgacaaccacattctagcttaggggtagggccacacctgccccactgaggactgctccttggacactgtggag

SEQ ID NO: 121837 - DNA, 873 bp, Homo Sapiens
  misc_feature (54)..(69): n is a, c, g, or t
gctacttaagaatgaggcagaaatgtatgctgaggtagcccagtcaatccttannnnnnnnnnnnnnnngtaaatttggtctcagaatatttctggcagggtgacgtttcgaagaagccactgctgggaccgacttccattgcagtctctaatgctgggcacctggctatcctcttctgtggctttatccaggcactgattactgttcacatgctgcagggttaatttcactgggtcatactcccagagttggttgccttttaggtggtggcatttgagcattgtaactgggccattaagtttggaaacatccaagcaaaggtcatctgttctaatttctttgttggcagtataagagaaaacctgattaccccccataccatggcaattaaaaattccaactttttcattctcttttctagccatgttatctagacactgattcgtttccacatttcgtatctctcccaatgagaaatagtgacgtggaatttgagaatcaggatatatattctctaggtaccaggaaaaaggtttgcattgtagtttgtgtcttagaccaactcttgacgatatatctccataatctacctttgtaacacctggagaaattatatagaagaaattcttgaattcatccatccacacttctgcaagtcgtctgttatttttattgataatctgccctgtgcctcctggaaacgtgtaaggtgtagctttccgaaacacatgtccaacatgtgagcatgtaacaatttccaaagttcctccacactgccaaatcctaaaggaaatttctaggttttctcctccccaaatatccattccagcatcatatgttccaatttcctgaaagtaatctctgtctattga

SEQ ID NO: 121838 - DNA, 409 bp, Homo Sapiens
  misc_feature (260)..(275): n is a, c, g, or t
cattgtctcagtattctttaccatgattttcggagaaagactctttcaatcttgtaaacatcagtgtgcacagtctcattactatgcagtttcacgtccatggacaggaaggctggttcacagctagtgaaaagctagagaagtctaagttttaatggctgataaaccttacatcctgcagaggaggaaagcacttttccttttttgctacttaagaatgtggcagaaatgtatgctgaggtagcccagtcaatccttannnnnnnnnnnnnnnngtaaatttggtctcagaatatttctggcagggtgacgtttcgaagaagccactgctgggaccgacttccattgcagtctctaatgctgggcacctggctatcctcttctgtggctttatccaggcactgattac

SEQ ID NO: 121839 - DNA, 801 bp, Homo Sapiens
ctttctttatgtctttatcatatttcattttcattacttttagggctcggtgaaaaaactgcttctttaaaagcctgttgcagtagtcaaccacagactccctggttgtaaataaagcttcctcttttgttatcatttcaaaatcatttccatttccactactgtgctgggatcgatcatcttccctcctgtcactgtccgtgtctgaatgccgttctccccccgagccttctgttccatgatttcctggtcctactttcccctcctcatcttcctttttctcactgtctgacttttcctcactgtcggacttctgttgctttttggtttcagacttctcatctttctttaagtctgcttttggtcctttgtattcatgtgtgtacagaggcctgaaggagtcaatgaagcccacatcagcagtcagatttggcaagaaccaaaagtggtgccttcctccagttatgagccaaatgatgagaaatagaatgcatcgagcaacagcaaggagaagaatactggctacaaaacagcctgcacccacactgaggtaataaacacctactctcatttctgctggccaaagggggaagagggtggccgctattactgcaatcacaagaattaatcccatgacaaatgttttaaagtgaactgggtcatagatccatacatacacctcatttccatccagaaaaacctgatcatcatgtggctcaagtttgaattttttcttagtttccttctttttaggagttcctggagtttcctcctttttggattcttccttttcaccatctt

SEQ ID NO: 121840 - DNA, 2284 bp, Homo Sapiens
  misc_feature (832)..(841): n is a, c, g, or t
  misc_feature (1266)..(1274): n is a, c, g, or t
  misc_feature (2172)..(2206): n is a, c, g, or t
tttaatggtgcaagagaattgtatttttattcatggttgtgcctagtaaaattctggtacatggtaagtgctcagtattactgagtgaatgagcaaagacctgaaatactgcggaaacagtaaaagcaaattaccacacaattaggaggaattattttcagacataggatatttaaaacatcactcaaatactggagcatgattcagcaataaattctattccataaaccaggtagataaatgtcacagctttaaaatatagttaagtacagttgatcctcgttattcatggattccgtatttgtgaatttgcctaacctaaaattttgtggtacagcaaaaaacttgctgtacacatattctgagctgaggttgaacaaggccatgttccagctttcatactataaacgtgtcctttttacgctaatgccatggtttttgcatttctgttctttttttgatttcactgtttaaaatggcccccaagcatagtgctaagggcaaaaagctgttcctaagggtaaaaaggctgttgtgtgccttatgaagcttatgtgtcagataagcttcattcaggcatgagttacagtgttgttggtcatgacttcaatgttaatgaatcgattatattaaataaggtgtctttacaacagaaatttacatgttgactgcttgatgaaaatgtgaccagtggcttgcagaaatctagccttgtatttcccctaggttctatatttgctaattcagtgttcgcagtgactttatagaacgtaactaccttgaataatgagaatcaaccatacttgctgttttccagttcctaatagatttnnnnnnnnnnttcaatttacaaaagacacaagatgacttttcttgtcagcagctaactgatcctcatgatgtaaaaccagaaagaggggggaaacaccaaaattcatcaccactgcataatttcaatgtgatatattaaaatttattacttcctgaatagtattcaactaaatctatattatttcaattaaagttacctaggccatatggtttgaaaattgaaaaatccagtaagagggaaaaggaaaaataccttatttaatacattgactttaagaacaatcacatatgcattattcttactatctgaacttagcctctggtaaattcaatcctgcttagttaggccaattgataccctctacaataagccctacatgatcaaaaagcttcatgctttctacttacagcagcatagcaaatctgaagttcttnnnnnnnnntcgccattctattaacaattataaacgattttccatgctctggtacaagaatatttaatgttagccaagaaagatagccatctattccactgaggattgtaatagaggcagccttttgatttttatatttgtttaaagtacacaacttgaatagtaaaatagaaactgagctgaaatttctaattcactttctaaccatagtaagaatgatatttgcccccagggatcaccagatagtttataagaaagtttgtactgacattctgtaagaatccacacacatcagtaagaagctgaccttcctgttggccatgctccaaaatgtctttaagactagacaaattacatatattatagaaaaatttcaggatgaatattgagtgcctgggtattatcacagtaatagtaaaggttaatgaaataatttttatttctgaaaaacaccatgtttataccccaaaataggtatcaatgttactggtgataaactcagaagtgatcattatatatatgcttactgtggaaatgaagtagtagagctctgcaaatgggacgggaaaatacccaggcacttcatcaatgaacatttatttgctaaaaagaaactattaaagtgattgcagccttgacatagttgcattaacatcaaatagccacatttatgtccacttacagggactactataaagaagcaatcaagccaagtttaataaaatgtgtcgatacagaaaacatatttttcacaattagaaaaatttaacatctttaattcaaacacttagatgagaaacagcctaaagcaaagactgacatacactacctatttcaaccacaaagcaagatgctccccggccgtaatggccgaattcccgggcatatgtccggtaccgtcgactgnnnnnnnnnnnnnnnnnnnnnnnnnnnnnnnnnnnccgccgcttcctcgctcactgaactcgctgcgctcgtcgttcggctgcgagagctagcgccctataggagtgatcatt

SEQ ID NO: 121841 - DNA, 1117 bp, Homo Sapiens
  misc_feature (366)..(366): n is a, c, g, or t
cacggatcggtcaaatatgcgggggggagtaataaacgtggcaccctgttagcagcacgcgcgctttctcacatgtgggggaccacaagagatcgccgctataagttggagttttggcgcgacccagtagactcactgggagttaaagagtggacacaggcggtcgcgggggcaacgtatacatactgcgatatggggcgaagaagtcctcgggtgttttggagaagagcgcgccgaacatttaggcgcggaagcaggtcaccgcgggaaagatattaaggctcgtgtccaaggataagcttgttcccgcattcactgggaagagttttgtgtgttttgctgaggagtcgcgtggattaataaggntttttgagccatcattgccggcggggagcggcatcttctgcgtagaaaaaagaccaggggggcagaaggagagattcgccccaaggcgctccctgtattagggttcgagctgaaactcccaaaaacggattctctgcccgtaaaggggagacacaagcgctttaaggggagccgacgggggtgcaaccattaaaccatgaaagggggggacgcaacgggcgcccgagaacgggaaggggttcttagagacggacttggctccaagggcccgaaggcgggccccgaccaagcaaaaaatgcgcgtcggaccgggatagtggtttcactttcaggcgtttcctgaatctttttggtgcgggatgtctttatcatatttcattttcattacttttagggctcggtgaaaaaactgcttctttaaaagcctgttgcagtagtcaaccacagactccctggttgtaaataaagcttcctctcctttcttggcctttgcccactttgaatccaaaagacagtccactgcttttgaagcaataaaataatcaacccggtgacccatcatattggtggactttgttggacagttgaatcgaagatacttggccacagccttctcttctttagatggttcaccaacttcctggatccgcttcttgtgtctcctgcgttccgccatgttggccgctccgcccggttccctccccggccgtaatggccgaattcccgggcatatgtccggtaccgtcgactg

SEQ ID NO: 121842 - DNA, 2061 bp, Homo Sapiens
cttcatcaatgaacatttatttgctaaaaagaaactattaaagtgattgcagccttgacatagttgcattaacatcaaatagccacatttatgtccacttacggggactactataaagaagcaatcaagccaagtttaataaaatgtgtcgatacagaaaacatatttttcacaattagaaaaatttaacatctttaattcaaacacttagatgagaaacagcctaaagcaaagactgacatacactacctatttcaaccacaaagcaagatgctctcactgtgactgaagaaaaatcatttaatattcattattagttagtataactccaaggaatgattatgctcataagtaaacaagagtttccaaagacttgtaactaagatgtataagacgtaaagtcaaactgcaaaactagttcaaagcaattagagtccaatagttctcttatgttttctttcattatctttattttaaatttgatattttagaataggaaattatctttcacagcaatgcctcctggtctgataatacagtatctcatttctgaatgtaaagatttaaaataaatcaaaatgaacattaaggcgtacaaagctactttaagtctgctcttaagatcagtttttgctcatattcaaaatacatggaatgttggcacaaaactgaagctgctgtagaaagatcacagatgttctgtgggttactcaaacttccatttctctaaaaacatacccttacatggtcttaattttatgaatttaagtgttgagaaatatctaaataataagtaacaattaaaataaaatgttttatttgtaaattatgtacagaatacactttacgttacgccaatgaaatggggagggaggagggagagccatcaccttccaacaaatgctgttcactttctctgctggagacgaccatctttctctcagtcagacgtacaaatcagtgtggatttcctacattggaaaaataatttagctaaaccagaagtgttgctgcattgttactagttggcttgtttccacaaaatagttttgaactctgctaactcagaatcttaaaagaaatctcctggtataattttataatgaaaaataaaaactatcaaggacaatgagtttacacatcttaaagaaactgtgaaatggctacataactatgcataatgtgaaatgttggagtttctttgttccttttaaagttatttttgattagtctaacagtaaaaagccataaaactatcaaaaattgccattaatgtaaatttaactgtggaaagtacatctttgataactgtcaaaatgaatgagacctacttactgtaaaattatcaaatggataaaacatattaatggctttaaactgtaccaataatagtgccaatattctataaaatgaaggaccgaatataactgcttgaatgtcaaatacatttcagtagatagatttaaagaatgctacaaatgccatgtgttcaatatggtaatcagccaacatagaaaatccaacctcttgtacttattcattcagtcccaaaattagtcagattatgatttttcatgtgaagatttaggtgtttctccatcattttcctcttcctcatcctcttcacaatccccatctgtttgctgttccagttcctcttttgttatcatttcaaaatcatttccatttccactactgtgctgggatcgatcatcttccctcctgtcactgtccgtgtctgaatgccgttctccccccgagccttctgttccatgatttcctggtcctactttcccctcctcatcttcctttttctcactgtctgacttttcctcactgtcggacttctgttgctttttggtttcagacttctcatctttctttaagtctgcttttggtcctttgtattcatgtgtgtacagaggcctgaaggagtcaatgaagcccacatcagcagtcagatttggcaagaaccaaaagtggtgccttcctccagttatgagccaaatgatgagaaatagaatgcatcgagcaacagcaaggagaagaatactggctacc

SEQ ID NO: 121843 - DNA, 986 bp, Homo Sapiens
cacggaaaaaacatctttaatttgtcatcattaagactatagaaccaatgaatgtacttgtacgtcaaacacagcaatgagatattaacagctttaaaacttgttgaaatcggttcataatataaaaacatttaagcacgaagtggttgattttaagttacttttctgaggcattaaacagttcgaagtcattttgggtacattttatcatgtcctcaaataaggcaggcatattaattgttgcacacactttaaaaaaggatgaaaactattaaatttatgttctcatctattagaaacaatctttactaggtaattaaacttttcaagtaattaaaatataatgtgaaattttaagattttaatctaaaagtcagcaaaaccttaacatctcctgtatttcacagtgttggccacatcttagctggattaaaataattgttcaaactgtagggctaaaccctacagaggaagcggagtgctaaaaattataccattggactgagagaagaaattctttcacaccaagtccttctcttcttgttaaagcagaaaactaaaaggataattttagccccacttagcctttcagaagaaaaaggctgcagagcacaaaggtttcgtttcctgatgacaataaaaaaattctctccctagaagggcctaactccaggaaagctcagaatagatcattctggaaaggattaacaacaacctttctccacagagagatttaaaaagcaaaacttaagtgtgttatatctaaattacaatgccacacagtacacattatgtgtttaaaaagtaaagtcaatcccagtgataacagttggaaattccattgaaaatgggaccttcacacctacacttaaaagagctgcccatcattgttttggttttaacagtctcttctgaaatcagagacttgtgtaaactctcacaattagctggcaaaaggattctcagcaccaatgcggattcaatac

SEQ ID NO: 121844 - DNA, 1323 bp, Homo Sapiens
  misc_feature (75)..(106): n is a, c, g, or t
  misc_feature (1089)..(1151): n is a, c, g, or t
gtcagtcaacaacatttattgagcacctactatgtgcaaagagagcactgtactgggcactgtctggggaatacnnnnnnnnnnnnnnnnnnnnnnnnnnnnnnnncatggtccctgctctcaaggagcttacaatctagtacaagagaaggaatacatatacatgaaataattgaacacttttacagagcaacacaataacaagtgcaaactgatataatacaaactgagtacataagtgctaaaagaacaaaggcttaagagagaatagtcaggcagagttagagaatcaaggaatattccttgaagagttctaagccagattttcatagtaaagaacaaagactggtagggaaaggagaagtcatcctagtcaggtggtggtaaaaaggtgagaagaaacttgggacaagaaggctgaagatggggccgaaaacagcaaaatactaactgtccttagcattttggataaggagcttggattaggtaaataagcaatagaagcgtttacaaggtccttaattttttaaaaaaagttgtaattcatattgtaataaatctaagtgaggaaacagattcagaagctttacattttcccagatgtatggcaaaacaaaagatctgaaatatttgcaacaggattagatagcaacatgtctctccataaatgttttgtgggttgagtttctttaaggagaacttaggaaaataaggcatgatggagagggtgcaattgatgaggtctgatacataaagcaaagtcaattccttcctgagatgcaaaggaacagactccattacctggctttataaaaaggtcaagagtaaatttgggtacacctgtctctatacaagcagtagatttaatgacatctattatcaattgaaaatattacaataggataaaaagctcatttcgccaaaaaccacacagagtatattaagcttgtaaccaaggggaacagaatatattgacagtggcaggctggcataaggctagccaataacaagttccaatatatgaaacagtgtggtatttctggatcctagcagcaatattttagcatctccccccatccacccacaccnnnnnnnnnnnnnnnnnnnnnnnnnnnnnnnnnnnnnnnnnnnnnnnnnnnnnnnnnnnnnnnaacaaaaataagtgtgtttaaaatatatatgttactgccaaaacccgaaccgcaggaagaactgataatggccggccattatcgccaatggctggtaccaaacagccaaacccgaaatgttgcccggccgtaatggccgaattcccgggcatatgtccggtaccgtcgactg

SEQ ID NO: 121845 - DNA, 1194 bp, Homo Sapiens
ttttcattttgaatgactttattgagaacattttgcaaattagattttacaatttaacattttacaattagaaattttatctgctattacataagctgcaaacttttcaaaaacactacagaaaatcttttatttctttggatttttctgttccatgttgagctcctgagatatattttttctttcagcttcattttcatcttccttggaagatgaagaatcacattcctgacatatccatccgtagcctgtctgtttaggagactttttcaaaggaggatccaaacagccaaaatggtagcagagtctgcattcatcacacctgacaagattttcattgtctccagttcccttgcaagttgcacattcagttcttaaatcttcagccttgggcttcttttgcaacacagactgtctttgtcttctctctctaggaactctttcctcatgtttttcttcctcaggaacgaagcttcgttttcgtcctctggttctcgtgtttcttatcggaatcttcttgggttctggtggcacatcctgtggaacaaatttcactggttccttaatctgcctccttgatcgtttggttccatctggtagggtttccatggccatatctgcttccatgtcactgctccctgcctggtcacattccgagcactgccaataactgtttttggtctttcttggcatccttgtaagaggaggatccagacatccaagatggtaatgtagtttacaggtatcacacaataaaagaagatgctgatcatggttcttcttacaaatcccacaactataaagtactgcaggaagagtagatgtcttttgtgtgcctccttcttttttacttggttttctctccttgggtgctcgcaaaattgccggtatattcaacttctgccctgtgattctgcctagtaaagcccatattccttgtccttcacttcgaagttttccattcaggttttgtagttcttctaaagattcacatagcttattatattctacatgaagcttttcttgttcattctctaatttatcttttatattcttttgttcagccatattttcctgaatttgaatcatgcgcatatttctctcaaaataataattcacaaaatctgcagtgagagctggttgcttatgttttctccttccatccacactagaactagtatctgaattgtcccc

SEQ ID NO: 121846 - DNA, 1284 bp, Homo Sapiens
acgttttcattatttaatataaattttatcttatatttactattaaaattttgattgtgaaaggtattattttatcacatacattgtaagcaatcactgcttctttaacatttgttccagcatgaagaaaacttagaccatcccttcattttaatttttttctaacttaagtatttctttgcttcttgtaatgactgcacttagctttgttttctaaattagtggtcttttcaaaggtacattgagtccatctgtatttaataatactgcaattattaatacatgtttatagaattagtacataaattaatgccttttcagatccttcacatccagcttttttaccttaagttaatatccatatgtatgagaaataaacgtaatctgataatgcttagttaacttgatgattggacaataacaatatgaactatattggattcactgttacttcctctttattcctgcagtgaaaacaatattttcttatgtcagatttctctcaatctcttagtcaatgaagacctgaactacaacaatatagagtcccattttaaattcaaacaaagatatttaggtttgacaacagactcatggtaatgtcatttaaaaagatggatccaatgaacacagacaaacatcaaagttttcaccatggcacaaacctctgccacaatcactcataataattcaactgccttcatatttggcagtaacgtcatgcaagtgaatttgctgatgattagcaaaattacaaaatgaaagtcaaggtcacttaatcaagaattacagcaacaaagaaattctaggaatgcaggtcaaggcaagaggctgcagctggcctgataatgataccacttgcctaatgttcatttaggaatttgctatcacaaataaaacacgtatctcctctgagttactagaacagaaaaggaaacaatcaggtattacttatcaccattatatgaccatgaaattaaaatatttccttaataatgattaagagaaaaaaatcattctcatgtgttcataatagaagctctatttctgaatttaaaacactactcagtatttgcttaagtactgaaatttagacaatatagcttttgacatattaaaagttctataggaaaaactaagacctcttaattttgctttaatatcaaactaaacagagcagatgaaaaaattcaataagagcatgggttaatccgattcaagaagtgcttccaaaattcaaccacctcgcttcttcttaggagaaactgtacatcaacacagaac

SEQ ID NO: 121847 - DNA, 1310 bp, Homo Sapiens
  misc_feature (1013)..(1242): n is a, c, g, or t
gtacaaacatgcatttatttttacagtttttgtggaaagaggcaaaacacatttaatcaaaaacatgaaacaccacatttgaaaaaagacttatctattatgtataaaggaaaatatccaagacaatttctttaaaatatatacaattctaacatagttatgcaatatatacattcatattttgacttaatctgccaaaataaacaggtacatatgaaactttatttacataatggctacagtttcagtctttagagttcaaagaaatagttaagattttcacctatttcatacttttcccccatgtttctcattcacctctagaggtttaaattaacctttcaaattgattaaaatgggtatgcctgaatgtacacaaaagggcatagtcctacaaagttgtttataaattgttttatgtgtgcaaattgaaatattaaagatggatcagggatctcagtttaaggaatcctgccttctgtatgatgatgtcttaatttttgagattttcatatattgggttatagctatatatcaggacaggtaaatacattataaaattataacctttataataatttttagtataatcacttgtgtgactataataaattggctttagttttctttactcttcacagttttaataggtaactattttacaagaataacattgctaggtagaaaaatttctgttcagttaggagttcttattttgctgctgaaatgagtcatgcacaattttaaatctctgtagtttcttcataagctattttactatcttactattttataagccttgtgttgcagtcaagtttttaccacattctatagaccttgtctgtacaccatttatgaaatggaaatttgaatatgacatcttttatgccctctacttacttttaaagcaaaaatattgttgaataggaacacatagcttttatttaaacaatgttttttccccctaaatttcttgtatgaatactcacctttgcttaaaagtgcttgagaannnnnnnnnnnnnnnnnnnnnnnnnnnnnnnnnnnnnnnnnnnnnnnnnnnnnnnnnnnnnnnnnnnnnnnnnnnnnnnnnnnnnnnnnnnnnnnnnnnnnnnnnnnnnnnnnnnnnnnnnnnnnnnnnnnnnnnnnnnnnnnnnnnnnnnnnnnnnnnnnnnnnnnnnnnnnnnnnnnnnnnnnnnnnnnnnnnnnnnnnnnnnnnnnnnnnnnnnnnnnnnnnnnnnntcctggtgtgataaatggtgcagagacaagtggctaatggtttatagtaattcacctactccctggaa

SEQ ID NO: 121848 - DNA, 990 bp, Homo Sapiens
  misc_feature (876)..(910): n is a, c, g, or t
tggaactgtgaacaggaaacttggtggtagaaattcgttcatttaggatttttatttgctgctgaaaggagtcaagcaccatgtggaaatctcggaagtttcttaataagacttttttactatcgtactgatgttaataagcttgtgttgcagtcaagttttttacgcacattctgatagacctggtctgtaccaccagttgatggaaatggaaatttgaatatgacatcttttatgccctctacttacttttaaagcaaaatattgttgaataggaacacatagcttttatttaaacaatgttttttccccctaaatttcttgtatgaatacttacctttgcttaaaagtgcttgagaaatactgccccccaggaggcatttgacaatgtctggagacattttttgattgtcatgactgcggggggagcatgctctggcatcgggtagctagaggccaggaatgctgctaaacataccttctaggacagggctgctgtcctacaaggtacaggacagcccctgcaaggaagaatcacctggccccaaatgacagtagcgcccaggttgagagaccctgtcctggtgtgataaatggtgcagagacaagtggctaatggtttatagtaattcaactactccctggaaacagtgtaaactaggctgattacctaaggcaaggctaaccaaagctttcaagttccgtatatgtatgtttagcacttatttaaggaagtactcacctaaaggaggtgagacagagtaaaaggaaggatgtgctataattgtttgtatagcacattgaaaagctagtatttacatataccccggccgtaatggccgaattcccgggcatatgtccggtaccgtcgactgnnnnnnnnnnnnnnnnnnnnnnnnnnnnnnnnnnncggccgcttcctcgctcactgacttcgctgcgctcgtcgttcgtctgcgcaagctgaggccctatagtgagtgtatacca

SEQ ID NO: 121849 - DNA, 536 bp, Homo Sapiens
ccgaacttgctcagaattttattgggattaacagggtccacggggagaggcgagccttctgggggacggggacaagaataccgcaaagaataccgcaatggcgaagcggccttgcatagacaccgaggcgggctagcggcgcggcgggaagaggagagggatggagaaagaacttgggagaggaaggtggcagcagcgcctccatgggcactgcgcggctgtgacgaaggccacagcggccctccccgcttcgggggtcagggtgtccactccacacagcacagggagaggggctggggccacaactgactgggagaagtgggtagaggggccctgaccaaggcatcacaataaatacagttagcagcacacagaagcctgcgggggcggagggccaaaagaaggggactagccccctttccctccccccaaaataagaactctgcaatgactaaaccataaaaataaactttaaacccgtgtacgaagtcggtcaccccccacaagtgcaatgtggggccgcgtggccctagctg

SEQ ID NO: 121850 - DNA, 804 bp, Homo Sapiens
  misc_feature (604)..(604): n is a, c, g, or t
  misc_feature (609)..(609): n is a, c, g, or t
  misc_feature (793)..(793): n is a, c, g, or t
tttatgtgggtttttaaaatttgttctgagtgggggagaatcttagggggaatgtactgaatagtatcatgggctcagctcccccatgcagggccaacaaataccaaaatgagtaaactgggaagcttttctctctttctgtcttcatcccagatcaaagaatcccgagttaggatctggatgaaggataagcccctgaattgtcgatgggctcacccccacactgacccagcatctgaacttgcttaacagggagccggggctaaactgcttcaccctgcctgagaaccagggagcactgcatttctccacagggtggaggagaagaggcagaataaaccaagcctgggacacctccctcctgtctaggtgtactcattcttctgtttcaaaagaaggcaaggacatgaagtcaacttctacctatcttctgctgctggtgtcttatgtattctcagtttgacctgattcctcttctgtcttttgacttaacattaggggttcttggtcataacctgctctgatgtacataaagatttcaggttcaatatcaatgtgtcttaaaacagaagtattttagcgggtggggggtggggtggtgggngacanacaacgcaggatataattgccaaaaccaggcttgaggttggtgactcttgaaagattttctttcttcaggcctagatcagaaaattaagtgcagcaatatcatgaattctcagaagccctttcagggagccagtgagtcatacagtatccacagttgagtcacttaaagatgtcagtatacganacattattcac

SEQ ID NO: 121851 - DNA, 2576 bp, Homo Sapiens
  misc_feature (172)..(185): n is a, c, g, or t
  misc_feature (1583)..(1583): n is a, c, g, or t
gacaaagtttttgtaatcacgcttgggtgatgttggtattaataccacatcaatttgaaattttacaggaaccaagattcaagctccttaggtgctactgtatttttatgttgcacgcacagacacgtacacacagtttcattagtaatttttcatctataggtttttcttnnnnnnnnnnnnnntcctgtgtggcacaaagatctcttcaattatctaaacacagcagcaacaaaagaaaagaactggatgtggcacttccactgcagaaggtcctttggaggggaagcccaaaaagacaatcactgacttcctgggagggcagaggatgaggatggagaatgcacttcctactaggacatgaaaccagttaaaacactcaaagggggctaagaaaataagatggagtaaggcaagggtaccttttacccatccaaattcctaactaatttttccaagacacgtagacaatttccttccactactttttgcagctgccgtactttgggaccatcaaatatcatagcccttactttaaactcgccagtgcatattccctctgaaggatcatgactatgagtgagaacctgaaggaactcacagatgatttttctttcaagttcgctgaattctcatattgaaggtgaagaaaaaaacttgcccccaaatgggaatcggagatttgaatctcgggaaaagatcaagaaaaaaaggctttctgtatttcacctcttgagaatgttcccccccagactgagataggatcacaaaaactcaataactgaggagcccacatgcaggttatttttttctctaacaagtttacagcagtgcacagcagttacagacatttattttatagtaagaaaagtacaaccttatttattaaacttgaggtgggcaggggagagggaggaaagcacattcgggaacgagttctcaaactaatgctcagaaccggtgtccagtgacgtagaaaccactttcccaaatggcggagcctttccttccctggggatagtggcagagggagtgaccgccaccgcagcatgcctgctgactccctctcagtcccactttccatttctattcttttttatcagatggcattcttggaatcaggaattatcactatcacctataagttatttatcaagttgatagttaaatcattaaagaaaaggagtatcaggggtagctgctcacattgtggggcaggaagataggatttgagggctgcaaaataaaaccaaggaaggtatcacactcctgtccccaaataattttttcataagttaatcatgacttcttaagggcaaaactataatggatagctgagtaagactagtgctgaaaactggacagaaggacccagaggtgttctttcattttctctcttacctccaatctttcccctttcaagctacaggtaaaggctctaccaccattaaggtattgacttatcctatgaatttgattctttcttcttctgagttctaagatagttcttttatcagtccatcaatttttgtgcttgatactgagggttaaagggaaaggatgggagaaaacaccaaatttanaaaaaagcttggaatgcaggctcaagctgacactgagtattttccttcatagtacaagtaacgacgttataactattaaatggtgttttagtaactgttgcatttctggtttccatgtacttattctgccttttttttggcgattccagggagttttgcttggatcttttcaacaattgacttggtctgatctcgggcgatgccaacatagtgatcaatctgggtcttgtacttctcatagacaatcgggacactgaaaatgagcagttcagcaagaattagaagggtgattccgttaaaaacagcaccaacataggtcatcagccacatgaagacagccagcttcaaggagtcaaccagatcttctaccagaaagagacgaataatgagtttcagggccctgttgatgtgcaccatggcagcattcatgtaattatggaaagcttctgaggacagagtaatgtctacgtccaggtaggctttgaatggatggccttcttctgacttctgtacagcttggatgacggacttgtagatcctgaagctgatggtgacagagagaagagccaggatgaggtaagaaaccacactgatgacactgaaagctgccagggaaagcagcatgatcagcgtggtgccaaagacaaacccagtcttcttcacatctctccagaaaatcagatcgtgcaccgcacaggaggagctgcagctcttcgtccccagggcggggcaggctcctgggctcccgccgccgccgggcgcggacggctcggctccgaaggacgacgaggagatggaatgggactgagtggccgccgacggctccgccatggctacgcgagcgagggtgggagaagggtgaaaagagatacggggcgggagagagggaggggaaatagaataatccggcaactggctcgctcaagtccctttactccgcctgctccgaggacggaacggacgcgtgggtcgacgatatctctgaaattccgg

SEQ ID NO: 121852 - DNA, 1077 bp, Homo Sapiens
  misc_feature (385)..(448): n is a, c, g, or t
  misc_feature (460)..(544): n is a, c, g, or t
ggagctcgagggccggcgcccctgcttgcctctgcgggaggtgggcgcgcccgggacggaacctggggcgtcagaacgaaaggcagcggcgccgcgcttcccagccggccagcctcccgcgcagcgccccggccggaagcctcctcgccgccgcttcctctcgagaaggcgcggggcgggctgtccggcctgcagggcggtcgagcccgcggcgccatggctcacgtcggctcccgcaagcgctcgaggagtcgcagccggtcccggggacgggggtcggaaaagagaaagaagaagagcaggaaagacacctcgaggaactgctcggcctccacatcccaagagagaagcaagcagaaggcccggaggagaacaagatccagcnnnnnnnnnnnnnnnnnnnnnnnnnnnnnnnnnnnnnnnnnnnnnnnnnnnnnnnnnnnnnnnnccagtgatggcnnnnnnnnnnnnnnnnnnnnnnnnnnnnnnnnnnnnnnnnnnnnnnnnnnnnnnnnnnnnnnnnnnnnnnnnnnnnnnnnnnnnncggaagcacagcaggtggaggctctgccgggcccctcgctggaccagtggcaccgatcagctggggaggaagaggatgggccagtcctgacggatgagcagaagtcgcgaatccaggccatgaagcccatgaccaaggaggagtgggatgcccggcagagcatcatccgcaaggcttattaagggagatggcgaggtcctagaggaaatcgtaaccaaagaacgacacagagagatcaacaagcaagccacccgaggggactgcctggccttccagatgcgagctgggttgcttccctgagggcccccgctggccaaggcctgtggacgacgctggcggcccagcctgggcaggtttcagggtgccagtgggaagcctgatgggtgctggtggcctttcccccgtggattggtctctggcccagcccagtctcttctcaggggcagggggtggaggttggggtcaccggcctgcttggcacccccatctgaaagagcagcacttctcagctattaaaggccccctggatagac

SEQ ID NO: 121853 - DNA, 1238 bp, Homo Sapiens
  misc_feature (72)..(113): n is a, c, g, or t
  misc_feature (137)..(193): n is a, c, g, or t
  misc_feature (248)..(248): n is a, c, g, or t
  misc_feature (250)..(252): n is a, c, g, or t
  misc_feature (829)..(881): n is a, c, g, or t
  misc_feature (911)..(982): n is a, c, g, or t
gtggggggaattcccaagccccttttttgcactgtccccgggtttttcctttgggggaaccaaggttttggnnnnnnnnnnnnnnnnnnnnnnnnnnnnnnnnnnnnnnnnnnaaagaaaaggtttttaaaaaagcnnnnnnnnnnnnnnnnnnnnnnnnnnnnnnnnnnnnnnnnnnnnnnnnnnnnnnnnnatccgcaaaatgtttgcgccggcggtgctttgcttgcctccttcttttttctctntnnntggtctatccagggggcctttaatagctgagaagtgctgctctttcagatgggggtgccaagcaggccggtgaccccaacctccaccccctgcccctgagaagagactgggctgggccagagaccaatccacgggggaaaggccaccagcacccatcaggcttcccactggcaccctgaaacctgcccaggctgggccgccagcgtcgtccacaggccttggccagcgggggccctcagggaagcaacccagctcgcatctggaaggccaggcagtcccctcgggtggcttgcttgttgatctctctgtgtcgttctttggttacgatttcctctaggacctcgccatctcccttaataagcctggtgcgccccgtctcagggtccaccaccttgcggatgatgctctgccgggcatcccactcctccttggtcatgggcttcatggcctggattcgggacttctgctcatccgtcaggactgggccatcctcttcctccccagctgatcggtgccactggtccagcgaggggcccggcagagcctccacctgctgtgcttccgccttctccttgcnnnnnnnnnnnnnnnnnnnnnnnnnnnnnnnnnnnnnnnnnnnnnnnnnnnnntacttcccccgcttcttccggccatcactnnnnnnnnnnnnnnnnnnnnnnnnnnnnnnnnnnnnnnnnnnnnnnnnnnnnnnnnnnnnnnnnnnnnnnnntcttgttctcctccgggccttctgcttgcttctctcctccgccccaggggccgtgctggccttgcgaccttgggatgtggaggccgagcagttcctcgaggtgtctttcctgctcttcttctttctcttttccgacccccgtccccgggaccggctgcgactcctcgagcgcttgcgggagccgacgtgagccatggcgccgcgggctcgaccgccctgcgggccggcctcgtgccgattaacagccggcctcatc

SEQ ID NO: 121854 - DNA, 938 bp, Homo Sapiens
  misc_feature (83)..(117): n is a, c, g, or t
aactatctgacctactatgggcgcttacgcgctagtatcgaacgacgagcgcagcgaagtcagttgagcgaggaagcggccgnnnnnnnnnnnnnnnnnnnnnnnnnnnnnnnnnnncagtcgacggtaccggacatatgcccgggaattcggccattacggccgggaggaaaagaactgggggtggattttggcatcgtagcatatcgattaaagaataatcaggacatcagatacattttaatacatagctggggccttatgttgtagatgaagcttgctgtttttagcaagttcctgggtttcacattcatttctgctgcatctagtagctccacacatttcataacctgatctctttatttgtatgcaaaaaatactgtcttaatacagagcagcatttttgtaacaaagagactcgctggagctatttggtgcttgaatgtgaccatcctttttacttttgctaagccttatttaaattttgtataccgtggaatatgtagaatttgtcaaatcattttagtgctgaaggtttttgatttcttgtttttgtttctgttgttgcagtttctttggtggcttgttttgtattgtaagatggcacttgctgatataaatactaaggcactaagagaaaatacagataagtatttataagttgcttgggaaccaatagcaagaattttttgtttggttttgtaagaagaaaaaaacaattaccaataaaataaactgatctagcaacccaaactctcttggggggatggtcttaagtatctttcacgctataaaattgttcatctaagcacagcatcatcttatggccttatggattgtaaatcttctagtgaggctataaactccactctgaaaacaaaggcataatttaaccgactgctcagttgtccttcgttgtaaaatgaattggctttggg

SEQ ID NO: 121855 - DNA, 681 bp, Homo Sapiens
ggtttttgttgttcaaatttcccttttacagtaaaactactgaggtgacggcatatcccgccaccatggcaatatcaacttcctgttccccagaaggagcgattagaaaaatcaggaaggagctgggaactacagcaccagagaggtgaacttgacctctggtggacaaagcaaccatcttggctggtgattgaggtggccaacctggtgcccaacaacagctttgatctaataaaactgagctgggaggaaactgaggcaacacccaattgcacactagagggcaggaagaggtatcagctggtcactatggaaacagtggcctttgctaagtaccactgtcagctagaccagccagtaggccaccattttggtcactaagaagggaactgtgttgagtctgaaaggagtcagaaatgtaggatggaatgaacaagacagccatctgggttactcgggagagcacatgggttcttggggtagtcctgttgattaacagagattatactgggatatggaaaggaaagaacaagacaaattaggcctgccacagcacatggcagtcatcttagctgtcctaaaatcagcacagagcacaagggaagggagatcttgggaagtgccactgaagactgggaaaagtccttctcggtccacctctaacctcttacagtcagtaag

SEQ ID NO: 121856 - DNA, 882 bp, Homo Sapiens
ggcaacagatcagccttgccctgggaaacccacctccgcgatcatggtatctcccctgccagggaagtataagcaggttttattaagatgccagggcgacagcaccaggtcagagctgcggcaggaacgccaggcagggggactgagtgtgcgggagagggcggggcacaggacagctgagggaggggtcagggtgggtgcgcggtgacggggagggcaaaggtggtgtcagtatcttcattttgaggattggggttcagagcacttctggggtgtcagctcctccttgtccccccgtggggctccgtaggactggaaagaggacatgaagagctctgacagagagcagcagaaactctggaactgtttccagagggcctgcactgcatggaccagggccaccaccttctccttcacccaggccagaaccccgtgccaccaggtctgcagccgctgcagcatggcctggaaccatctcatgaccttgtcacaaaagctctccccaggctcctcggttgcgggatcctcaacatccgggacaggggatctgttgcctcggcaccgtaatccatctctttctttttcaagtagaggagtgagctctgggtgctgctcctcataataagccgccactgtctccaggtagccctctttgaagtcgtcctccagctctgccaggctcgacatcacctgtccacgtcctgattctgcattttgcattttatcataaaatctttctatggcctggtgcattcgggccttcagcttcttcatgtcatcagagaggaccttcgggaagcacatggcggccaaaagttcaaggagccaaggcctgagatgacccagctccactgagacagtcaccttctgcacgcagtcccc

SEQ ID NO: 121857 - DNA, 806 bp, Homo Sapiens
tttgggggtcaagctcctccttgttccccccgtggggtccgtaggactggaaagaggacatgaagagctctgacagagagcagcagaaactctggaactgtttccagagggcctgcactgcatggaccagggccaccactttttctttcacccaggccagaaccccgtgcccccaggtctgcagccgctgcagcatggcctggaaccatctcatgaccttgtcacaaaagctctccccaggctcctcggttgcgggatcctcaacatccgggacaggggatctgttgcctcggcaccgtaatccatctctttctttttcaagtagaggagtgagctctgggtgctgctcctcataataagccgccactgtctccaggtagccctctttgaagtcgtcctccagctctgccaggctcgacatcacctgtccacgtcctgattctgcattttgcattttatcataaaatctttctatggcctggtgctgtgaagagaggcagagttggcaccaaagggccggatccttgtccctccagggtcccaggtgtcccacagtgtcctcagtgtcacacgctgagacccaggcccccaacccctgagcagaagtagggaggagcattaccattcgggccttcagcttcttcatgtcatcagagaggaccttcgggaagcacatggcggccaaaagttcaaggagccaaggcctgccgagagagacagaggtctggggtccctgggaggaatgagggtccgtccctggctgggcccctgctccctctgagctggggtgggagtctctgagcccc

SEQ ID NO: 121858 - DNA, 770 bp, Homo Sapiens
  misc_feature (39)..(39): n is a, c, g, or t
  misc_feature (62)..(63): n is a, c, g, or t
tttcttttttgtccggcccggaacacggttttttaattntgttgttgcggttcacccgtttnnttttgggtattcttccccctgccaggggaaggtataagcagggttttatttaagatggccagggcgaacagcacccgggtcagagtgccggcaggaatgccaggcaggggggactgagtttgcgggagagggcggggcacaggacagctgagggaggggtcagggtgggtccgcggtgacggggagggcaaaggtggtgtcagtatcttcattttgaggattggggttcagagcacttctggggtgtcagctcctccttgtccccccgtggggctccgtaggacttgtcacaaaagctctccccaggctcctcggttgcgggatcctcaacatccgggacaggggatctgttgcctcggcaccgtgatccatctctttctttttcaagtagaggagtgagctctgggtgctgctcctcataataagccgccactgtctccaggtagccctctttgaagtcgtcctccagctctgccaggctcgacatcacctgtccacgtcctgattctgcattttgcattttatcataaaatctttctatggcctggtgcattcgggccttcagcttcttcatgtcatcagagaggaccttcgggaagcacatggcggccaaaagttcaaggagccaaggcccgagagagacagaggtctggggtccctgggaggaatgagggtccgtccctggctgggcccctgctccctctccc

SEQ ID NO: 121859 - DNA, 2105 bp, Homo Sapiens
  misc_feature (306)..(328): n is a, c, g, or t
  misc_feature (454)..(491): n is a, c, g, or t
  misc_feature (996)..(1006): n is a, c, g, or t
  misc_feature (1226)..(1235): n is a, c, g, or t
ccggggaaaagggcccggagaaaggattccaataagcaggagtcagttagtttgcccccccaagatggaaaaaagttcctgcagtactctctcccaaataataacccttactgttcccttgtaattaaattccccaatggaaaattaaaggtggcgttccatgtcaaggactgtgtgaaatttgtttttaaaaaaagtgattaaaaaattaacccgtttgggtatccattggaaataatgttaccccataagggcgggaaaattactgaaataacggttaagggtcaaatacacaagttttctttnnnnnnnnnnnnnnnnnnnnnnnttttccagagaaataaatgctagataggaaagcaggactttcagcaagatagcctttcagaccaatttgaagcaacacagacacattataccctaccatcaaccccccagaaattctagctgaatnnnnnnnnnnnnnnnnnnnnnnnnnnnnnnnnnnnnnncttcttccaaaatctcatgccccagtgaatgtcacggggaaaattcccgacactgaactttgtccgcctggcatttctccctttagcagcatcacctctatttctctgttaggacatttgctccatctgtatctagtcacagcaaatccaatctcctggaatcagtttaatgagcagaggagattatactggagtcagctgaaggacatactttaaccaaacgctctaaattaacaaccaagaatgtagacctcaaattcttattctcaattcagcatctgatcaattatttggcactagctggataaaggtctaatcggaatttgtgagccgaggcagatgtagttaaatactaaccaatatttgcaatctatgagttagtttcaaacttaaaaggcaggtatagatagccatactcaaaagtatttcagaattggagaagaaacattaataacaagatataaataaaaccaggcagattagcttggcaaacaacaactctggnnnnnnnnnnnctgaaccaatcatatcccattgataattagcaaaaatgggcatttttccacccttaaactagtttaattacaggcagatgtctttctactatactaagattttctatatccattttccctaatctttagagtttaatgagaaaccatttattctacaaagaaatacagcatatatggccacagtctaaatacgcttataactggacaattatgtcacttnnnnnnnnnntcttgcactgttacatcattactctatggtaattcaataggtgctgggatctgccctcaccaaaaagcatggcactcactgcccagggtgaatactaacactgcacaaagagaagcagtaacagcaaagtctccatagaactctttctatttatttaactgtgtatgagcatttagttaatgctccaaattgaaaatggtgcaataaaagcaactttcaatatataaacagacaggaagctgcgatgccagtggccacttggcgctgcaagtagggaaaataaagcagtttgcatgagtgaagcatggattggggagaggagaaaagggaggcacaggaggcagatttcagacagacagtgacacaaaactgttgtactgctggatgtttcgtttgaggatgtctgagcatgggccaagaacacgttcaaatctaggtcggtccagcttaacgcacttcaaggggccacgagcaacaactgtggcagcacgaggacgattcatcagtagtgcaatttcaccaaaataatcagaaggccccaatcttcccacttcaacaaactcttcattttctgaccgacgttgtagcacagcagctgacccctctaaaataatgaagaactcatcccctggttctccctgcaccacaatcttctgcccatcttcaaactgcactggttccaatgcatcagctaccgtaagacgttcccacttgtccagagactctaaaatagagactttactaaggaattcctcatacatcttccgctttctcagtgtgcttcccatgaggattcttctatagctgtctcggtcgatgcccacaattcacatttgtctttgctttgacagtggctgctctcggtgttcc

SEQ ID NO: 121860 - DNA, 1116 bp, Homo Sapiens
  misc_feature (75)..(91): n is a, c, g, or t
  misc_feature (657)..(703): n is a, c, g, or t
  misc_feature (780)..(969): n is a, c, g, or t
ggtaacgacggccagtgccttaccgaaattaaccctcactaaagggaaaaagcttgcggccgcggctgttggcgnnnnnnnnnnnnnnnnncaggtaacaaagtccagtctgttttatttttaacccaaatattccaaatatacagaaaattaccagtacaaagttaaacacattcagatttatttacacaatgctaaagaaatttgagttttatttccattttgtggaattttatcatggggtctggctttaatgtgtaactgacgtgggtcactgaaactcgattatcccacctcacatgcaattttctgtcctaagggaatagaaaacttgggtttttagggcacatgcagtaatgatcttaatactgctttacactttcgtgggaaggcagctgtcccacagcctggggaaggaccacatgctcagaaagggaacaagagagagggctgaacaacaggcacatggggaccctgagcatttctgtgcacgaggataaggagagtatgaccaaaaccctcctccctagaggtccaaacacaggaggtgggccaaatcatcagggaacagtcagtcacccgcttgtggctgagggcatgcggaggatgagaactacattaaggatctggggcatagcaataaatcattaccatgtnnnnnnnnnnnnnnnnnnnnnnnnnnnnnnnnnnnnnnnnnnnnnnnaaggtacagattagtttatgttattccttactaacaagtacactcctcgttccgaattcttggcctcgagggccacnnnnnnnnnnnnnnnnnnnnnnnnnnnnnnnnnnnnnnnnnnnnnnnnnnnnnnnnnnnnnnnnnnnnnnnnnnnnnnnnnnnnnnnnnnnnnnnnnnnnnnnnnnnnnnnnnnnnnnnnnnnnnnnnnnnnnnnnnnnnnnnnnnnnnnnnnnnnnnnnnnnnnnnnnnnnnnnnnnnnnnnnnnnnnngccagttgattatgatcggcacgcgcgggagaggcgttgcgtatggcgtctccgttctcgtcatgatcgcggctcgtcttcggtggggacggtacactaccaagcgggaaggtaccagataagggaagcagaataatggacacagca

SEQ ID NO: 121861 - DNA, 1061 bp, Homo Sapiens
acaaggtttttatatctctttggatagttgtttgcggtgtttgtatgttagttctttttttctttatatgttataaattatttcatctctttttattacttgacctaccattaagacaatctataacaaaaaaagtatattagcacacatggtataatcagactggtaatcaggaagcaatacaaaacggtcctttggccatctatactttctagagcagtaaatctcataaattcacttaccaagcccaggaataatgacttttaaagccttgaatatcaactaagacaaattatgccaattctgatttctcacatatacttagattacacaaagataaagctttagatgtgatcattgtttaatgtagacttatctttaaagtttttaattaaaaactacagaagggagtaaacagcaagccaaatgatttaaccaaatgatttaagagtaaaactcactcagaaagcattatacgtaactaaatatacatgagcatgattatatacatacatgaaactgcaattttatggcattctaagtaactcatttaagtacattttggcatttaaacaaagatcaaatcaagctttaagcttgtaagaacgtaattttcatttttaattttttaaatataaaaaggtagctaaacacaaagtacagatcagaaaccctcatttaatatagattattttggaaattaaaaaatttgtaacaaggtggctttcttacccaccctaaaatgtaaataaaacctcttccccagatttatacttcatacttggtaacaacctaaaagtttttcaaatctatgaaaaaaatctaccatgaccaatttaaattacctgggaaagggcaggagaagggatcaataacagagtcagttagttgcacacagatggaaaaatgcttgcagtcactcccaaatataaccctacattaccttatatataaatcacaatgaaaataaaagtgcctacattacagaactgtgaaattttgtttaaaaaaatacgacgcgtgggtcgacgatatcccgggaaattccggagccggtacca

SEQ ID NO: 121862 - DNA, 759 bp, Homo Sapiens
  misc_feature (111)..(131): n is a, c, g, or t
  misc_feature (219)..(219): n is a, c, g, or t
  misc_feature (363)..(400): n is a, c, g, or t
  misc_feature (410)..(410): n is a, c, g, or t
gcttgccaagtccctccccccaaatataacccctaccattccctttaatattaaatccccaatgaaaaataaaagggcctacccttaccagaacctggaaatttttgtttnnnnnnnnnnnnnnnnnnnnnctgttgggtatcatgggaataatgtaacacataaggctggaaaatcctgaaatccagttaggactcaatacacaagtttactttaaanaaggaaaagaaagaaaagtttgccagagaaataaatgctagataggaaagcaggactttcagcaggatagcctttcagaccaatttgaagcaacacagacacattataccctaccatcaacccaccagaaattctagctgaatnnnnnnnnnnnnnnnnnnnnnnnnnnnnnnnnnnnnnnttcttccaanatctcatgccccagtgaatgtcacggggaaaattcccgacactgaactttgtccgcctggcatttctccctttagcagcatcacctctatttctctgttaggacatttgctccatctgtatctagtcacagcaaatccaatctcctggaatcagtttaatgagcagaggagattatactggagtcagctgaaggacatactttaaccaaacgctctaaattaacaaccaagaatgtagacctcaaattcttattctcaattcagcatctgatcaattatttggcactagctggataaaggtctaatcggaatttgtgagccgaggcagatgtagttaaatactaacccc

SEQ ID NO: 121863 - DNA, 1033 bp, Homo Sapiens
  misc_feature (78)..(135): n is a, c, g, or t
  misc_feature (150)..(150): n is a, c, g, or t
  misc_feature (160)..(160): n is a, c, g, or t
cacgcattattgatagctcatcatagcaccccagcttacactttgctcccgctctatgtgtgtgaaatttgagcgatnnnnnnnnnnnnnnnnnnnnnnnnnnnnnnnnnnnnnnnnnnnnnnnnnnnnnnnnnnttgcccctcgagccnaagaatcgcnacgaggtaaagatgagcgggtggcagcgacagagccaaaatcagagctggaacctgaggagagagtgttcaagaaggaagtgtatcttcatacatcaccacacctgaaagcagatgtgcttttccagactgatccaactgcagagatggcagctgagtcattgcctttctccttcgggacactgtccagctgggagctggaagcctggtatgaggacctgcaagaggtcctgtcttcagatgaaaatgggggtacctatgtttcacctcctggaaatgaagaggaagaatcaaaaatcttcaccactcttgaccctgcttctctggcttggctgactgaggaggagccagaaccagcagaggtcacaagcacctcccagagccctcactctccagattccagtcagagctccctggctcaggaggaagaggaggaagaccaagggagaaccaggaaacggaaacagagtggtcattccccagcccgggctggaaagcagcgcatgaaggagaaagaacaggagaatgaaaggaaagtggcacagctagctgaagagaatgaacggctcaagcaggaaatcgagcgcctgaccagggaagtagaggcgactcgccgagctctgattgaccgaatggtgaatctgcaccaagcatgaacaattgggagcatcagtcccccacttgggccacactacccacctttcccagaagtggctactgactaccctctcactagtgccaatgatgtgaccctcaatcccacatacgcagggggaaggcttggagtagacaaaaggaaaggtctcagcttgtatatagagattgtacatttatttattactgtccctatctattaaagtgactttctatgagc

SEQ ID NO: 121864 - DNA, 741 bp, Homo Sapiens
  misc_feature (133)..(133): n is a, c, g, or t
ctgtttcctctgtaatgtgttaccaaaaacaatcaataaataatgtctatccctatgtggtgaagcacagcaattaagtgtctcataacaatttagtgtcttcttacactatagaagctgaaaagctaatagngaatttcccatgctcttgcagaaaggttccacatacaatttaggtttcacctactatgtgtattcacatgatactttgattcagaagagagctacataaggagagagtcaatgcacaacatttattttgcttgcatggaacataatagaggcaacaagagattggagctagaagttgttaggcggcatcttgatttgcaagctggtttcctaacttggcagcttcttgaccttggaagagacgagtgattctggagtctacagctctgttgcaattttctgattatggcagaggcagtggctcccttgtcagtcctggtctgtggtaaaatttttgtggaagcttattttgaaaatgatttcttaagttcttccaagtgaactatatatatactccttaataaattcctttttgcctagactaaccagaggagattacgttatccacaactaagaaccttgaccaatatatcatataagctaatagtatacagttatttaagagaatgagggtggtctttatgcatgatcattggaagttggtgagattgtaaatagtaaaaaaccggattgtagaatagtatgctcagaatattctctttttttgtt

SEQ ID NO: 121865 - DNA, 731 bp, Homo Sapiens
  misc_feature (698)..(698): n is a, c, g, or t
ggacttcagaacaaatgtttattactgcttaatggggccaaaggggcaacacaaagcattgaaaacatcactggctcacaaaaacagtcaccttgttaccttctcagttgcatttgtttatttcacaaggcttcattcacacataaaaacaagatactaatccaattcaagttcataacgattataaaagtaaacatttgttgggacaatgtacaataaattgcactttttagacaagcattacatttacatttatagagtgtactatacataatacatggaattacggaaacgtctaattggtcattgtttatagaggaagaggctgatcactaacgtttattttgtagttaattagtactgttcagactaatcaactcctttattctagaacctgttttcattagagatgccatggacaaaataatggaattcataaaaatagacaattccagaatctctactacctcctctgcaagggaaaggtaggagttagaaagaaaggaagtggggctgactgagaaactttgtccctcatttgaactaaggatccatgcattatgcaaaataccaaaaatagagaaactgatacaaaaggcttttgggacatcttggatctgggaccatctccagccttattcttgtgctttcatgacaccagagtctttcgatgcatttatattctcacaattcagtcnatatagtttatcccatatataatatatagttat

SEQ ID NO: 121866 - DNA, 1496 bp, Homo Sapiens
tttttttcatgaaaatatagtcatcaaatttattttcattgggatgccattttttgaagaattcctaagactaatgtttcttgacatgcaagagttagcattaatagcttacgttactataaatactgctgcttggaagcagtacaactgttttagagttttaagactacagactttcattactcaaatcttattcagtaaatgtaaaaatcagaaggttctgaacagctggttaggaaggtagccaagatgcaggaaagatgtctgcgcctccttttcaagggcagccaactcttgaacagtaggtgccaaaatatccacatggcctttatagcttccaccaccagcagcccttttctgaccgtaggtaactttcccatcaaattcatccactggtacctttatatccggctcaacctgagaaatggtacagttcaggtgttcttctatctcagatagtaactgcatctcgttgtaccatatggtacagcctccatcttccttgagtcttgtgttataacacccttttccacggctgctacatacatggtaccaaaccttttctttttctgttgccaccagggaaattgccagacccatcctttcagctcttcctactctgccaattcgatgtacgtagttttgcttttcatcgggcagagtgacatttataacataaggaacaccgtggatatcaattcctctagcagctacatctgtgcaaatcaagaatcttacatctcctttcttaaatctttccaagttttgctttctctcatgaggctttctgtcaccatgaagacaaacacatgagaactggtgtccttttttatcaggtcctcctccttgttgtataaagtactgctccaagttatcacagtcaattttggttctacagaagataattgcttgatccatcttatgttccttgattgcccggacagcatactcccctttcaggattttaatagcttcagaccacatctctggactattagcaccaggtcttgtgttatcttttgcatgtacatcatcagttctaatgtggctctttccaagcctttcccagagtctgtcagttttgggatttactgggacaacaacatggtgtacagtatctggaacagagtcttctccttttaagtcaacccatgtaggaaaatgcattatcttctcggacagtttctttacatcgaaagaatgcaaagtggcagagcaaacaatcacctgaagtctttttccatcagaggtaacctgaggaatctgattgtgcatcctatttataaaatcagaataaccttgagaaagaagcccatcagcttcatccaggaccaggaatctaacttgagataagttcagctttccagttgacaccaagtcatctagtcttcccggagtacctacaactatatctactccattttccaaaacagagagctgatcccgggctgcaacacctccaattatcagaagctcccttaatttaggattatccc

SEQ ID NO: 121867 - DNA, 911 bp, Homo Sapiens
  misc_feature (66)..(81): n is a, c, g, or t
  misc_feature (849)..(857): n is a, c, g, or t
ggtaccggtccggaattcccgggatatcgtcgacccacgcgtccgtctagatgcgagcgccgcccnnnnnnnnnnnnnnnnggaatcatcattaactttatttgtcactcttgatagacattggtccactccaacataaaaagtagaattcacccacttccacttaatattctatagaatgaagttgtaccacaaaccatagtaacttacacagggggaaaagttactgaaataaaaatgttttatattcatgcctcaaaatgtccctcagggatttttgtgtgtataatgaaaagcatctatatactccacaaggctagtttcttcttagatcaatgtagtatttttagtatccatattagcccatgtaggtcaacaaacttgcagaagagggttaaaaaacagctgtcctctgttactcagatacagttccaaaactaagcgattatataagcacatccatattttagggctactctaagttaaaaaccttttctcttgtttcagagttatttacatcaaattaagacatttacaaattgttcatagtatacaatagcccaaatatgattttcacctatgctgtgtaaagaagttaagcattcgtaagtttgtctaataaattcagtgcacttttttccataacacgagctattctaaatgttttacatttctttcagtgcatatttccaaattcattaaacagaatgaaatcaatgttattaaatggctatatcataatattcaagcatattatggaatctataccacagtgggattcacgtcaatactataattcactctagaaaaacatcacaggcacacacaaaataaagaacaaaatttgannnnnnnnnataaatgtaaagtatactatctactttaaagcacactaaaagatatattttaac

SEQ ID NO: 121868 - DNA, 695 bp, Homo Sapiens
ggcttaaacaacagaaatttatttgctcataatttttgaggctggaagtccaggatcaaagtgtagataaggatgatttcctctataatgagccttaaaagaaggatctcctccaggaatctctctttgccttgaaggtaaccatttccggtcacttcacataaaattctgtgcctgctaccctggtatctctttcacttcttataaggaaaccagtcatattgaatgagggccccattctaactgcctcattttaaaatcacctctttaaaaaaccacatctctaaataccaccattatcttgaggtcccagggatgaaagccttaatgttaatgagtggatgggacatgtgacataatctaaatcagtggtcccctaactttttggcaccagggaccagtttcgtggaagacatttttcccacggactggagttggggattaaactgttccagttcagatcatcaggcattagattctcataaggagtgtgcaacctagatcccttgcatgtgcagttcacaataaagttcatgctcctatgagaatctaatgccactgctgatctgacagaaagttgagctcaggcagtaatgtttgctcatcctacattcacctcctgctgtgcaccctggatcctagcaggccacagaccagtaccagtccatggcccaagggtttggggatccctgact

SEQ ID NO: 121869 - DNA, 569 bp, Homo Sapiens
tttttgaaggtcacctgtatttccatagatatgtaattttatttaagcaggtttattatattaaggcggcgaggcagcgccgaagactacaagttccagcatgcaccgcgtccgggcgggttcgggctcccagcgagggcttcagggacgccagcccggaggcatcggccggaagtgtcgtagggcaaccacgtagtactctctgcgcatgtgcaaagcgctgtcgggggccgccctagctgccgtcgccgccgccggggctctatggtctctccctagagctttgccgttggaggcggctgctgcggtcttgtgagtttgaccagcgtcgagcggcagcaacatggaggaattcgactccgaagacttctctacgtcggaggaggacgaggactacgtgccgtcgggtgagcgattccgcctgaggcgagaagcgaattgcccgccccacgcctacgtgaggccgctctggcccgcgggcgttgcctgtggcccagtggtccagggggggctctgtcttcacgtccctccctcagcccctattctcggcgctccgcccggagctgtct

SEQ ID NO: 121870 - DNA, 1558 bp, Homo Sapiens
  misc_feature (168)..(168): n is a, c, g, or t
  misc_feature (174)..(178): n is a, c, g, or t
  misc_feature (180)..(180): n is a, c, g, or t
  misc_feature (183)..(186): n is a, c, g, or t
  misc_feature (188)..(188): n is a, c, g, or t
  misc_feature (193)..(193): n is a, c, g, or t
  misc_feature (313)..(321): n is a, c, g, or t
attgggtggggaatttccaaagcccccttggtccatggaccagggtttttccctagggaaaacaggctattggcccatgttccctttaccctacctggggcccgcgcccccaaaacgaatgggtttagaaaagtttttccgagggccggaggcggcccgacatgtttntttttnnnnntnttnnnntntttcnccattatcctctcacaggaccaacttttattttatttattcatttaaggacaaatttttaaaagtaaagtgaatgaaaccatttgtgattaagatacatagacagaacttcaatgtaggnnnnnnnnngaccttgctgggaaacagatgatgagaaacactgtaaaacatttcacagacgcacaaaaagctcacattgtaaacaggattaagctgctcttgatttagcccgtaacatcaaggtttcattttgctcagcctgagatctcgctcaatttcaaactgcctgtgatccactcggtcgaggaaggctttccgttcaatgtacccctctttccctcgattatggatggccagttcttcaccaatcccctcttcctccttgaagctctcccagtccagtttggacttctcaagggtgctcattttctgcttcttggcaccaattttccccaaaaggctgctcatgccacttgatctttttaaccctgacccggcagggagtgatggcagagctgaaggaacattagcctgtggtttttctttctcattctgcttgaagaaggatttggcctctttagatgtagcatccacttccttagttacccttacttcttcaccagcaaaatcaaacaccttggtgattttaactttttctgtttctttaggtttctctagctcttctgcttttaccaacaatttacttgaacttgtctcttcagtctcctctcctttcttaacttgtgtacttgggggcacttttgattttggtcccacatcattgaggaagctggcccagagttcgtcctccttctttttcctggcatcctctgatccaatgcctttttcctgctctgcagcgtcatcttcctcctcactactgcttccctcagattctgaattggcatcctcctcttcctcttcttctaatgagaggccaccttgtcttctcttcctggctggaatgctctgggcctttctttttttcccttgggttttctgtgtctgctcttcaccatccacttcatcttccttcactaattcatttacatcatcttcactatactctccacccgacggcacgtagtcctcgtcctcctccgacgtagagaagtcttcggagtcgaattcctccatgttgctgccgctcgacgctggtcaaactcacaagaccgcagcagccgcctccaacggcaaagctctagggagagaccatagagccccggcggcggcgacggcagctagggcggcccccgacagcgctttgcacatgcgcagagagtactacgtggttgccctacgacacttgccggccccccggccgtaatggccgaattcccgggcatatgtccggtaccgtcgactg

SEQ ID NO: 121871 - DNA, 932 bp, Homo Sapiens
  misc_feature (700)..(712): n is a, c, g, or t
acataagtgatacaaattttatttttcatgctgaaatttttttacaaattttattgcgtcatacacaactacaagagtaacagttataactgaattaaaaaaatagcattttggggggcatttctatttgtttgctattatcataagcatgttttgttacatgaacagcaataataattacaattacagaactgctcaattcataaatgtagtaagtgtgtcatgatggaggctactacataatataaacagtaaatgcccaaacatattttcatattctatattatttattatataactagaatcaaggattagaatctaggtaataccatcattcaaatatctgaccaagtcaatcaagtgagcaagcacgtcaaatcattttccaaaatctgttatagtttagttctaaagaaaaatataagatgaaacacataaggcatggcttgttaataatttatgcctaaaaccattatataataaaaatctgcatattttgcaacttggcatttgtttcatctgacacaataataaaaaagatgaatagtactatcagcacttggaattacccaactacagctgatatagtacctcccagacttctagtttctaaaattctgggtgaagtgggacaatttgaactataacagtctacatggtagtaatattaccttttggccactggctcaatactaatccnnnnnnnnnnnnnaatatataaaatatgctgaaattgtatctcttaaaacacatttcaattaatgtaattaaaaacagaagggtaacagcttccttttagaagacttaagacttagttatgaaaaatctgccatatttgttaaattaatccaacatttttagggtcaaatatagatcataccggacgcgtgggtcgacgatatcccgggaataccggaccggtaccagcctgc

SEQ ID NO: 121872 - DNA, 753 bp, Homo Sapiens
ctctcaggctcatgaatttcagcacagcaacacacacatgccctgacctaatcacacaaagaacaaggatgaacacacacccaagctgtggctgccgtgcgtgtctatttattgttgctgccaccctggaggagccccagtttcttctgtagctttcttttctgggggatcttcctggctctgcccctccattcccagcctctcactccccatcttgcacttttgctagggttggaggcgctttcctggtagcccctcagagactcagtcagcgggaataagtcctaggggtggggggtgtggcaagccggcctggatcctgtcctgggtcctccttcctccgcagtcccgtctctattgctgggtgtagtgtccatggtctggcctcatctccagctctgtctcagcgccgtgcccctcgcttcttcctctctgaattctgcagcttggtcaccagtttcctctcgtgcccgccagggctggggcggttggtgttggcagcagcttctctcttggtgcgacctttccggcctccacctccgaggtaggaatgggccaggctatagaggtcagattcatccaggctggagtcctcgtcctccgggcctgggggctgctggggggcgctggttgctggtgggaaggtggccatcgtgcctggcttgtcttccctgcctctcttcttctcctaacgctttgtctgtctctgctttcctggccccgggcctctccactccctcagcttataaggct

SEQ ID NO: 121873 - DNA, 783 bp, Homo Sapiens
aaattttaaagttcttttacagacagggtctcaccacattgcccaggctggactcaaattcctcaaatgatccttccatcttagcctcccaaatagctgggactacaggtatgagccactgtacccaagggtttttctttcaatatgtatgtgaccagctgacttaccgccttcacagtcttatatcactgtattcatttatcaggattattacatatagagggtaaaagacataggcctatatatttactgagatgttacaataatttcaaagcacagtgtcaccctggaaaagtcacatggcaagttgaatgattttcaaaagccccaggcccccaacactttaccttaacctccttggagctactggaagtcttcccttcggtcttcttctgctttgatgtggaggaactgtttttgctgctgccactcgtctccttgttgctgttactgcttgactttaaggaagaagactgactaatagtcctcttccgagagccatgctctgtttttggatcttttgaaggaacaggcccagcgggagaaggcaacaaatccttttcttttgcagcactctgcttagatgactctctgttgctggatggcttatggcctgctgaattcttgtcctccgttttgggtttcttgctctcactggctcggttatcatcttcattcttatgcttcctcttgcctttgttggaaactttttctgaggcttgtttctgagcctctctcgtgtgcttttctggcacatttttcttttcccccttgggcggccgc

SEQ ID NO: 121874 - DNA, 471 bp, Homo Sapiens
  misc_feature (317)..(370): n is a, c, g, or t
gcttgctcctcacagagctcgggtgccactgtgggagggcagtaaattaataaatgagtaatttatgacataaaatgtcaggtgacagaggctatgcaggaagaggaaagagacggggtggtcagggaaagcctctgtgaagaggtagcatttgagcagtgccttgaaggaagtgagggagccctctcaggaggtatctggggaggaatgttccaggccaaaggaacagccagttcaaagggcctggggtgggacctgtgcctgtgccaggctcaccagtgcaatgggaggcatcagattctcagaacagccctggnnnnnnnnnnnnnnnnnnnnnnnnnnnnnnnnnnnnnnnnnnnnnnnnnnnnnncctatttagaatctttcctcgtctgctttatgcatatgcataaatgtgtttggttgggggtgttaggaaatatgtgatatgtatcacatcatctttctttc

SEQ ID NO: 121875 - DNA, 759 bp, Homo Sapiens
tgatgcaaaatgtagatgagtgcattaaggtttgtaagatctttatcattttatgtcattcactgaaaattgaaatgttcattctttttaatgttttcctatttccttttgcctagcatctgactttggtgttttaagttctgtagttccatgacatcattgtttgctgttgtgttacagagagagaaggaacctcacctgtggctcagctcaccccacatccgtttctcattacgtgtaaataaactgtcagagctgatgttacagcttttacagtttaaagcattcccctcgtctctagttccttttttcttgtttacatgttttgggcactttccctcattcaccaccttccagggtttcatagaaaataacttgttacaaaatcagttcaattctaatgtggacatagtggcatgttcataattagacccatataggggacactgagctttaaatcgttgattctaaactctatacattaaaaaaattcagcccaggcccctcaaagcctgagaaaatttaatttgctcttaatttaatgttccaaaactcactcttggaaaaatgcctgttggaaaactacaggtgggtcacatgtgggggctgtctccgtgacactcaggattccagtcagaacctaatcctcatatctattgcctacaaaaatagaccaagaatgttgctgctcttttataatcctttaaatatttaacattcaagttttctttgtcttaaattcagcctcttcctaaaagc

SEQ ID NO: 121876 - DNA, 717 bp, Homo Sapiens
ttttttttacgaataaagcacacaactttattcacgaagttgtgagtatgacagtgatgcagagtatatgacaaaggagtgcagtgagtgctgctggcaacaggagcggggagcaggtagggatcacaggcacagcagcgcggagccggcagggccacctcctcctctacacacaagcatgtggcacttagcgcgccaacacacacctgctcagtttcacagggaacacgacacagcttttcaaaaggaattcttctaaacatttgctttcatatttccaaaaggggagggagggcaggaagaaccacacgccttccaacatttgaaaaaattccataaacccaacttaaaatcaaagaactcagagagcttcaatgcggagtcatcagcaactcgcaggaaccacacacatgattggacaagtctgtacataaaaccccaaaagaacatcagttttgtggacaatggtttcctctgctgtaaagaaacgtatgcatatatgatcagtaagcagctcacatctttctgaatgtcaaggtctacaggattgtctctgtccacctttggtcaatgggttcaggaagtgactcatgggaactgcactcttaggagaaacacttttgggaataattttattgaataacaaccaccactcaattacactaagcttcagaaattgttggatttgtttaattttgctgtgtacctatacattgt

SEQ ID NO: 121877 - DNA, 442 bp, Homo Sapiens
  misc_feature (23)..(23): n is a, c, g, or t
  misc_feature (139)..(139): n is a, c, g, or t
  misc_feature (144)..(144): n is a, c, g, or t
  misc_feature (412)..(412): n is a, c, g, or t
aatacgaaataaagcacacaacntttattcacgaagttgtgagtatgacagtgatgcagagtatatgacaaaggagtgcagtgagtgctgctggcaacaggagcggggagcaggtagggatcacaggcacagcagcggnaccgncagggcacctcctcctctacacacaagcatgtggcacttagcgcgccaacacacacctgctcagtttcacagggaacacgacacagcttttcaaaaggaattcttctaaacatttgctttcatatttccaaaaggggagggagggcaggaaggaaccacacgccttcccaacattttggaaaaaattcccttaaaccccaacttttaaaattcaaaggaacttcaggggagctttccaatgcgggggttcattcaggcaacttcggcnggggacccaccacacattgatttggggcca

SEQ ID NO: 121878 - DNA, 1038 bp, Homo Sapiens
  misc_feature (806)..(806): n is a, c, g, or t
  misc_feature (849)..(849): n is a, c, g, or t
  misc_feature (858)..(858): n is a, c, g, or t
tttttgtcatcaaaatggaacagatttattaggatgctcacaagaatggagaacacatgaactagcactctcctcatgtgacagagagtacatctgacccacatggtggcaggacacaggggaagggctctcagagctggtgccaagtgtccaccaaagaaagtcccattcaccagagacaggctgtttccttggactccaccatctctgttacagctaccagccaggtctccatgatcttcctggaatccttcatgccagcatcagttcatgctctctgagcttgtcactcccgactctttcaagacccaggtcaactgccccatggctcacccacccaggccgcctccggagtcctgcagcacatctctttggtatgctgctgccctgctaccctcaagggcatggttgtgggtagggggagaacatcaacatcacattaccaaaagcaaacagcaggggtacattagtaaacgacacttggacatagccgaacaacctcacagaacacatgcttcctccccaaatgatacctaatcccccaagagcaaatgaaaccccttgatcacttgaacacgtatgaatgattctgtgtgccaggcacagggacacacaatgaatgctgtttaattccaccacaccccgcacacaacaggaagctagtggctgaaagctggaaccagatctctgtcctggctccatcagctttctcctggctctttctgcctttcaacggtgccaccaccctgcttctgtctgctctgaacacttgttccaaaagggaggataaaggatgaaggatgganaggagggaggaaaggagggggatagcatcctgtaaacagacanaacacacanaatccagaacagattagtactacattttatacatagagattgctgaaatctacatgctacacagatatatgtcacactcagggggaactggaggagcactggcaagcacagttaacaaagcttcatgacgtgatgattgtttgcgttcactgcagctctttttggaaaaaggataagcgg

SEQ ID NO: 121879 - DNA, 1350 bp, Homo Sapiens
  misc_feature (29)..(29): n is a, c, g, or t
  misc_feature (46)..(46): n is a, c, g, or t
  misc_feature (156)..(156): n is a, c, g, or t
gggggagaagcatcaaacatccccatttnccaaaaagcaaacagcnagggggtaacattagtaaaccgacacttgggacataggcggaacaacctcacaggaacacatgcttccttccccaaatggatacttaatcccccccagagcaaatgaaanccccttgatcacttgaacacgtatgaatgattctgtgtgccaggcacagggacacacaatgaatgctgtttaattccaccacaccccgcacacaacaggaagctagtggctgaaagctggaaccagatctctgtcctggctccatcagctttctcctggctctttctgcctgttcaacggtgccaccaccctgcttctgtctgctctgaacacttgttccaaaaagggaggataaaaggatgaaggatggcagagggagggaggaaaggaagggggatagcaaccctgtaaaacagaacaaaaataacacaaaaatccagaaaccagatttagtactacattttataacaatagagagtagctgaaaatactacatgctaacacagataatatgatacacaacctcaggggggaagctggcagggagcacgtggcagaggccacaggtttagactaagagcctttcaatggactgctgaatggattggatctgctgtttcagctgcgagccttctttgatggtgacagaacaggcgatgacaggcctggagaccccacaggctctccccagggcctgcttggagcgcacaaacacgtagggcacattcttgtcttcacacagcagcggcaggtgcagaatgatctccagtggctcggcgtctgcagccatcacgatgaactcagagatgcccctgttgagggttttggtggcctcattggctcctttccgaagctgcttatagttacatgactgctgaacgaggtccagtagcttcttggtgaggtgggcatcggcaaggggataggcctttggattcacatcagcctcagtcatagcgtctgtcttggtagtctcttgccggacaccgcgaggataccacgcgtgtcggtttggacggtctgctgcccagcaccgcaaggacacggatgccccgccacccaagagcaggaagtgacgccactgccgccagcggaagtgacgtccagggccagcccgtacaccaggacgccctgtcttctacgtaactccttatcttaggcgaatttgtcttggtcccaggacaacatggctgcggttccgcgggctcagcactcctaggggagcgcagctgacgtttcagaagcactcgcgtgcaccggaaactcacagagcctcgggccgatattaaaacgtgcacgggggtcgcttggttt

SEQ ID NO: 121880 - DNA, 902 bp, Homo Sapiens
cagccacaggacacacaatgatgctggttaattccaccacaccccgcacacaacaggaagctagtggctgaaagctggaaccagatttttgttcctggctccatcagctttctcctggctctttctgcctttcaacggtgccaccaccctgcttctgtctgctctgaacacttgttccaaaaagggaggataaaaggatgaaggatggcagagggagggaggaaaggaagggggatagcaaccctgtaaaacagaacaaaaacaacacaaaaatccagaaaccagatttagtactacattttataacaatagagagtagctgaaaatactacatgctaacacagataatatgatacacaacctcaggggggaagctggcagggagcacgtggcagaggccacaggtttagactaagagcctttcaatggactgctgaatggattggatctgctgtttcagctgcgagccttctttgatggtgacagaacaggcgatgacaggcctggagaccccacaggctctccccagggcctgcttggagcgcacaaacacgtagggcacattcttgtcttcacacagcagcggcaggtgcagaatgatctccagtggctcggcgtctgcagccatcacgatgaactcagagatgcccctgttgagggttttggtggcctcattggctcctttccgaagctgcttatagttacatgactgctgaacgaggtccagtagcttcttggtgaggtgggcatcggcaaggggataggcctttggattcacatcagcctcagtcatggctgcggttccgcgggctcagcactcctaggggagcgcagctgacgtttcagaagcactcgcgtgcaccggaaaaactcacagaagcagcagcggaaatggccccccc

SEQ ID NO: 121881 - DNA, 474 bp, Homo Sapiens
caaagtttaatacagtcattatcttttacacatttgaaaaaagtaacttgttttaatttataaaagaaaataggctatagaatattaatctctgtgaaacaataagacaagtgtatgaaaattattttacagctactttttcatggctgttgacctactggaacaagagcaaaacctgcattagatgagtggtcataagattctccataagttgatgtccaataataatgctttttaaggccattggagacttctgcaagatatacacgtccatctaccacaaatggctccacatctgtattgtctggttttagacaacccatttgaattaagtctgaatatgcctaggatttttaggaaaaaaactatatcattaagaaaaaatgtattcaatttacagtgcttacggaaatttaaatattcaaattagctgtgctaatttgtagtttaaaataaaatattctgaataacaaa

SEQ ID NO: 121882 - DNA, 454 bp, Homo Sapiens
aatacaaaaactttcacattctttattcagtgggacttaatacaattatttatattttaaattattaaagtatctggaaagggaaaatgttttcttcatttttaggatctatctagcaaaagccagatctgaaattcagatatttgtactgtttttactgtgtatagaaattagtgctttggttttaaaatgatcttttaaaaaagttaaggacatcctagagccttaatagttaagaagagttaaattatcaagcctatttgtgcatttgctttttttgaaaaaggtaagttgctgattaagtctaattggaattgataattccatagtcttagattaaaatgaggatattttctcctagattttctcatgttatgccatgcatttatatatctaaccattaatttcacactaaggatgcttcaccatataataaaaggagcaagatggaagc

SEQ ID NO: 121883 - DNA, 732 bp, Homo Sapiens
  misc_feature (692)..(692): n is a, c, g, or t
gctcttagaatagactttattgactttagccaagggcaggccctgagatgggggtccagagagagaggcttggtggggctacgtcctgggggccaggttggttctgaggggtagaaggccatccacccactcgcacggctgctccaggagggcttgccacagctgcttctcctcaggtgtggaatccatccagggcacctgcagcccatagctgctgccggtgcccaggctgaggcgtgtgccccccagctggcggttggccagggccccatggtcccagagggagagctcggcacaagcctggcgcaggtcagcaggcccaaagccatcgtacaccatggtgtgattgaacacagggctgaggctgcgtcgcacaacccttgtacgctggcggctggcccggctgtcatcaggcagcacgaagcattgtacgtaagtgtccagggatcctgcccgcagcggcaggaggtcccgagcctccttcacccagaagtgcagctccccgctcgggggcagtcctgcgccctcggagccggcggggacgtacttgagggacagggcgagtaacccgcggctcggaaggtcgtcgggagagggtgggacccggggctgcagggggagccaggtgggctcagagccccagtctcacgtgtccaggggcacttcaacttcgcccagaaagatgttgcganccaggctttcgcggtgccacacagacaggctcagcacgcg

SEQ ID NO: 121884 - DNA, 854 bp, Homo Sapiens
  misc_feature (728)..(728): n is a, c, g, or t
  misc_feature (781)..(781): n is a, c, g, or t
actgttacatcagaacacatctcctaattttattttaagattttataggaaaaaatacaaatacaaagttaacaaacattgtatagttcaatcccctcatgcaagaaggcgtttttaagcactgggccacatagacaactgggatttcctgatattagggaaataaattattaacaatttacattattagagcattagtattgacactaaacatttatgaaatgctaccatgcgctaagcacttcaggtactgtatctcttttaattcttgtaactattgagatggctagtggtgtcatttccattttacagagaagggctctgtcacaccatgcagcccactaccagcggactccgtagtttctatattgtctccttccctctatgtgctctcccaattgggaaccagaaggtagggtataaaataggaggtgatgcgtttacttttcagtgtccaggcatatcaaggtttgaattaaaatttgctgaacatcatgtaacactaaaggtcatcctggccatctttctattcgtaataacattctaaagagcattggatttctagatgcaaatgtggaaccctacaaatgttcatacctcttgtaaaagataggaaaatgttttttaggaggcatgttgtttggggacttttttgtgaggatttagaacagtttagtcagtctgaatatttattctaccaaaccctgtacaatagcattacatttatngcagaaaataatggatataaatgattatgagttagtgatttgttttttcccanaaaggccattagactaggtgtctcccggccgtaatggccgaattcccgggcatatgtccggtaccgtcgactg

SEQ ID NO: 121885 - DNA, 941 bp, Homo Sapiens
  misc_feature (256)..(333): n is a, c, g, or t
  misc_feature (494)..(543): n is a, c, g, or t
  misc_feature (548)..(605): n is a, c, g, or t
ttttttttggccggggagggggtctcattggttgctcagcctggtctcaaactcctgggcttaagcagtcctcccaccttgacttccacagtgccgagattacaggcatgagccaccacacctggccaagtttaatttgttcatggctgagaacagttagctcggaatacttacattgttttttgaataaggaattccttattctgagtgagtcacgaatgagagctgatagatgctttcttgaaaagggcaatannnnnnnnnnnnnnnnnnnnnnnnnnnnnnnnnnnnnnnnnnnnnnnnnnnnnnnnnnnnnnnnnnnnnnnnnnnnnnattatagagaatgggttatatggtatttgcatataacctacatacatcctcctgtgtactttaaatcatctgaagatgatgacttatgcctaataaaatacctacacatcacttcatttgcatggattcaacatagtgcttggtgttcagtaaattcaagnnnnnnnnnnnnnnnnnnnnnnnnnnnnnnnnnnnnnnnnnnnnnnnnnnattgnnnnnnnnnnnnnnnnnnnnnnnnnnnnnnnnnnnnnnnnnnnnnnnnnnnnnnnnnncttacatatctatctatctttgagtaacaaactctttgggggaaaagagggaagtgtattgagcaagagaaggcaaaaaacattacataatattttgattctgttacgtgtgtctatagattgtttcattctaatcaagacctaagaaggtatgattctgtgactgatttagaattctggggtggaaatatcctggaaccatgttttttaataaattctgtctcttggaaagagttaacaacagcctgggaaagagttgttattccaaaagtcagcctgttacttggtgaagctgaagtttaagagttctggggaaaaataaaatttagtaattcc

SEQ ID NO: 121886 - DNA, 941 bp, Homo Sapiens
  misc_feature (378)..(400): n is a, c, g, or t
  misc_feature (405)..(448): n is a, c, g, or t
  misc_feature (615)..(692): n is a, c, g, or t
taggctggaattactagattttatttttccccagaactcttaaacttcagcttcaccaagtaacaggctgacttttggaataacaactctttcccaggctgttgttaactctttccaagagacagaatttattaaaaaacatggttccaggatatttccaccccagaattctaaatcagtcacagaatcataccttcttaggtcttgattagaatgaaacaatctatagacacacgtaacagaatcaaaatattatgtaatgttttttgccttctcttgctcaatacacttccctcttttcccccaaagagtttgttactcaaagatagatagatatgtaggtattttattaggtataagtaatcatcttcagatgannnnnnnnnnnnnnnnnnnnnnncaatnnnnnnnnnnnnnnnnnnnnnnnnnnnnnnnnnnnnnnnnnnnngcaaaacttgaatttactgaacaccaagcactatgttgaatccatgcaaatgaagtgatgtgtaggtattttattaggtataagtaatcatcttcagatgatttaaagtacacaggaggatgtatgtaggttatatgcaaataccatataacccattctctataatnnnnnnnnnnnnnnnnnnnnnnnnnnnnnnnnnnnnnnnnnnnnnnnnnnnnnnnnnnnnnnnnnnnnnnnnnnnnnntattgcccttttcaagaaagcatctatcagctctcattcgtgactcactcagaataaggaattccttattcaaaaaacaatgtaagtattccgagctaactgttctcagccatgaacaaattaaacttggccaggtgtggtggctcatgcctgtaatctcggcactgtggaagtcaaggtgggaggactgcttaagcccaggagtttgagaccaggctgagcaaccaatgagaccccctccccggccaa

SEQ ID NO: 121887 - DNA, 470 bp, Homo Sapiens
  misc_feature (257)..(334): n is a, c, g, or t
ttttttttggccggggagggggtctcattggttgctcagcctggtctcaaactcctgggcttaagcagtcctcccaccttgacttccacagtgccgagattacaggcatgagccaccacacctggccatagttttttttgttcatggctgagaacagttgggtcggaatacttacattgttttttgaataaggaattccttattctgagtgagtcacgaatgagagctgatagatgctttcttgaaaagggcaatannnnnnnnnnnnnnnnnnnnnnnnnnnnnnnnnnnnnnnnnnnnnnnnnnnnnnnnnnnnnnnnnnnnnnnnnnnnnnattatagagaatgggttatatggtatttgcatataacctacatacatcctcctgtgtactttaaatcatctgaagatgattacttatacctaataaaatacctacacatcacttcatttgcatggattcaacataa

SEQ ID NO: 121888 - DNA, 986 bp, Homo Sapiens
gtttttttcagtaaaatatgttttcttttatttcatggatctgtttattccatttattagtaacagtgcattttttcacacaatattctattttacttaaacttaatgcatatgtagtaagaaagatttactatcccaactagcctctcagtatttagatgaggatagaacagatacggtgtaacacgcctctccactgcttactgtgtgtaccaagaaggcagaaagcagctcacccaagcctaacctggccctgtctttttcaggcttctcaggatgcccacagcacatactggggaactggatgcagggagaagccaggtctgtcttcaggaggtcacagccagcagggcacagttaggtcgtgccctgataagggggtacacaaggggaactccaggcagtggggggatggggacactatggtgcactcaggcagtggcaagggggcaatacgtggagtcaggatggaggaacactgggtgccaggacagaggggggctttggcaaccatctgcaatgcatggggcagggactatctggaaggactgcagggatacactgaaagctgtgccaatgcattagccatgaaacctaagaaactcagtacatgttctccctctgctcaccaagagtttgcatttatcttgtggtactttttgattttcagtccaatctacagtaattatggacagcccattgtatgcagaggactaaatgctatggcagacaaagatgtggtggataaacccttgccttcaggtgcttacaatcagtaacgttatttagccaaagcctcacacaataatgcaaatcatattatatttcaatataatatgatttccatgtatctttcatctctctagatctccctcaatgcctaccagaaaggcgtttcaatgctcaatagaatactcttattcttttgatgccatccccgtccgtaatggccgaattcccgggcatatgtccggtaccgtcgactg

SEQ ID NO: 121889 - DNA, 1576 bp, Homo Sapiens
  misc_feature (537)..(537): n is a, c, g, or t
  misc_feature (1150)..(1238): n is a, c, g, or t
tttgctattttatcatttcaagttttatttcagattcggggatacatatgtgcgttagttacatgggtatgttgcatgttgctgagggtccgggtatgattggtcccatcacccaggtaaagaacatagtacccaatagttagtttttcaacccttgctcccttccctcacccccaggagtccccagtgtctactggggacatctttatgtccatgaatacacaatgtttagctctcacatatagggtgtattttttaagggactaacgggtggaattaggcctaccctattgcttagcttgccatgattattcaaatccaaagttgacataaatagggctttaaggccttgaaccaggcttgtttaaggagtcactccttcagccttatgaaatgttccattgtaattttttaaaaataataggaagtatgaatagaaatctgtccctttcttgtgttttttcctaaaaacgttaataaaataatttagaagtagaaggacatagaattcattcgttgttcaatttgttgcacagnctaagagatggcacaacacatacaacacttgtgagaaaaaaatttattttgttctagtattaaaaaaacaaattcactgtcaataaaagataaataccatttccataatttagaatacaaccaaagtacacagaccctaagaaatcatatccaaaattttgatagcagctgcccactgaaatatttaatagaaactttcagttataatgatcagtaaaacgaaaaggtttggcttctgacatatataggtggtgctgtaactgtttagaacgcttagcttctagtcggagctgtctagttctctctctgacagcttgttgctctgccattttttccatccgtttccttcttaaccattgtttaaaggccctttcccggccttctgttcctttaaggaagaataaacattcctcttgctttcttagttcttctgtctgtctttctttcatctgctcttcgtgcttttttttaagccataatcgaaaagcttgttgtggatctctgttttcctgtctactgttcatgtcttcaatttcctttgctcgctgaattctcctcatttctaagacctgctctcttttcttttgcaaccacgctttaaatactatgtcannnnnnnnnnnnnnnnnnnnnnnnnnnnnnnnnnnnnnnnnnnnnnnnnnnnnnnnnnnnnnnnnnnnnnnnnnnnnnnnnnnnnnnnntagttctttctgtcgaggggaaagacagtatgttgaagtcactggtgagatatatgcagactgtgtcctgtgattagatttcccattccctttacttcgatctgagttgacagcagagcttggacaagtcttgcggttgagtggtggctgagcgatataagccagcggctctcctgttgatgagtgagtgacagcatgaatctttgctgtagaatcttctttcttggtgccactgacagaggagttggaagatctgggtaacaactgctgagggtcattttctgtactatttgcattattaatgggaggcaaaaactgaaaagagaggaagagcgacg

SEQ ID NO: 121890 - DNA, 681 bp, Homo Sapiens
  misc_feature (332)..(362): n is a, c, g, or t
acaaaataccatttcagttcccacttcttcccctacagtacaggagttgctcaccctcaggtggggctggggtcgggtcgggagtggggggactggtccgagaaagtgcaggacgtaggggaggggagcgggtttgagcaccatgagaacccggctggagccgcgggcggacgggtggagacggtcgggccgggcccggacacacactggggcgcggggagagcccggcgacgggcggtccctggaggggcgggcaggatggcttgggggtgtgggaggtcgggttttcccaaaaatgaataaatagaggtgagtgggactgttataaattnnnnnnnnnnnnnnnnnnnnnnnnnnnnnnntacaaatcataaccaagtgaataaagagacatgtacaggggtcacagctagcattggaagtaaaaaaggagttccgcgggggaggggtaaagcccatagaaagaatctcattaaaaacctcggctgccgtaacgtctatgtacatacacgagccgcgtgcatctgcgccgggcgggcgggcggctggcagggtgagggaacccgtatgtgacccccgctgccgccggagcctggtccttgtgtctgttgctaaaaaggccaaagtcggtgaggggaggcgctggtgggcgaggggctgccagcccctcccccgtctcca

SEQ ID NO: 121891 - DNA, 2150 bp, Homo Sapiens
  misc_feature (94)..(128): n is a, c, g, or t
catatggcgagcggcattgcggcccggtttttattagcccgtgaaacggaacccggaagccggccaagcgagtcagtgagcgaggaagcggcgnnnnnnnnnnnnnnnnnnnnnnnnnnnnnnnnnnncagtcgacggtaccggacatatgcccgggaattcggccattacggccggggtagtcagtgccgttgccttttcttcattagagacacagaacaatgtattagaatttccagctgtgggtttgaagacttagggggacatccagaacgtgcttcctctttcagacggtgtaaagtcccctggaattacacagctttagtgctgagcttttaacaggaaatgtggccctaggtattagtcttagtttaaaatgttggtgtttagagactgtaaatgcatattcacaaagttatctgatagggccttggaggagaaggtccagttttaaaaaatgacagtttgtgtttaataaatgaaggcatgagaggaagtaagtagcaagttgaaggacaggtagttgagatgaaacacttcaaaaccctggttatagatgtactgtttggatgtagcatagtcttgagtctagcgtccacaaagaattattcaaaatgattatttagaagaattataactattacattgaatggagtcccttggatattttgatagtaaaattaatagccataaagtcctagacttcttatttgaagttaaaatttcttatttgaaaagttgaaatttatgagctttgaagattgctaaattaaataatttatagctccaaaaacaaaaatatacttgtatatgtcacagagaaaaaaaatgcaaaatttataatagagttacattaaccttgttgtttacctttcactgatttcttatatggtataaattaaagttcaggcatttatggggagaaaaggccctccccaccgacccgccacctgccacctctgacggagtgggagaagttagtctgtgctaagatagtactgagtccccagatgttgtatactgtaaattacagtataatgccaaatgcagcaaaatcttccagctgtacgttacaagtttggtcattttgaagcttgacattttagtttgccattatgttaaaaacatctaaataggtgttagtttctcaggagtagattgttagtgttgacttttcctgtaaagcagacatcgttcttggcctgccctgcattgtatactagatttcattgttgtctctcatgcttcttgagttgcttcatggtttatgctcgccatggaaagctatcagtaacagtttcatgcttataccaaagaattaaatctgatctttaatatctgatattttcctggtactcgtactgataagggattattggaagtcagtcacagaatttggaaataaattctagtctctccttagctatttgatgcttttcatataggccaagaactcattgcaaaacatttttgcaaggatgaatgcctgtatttggtctaggaacagtacattttagtctgatttagaattactggtagcttattttaaagcaaggaaaagcagctgagctcaagtttgctgtctttagaatggtttgtgaaaatatggtataaaggtgttttcattttcctgttcttacctattattgtatagagctattcatgccattttttgggaaaactttaaaaattgccccaaatactgacattgagtgcattaaataacaaattatctttgatacattaaacttttattcttcatgcatctgtaatttaattttaagtataatgttttgcctttggtacaactaaattaaaactcttggtggtcacatattgtatataaacaaaacaatatgctttgttgaaggaaaattttctttattggaatgtggttgtaatccttgttcagttcttaagtttcggttttttttaaaaacaggatgcaacttaaacttttctttgcatcaaggtatatgcaaaacattggtgccgtgcatcaccaaatgaaagtttgtatttaacgaggaggtgctttacactgtactttttggtgttttttggaaaagttacatttagatctattctgaagctgttcatttttaacaaataaaatgttacaggtttcacatgatttattctcagctcta

SEQ ID NO: 121892 - DNA, 1083 bp, Homo Sapiens
  misc_feature (1016)..(1026): n is a, c, g, or t
ccattcttctttttaaattttattaagaaatatcatacatacaaaagcacataaacatacagattaaaaaaggaaatgcccacaggcttcagaaacagaccctcaccagttcttctgaagacccctgtgccctcatgatcacctctccctccatcaaaacggctaacattaaattttgtcttaatcgtttccttttatcatgtatttgacagcctgtttttgactttcattgaaatggaaccatagtgatgtattcttctgtgacttgctttttttgatccttctattgttgagttttgtccatgttcacatacatagctgcagttcagtttcacttctgtggaattccactgttggaatataccacagtatttatccaacacactgttggtggacacttgggatcttcccgggttttttcttcttttcttcctattacacacaaatgcttaaatccatcccctggtacgcatgtgtaagagtttctctagggtatgtatccgggaatgaatggctacgagagaggttatggcacacccacttataccaaattgtttcccgtttcccaaagttgttgtttctaaacattcttaaatctgttgacaaatgacctatttgggatggctgaggggaagaaatagatcagctacaaaactcttgaatttttaaaatagtaaattcaaaattctgatacaacaatgaaaaatacatttacttctctgctttggcttacttgaaatgtactttttaaaactacaggttcaacttaaaagtgctctcctttatctcaaaataaatgtttctaaatattaccaggtaaaaacagcaagactcagaacatacgggtataccgtcatatattttgaaagatctatacatatatgtttatatttcctcccacctcccatctccccacaaagaaaacaacttggaagaataactgttaacagcagcaagctcctgcagaggaaaaacagagaaataggagtagtaggagacatagatcactgaacacnnnnnnnnnnnaaccatgggcaacattacaattataatacaaaatttcaaaagtagacctggggttct

SEQ ID NO: 121893 - DNA, 1513 bp, Homo Sapiens
ttttttaaatatcccagaaatttatttgatgtttgcttgaatacattttatatagaaagattgggattgtttgccttggatgcccctggcaaatctcgtgaggcattgaactagaaaggggtgccaatctggagacatcagaaatggaaatcacaagcccaattttagaactattcttaaagatttgtctctagtgaaatgaggccactcccttaaaaatgctcaaagtgttggagctactgtgtgacaacagctgacatttaggagggcatttcatgttctgatctgttagaacatttaaatacttagaaataaaaaatattcagctttgaagttttcaatactggaaaactttcaagtctaggatttacagccaggaagcgctgctctgtgttccttaaattggactctgtttcccacaaagttaatcttcagctttggcttccatttcttctgcatcatcatctccatccacttcggcattttctctttcaagcctctccatctgcctcgcaagttcagtctcatctgtatctgtgaccactttgggctccatttgaacattgaacacacccctcttttcctcaatcttctctttgataacagccatagcttgactgaggacagaaaggccttctgttctctccagggttgtcgtagtcattacataccgaggaggagctattagattaatcttaatgggcatgttttctgtagaacaattcaaacctgctcttagggcttcttttacagcatcaatgccttcataaccataacaagccacttcaaatatctgctcgaattttgacagcctgtggggtcaagcgcctattaatattattaatgagtacttcccgttcatcttcattcaaatctaaactatccaaaatagatgggtctgagactgcatgcttaaatgcatcataggcaccatatccaggtctcttgtacttgtcatcaaagacccaggcagtcctctggaataggctttccagctgctcatccttggtgtattctaacacctcagcaacatgacgaagaatgctataaacagttttggattttgtgaatttgtcttcacatttgattgcttcctctggagaaactcttctttttgacaaatcaatatatcctttttctttgtccaccctaatgacaaccacacactcattcctgccaattcggatgagtttgttgatagaacggatacgccttctggataattcactaagaagaatcatgccttcaatgttgttgtattccagcaagctgacataagcccccatttcagcaatggatctgacattcaccatcactacatcttccacctcaggaaatttgtgttgataaaatctacaacttagacccggcattctgaggtatgtgtgtgattcccgcactggagcccagagccgacttcttcaatcacagagaccagacttgcttccccctcaccggccgccgcctcgtgccgaattcaccacccaggcctcgtacctagcctgaatgttga

SEQ ID NO: 121894 - DNA, 611 bp, Homo Sapiens
tcagtacattttcatataaactgcaatcaaaaaagtaatttactttgtcaaagaagttatgaagttgcaagttattttttgtaatatgcagaacagtaaaatgtaagcatgctcttggatgcaggtgctcctgtgcaccatggagttattttgaagagcctgctaacgtctgcaggcagtttataggatgcaattattttctccacaacttaggtacatgagaataaaactgatatttatgaataaagtatttttctcgaaaaagttgaggcagcttttgttgaatgctatctgtgtgggtacacttgctacaccttgaactgtactgagagagagacagacagcaagaagcccatgttcatgctgaaacctgaaaaatccctccatacgtgttgaggagttccaagaaaaagaagagggtaaaacactatacacaactgttcatcgtcttacattaacagaacacaccgagaaactttacataacaaggaagcaaatccccttcactgcttttagtcaaagtccgttgtatctatagtggaggatgaaagtggagcaagcctagtagggataaagcttaagtctacatctcatgcagagttgtccttggt

SEQ ID NO: 121895 - DNA, 1546 bp, Homo Sapiens
  misc_feature (1416)..(1425): n is a, c, g, or t
taagtctacatctcatgcagagttgtccttggtctgtcctctaatatttctcagacatccgagttagaactgaggttcgttaatctggggtccgcattgatttcatatctgtaatgatacccttccatgtgatccctgcaggcatctctgatgttatgcatccacttttttatccccttgcggttcaaatacaaaaccaggaggaaaatagcgcctatcagggctaaaacaatacccaggaagacataagaggtttgcagggatgggggaagaatcgggtcacagtccaggtcagcactgttgagttccaagaggacccgattcctcattttttccggatatgcacaggtgagccggtctttgccctgcactacctctgtttccttgagccaggtcaccatgtctgccatgtggcagtcgcagacccagggattgttgtccaggaaaaccctaatgtggggtagaccttgcaactcagccagggtgccattgtgaaggaccttgagggcattgtcctccaggtggaggctttctagatgtgtcaggttgcggaaggacacgtaggtcaggctcaccagcgaattattacttaagtccaggtgcctgaggctgggcagttgggccagcacatcccgcggcaggtaaaggaagtggttgttggccagctccaagcggcggagcccctgcagtgcacggcccgccagcagggccgccaccaccatgccctcgaagctccggttctgccgctcatcttcagggggcacgatgtggttcaggatcagttccacaaggggactgggggccgagacgctggcattgctgcccgagaaagcgaagggactgaggtcggccagtgggttgtggctgaggtcgagctggcgcaggctgggcagatgctcgaaggcgcccgcgcgcacctcgtccaggcggctgccgctgaggttgagcgcggccagctccgccagcggcggccggcgggcgaaggcgccggcagggagcacggccagctggttgccggtaaggaagaggttgcgcacgtaggcgggcaggtccgtgggcacctcggtcagattgcggttaacgcacttgactgtgcgcgctgcctcggagcactcgcacagcgcggggcactggtccggcagcgggggctgggcggacacggcggaagccaggaacggcgccgaggaggagaaggaggatgccgaggaggtgggagaagacgaggagacccagcccaggagtaccagcgctagtcgcgccagccgcagacgcccgtccccggcggcggggccccgggagcaccccccaggcatcgcaggcatcgcgtttccccggagctgggctgggacaggcagcccgactccgaaggctcgggaggctgggcccggagggcgcgagccggcggaagcgtctggnnnnnnnnnnctcttcctctcgtggaaccgagggagtggcgccgcagccaggaacattggctaaccccctcgccaccggcgcggggcactcaggcctctcggggataagccggggcctcttcatagactta

SEQ ID NO: 121896 - DNA, 1828 bp, Homo Sapiens
  misc_feature (161)..(187): n is a, c, g, or t
  misc_feature (1286)..(1430): n is a, c, g, or t
  misc_feature (1439)..(1452): n is a, c, g, or t
  misc_feature (1478)..(1486): n is a, c, g, or t
  misc_feature (1562)..(1654): n is a, c, g, or t
  misc_feature (1671)..(1680): n is a, c, g, or t
attctttgtgccataccaaagtacagtatcagctgagctgaccttactctgaggactaactcttttgctggaagcggtttctgatttacagctcttggtttctcccagacatgttggtgggagagattttggtttttaaggggttgttagatggagtaaannnnnnnnnnnnnnnnnnnnnnnnnnnaactaaaaaggggtcacagaatttcagcagttctctgatttttatattttattcctcttcctatccaatccctgccttttgagtccaggtggtaagtacattttctttaacgtttttcctgcttttcttcccaaatgtgtctttttctttgggctactgtaccctgcttccagtgctgtccccggcataggtccatctctgcagaagccatttcaggagtacctggaggctcaacggcagaagcttcaccacaaaagcgaaatgggcacaccacagggagaaaactggttgtcctggatgtttgaaaagttggtcgttgtcatggtgtgttacttcatcctatctatcattaactccatggcacaaagttatgccaaacgaatccagcagcggttgaactcagaggagaaaactaaataagtagagaaagttttaaactgcagaaattggagtggatgggttctgccttaaattgggaggactccaagccgggaaggaaaattcccttttccaacctgtatcaatttttacaacttttttcctgaaagcagtttagtccatactttgcactgacatactttttccttctgtgctaaggtaaggtatccaccctcgatgcaatccaccttgtgttttcttagggtggaatgtgatgttcagcagcaaacttgcaacagactggccttctgtttgttactttcaaaaggcccacatgatacaattagagaattcccaccgcacaaaaaaagttcctaagtatgttaaatatgtcaagctttttaggcttgtcacaaatgattgctttgttttcctaagtcatcaaaatgtatataaattatctagattggataacagtcttgcatgtttatcatgttacaatttaatattccatcctgcccaacccttcctctcccatcctcaaaaaagggccattttatgatgcattgcacaccctctggggaaattgatctttaaattttgagacagtataaggaaaatctggttggtgtcttacaagtgagctgacaccattttttattctgtgtatttagaatgaagtcttgaaaaaaactttataaagacatctttaatcattccnnnnnnnnnnnnnnnnnnnnnnnnnnnnnnnnnnnnnnnnnnnnnnnnnnnnnnnnnnnnnnnnnnnnnnnnnnnnnnnnnnnnnnnnnnnnnnnnnnnnnnnnnnnnnnnnnnnnnnnnnnnnnnnnnnnnnnnnnnnnnnnnntttggcggnnnnnnnnnnnnnnaaaaaattttttaaaacttttgtttnnnnnnnnncccccggaggaaagggaaaaggggctatcgtggtcccaaaaaaacccgggtaaaagctgggggttggtttccccannnnnnnnnnnnnnnnnnnnnnnnnnnnnnnnnnnnnnnnnnnnnnnnnnnnnnnnnnnnnnnnnnnnnnnnnnnnnnnnnnnnnnnnnnnnnggtcttatttaaaattnnnnnnnnnntggctttttttggagaactggggggaatctttaaaagttttcccgcccggtggggaacccccccacaacgggtttaataaacccttaaaacccccccgggatataaaaaacccttggggcgcgttggggaaaaataatttttccccca

SEQ ID NO: 121897 - DNA, 679 bp, Homo Sapiens
tttggcttttgtttttgtttgattatttgtttcatttggtagttcatctgccttttaacccattcaccaaaatttaccttgttaacaagcatcaccaatgaacatttcagagcaatctgcatatttaacagacctaaaataaatcctattaggcaagtcagttgaaaatgctcgtgctgctaatggaattagagtgcgttcattttacaggctagtattttaaaagtagaaatcaaaatctggcaccgaagcatgctaattgtttactgtaccttgtgaggttttcactcataaatttaaaccagtgtatttttttagaactggtttgtgtatatatatagtgattatggatactaattcaatgtaatttataattttctatgtcaatacaaaaatacatcacagccttctcaaacagctcaagcaatatattgtatattgccatatcgtctggtgaaagggttaaattacttcacctcttgcacttttagatgcaaatcagtttttcatttctgtaatagaaaattattcacgtatttttacatcatttgtttttcctgaccagtatttaaaaccaaaaggatattctgaaaaatggccaacaatttttttagaagtagcatcccaagcagcgtgcctaaacattacattgcatatggaaataaatgaatccaacgtc

SEQ ID NO: 121898 - DNA, 729 bp, Homo Sapiens
ctagaaacaaagaatcaggctttatttttgttattttgaatacaggtattgtattgtagacatctgttagtctcataattcagtatggccaacacacagaaattaaaagtagaaacaaaatgagggcacacttgctcctgtccttggcttggcccctccaacctccaaaagaactgtcctccccattgtcatatcctttccctgctacgaaagacaaaacaaaatgatgccccaaagaaaagtcccagaggctctctcccagcagtcagtgggatgaagcaagacactgttaccttgggtaggatggagaagccaccaggtccataccacagaggccacagtgggatggagaagccaccaggtccataccacggaggccacgtgtgccaccagtggagccaaaccctggccatggctggcaaaactcaccaccaggcgagaccagagcatattatctaccagtaatccccgaggtccaacgccattcaagtcaggcagccctgaggcaagcaggaggagccctgtcctctgggggtgctgcttccagaggaggcccaaggacagtctcttcagagaggggctcacccgggaaagggggttcctgagaaggcgtgcaaaggtcaagggacccacccttgccacctgtcccagggcttactgctgactccactgtcctgggagtgctggaatctccacaccacttaaaatgaaaaaggaaatcagaaataa

SEQ ID NO: 121899 - DNA, 1022 bp, Homo Sapiens
  misc_feature (313)..(322): n is a, c, g, or t
  misc_feature (478)..(487): n is a, c, g, or t
tacagataaacattttaattgattaaatatattactttcaagatctttttgaaatcgcacttgtactgtactaatcaacagccaaaggcaataagaaagtttaaaaccaaaaatattctgacatgaacacatgacaggaaccgctgctatgtaaagtaacatacactgctcccaagaacaatgatatttttaggagataattcatcttaacatgtgcaaggacaaatttgtaatcaaaggctggaagaaatatatattagtgcctgctttttaaaagtttattttacattttaaatacagtatttttctcatnnnnnnnnnntccaggaagtgcctaactccatggtttctataccatatgtacatgaaagctgacagagagcctgacaaatgttctggatgtaacagtatgaacacctatgagctgggactacttctgaatcaaaattaaaaaacacaaattaagcactgcttaagnnnnnnnnnntccagtttctgaacaaccaaaagagaacagagttagatatgtacaaaaccaggtattaaaaaacagaaagaaatacagcacacaaaaactcaaacaacccatatgtagtgaactgtatatactgcagttaatgaaaaccctcctacaagaagtgatttaggatttgaaattttaaaaatctaagtacttcagtaacaacatacaataacaacattaagtgtatattgccatctttgtcattttctatctataccactctcccttctgaaaacaagaatcactagccatcacttatacaatttgaggcaattaatccatatttgttttcagtaaggaaaaaaagatgtacctcttcccgtcaataaagaaataacacaaattaaagctataaaatttaagcatgggcatatgtatttccaattctccttaataagtaattccaactggataatgtggcgacgcgtgggtcgacgattatcccggattccggaccgtaccagcctgctttttgtaccagctgttcatagtacaatgt

SEQ ID NO: 121900 - DNA, 1207 bp, Homo Sapiens
ttttttttctgttttacaagaatttaataacaaagattaaacaatcaaaatgaaccatgggactcaaaaacatcctaagttgcaaaatcaatacataatggaaaatctgacgacatttaaaactgtaagattaattcttttcattgagttcttctacttgcatttgcaaacagagagaatgacgcgcctgtttcagggattctttagccttagcaaggtcttcttttaacttgttgtattgctgcacatcaaagtgctgttgctttgatttcttgtggaagaactgaagaaattgcctactcttaacagctgagtaagtataatcctgtcgagtgactataaagtatgcaaaaaagaccatagaatttgcaaatgtgatgaagtatgtaactggctccatgatatcccaggagtacacccaccacgtgagccaggccagtgccccaccctgaatggacagcagtgccaatccagcccacaggagtccactggttttggcttccgaatgagcttctattccagctttcacctgttcaaggggctgcagctgttccttcaggtggtcaattttctccagtaaatggtgctctctctttttctgagactcttctaaatgcaagattgtaaatagtctgtgaaccaaggatttcatgtgttccatctcagcagtgtgctcattacttggtttttctctctttggacactgcacatcatatgctattttattaatgacaagtttaaaatcattcattagcaaaatatccatcaaggtagaagctgaaatcatgttgccatctgctgtgaagatggctgcagttttgatacccttatcttcattttgtaggtcctgaaggaatgaaccaactgttgacaacattggtttgactacgaattgacaacgttcttttctagatggcaaggtaagtgttaccaagggaaggccatgtctataaataactgttatttcatcaggtggcaccacggtactataatggtgtgactggtagtatttcacatttccacacagcttcacacgcaaaacctggggcggaggcggcagcggccacgggcgcgctgggcgccaggtgccaggggtcggcagcagccgcgtgcgccacggccagaggcccctctggagcatcctcccgccccaggcgcgcggctcccgcaggcgtcagcggcgcatcctccctcagccgggctcctc

SEQ ID NO: 121901 - DNA, 999 bp, Homo Sapiens
ttttagctagtatcttttattgtcagaacttctgtgagccaacaaacagttttgcatggttgtacacaaagggacaaggcaaatttcttttttcgtgtgggtagacttagttggcccaagtccttaaaacttttccatataaaaataaaaagtccaagaccagattatttttcttctggtcataaatgctgatttatttacaggtgccttgttcagaccaccattataaacttgggataaaatatgtgtgtattaaagcctcagcatttaatgtcagggtcctttgaagattcactcaagtgttaagacgtttctggaatgcagcgtctctcccccatagtcaacatggttattatatctgtaatctatccagaatgatagaagctaaccttccaagtaacactttgtttttaacttaaatcttttagacatgaaagactccaaaatgacttcattcttgttctaaaaccagcactggagccagctgttgaagagtggtttataaatacagttatcttgtaggctgcttatctgtttataatacagcagacacagatggcagactttgctacatgtaaaacaatggagtcaacacgtgtttttcaaaatacagcaaagacaggaaaatccaggatttgggtttgttaataaaaccaccttataaagtaacaattgagactatagctctgcattattaaaatatacagactgtgtacaccattacacatcctttttccctttgctttttaatgctcatgaaaccatgattaaagtgttgagtttatgaacacatgcacgaacaggcaagcacgtacacttaaaagatgaaacaaagaaaaaagttgattcatgtcattccatgagaaaggctgcccgcagcactccagctcaaacacactgtcccctcgagctctccatcccccttcccactccctcaccttccctcagacccggccgtaatggccgaattcccgggcatatgtccggtaccgtcgactg

SEQ ID NO: 121902 - DNA, 2231 bp, Homo Sapiens
ccctttgctttttaatgctcatgaaaccatgattaaagtgttgagtttatgaacacatgcccgaacaggcaagcccgtacacttaaaagatgaaacaaagaaaaaagttgattcatgtcattccatgaaaaagggtgcccgcagcactccagctcaaacacactgtcccctcgagctttccatcccccttcccactccctcaccttccctcaaattcggggaaatcaggttgggaggttagtgcatcattgacagaaaatgccccccttccacgctctgttaagtctcccccagaagggggaaaggcagttcccttcagtagcacagttacggtcgattagtgttggttccacaagttaaggcacttccggctgctttggtggcagcgtggttcctcccctccttttttaaggcatgtgtcctctaagagtagtaaagctttggaaactgtgcagacttgttaaagttgacagcttaatacaggatcaatgaaggcggcaggcaaaaggatcctcggagacacctccctcagaccagaagcttccagaaagcctgggcagctctgtgtttgttttggctgggcatggcacactggagccagcctaggccagagggtggtgcgttcaggtagcaaagacaggtgggctctgtcccgccttcacctggagctgccctggctgctggcggagcgtgtcgtgctgtagcgcttcttcacgatcatgctgatgtaggctttcatgagcttggccacatccaccacctcactggtttcaaagagcagctccctctcatcgaccacgatcttatacgtattcgccaggggtgcccccaaaagagaggatgtgttcatactggaagatttccagtggtcttccctctccacgcttgtagacggagacggcgtccgcgctgacacccaaccagagttcctgagggaagccactttctttgcactccacatcaaacagcgtcgagccatagccaggccactccttgatcaaggccatgtacttggccatggcctgttcctggttcattccctgaaatttcctccacttgtcaatgatactggctcgagcagaggagacttcttccttaatccacatgtccagcatctgctcctcctcgaccttctgccggaccacggatcctgtccggaagctccgcctcagggtcccctctaggaagctcgtccgcctcttctccagccgttcacaaggggtgaaggttttggttgactggctgatgcgggccttgagtctctgcagggaataaacctcttcgagaggtgggatggcagcgtgcagagtataatccccctgcagatactggagtcgcagggcagcaagaacctggaggttttcttccggggctggatggtggccatggataaccgcttcgtgggcctgttcaaacataaatgcaaactccacactgtcttttggcacgttgtctgtgtccaggaagcagtaaagtttgaagtagaatttccatggcaggtccccaacctcggatgtggcagccagcttttcaaacttggctaagacatcagctacgacggttcgactttcaatggctttgtcgacgtggccgttgtattcaaacaaagcaaacatgttcctgctgtcctccatggccaggcctcggatcagcttctccaccacctccccagcggtggtgtgggagttgatggtgatcttgcaggagccgccgccatggcaatagaccgtggatgtcatttcctgcctgtggatcagagcttctatttcatctcgggaaggcacaaactctcggcatttggttttcttaagagattcgtaagtgaagagagcgtatttttccatctcggttcctggaaactgttcccgtatccttttcagatggaacttgagatacttgagaatccctcgactcggcaggaaggtgcagctcaggcatgtcaggatctgccagctgtacaggttgcccacactgccggggtggggcactttgttggtctgtttgataagctggcagtacagctcgtcccgcagaggtcgcaggtcatgccctgtctgtaggatgccctggattattggaattgggtcagacatggactccagttgctgcagggaattgaatatcttgatggcctcatcctgaagggtggtatagcctttgtctttgagcaagttgagatttatgtccccggacgcgtggtcgacgatatcccgggaatccggaccggtcca

SEQ ID NO: 121903 - DNA, 584 bp, Homo Sapiens
ttttttttgcccagcaaagaagtatgtttctcaagaagtgaaaggccaagggtcacttcaccaggctttttctgaacttccagctccattaacatcctgacgtgaagaaccaaccccttgccttcaccaagaagatggaatgtttcatggacacagtccctgtccccaaacccctccttttcaaggggcctctggtcatccggggcactgttctggaggtgctgttcctgcttatcctgctgctcttcgtggccgtgctcctctactctttgccgaactatttgtcaatgaagattgtaaagccaaatgtgtaacaaaggcaaaggcttcatttcaagagtcatccagcaatgagagaatcctgcctctgtagaccaacatccagtgtgattttgtgtctgagaccacaccccagtagcaggttacgccatgtcaccgagccccagttgattcccagagggtcttagtcctggaaagtcaggccaacaagcaacgtttgcatcatgttatctcttaagtattaaaagttttattttctaaagttaaatcatgtttttccaaacaggtttcagcatagctgagat

SEQ ID NO: 121904 - DNA, 2259 bp, Homo Sapiens
gttaaaaaggtgaaacatttttatttagtttcattacagaggttaaatagacttttatgacatccatacaaaatatagcaatggttgtgggcataaataagaattgttctaactattctaactgattttataatgcacagctctttcagttgattacaaatatgaagtatatcacctcaggatgcagagatttttgaattctatttagcaatttccaaaagctgaagtctagaaccgaagacacatataaaaagatgatttttaaatggaaccagccaccttgaaaaatattttgaaaaacatgatttaaactttagaaaataaaacttttaatacttaagagataacatgatgcaaacgttgcttgttggcctgactttccaggactaagaccctctgggaatcaatggggctcggtgacatggcgtaacctgctactggggtgtggtctcagacacaaaatcacactggatgttggtctacagaggcaggattctctcattgctggatgactcttgaaatgaagcctttgcctttgttacacatttggctttacaatcttcattgacaaatagttcggcaaagagtagaggagcacggccacgaagagcagcaggataagcaggaacagcaagccgatgatgacccacttaaagcggcgccacacgatgaacttcatggtcttgcatgggttggtgaaccagaggaaggaggtttctggtcgatttggtaagtccagcttggggttcatgttgggttcgtcccgccccttcccggctggcctctcgtcggcctccttctcgttgaggatttccaatgtcatctccactttcccagccattacgcgggcgccatctttctctgcgtagcatggccaccatcctttcatggacttctgctcaaagagggaggctgtcttggctttaagggggttcatggctttgaggtccggaatcatgtccaacctgcatttctctggtgattttgcaggaatgatcgtgtgacgcaagtcaagttctaggaaacccaagtagtcatccagagaaaacttgtcattgtcccatatctgaatgatcagcctgggtgggattcgaaattccgtttggtcaatactccagaaatgctcttttttcgcaacgatacagagttgttcggctggaaggtagtcaaacgggaaaacaaatcgccagttaaaattcccttcaccatccaaagatctgtaatggacatctgttttctgtttgttttcttcattgccaggaatccagcctttgacgtagatgtcactcatttcctctcctgtgatgcttttctcgtccaagataacgtccttggtgttccagatgatcacacgcaggtagtatttcttggctttccggggtgtgatgttgaaaggagggcctggtggccccaaactcttggggaaaacatccacccacatctgaagttttccctgggaaatgttgggctggaaggtgctgtgcaaagtccttgtttccacgtgctcagggaccagcccctgagtcctgaggatgtgaagagcaagccgctcttcaggggccccgaggtgctggtgcaggattttgttggcttcaaattcatccaagctgtagtctcgtcctccatatctgattctactcccatcttcggaaaggatgggttgtgggaagcctttgaatctggcgacattttgaagcagctgtgttggtctcagttgatctcgccaggtattgactccagaaacacagtactcctctggtatgccgcagtgggacccaaagcgggaaaggaatcggttttccagatcaataattgtttctcctactttttcatcccgggtaaaggtgtcataatcatagacagaaattttcaggtctttttcttgaggtaagtagcagctcagttcgtacatcctgccaaagactgggttgagagtgttgggaatgtagtgatctcggtcttcaatgacttttttgcccagtgttatttttatgtaagggtcacacaggccattgttgtcctggggctggagctctaagcctcgaacaatgtaaatcctaaccgtgcattcctgtgggacgctgtcaggtaattcccgaaactgtctgggaggggctggcacgctggggtcatccggcagagggtagatccgaaaggagcccttaaactctccaaccacagaaggatcttcattttcatccgacttgcctcggtacaacttgaacgtatctgagaagtctgtcaggccctcaaattctg

SEQ ID NO: 121905 - DNA, 951 bp, Homo Sapiens
  misc_feature (115)..(115): n is a, c, g, or t
  misc_feature (185)..(185): n is a, c, g, or t
  misc_feature (195)..(196): n is a, c, g, or t
  misc_feature (223)..(223): n is a, c, g, or t
cagctacctatgtccgctgttgtgttgatgtgacgatacatcacacagaacagttgctgatacgattatcgactccttaggattgcctcgagccagaatcgcacgagggagaccntagagttaccagtacagatctcagaagctgggaaggcttatcagtccataatcagcacccaatcttcctncgaagttgtnntgccttaaaatgtcagttgaatgcccntgagggagacaacctgagtccatttcctatacttcagccagtgctgtgaaacaggctgatgaacgatctgttctctcatgaaaatctacatcaggaggacctagaaaaggaaggaggcattgaatttcctcagatctactatgatcgattcagtggcaaaaagtatcatttcttttatggctgtggctttcggcatttagtgggggattctctgatcaaggttgatgtggtgaataagacactgaaggtttggagagaagatggcttttatccctcagaacctgtttttgttccagcaccaggaaccaatgaagaagatggtggggttattctttctgtggtgatcactcccaaccagaatgaaagcaattttctcctagttttggatgccaagaactttgaagagctgggccgagcagaggtacctgtgcagatgccttatgggttccatggtaccttcatacccatctgatgggacaaccacaaggtctggaaactaggtttaaaataagtgtgcacttggacataaagactggagaaataaacactgaggactccaaaaggggggcaaggaggaagaggggcaggggttaaaaagctacctattgaatactatgttccctatttgggtgatgggttcgttagaagtccaaacctcagcagcacacaatatactcatgtaacaagcctgcacatgtaccccagaatctaaaataaaaataaaaaga

SEQ ID NO: 121906 - DNA, 4216 bp, Homo Sapiens
  misc_feature (12)..(12): n is a, c, g, or t
  misc_feature (168)..(168): n is a, c, g, or t
  misc_feature (175)..(175): n is a, c, g, or t
  misc_feature (223)..(223): n is a, c, g, or t
  misc_feature (266)..(266): n is a, c, g, or t
  misc_feature (279)..(279): n is a, c, g, or t
  misc_feature (286)..(286): n is a, c, g, or t
  misc_feature (377)..(377): n is a, c, g, or t
  misc_feature (1002)..(1016): n is a, c, g, or t
  misc_feature (2052)..(2061): n is a, c, g, or t
  misc_feature (2461)..(2475): n is a, c, g, or t
  misc_feature (4092)..(4147): n is a, c, g, or t
ccagctacattntctccgctgttgtgttgatgtgacgatacatcacacagaacagttgctgatacgattatcgactccttagggattgcctcgagccagaatcgcacgagcaacggtcggtatcatgtgaccaaaatctgtgacccatctttatgtcttgccatatcntaatgcntgcaaacagtagtattaccagatgatatgacataaaaaaataaattcnaagagattgagatcttagccaaagttgagggactacatcattntgaagcactctangaagggngatgtgattaaatgtgactgcatgcctgggctggctgcttctaggtatagagctgtgttaaggcgtgggaataggagagcaatgccctagngaaaagagggcactaggggaaacaatggttgcagtgcactgcagaatgaccaatggccgcttatttccagagttttccttcaacttaaaaagagatggcattttcttatgattcagtaaccgcattacttacatcaacattatggttgctatagacaagcctaggtagctagcctctatttacatcatcccactaagggtatccaaacccaagtaaccaaattttagaacactatcagatagtttcctgcattcaagacttcaactcataactctttgaactcttattagatataaggaatctaagatgtattataggcattcctataattagccatatttacaagatacaaaatatttggataaaaagcaaatttcatcacatcgtataatgtacagataaggtttataaagtaaattaatttatttttagcaccatatatacaatccaaacactgcaaattaatttcttttcaaactcaaaagatagttttcattaatcatgatggcacatcctctctctcaataaacgcaaatgctgttttatgggctgtgtggtaatagtttaacatttagtaattgattatataaaattatgttctcaagactaggctgcatttcctttnnnnnnnnnnnnnnncctcaggttaaaaattagccaaaaatttgtgattactatcacaaataatccaagatttaaataaccaagggcctccagaggcccctgttcttccttttgccctgtctaaaatccaatgaaatatattaagtgttaaactggtatgaagaggtggaactaaattctttgaaacacaaggtggagtatcactttttacttaaactttgagtcctttacatttataactgctattcaaaaaaaattagacaaagacatctagatttagattaacgtgatcaaagggattattgtggatcattaaaggaaacttaacattaagccttcatgtaccaaatactaatatttaaattaatttcaaaatctataaaggtatgtaattattaatttgcaaaggagaaaactgaggctcagaagttgcacaaaaccatgaactagtggaactgagctttacaaaccaaggctgtcctctactatacattatttctcctcagtacacaataataaattggttcaaaattatctagacctttaaaaagtatataatggaaagtgcttttagtattaaagttttcatgaatgaccctaacaaattttgtctaaaagtttactaaaatgctgacatcatttataatccttcatttatttgtaaaaagatgaggacacacattaagtgaagtgcaattcattttgtcttctacaaaataagttaattttaagcaacccaatctcaatgatgataaatgcatgtcattatttatttagatgtttcagctctcgcactaagtttttacaagctggtgaacactgacaaaattatttctcccacagaactataaccacacatccccagacagtataaatatatggttgaactaacattaatacacatcaccattttatcaattacataataaaacaaattgtcaagtatccaaatattaagttacacagctcaaaaggcatataaaatattagatgtctgctcaattcattagcagaaacccatttctttttttgcaagagaggttgggaaggnnnnnnnnnntcacactttcaaacaaaaataagttggtaaacacacttctgataagtatgggaaaaaaattacaagaatttcaggaagtttatgattacaataacaaagcatctctaccttttaaaaaaatattttactaaattaaagagcatattctacatgtttgcacaagacaaaggcaacattttgctaaaaataattaatagccccctcccattcttttctcaggccctccctgttaagttgcacctcagagtgcaaacattaaattaatgtaaggcttttttgtctgaagacattaaagacatgtgcttctgtacaacgtagattttcaaaatggaggtttttttaatacagcacaaagtgagatacatggaaacacgtaaaataatcactgtaagacttggtnnnnnnnnnnnnnnntcaatggttaagcaaacctgacgtatattggtatgaatgtgggagatgtaaacataaagtgagcaggcaaataaccatgtaggccctactttcaatgtttgaaatgattgaaggaataaaccacataaggtctagtgttcatagttcctgggattttacttctgtatggtactaaaaatatacaagtattgtgctgggtattttggcacctaatcttcctaaatttcttatgtattgataagattctggcatgggaatagatttaacaagtcataactcaatactgcatgatttggggaaaggtcaattgatacaaatgacaagcacattttatatgctgacagcaagaatcttttgccaagtatccaaataggttgactgtaacccaaatacagaggttgccaaatctgtctagcttgaggcctggtaaaactgcctttcaatactcctatggaagcttcattagacttactaagccaacatgttggctaatatgtataacaaattaggccctatctcaagttccacttccagtagcattaggcaccccaattttattgaatgcaacagttgtttctatgaccgttggaatctttgaaacgcagccgcattttaggacgatacttctccaaatacagaagttgcttgctgttaaaagctccacgccgcttttgtcttatgaattgtactgcatcttcgtatttcattccaccttcaattaatgctagggcaacaagtactggagctctcccaaggcctgcaacgcaatgaacagcaatacaacaaccaggttcttcacgaaacttaattttcacaagacttaaccagtcatcaacaatctggttggatggtggtgcaccatcatcaaaaggccaatcaagaacatggataccttctttctccacaagagtagtgtcataagttgcttcacatactcttactattgtggtaactccatacttcttaagttcctctataaatttgtttaaggtcgcattggttggattgtgtgtaataagaaatctcatgttcttgtatgtgacttccacaggagctgggcggttcattcgagccatgttaatttagttaaaaaacactcaatagggttatgaaataattaaaaaaattgaatacagaaatgatgcaaagaaactgaagtctacttcaatatactccacttgaaattctcagtgctttgagtatgaagttgtaagtaatgataagtgaaatgaacctcctaacaagaagcagcaattcttcaatccagtaatactgaggccaacagaaaagaagtgcactgaggtttaccccatccaggtcagaactcttgtaaaatgctctgtggatttcaattcaacacttctgtgtccaggataaccactcttatgggggcttcttggtggagcagtaatcagtttctacagttcacttgtctgcatagaggtcgtgctgtgcctggcagtaatctccactgcccttcagaaactccataaatgtgtgaccaagaacaccacagaattgaggaatatgtttactcattgaagattgtggcctaatcatacagccggtcccgaggcggcggcgacacaggcggtggcggtggctgcagggcaggannnnnnnnnnnnnnnnnnnnnnnnnnnnnnnnnnnnnnnnnnnnnnnnnnnnnnnnaccagactctaccatgcagtgagcggctcggagcagagcgcgtagccgagccggcccgcagccgaagga

SEQ ID NO: 121907 - DNA, 1555 bp, Homo Sapiens
gcttgattttctgcaggataaggggaacagatctgtgctgggggaagagctgagttgcagacaactcacaaaggccactgtgactagtattcctttctggcaaacatttactttctccaaagccatgggtttgactgccattgtttcctaatgtaggcagtctgaaaccgaggaggaaggggtccagttgactggcaagtggggataatacattagaaaacctaagctcctaagtgagttagaaatgcattagagtagggtaaagaagacattaagttaggaaggccagaggcccaagaagcccaagttaaggtagaagatgaattgtgaactaaaagtttgaggggcagagaagcagattcatttggccagaaataagtattggtatagagtgatgatgagaaagcagtggctttcttagaatttgagttggcagttcccaaggctggctagtaagccacacacggagactaacagggccacaccatcttccattgcccagccaggagcctggctggcagaccttaggtgtctgatgacattggagtaatagtgtgacttctaacaaatacctaggtggtgtttaggggaggttatggcttgttcactcaggaaactagctttttattacaaagggcttatgatgattttattggctgccagaggaacacagtaaataactcccaggtgtcttgttggaaattaatcatgtggaaattatcacttctttggtgcaataatgccttccagttgggccttcagctgctgatttgttcgcttcaggaactgaatctcctcattgtgcttcttctcctccacctgccgcctctcgctctcccgcttctcagtggcttcacattttgccttctgctcgttcacttgcctctccaggtctctcttttccgtctccaattctgcgattttcctctccatgtctgacttcccctgctcagcctgcagtgccttcctcatgccaaacgccacgctgctctcgtacagggtctggtaggcagcgatggtcatgcggatctcgtcccggactcgcagcagcagcagccccctctccgcacagttgatggtgacctcccggatcaactcatcaaaacactgtgagtagagttccctgcggacagggcagatgcctgtttccctggcctgccgctgctgcagctttaagtctaactgctcctggaggtgcaccacgtccatcctggtgctaggggtgctggacacctgctggatccatagctgcgtgtcttccacccactcccttgggggtagtatggcattcaagatttcttctgcctgctttgtaggatctgggacacagggagttgaggggagcttggtcttgggtggctgtggggctgaacctgaaggtccaggctgctgggggctgactttcagtagccgagccttggggctccgtttctccgtgttccggctcaccagcactggggtgtcgtacttgagcaaagagtctgcgggcggaatcatggcggaggcgagagtagcaacccagcagctgccctgtccagtgtggggccttgtattg

SEQ ID NO: 121908 - DNA, 1550 bp, Homo Sapiens
  misc_feature (147)..(157): n is a, c, g, or t
  misc_feature (172)..(267): n is a, c, g, or t
  misc_feature (283)..(337): n is a, c, g, or t
  misc_feature (377)..(392): n is a, c, g, or t
  misc_feature (400)..(526): n is a, c, g, or t
ccccccgtttttccccgggggaaatttttttccaaagggcccaaaggtggttttccccgggggaataaagtttttaaaaccccttggagggggttccctctcgggcgaaagtttttaaaatttcacacctttttccaaaaagggcannnnnnnnnnnaaatttattttgagnnnnnnnnnnnnnnnnnnnnnnnnnnnnnnnnnnnnnnnnnnnnnnnnnnnnnnnnnnnnnnnnnnnnnnnnnnnnnnnnnnnnnnnnnnnnnnnnggggaaatcaaacccnnnnnnnnnnnnnnnnnnnnnnnnnnnnnnnnnnnnnnnnnnnnnnnnnnnnnnnggggcccggggcccaaaaaaaggttttaaaaaattttttnnnnnnnnnnnnnnnnccaaaggnnnnnnnnnnnnnnnnnnnnnnnnnnnnnnnnnnnnnnnnnnnnnnnnnnnnnnnnnnnnnnnnnnnnnnnnnnnnnnnnnnnnnnnnnnnnnnnnnnnnnnnnnnnnnnnnnnnnnnnnnnnnnnnccacttttaaaccagtctttaattttcaattcaggtgtgaggcacatatatacacacaaacatattaatttaaggaagcaagaatgtagaatattaacatgtatggcagacactacttcatgtattttgtttaaaacttaactttgaaataacttcattgtttacatgtaaaagaaaaatatcattcacttatacttccacttccctttaaagtattctcaaattatatttcctgaaactccaatagaaagcattctctcttaatcatggcaacgggtcgggtactcattggtgaccaaaatctggtgacaccatcttttatgttctttgccatattcttaaatgcctggcaaacagtagatatttaccagatgaatatgacattaaaaaaataaatttcaagagattgagattctttagccaagttgagggactacatcattttgaagcactctagaagggggatgtgattaaatgtgactgcatgcctgggctggctgcttctaggtatagagctgtgttaaggcgtgggaataggagagcaatgccctagggaaaagagggcactaggggaaacaatggttgcagtgcactgcagaatgaccaatggcacctacttccagagttttccttcaactaaaaagagatggcattttcttatgattcagtaaccgcattacttacatcaacattatggttgctatagacaagcctaggtagctagcctctatttacatcatcccactaagggtatccaaacccaagtaaccaaattttagaacactatcagatagtttcctgcattcaagacttcaactcataactctttgaactcttattagatataaggaatctaagatgtattataggcattcctataattagccatatttacaagatacaaaatatttggataaaaagcaaatttcatcacatcgtataatgtacagataaggtttataaagtcggacgcgtgggcggacgcgtgggtcgacgatatcccgggcattccggaccggtccag

SEQ ID NO: 121909 - DNA, 693 bp, Homo Sapiens
  misc_feature (72)..(89): n is a, c, g, or t
ggtaacgacggccacgtgcaagctaaaattaacctcactaaagggaatatcttgcggccgcggctgtaggcnnnnnnnnnnnnnnnnnnagaacaccacaattaaacctgggtttataaaacatcttttagttaaaaatgaggcctttccgggcctgtcaacatggaagtgtcacacatgaatacacctaagttaaaacatgaaacatgactgacaaaacgttattgctggagagcacctggcaactgttttacaagaaataaatatgactattgaaaccataacagctctctactagggttgaatcctggtaaagaaagtccccttggattagctgagcattttgagttaggatatgcaaaatgaactgggagctcagttttggaggagctgatgtaggggtggagggcgacggggcataaagggctggggagatgaccagaggtgggatggggtggcgtggccagggaaactgtggcaagggccttcaagaaggacgtctcagagttaaacgattcaaagctgaggtcatgcgtgctgctgtgatgtaaacctgccgccacttccatctcctgccagaccctcgggtgagttggtctttttcgagcaaggagaccatgaaaacataccttctcaggggatctgcagaaatcttagggaggtcatggggcctttaatagggtgtggaaagga

SEQ ID NO: 121910 - DNA, 1553 bp, Homo Sapiens
  misc_feature (693)..(715): n is a, c, g, or t
  misc_feature (1093)..(1145): n is a, c, g, or t
  misc_feature (1473)..(1507): n is a, c, g, or t
ccaggctggtctctgtggtttttattagtgtttcctgggacccatcaaacaaataaacatattttgaaaaatataattctttgacaaaacaggaatagcaggaatagtttgaatttaacatagcttaaagggaaagatttctgattttttttaaatagtagcaatagagttgtttccacaaattgtcaacccaggagccagatggaaagaaaaacaagaattatgcagataactacagaaagattaatcccaatttagttaaacttgtgaaggcttgtacgtttcagaggttcataagacacagtctcaacaggagttttttttaataaatgctctatctctagttccagaaactgaattccaagaagctacactgaggataattcagctctgatattgtgattactgtgatgttctttcattcatacagtaagtatctgcccaatacgtaactaccgagatctattgcttcctacataattagacaagctcctcacacatatgggcccatgccgtgcacatagcaggcactcaacaagtgtttgcttaactacagaagaataatataattgccttccttcttaactgttttacctttttctatacttgatatatttgaaaaacaacatgcttgcaaaactaaaatctaacatgcattactaactttatcaaaagatccctcagtatttttcnnnnnnnnnnnnnnnnnnnnnnnccaatcccccaaatactaaaacttagaactgctttacacttaaatagcaatttacatcatattaacatattcataatcttcattggttaaaacaggtcaaaggtttattactggcttctcataccagataagtctcacagttcccaataaggcaacagaatcctcatcccacatatattgacttgtggaacccaacggcctgttttggtttcatttcagcgcaagtagaaggcaaaataaagagtctcacagtaaaatgttcatagtagataatatgtccttgaaggttgtgccgttgtgctcttattccactgaagaaatgattcacatcccaattatagatatggtctcccaatcagaggagtcttttagaagacnnnnnnnnnnnnnnnnnnnnnnnnnnnnnnnnnnnnnnnnnnnnnnnnnnnnnacaggaaaataatagtgattgataagacatagtccctgtcctcaaagagctaacagtctagcaaggcaggaactttgagaaaagaccatgtgttcaaaggaaaactcacaacctgggtctcccttctcagatggcacattcaagaaactgttgcttatgccctgggagccacagccttacttaagtcttaccaagtcaaatatctatcagcctcagatgatttgagcctggtaaagtcttagcaatagatttgctgcctcatgttcccatgaaaacccccggccgtaatggccgaattcccgggcatatgtccggtaccgtcgactgnnnnnnnnnnnnnnnnnnnnnnnnnnnnnnnnnnncggccgcttcctcgctcaactactccgctgcgctcggtcgttcgct

SEQ ID NO: 121911 - DNA, 1806 bp, Homo Sapiens
  misc_feature (62)..(269): n is a, c, g, or t
  misc_feature (701)..(725): n is a, c, g, or t
gaaaaaggagacggtggtgtggaaatggctgaagagttgctcttgtatccctatagtccaannnnnnnnnnnnnnnnnnnnnnnnnnnnnnnnnnnnnnnnnnnnnnnnnnnnnnnnnnnnnnnnnnnnnnnnnnnnnnnnnnnnnnnnnnnnnnnnnnnnnnnnnnnnnnnnnnnnnnnnnnnnnnnnnnnnnnnnnnnnnnnnnnnnnnnnnnnnnnnnnnnnnnnnnnnnnnnnnnnnnnnnnnnnnnnnnnnnnnnnnnnnnnnncagtttagctagtcaatatgaggatggtggtttattctcagaagaaaaagatatgtaaggtcttttagctccttagagtgaagcaaaagcaagacttcaacctcaacctatctttatgttttaaatgttagggacaataagttgaaatagctagaggagcttcttttcagaaccccagatgagagccaatgtcagataaagtaagcatagtaatgtagcaggaactacaatagaagacattttcactggaattacaaagcagaattaaaattatattgtagaaggaaacaccaagaaaagaatttccagggaaaatcctctttgcaggtattaattcttataattttttgtcttttggattatctgtttactgtctcatctgaactgatcccaggtgaacggtttattgcctagatttgtactcagaggaannnnnnnnnnnnnnnnnnnnnnnnnaagaaaggaaagaaaggatgaaaaaaataaacagaaaactcagctcaggcacaattgtcaccaaggagttaaaagcttcttcttcaatagaggaattgttctgggggtcctggagacttaccattgagccatgcaatctgggaagcacaggaataagtagacactttgaaaatggatttgaatgttctcatcccttttgcagcttttctttttggctctctcatgtccttggcttgctcctctattctacctctctttctccagcaataatatgcaaatgaagacatgtatccataagaaggagtgctcttcatcaactaatagagcacctaccacagtgtcatacctggtagaggtgagcaattcatattcaaaggttgcaaagtgtttgtaatatattcatgaggctggaagtaagaagaattaaaaatttgtcctaattacaatgagaaccattctaggtagtgatcttggagcacacatgaataactttctgaaggtgcaaccaaatccatttttatttctgcctggcttggtcacctctgtaaaggtttaacttagtgttgtcaagtaacagttactgaaagagctgagaaaaagaacaatgaacagcaacgatcttgactgtgcaactcagacattcctgcagaaaagacatatgttgctttacaagaaggccaaagaactatggggccttcccagcatttgactgttcattgcatagaatgaattaaatatccagttacttgaatgggtataacacatatttgttcaatgaatgaatgaatgtcttctaaaagactcctctgattgggagaccatatctataattgggatgtgaatcatttcttcagtggaataagagcacaacggcacaaccttcaaggacatattatctactatgaacattttactgtgagactctttattttgccttctacttgcgctgaaatgaaaccaaaacaggccgttgggttccacaagtcaatatatgttggatgaggattctgttgccttattgggaactgtgagacttatctggtatgagaagccagtaataaacctttgacctgttttaacc

SEQ ID NO: 121912 - DNA, 1668 bp, Homo Sapiens
  misc_feature (213)..(229): n is a, c, g, or t
  misc_feature (1591)..(1625): n is a, c, g, or t
tttgcgtcccattaagagcttatccattgcttccagaaagtttttttaacggccctttagtccctgatccggtttcccaaaaagccaagaatccagtttttcaggtcgcactccaaaggcctccaatataatataatcgccggtataaggaatccagaaattctctggtttagatatgctgtagctccacccaaggctttcattaataaattnnnnnnnnnnnnnnnnngtcgtacaacgtataatggattatgcagtgcaaagtaatgtcactggaccaaaatttagtttaatcatttttatttcaagtgtatttaaaaaatcataaatggggtttcataatccaaagttgaaacatttattcttcatagcttcagaatttaacaaccaattgtagaccatgctttccaaatccagtcttctttgctatttttcaaaacttctgagatctagtattaaactgctccattctaaatgtatagttttagataagtattgtacacttgttgataagggttttctgaaagcagtctatcaaatataaagaatggtttctatctaagaatcagcagtgagggaagaaatattaaacacctatcaagaaatcaattattcattttaaaaataacagaaccagtgctgctctctgtcataaaagagaacatgtaaaatttatttttatagactttggtaatattttattcccccacagaggccttcaatcctacttaaagatattttacacacagtaaccatcaggatttactgagtaaaaatctcaggtattaaccatgcccctaaaatgtgctattccaaagaggaacaggttacttttgaggaaaaaagctgccttggtaacttccctcaaatgtttattttaaataaaaatggttgatggaaatattttttaaaagaactttgggtataatatggcatactgcccatcaaacaaaaaaggaaataaaactttctttccatttataataagttttccacctttactatcaagattacaacttattgaccttttatgcttgcttggtttttttgactgcctaatccaatgtttaaatttttaagtctgcatttcaatgtagtaggagttatttttcaaataatcttcagaacccagaatacagagcaactctcagaataccagagcaacactctcaagtcatacttttgaacccagaataccagaataccagacttcagaacccagaataccagagcaacactctcaagtcatacttttgactacaattaagagatgaaaatggacggatatctgaagataggtattccctctgctctgaaggtgagcaagattttaacatgtgagcaacacagaactccactcctctggagctcctttcaactcagaatgcttcagttcagtaagtcaatatattattcttaaaaattaaagtttggtcactaagaaggactgaacaaaaattattcccctcccgccaaacacaaccagaacagttctaatcaggccctcttctccccacaaaaatagggaagtagctgggctcccggccgtaatggccgaattcccgggcatatgtccggtaccgtcgactgnnnnnnnnnnnnnnnnnnnnnnnnnnnnnnnnnnncggccgcttcctcgctaaactacttcgctgcgctcgtttctga

SEQ ID NO: 121913 - DNA, 1343 bp, Homo Sapiens
  misc_feature (240)..(338): n is a, c, g, or t
  misc_feature (633)..(695): n is a, c, g, or t
  misc_feature (905)..(925): n is a, c, g, or t
  misc_feature (965)..(986): n is a, c, g, or t
  misc_feature (1252)..(1284): n is a, c, g, or t
cgttcccgatattataacgtaacccattgatgacgtacgctccccaccaaagacggggcaaggtcataccaggaacagaaacgcccatacacaccgcctctcccgagattgcgggtcattatgcactgaagggcagtttccgaatggaagcggcaatgacgcaacacattaattgagttactcactcataggcacccaagatttacactttatgctcccgcccgtatgttgtgtgaattnnnnnnnnnnnnnnnnnnnnnnnnnnnnnnnnnnnnnnnnnnnnnnnnnnnnnnnnnnnnnnnnnnnnnnnnnnnnnnnnnnnnnnnnnnnnnnnnnnncacgaggaggcacatggagaactaaatcttttgtagtagctgagatctgcaatatataacgggacagtcaaagggcaatgtttttctgtaacatattggaaaaagaaaatgcagttatattccttttttatttgttcctttagtttgttttggttcagcagtcagcagttaagtatataacatggcccgcaaggacaatgaatccactcacattgcagaacaattccgaaaatggcaaactactactactactgttcagttttttaaaagttttgaaatgctgcatttacatttnnnnnnnnnnnnnnnnnnnnnnnnnnnnnnnnnnnnnnnnnnnnnnnnnnnnnnnnnnnnnnnggggaagatggtctgttttgacagaaactgacaggaatcaatcaaaacaatcgaattttgaattgagtaaagtgcaatttcattggatagctaaatatctttgtaagatagagattgttgaaaattctatttttgtttttctagtcctttcaccccaggactctaaattattggggtaaaaaacagccttgcaagaaaaaggggagctannnnnnnnnnnnnnnnnnnnnattgttaaacttgtatccctttaaaaactgaaggaaattnnnnnnnnnnnnnnnnnnnnnncaaatgtaatggtgcttttaccacaatatgttaactacattaaatgctaattaattattttctgttatcaaagcacatgactaaaatgaaatcatggtatctgttaattttataagctagaagtcactataatggattacgccaattctaaaaaattttacacctatctggcatcataggatttatcagttatcagacacctcattgtaccagagattgtccagaagttttaaagacctttgcatccctgaactgggctatgggannnnnnnnnnnnnnnnnnnnnnnnnnnnnnnnngatgaaaccaatactgacacaaatgctggtgcccattcagatcaagggtacttgttagg

SEQ ID NO: 121914 - DNA, 987 bp, Homo Sapiens
  misc_feature (61)..(93): n is a, c, g, or t
  misc_feature (359)..(379): n is a, c, g, or t
  misc_feature (419)..(439): n is a, c, g, or t
ccctaacaagtacccttgatctgaatgggcaccagcatttgtgtcagtattggtttcatcnnnnnnnnnnnnnnnnnnnnnnnnnnnnnnnnntcccatagcccagttcagggatgcaaaggtctttaaaacttctggacaatctctggtacaatgaggtgtctgataactgataaatcctatgatgccagataggtgtaaaattttttagaattggcgtaatccattatagtgacttctagcttataaaattaacagataccatgatttcattttagtcatgtgctttgataacagaaaataattaattagcatttaatgtagttaacatattgtggtaaaagcaccattagatttgnnnnnnnnnnnnnnnnnnnnnaatttccttcagtttttaaagggatacaagtttaacaatnnnnnnnnnnnnnnnnnnnnntagctcccctttttcttgcaaggctgttttttaccccaataatttagagtcctggggtgaaaggactagaaaaacaaaaatagaattttcaacaatctctatcttacaaagatatttagctatccaatgaaattgcactttactcaattcaaaattcgattgttttgattgattcctgtcagtttctgtcaaaacagaccatcttccccatttccatgtgaatttttgtgtcattgttgaaattgttgaaaaaatgttgttgttgtttttttaaatgtaagtgcagcatttcaaaacttttaaaaaactgaacagtagtagtagtagtttgccattttcggaattgttctgcaatgtgagtggattcattgtccttgcgggccatgttatatacttaactgctgactgctgaaccaaaacaaactaaaggaacaaataaaaaaggaatataactgcattttctttttccaatatgttacagaaaaacattgccctttgactgtcccgttatatattgcagatctcagctactacaaaagatttagttc

SEQ ID NO: 121915 - DNA, 961 bp, Homo Sapiens
  misc_feature (131)..(139): n is a, c, g, or t
  misc_feature (725)..(738): n is a, c, g, or t
gctttactgcactggctagaacttccatcaatatgttgattaatgttgagaagagacattactgctttgttcctaatctaaggaacaaggccttcgaccttttgcccttaagtataacattagttgtgggnnnnnnnnnggtgtgtgttcacgtgctctttaacaagttgaggaagtcctcctcaattcctatttttctgagagtttttaaatatgtatgggtgttgaattctgtcaaatggtttttctgcatcaactgctataatcacgtggtttctcttctttaccctattaaatggtggagtacactgatttgtttttgaatacagagcaagccttgcatccctggaataaaccccatgtggccatgatgtatatatactttataaacgtacacatacacaatttcgtatattgttgaaattctattttctggtattttgttgaggagttttgcttatatatttataaaggctattggtttgtacttttcctttttttgtattgtctttgtttttagtgtcagagtaaaatcagttttgtgaaattaatagggaagtgttacatctattttctgcaaaagatggtctagaattggtgttcattccttttttaaacgtctggtagaattccgcagtgaaaccatttggacctagaggtttcgtttttggggagttttaaaactatgaattcaatttccgttgtagtttatagggctattcaannnnnnnnnnnnnngtgagacgtagtttcactcttgttgcccaggccagcatgcggaaagaaggggcacccaggacctgcctcatgtgccggagggacttgaagactggcagcttccggggctgccagctcccacagcctgagagagaggaggactctgccgggccctgggtcagctcccgcccttctgtactctctggcaacacaggggctttctcctcctcttcagcctcagagt

SEQ ID NO: 121916 - DNA, 846 bp, Homo Sapiens
taatggatctggagtcaagttcaaagagtttatccactacttgctggattcccaccgtccagtaggaatggacattcactgggaaaaggtcagcaaactctgctatccgtgtttgatcaactatgattttgtagggaaatttgagactttggaagaagatgccaattactttttacagatgatcggtgctccaaaggagctgaaatttcccaactttaaggataggcactcttccgatgaaagaaccaatgctcaagttgtgagacagtatttaaaggatctgactagaactgagagacaattaatctatgacttttattacttggactatttaatgtttaattatacaactccatttttgtagtttgcattcattttctaaaaccctgtatatacttaatgatgataagttcaaatcagctgtaatttttctataattctctgtatgacagaaatttaaccaagtgcagttgtcttgatttaatgtagatttttaccaaatagtatgacaccaattggcacaaagttataggaaaatcacctacaggagatgtaaacaacttgagttgctctaaaatgtttggaaaagagctgcttttgcattatgaattatattgttgaagcaataacctagccagctgttgcattagctaaagcagcctcttgcaatggtaggaaaaaaggatctcaaatagcatgagtgtatgtctatatcctgaaatttattgtctaaaatgcatgaatatatttttagcagtctgtggcatattaatcaaactgttgaattgttttcttacaccctggaaatctttctatcaactataatgataaatccattttgaagtg

SEQ ID NO: 121917 - DNA, 1103 bp, Homo Sapiens
caaatccatgcaaccattcaccataactcaaattagaagggacagacacctttggaaataattttttgagaacttctttagcctccaactcaacagcttccacctgttgctgcctttcattgtttttcttcctctggtgttcaactgcatccttcaaagaatctaactcattccagagaccacttatttctttctctctttctgaaattacttttaataattcttcatgagggggaaaagaagatgcctgttggtagttttgttgtttaagctgctcaatttgggacttaaacaatttgttttcatcttgtacatcctgtaacagctgtgttttgctagaaagatcactctccctctcttttagcatggcttctaacctcttcaattcattttccttttctttcaacacaatctcaagttcttcaaactgtgatgcagaagaggcctctttcaagttatgttgtgctacttcctgaacatgtgcttttaaagattcattttcttcttgaagatcctgtaaccacttccctgtattggctaggtctttctctttctcttccaaaacagccttcatggtattcatctgttcctcttttccttttaataagttctgaagctcctgaactttggaagtgatagataactgttgagccttttcaagctggacatttcctatttcttcttttagagcctttatttcctgtttcaaatcctgaacagttttctccttgttagcaactttgagaagttctgcctccagaagctcttctacagacttgatctttccatctttctcatggatcactttcttaagttcttcaactagagaggcaaaagaaacctgatcattttgcttagcttttaagtcttgaacttcttttgtcagagatgaattttctgttcttattgcattcagctcctcttctttagttgccacctgaataagtccagtttcaagtaattcttccacagtctttaacttctcatctttttcttgaatgcatttttccatttgttccacaacatccttattaggctgttcagaaacaagagtctgtagcttctgaacttctgattttaatgctttgttttggtcatttaga

SEQ ID NO: 121918 - DNA, 1994 bp, Homo Sapiens
  misc_feature (94)..(104): n is a, c, g, or t
  misc_feature (107)..(108): n is a, c, g, or t
  misc_feature (110)..(116): n is a, c, g, or t
  misc_feature (118)..(125): n is a, c, g, or t
  misc_feature (432)..(441): n is a, c, g, or t
ttcaaagaaagctgggttcaggaaacccgctatggcccaggggcctttccattacctttttttccgcccccggcaatagaagcctggagttttnnnnnnnnnnntgnngnnnnnnngnnnnnnnngtgaataataagcatccttttatttgctgacgccattacaaaaaccgattacattagcaacaaaaaagtgttttcttgagttgaagtcagaggcagttacttcccaaaatgttaagtaaaacagtgtacaacatcagtattaaaatgttaaattttacattgtctttaccactttgatcttctgaacaattttattgagcaaaataagataaaagattacatgtttatcttcaggaatgtaaaggtctaattattcaaacagtttttattataaaactaaactctgaaggtgtctacagagttggcnnnnnnnnnnccttctttaaatcagtagtctaacaaggattagaaaagacaaaactctgttcagtgtttctgacaaagtagaaagggtgaaaacataaataaggctttaatttggcaaaatataatacaatgccttttttatcctcaaatgaacagtttcccaattacttcactctaacacctggtagtgctctttctcctttgtgagctgttggtttaccgcctgaagcaactgctgtaactgtgttacagtctgatttagacttacagacattgtctccttctcagaagactccgtttctggggaaacatcactattttcaataacagtagtgtctccagcagcttttactatttttgactggataagctccagtgactgttgagccttatgcaaatcaccagctaccttctgtctttcattttgttcagttctaagttttgtgagtgtttcatttaactgtgccttcaactctctgacttctgtaacataggtagatcgttccatctctgccttttctagttccatttccaaatgttctcgttctcttctcagattttcaatatccttattttcgcttcttaatcgctctagctcttgttctgaagatgtaaatgatgactgcatctgtttaatagtcttgtgtgattcatcgaccttaactttccatttattttcttcttgctcacacttctctgtagcttctgtaaaattccttctgtttctgcaaggacggatttgtatttttcacactctagctgtaacaatgtgtgcatttcatcagcttctttcaacttgtgctctagaaccttaacctcctctgaccctgaagttccagccatacattcttttgcctttttttcaaatccatgcaaccattcaccataactcaaattagaagggacagacacctttggaaataattttttgagaacttctttagcctccaactcaacagcttccacctgttgctgcctttccttggaagtcttgttcactttgtcctgcagcattttttcagttgatgccaatgcttccattgcttcccagtttttctcccgaaggtcattgtttttcttcctctggtgttcaactgcatccttcaaagaatctaactcattccagagaccacttatttctttctctctttctgaaattacttttaataattcttcatgagggggaaaagaagatgcctgttggtagttttgttgtttaagctgctcaatttgggacttaaacaatttgttttcatcttgtacatcctgtaacagctgtgttttgctagaaagatcactctccctctcttttagcatggcttctaacctcttcaattcattttccttttctttcaacacaatctcaagttcttcaaactgtgatgcagaagaggcctctttcaagttatgttgtgctacttcctgaacatgtgcttttaaagattcattttcttcttgaagatcctgtaaccacttccctgtattggctaggtctttctctttctcttccaaaacagccttcatggtattcatctgttcctcttttccttttaataagttccc

SEQ ID NO: 121919 - DNA, 1446 bp, Homo Sapiens
  misc_feature (161)..(161): n is a, c, g, or t
  misc_feature (163)..(164): n is a, c, g, or t
  misc_feature (167)..(167): n is a, c, g, or t
  misc_feature (177)..(177): n is a, c, g, or t
  misc_feature (1321)..(1355): n is a, c, g, or t
  misc_feature (1359)..(1398): n is a, c, g, or t
gggcttatggaaatttaatagggaccccccttttggggggacccggcccgattttcccccctttgttccaagaaaagctggttgcagggaacaagctaattgcccatgtgccgttttcattacttctttttcccgcccccgacataggagccctggagttngnnggnttcgggtgcnttttttacaaactgggagctgtttattggtcgccgtgagaagcctatatacaaagaaggcacaaggagggggagggaattcccctgctacagtaccatggaaggggctggggctggggagtgggcctgccaacaggcaggggtcaggagaggttttctggaactagcctcagcttctcaaatgggccttaggacacagcccatgggggagggggcagagccaggctggctctgaaagccaaggatagctaagaactccacctctaggcccctgacgcatggtcagcgtggggtctggctggatggggtggggcagggccccctgcctattctacattcaagtgtcgctccctccgtggtcttgcagggtctctctggggccttctgaggctggctggtagtggtgagtgagaagtggcatctcctctgtatcctcccaacatctgtctgtccagaattggtcccctcctctctgtggaggatcccgccgtgccccagcacagtgagcccaggctacgttgccgtttgcctgtctttgttccttcctgctgcactccctgcgagttcagtctgtggccaaggagagaggcttcacagagatgcaggaaagcaagccgttctgggtccttctttctagttcctttgctgttgggtctgagcacgccaggtcctccaagtgcccccgtagacaaccttaggcaggatccccacctctctggcatgggtgtcattgggggcccaccagccagcggcccgggggctgctccctgtcagtagttttgacagcaaagtcaatccaagtgactgtggctcaagatggatccagtgtgaaagggggaggtgtcaccacattgcaggggccttttcctcccggctctggtgggaggctctttggcttgttttggcagctggcagaggctgatgacacgggcgagcccatgcaccatccgtgatgcaccaagcacaagtccacgagcaagtgggccccacagtgcatctagggcacaggaatgcagtgcacctcggcgttgtaaggtccacagcgctggccctcctgtgggaagatccccagggccagacagcatgtgcatgccccggcacgtaatggccgaattcccgggcatatgtccggtaccgtcgactgnnnnnnnnnnnnnnnnnnnnnnnnnnnnnnnnnnncggnnnnnnnnnnnnnnnnnnnnnnnnnnnnnnnnnnnnnnnnctcgagcgagctggcgccctatagtgatctatacatttgggtggtgtg

SEQ ID NO: 121920 - DNA, 1504 bp, Homo Sapiens
ggagggctttcaccaagaggatgcaaggaaaagccaagcccgtttctgggggtccttcttttctagtttcctttgctgttggggtctgagccccgccaggtcctcccaagtgccccccgtagacaacccttaggcaggattccccacctcttctggcatgggtgtcattgggggcccaccagccaggcggcccgggggctgctccctgtcagtagttttgacagcaaagtcaatccagtgactgtggctcaagatggatccagtgtgaaagggggaggtgtcaccacattgcaggggccttttcctcccggctctggtgggaggctctttggcttgttttggcgctggcagaggctgagacacggcgagcccatgcaccatccgtgatgcaccagcacagtccacgagcagtgggccccacgtgcatctagggcacaggaatgcagtgcactcggcgttgtaaggtccacagcgctggccctcctgtgggaagatccccagggccagacagcatgtgcatgctcttgacgaggtgtatgtgcctgagcctgctgctaccagccaaaggtggtggcccctgtggactgtcagaggcataacttatgataaataggaagaaaggggacactgggggaggagggggtgggatcagggaggacgtcagtagtattggtcccgagtctgccagctggtcacccagtgcttcttggtgggcagggtgctccctggaggtgggtagcgctcctcctcccggatccgcactgcgtggtacttgggcatgatctgataatagcgggtccgcttaaagaagtcacaccaggtgggccgggggcggggggctgccccctcagtagtcgtcggtcagcctctctgtctctgacggctggctcttcatctccgccttctgcctcttagcttcatacagggcgcgagtgcgggctcgcttgaagaagccgcacttccacagcaggaggatgatcagccccagcagcagcagccctgcacccacggccaccagcaccagccacagctcgatttcggccggcagctcctccaccagctccgagtcaatgtccacagagaaccacgtggtcttgttctccatgttgatggtggggatgctggttcggaggaatagggtagcccagccatttacccggactcggtcaaagtctctgtaatcctcgatgaaggtgctgttccacaactcgtgccttcacagtcacgttggtgacaacgggggcatcagggatggggcactctagccacacacagtgggcacgccctgtggcacaggtcagcacagtctcagacttggcttttttggcagcagccagagtgacaggtggggggccctggcctccccctggatccagctgtcgccgcctgcgctgtggggatgatggcctgtccccagcggacgcgtggtcgacgatatcccgggaattccggaccggtaccagcctgcttttgtgaacccactgttctatattcactaatagca

SEQ ID NO: 121921 - DNA, 2413 bp, Homo Sapiens
  misc_feature (98)..(136): n is a, c, g, or t
tccttgttgctgtgaatctctgtaattttcactttttcgtctcgtgccctgcctactcaacggccatcgctcttaaaaaccagtcccccgaggttatnnnnnnnnnnnnnnnnnnnnnnnnnnnnnnnnnnnnnnntcgatttcacgcactcctccacgcttcgatcaattccacagagaccacttgtcttgttctcatgttgatgctgcgatctcgttcgaggaataggtagcccagccattacccggctcggtcaaagtctctgtaatcctcgatgaaggttctgttccacactcgtgccttcacagtcacgttggtgacaacgggggcatcagggatggggcactctagccacacacagtgggcacgccctgtggcacaggtcagcacagtctcagacttggcttttttggcagcagccagagtgacaggtggggggccctggccctccccctgggatccagctgtcgccgcctgcgctgtggggatgatggcctgtccccagggtcagaaagagtgaggttgagagggttgataaggtctccaggtggtcggcagggccaggacccattgccatggacggtgatctccgtgggatacagcagccacttgccattgctgacttcgtagggccactccagacctaggaccagggtccccaggcccaccagcccctcccccattgggcccacctggaattcatacttgagggggcttcctacatcctccacagttttcatgccagactcacccatcactgtccccccaaagaagctttgtagccggtgatttaccatgctaagcgaggtctggagtgtatagtccaccagcagagtgaggatcatgggccacaggttgtcctggtgactcgacgtggagagctgcagctgcacctgaaggtcccttgtgtgcagggtcaccccgatgacctcaaaggcgatgagcagctccatcctctggttccgtttgaaggggttccccagctcgcaaaagatggtctcattagcttggcaggccccgggggggcgcactgaggacagcagcagggcgggaggcaccaccagggtgagcagcgcctcgtgggcgtcctccccggagcgctccgaggtccgggtgttcgtcacgttgatgctcaggagcaatttccggacgtctctgctgtactggagcctgctcagcttctgctgctgctctgacacgaaggctgcccgcatctgcaagttgctctcacacttgttgtcaggcccgcactccttctggaactggacctcagtgtggttctccagagcctgtgcctggttgaggatcgggtaggcgtccagggaccgcagccccagccgggggcgatcgggcatccgcaaaggtaaagagtagttcatggagatgatgatggggcggagtttgtcacggaggttgtccatcaggagcagctccagcttctggcagcgcatctcgggcatggagaagaagccgtggaagacagcggactctctgccggcaaagcggagccggggcggccggcggtccctgtcagcctccagagtgtaggccagggtgatgtttcgcctgtagttggggttcccggcactctggttgtaagcaaagcacagctccacttgcacacaagaggtggccgtgcaaagtgcagggtccagcacagctggcctgggcaccaaggtcttgtggacgatgttgatgacgggccgggcccgcagcagcacaatgtggtctgacaggcttcccactagaaggtctgggtagaagttctcatccacatccatctgcccactgagggaatagccgaaggtggccaacccaggcagtcccagcttctctccatggattacctgctggggctgtctaaggagccccttagagctactgtgatagatgtacactttgcccaagccttcaaacggagctcccacagcaatatcctgaaatccatcctggttgatgtcaccgatgctggccacagataaaccaaaggcagagccactggggccatgaagaaggagtgaggggtgagcagggaaggaggttcccgcctggttcatgaagacatagatggcaccccctacttcctctttcctctcgaagtagtagggggcgcccaccaggaggtcctgccacccatcattgttcaggtctgccagggcaatggcgctgccaaaataggcgcccacctgcgagccctccagcacctgcctcctccgcaggtctccgcctgcctcctggctcagcaagaacaccgcgcccatatgtcggtgccgtggggcacctgtcacaatggtgatgtttttggggtgcaggatgaagctgcctacctgcatcgtgtacccaatatagaggtttccttggtcccctcgtgccgaattcggcgcgccgtcgacttcataccctctcccccta

SEQ ID NO: 121922 - DNA, 1066 bp, Homo Sapiens
  misc_feature (77)..(77): n is a, c, g, or t
gagggagggggggtggggatcaggggaaggaccgtccagtagttattgggtccccgagttctgcccaggctggtcancccaggtgcttcttgggtgggcaggggtgctcccctggagggtgggtagcggttcttccttcccgggattccggcactgcgtggtacttgggcatgatctgataatagggggtccgcttaaaagaagtcacacccagttgggccccgggggcggggggctgccccctccagtagttcgtcggtcagcctctctgtctctgacggctggctcttcatctccgccttctgcctcttagcttcatacagggcgcgagtgcgggctcgcttgaagaagccgcacttccacagcaggaggatgatcagccccagcagcagcagccctgcacccacggccaccagcaccagccacagctcgatttcggccggcagctcctccaccagctccgagtcaatgtccacagagaaccacgtggtcttgttctccatgttgatggtggggatgctggttcggaggaatagggtagcccagccatttacccggactcggtcaaagtctctgtaatcctcgatgaaggtgctgttccacactcgtgccttcacagtcacgttggtgacaacgggggcatcagggatggggcactctagccacacacagtgggcacgccctgtggcacaggtcagcacagtctcagacttggcttttttggcagcagccagagtgacaggtggggggccctggcctccccctggatccagctgtcgccgcctgcgctgtggggatgatggcctgtccccagggtcagaaagagtgaggttgagagggttgataaggtctccaggtggtcggcagggccaggacccattgccatggacggtgatctccgtgggatacagcagccacttgccattgctgacttcgtagggccactccagacctaggaccagggtccccaggcccaccagcccctcccccattgggcccacctggaattcatacttgagggggcttcctaccctcgtcttggatcgccacccaggcctcgcttcct

SEQ ID NO: 121923 - DNA, 1523 bp, Homo Sapiens
cactacaaactctctccttttattaacgttgagtatgaacacgaaacgtgatcacctgtttaaaagaaaaacaccgctttgttctttgacaatttcaaaataaggaactttgggtttttattccttttaagagtttctgtagttgactgtttttttcttgctatacaattctccttggatctgtattacctcagctccttagatacggcaagggtagagagtcctcacttaaaaaaatttcctaattgtacacattaaaagctaatatttaagaaaaaccctcttaatcctccaacccctattcctactgtgaataatctggtttaatacaagttaagtctataaataaatctgttctttctcctcaaaaaaacagttaagaaactttacaagaattacaggtttaaaaaatttaccgagagaaatcaaagtactgtcacttaacccctattaacatacggtgttcaagccttccagtatcagcgccttttgcatagcatcgctgctagtcgtttcactagcatgctggctaggagtcttcttagtcactcttttcttctccttgatagtgtctgtactctggcttcagctcccatgtgtttttgtggatcccttttacattctgaacaccaatttcttttaagatttccttcaggtacaccacaggttgctttgtgatgtccaccaagtccttaagattatagtattgatgtttctcaaaggctgaaaatagcatgtctaaaacatgttgtttatcagctcgagctcgctttccgtcttctttctttttcctttcatattcgatattgtattgatgattagcaacaggtttgtaattggttgttacaactttgtccagctgttgtgatagcctcactggtttggaagactcttctatttgcaatctttttaatcgcatgtagttttcactggcagctggtcggcattcagctctttgtaccactattccttccaatgacagcttatctgatgagctctcagtaaatactgttaatgtctgtcctccaacactttgcaagacaaatggatgttctctaggagcactgactgaagctggttttccaccaatatcatgaatatttgcaagatcctcattcaaagtaaatgacacctcagtccttccttgagtcttggcaatccgcagtttcccaacttcacctcttccagaggctttagcccattgctgtgacaaatatttaggaaccttgactagccacactcctgtgttctgtttggcgccggtcaagtcgagttccccgcgctcggccatgggtctgcagccggtggaggcgtgcgggatgcagcagcgaccccaggagccgcagggctgaggagcgggcgtccggaacaaaggacaagccgcgctgagaggcgaagagccggcgttccttacctgccagaacactgggaaccgaggaaaagaggaacacgccgccaggagccgggactgcccccggccgtaatggccgaattcccgggcatatgtccggtaccgtcgactg

SEQ ID NO: 121924 - DNA, 1698 bp, Homo Sapiens
  misc_feature (111)..(119): n is a, c, g, or t
  misc_feature (651)..(659): n is a, c, g, or t
  misc_feature (907)..(949): n is a, c, g, or t
ggtcagaaacattaaaacaatggaattttattttgatgaaaaactcaagtttacaatcatttagtaaatgaagagcaaacacttcattttcctatcccataactcttaagnnnnnnnnngcattagtaaataaatatctgtgaacagattaagggtaaggcagactggataataaaccacctctgacattcacactccctgcatgtgactcactctaaagggtgaaatggctctggagataactgaactggtaagatatgggcattaaatctcatcctgatcattcagataagcccaagataaatactttttgctcatcaagggcagcaaactatacaaattgtactggaggaatactttgacagaagcacttaaattatattgtgcatcacaactataaaatggcttgaacatttccatttaaccaccatttataaagtgcaactatatattactctgcattttatctgaggtgtgatgaatatcagtccaaactgaaagtaccccagctgccaatttccaccacttctgaaaagacctagctgtgtgaaaaaggaccatcccccatacaaagaaccaatttcacaaacctactggtaaacaaatacatttacaactggaacttcaaaatgctagagttgtactcatttnnnnnnnnnccattcaggtacctttggtctttcaaaaagcctacactgcaatatcctaaacattgttatgtgcatctcacaatgaagaagagtggccttgcagtgcagaatgaggagagtacaacgtcactgtgaagagtagcatggtatggtttcaaggaagatcagcatcacagcattggattctgtgcatcaggatcgaggtcactgttgccagaagggggatggatagggagaatatccagctcatccacttnnnnnnnnnnnnnnnnnnnnnnnnnnnnnnnnnnnnnnnnnnntgcagctgctgcaagattggtgatagatttactctttacacactgaaagtctacatgccgactctttccttcttccttctcccaggacattcgaataaagggtctttggacatagttgtagatcacttctgggcggcctccaggccttttctttactttttctttgtaggtaggataaccttctattcccaatctaatcttcttaagacccctctccttcaaaactgacttggccacatctctgttttcaatatacttgaaaaatctatataattttgtgctataaataatttgtgaatattcttctcccatctgtggtggatattcttcatcccaatcaaccacatcatcatctgtaagcaccactatatgacattcccgttccccactctgggcactagctaccatgagagggaggatcatttcttccagataaaattcaaattgtctacgagcaccatcatttgataactcatgcattagggcactgagatctctacatttaatagtgctatattcaaaagagatacaaagatagtcacatgcttctctcagttcaggaatagatatgccatcaggacaacggattattcctgttttatagtaatccagaatcgctcgaaacacagtggaaccaattccctctgccacctcatactctcctttctcattgggtcgtgtaaagttatgttctcggccagatccaaacatcctgcccaacattgtatttggctgtgcagtaaaaatgg

SEQ ID NO: 121925 - DNA, 2143 bp, Homo Sapiens
  misc_feature (177)..(188): n is a, c, g, or t
  misc_feature (309)..(332): n is a, c, g, or t
  misc_feature (483)..(485): n is a, c, g, or t
  misc_feature (487)..(566): n is a, c, g, or t
  misc_feature (685)..(701): n is a, c, g, or t
  misc_feature (1705)..(1714): n is a, c, g, or t
  misc_feature (1904)..(1904): n is a, c, g, or t
  misc_feature (1906)..(1911): n is a, c, g, or t
  misc_feature (1918)..(1918): n is a, c, g, or t
  misc_feature (1920)..(1920): n is a, c, g, or t
  misc_feature (1922)..(1924): n is a, c, g, or t
  misc_feature (1935)..(1936): n is a, c, g, or t
  misc_feature (1946)..(1946): n is a, c, g, or t
  misc_feature (1950)..(1951): n is a, c, g, or t
  misc_feature (1956)..(1956): n is a, c, g, or t
  misc_feature (2121)..(2121): n is a, c, g, or t
cccacttggggcgaaaaaattattttcggccaaggggggaaccaagggttttaaaatcccccctggcggaatttaaagggttcctttcaaaccccggttggggaaggggtttcccaagtgcggggcggaaattttttaatggaatttccacccctttttttcaaaaaaattggcaannnnnnnnnnnntaattttaaatttgagggttcgcctttgggcttcccctgtggatagaatcccagtaaaaggccctccaggaattccccttttgggatttggtttaagaaaacccttcggttttcccccccnnnnnnnnnnnnnnnnnnnnnnnnaaattccaaggcccttgttcatggccccgggattttccttggggaacacggtattggcccatgttcacctttcccttctgggggccccggccccccaacgaatgggtttagagaaacttttctgaagggccgagggcggcccgacaagggnnntnnnnnnnnnnnnnnnnnnnnnnnnnnnnnnnnnnnnnnnnnnnnnnnnnnnnnnnnnnnnnnnnnnnnnnnnnnnnnnnntaagagtttaaggaaagaatatatttgaaccacataaacaaacaaaaaggtattacataagaaaaaataatgtaacaatttatgtaagtacctaacatatgagcatgctcttacatctnnnnnnnnnnnnnnnnnggtaacattggtactatatatatatatttgacaagtgtgcattaaagaattctctaatataaaacatttaaaatgtggagaatactttttcaagatacagaaaacaattgttatgataggcacacccacaattcttataacaacatgcttgcgaggataaaatccacctgagcactcatttctcagatgtaccaacgctagaaaagtgttaagcactgaatattgccacccacttttgcaatgtttgagtttcaacactgattggtatgaattctgaattacacaattaattactgttatttttcagtctttctgccatgttccatatagaaggcatgtatttaatatgaatacttaacacagcaacattatttgtagcaaagtcacttccctgtgttcatttttcctttaaaggcactatatttagaaaagttattacaacaaatagtgctttggaagatctgaaactccaaatcaatgtgctccatcaaccataagtagatctaagaagccctgactgaaaatacacaaatgtaaaaagttgataaatttaaagattataaaattggtttattgttaaagcaattcaagaatacccagttaaaatcttatcccaatgctacccaatacaaccaagaagcagttaagcacttttacattaggaacaaggacattaaacaagagaccacatcaaggctatgattcaaactcaaaaagggaaaggactcttaggtctccttcaggtcagtacacgagggcatcgtaagatccaagcactgtgccaggtatccacagtactgctacaaccactgaggtataactgggccaattaaagttgaggggtaaaggaagatctccatattcatattgttttgtgggtgtacttaggtgactgaaactctagaacagctgcctttaatggcagcacggtgtaagaccagtctttattaaagagaaagaagtttataaagttctctatcaaggtccccctaaatcttcacaannnnnnnnnnaactttcccaccctccccctaagctaaagctaatctgctgatatataagatataatcttaatctgtggctactggcaaattataggcactccttccaagtagctttgatcttctgcacattaaaaaaaatcccaacaacatgctatgtaattcgtatacccccaattttgcattctgggtagaatttccntnnnnnntctaaancncnnncggcgggggcnnttcccccccngacnngactnaattcaagatttaatctttctgctgttttcttaataaaagccttagagtcaattattatgagtgatcaacctatgaactattatatacaacacagtgattgcatttttttgagcactgaaagtacttaaaataaaacttcttacttccaacttttgccctcctcnaaattgaagggccaaaatactt

SEQ ID NO: 121926 - DNA, 985 bp, Homo Sapiens
  misc_feature (184)..(185): n is a, c, g, or t
gccgggcttaaatagggtccctaattgttcttcccttttcagtgggcatttttttatttctcccatttggggaccccccatggaaacctattacttcggaactggatttctgataatccagtatttacattagaaatgttttcaaatttttataccactgaaaggcttcattatttattgttgnngattccctgtcataaaaatatcagggaatagatgtttggctttctctttttccacgtttttgattattataatctacagatccttgaggaagtggattttcttttgcctctgcaaaggagggaccttttcctgatctgctttgcatagagttatctctttttttaaaagcaccatcactatgctgagaacctaaaggatatgaagtatctttagttctgtcatatctagaatacggtctatcacatttgattctgtcttcagcccatacttcagatactgaagaagtacttggtctttcagaacctctatttctaggtaatccactgccttctaaaactgactttgaattttgggagtctctttgaaaacgaggcggtttttcatttcttggctgcctggtatcatttcgaggaggatgtctcagatgattatcttttactccattttgctcagtatttgatgatctgtattgtccctgatgaagctgctgtggctgtgatttaggttcttccacattcaaagttcccattttagattccaagaaatcaaataatgtgcttggtgctgatggccttgcatttcccaggtcctcttcatcttcagatcttattcgccccctgccttttcctctacctctcagaggaggacccataacaggtttctgtttattgcttgtaagaagtacgttcagtgctgcttctaagttgttgccattatccataagagcttgcctcgatgcttccttactgaagcccatttccgttatgtgcttcagagctttctcatcaaccagttctct

SEQ ID NO: 121927 - DNA, 865 bp, Homo Sapiens
  misc_feature (431)..(534): n is a, c, g, or t
  misc_feature (537)..(556): n is a, c, g, or t
  misc_feature (759)..(768): n is a, c, g, or t
ttttgatagtgaaccactattcctttttacctacaatgttttggagcagaaatcactatatatcaaaacagtaacatggggttggagtttacactgattccttagctactctttgaaggctgtggagtaacccaaggcagacgtaagagacatgttccaactgagaactccaaataagggtgagtcagttttgcttttcagaagtacgtgtttcttctgagatgctgaacttcttaggtgaagtattacctatttctaggtttaatctcctttgacttttttttatagaaaatgttgacagaaactctattaagagactttgaaaatgcagcatcattctacagaaaaatagagacctagggtagttaaacaatctgctccaaactttataaaattttagcaggaagaagctagatcacttccagacacannnnnnnnnnnnnnnnnnnnnnnnnnnnnnnnnnnnnnnnnnnnnnnnnnnnnnnnnnnnnnnnnnnnnnnnnnnnnnnnnnnnnnnnnnnnnnnnnnnnnnnnggnnnnnnnnnnnnnnnnnnnntaatagccaactgtggtggctaaaaaataacctagattttttttaacatttgaggagtttgggctctacattagacttccttacttgagtttacaacataactttacagaattaaaatactgaaagttgaatcttcagccatcaatatttatatacagagttatatggagtgttctacagagtgttctgaagtggaatcttgnnnnnnnnnngttctaaactaattatttcatgtgatgattacctgttttgttatctacaataagttttagttaaaaatgagatttttggttgggcgcagtagcacat

SEQ ID NO: 121928 - DNA, 2295 bp, Homo Sapiens
  misc_feature (57)..(57): n is a, c, g, or t
  misc_feature (428)..(428): n is a, c, g, or t
atacaagtttgtatttgcgcccgtgtttttcggccataggggcgcaagttataaatncgggggggtaaacaggggccgtagaggcggggctagcgagtgtgagggtgtcatcagaaaacggtttggggagggattgccatagttgaggaggaaaggtattaaaggaaggggccaccaggggttcgaagggggtttacgggggggaggcaggtgaatttgaaatcgagggtcggtttgggaatacggggggaaaaatgccaggtaaaggcctttagaaggtcccattgggcagtttgttcagaaccggtggggttgggcgccggggggtttttgttaattggggaggaatgccaaggccggtagtgcatgggccaaagattttccttagggaaaaccagggtgatggggcatggtggcgcttggcgtanctgggcccgggcacgcccaacgagatgggtttagagaaagttgttcgagggccggaggggggccgggcaagtggcgtgtggttagggtggtgtttgtggggactggtaaatgtattttattttgtaagtgacaatcaaaatatatttgtgctactgattttttcaaatattaaatgggatcttaacaaaatttgtccactttgatgtattcatgtataactttagaatctgcaaagaccctgactaaagaaacagaagtaattgcacaactgagactgaaggtgttacagtgctgcaaatgatgccagatgtcttacatttagccaagtacaccttcagaggtcccttgattttgagcattaggaacaacagaggaatatacactgaaggcatcattaatagcgtttttcgttgctttatttaaatacgacagtatccaacatagctgctaaacactggacaatatttgaggtcataagtacatccacatgttcctccaaatgacgtttggggtcctgcttgccaacattctttattgccagctgttcaggtgtcatcttatcttcttcttctacagccttattgtaattcttggctaattccaacatctcttttaccactgattcattgtgtttacaatgttcactgtagtcctgaagtgtcaaaccttccatccaactcttcttatgcaaatttagcaacatcttctgttccagttcatttttccgatagttaatagtaatggagtaataatgtctgtttagtccatgaattaatgcctggatagatggcttgtttaagtgacccagattcgaagttgtttgtcttggttcatgtcctaagaccatcatattagcattgatcaatctgaaggcatcaataacaacctttccttttacactctgaatgggatccacaaccactgccacagctctctccgacaaggcttcaaagctctgctgagtgttgatatccacaccagaaagccaacaaccaaagccagggtgactgtgataccaaccaacaaccatctccggccttcctgtctgcttcaacatatccaacattttagcttggaacactggatcaactgcctccacactgacacctgttcctgactgtggcatagcaaacacatcaatcactctgacggtataatcatcaacaaattctccaagcatcaaacccataacttccattggaactccagcacggccatgttttaacatttttaacagtgccagggaagagatatagacttgttctgctgtgtccactgcaggagcatctgtaggtggcccctggcccagtccaggcatacctcctccaagtctaagaagtctgtccatatttctggtcagtaactacaactcttaaggtgttaaccttcaatttgttgagtttgacaaatgtcttcttaaagaaagctcttgctaattctggcaggtacaacttccccaagtatattttattttttctttctctcctgaagacgggcgggagccggatgccgcgatatggacccttgtcttgcctctgtggtgacgcgaagacagaggcaacagcagcagcggcgcacacccgacgcggctctgtctgcaaaccggcgatgaatcagcccgattccattcaaaagagttgcccgggcctccgccgcgaagcacttccgggttcactagtttgcttcggcttccgttccccgacggccaattggagacgacggagagtcaagcggatgtccaggaggagctcttgggacagacggcgcgggcggcccggcgtctcctgtctctggcaggactgtgaggcggcacttagcgccctggtcgctcgcgccccgccgacgcctcctttttctctccctacc

SEQ ID NO: 121929 - DNA, 849 bp, Homo Sapiens
acccggaagtgcttcgcggcggaggcccgggcaactcttttgaatggaatcgggctgattcatcgccggtttgcagactgagccgcgtcgggtgtgcgccgctgctgctgttgcctctgtcttcgcgtcaccacagaggcaagacaagggtccatatcgcggcatccggctcccgcccgtcttcaggagagaaagaaaaaataaaatatacttggggaagttgtacctgccagaattagcaagagctttctttaagaagacatttgtcaaactcaacaaattgaaggttaacaccttaagagttgtagttactgaccagaaatatggacagacttcttagacttggaggaggtatgcctggactgggccaggggccacctacagatgctcctgcagtggacacagcagaacaagtctatatctcttccctggcactgttaaaaatgttaaaacatggccgtgctggagttccaatggaagttatgggtttgatgcttggagaatttgttgatgattataccgtcagagtgattgatgtgtttgctatgccacagtcaggaacaggtgtcagtgtggaggcagttgatccagtgttccaagctaaaatgttggatatgttgaagcagacaggaaggccggagatggttgttggttggtatcacagtcaccctggctttggttgttggctttctggtgtggatatcaacactcagcagagctttgaagccttgtcggagagagctgtgggcagtgggttgtgggatccccattcagagtgtaaaaaggaaagggttgttaattgatgcccttccgattgatccatggctaattatgatgggtcttagggaa

SEQ ID NO: 121930 - DNA, 822 bp, Homo Sapiens
ttttttttattctttcaaaatatattttattagcggcacatggaatgtcaagttaagcaaattctttccagagagaaggtgagcctgacagactaaaacgttgagcacggatgatacagcagaaataacatttccagtgtaatgagagataaagaggaatactgcccaccgaggaaatgactttcttcaccatgctgaccacactgcacagcgcccgatccggctggtgaggatggggaggtgggaagaatctcaaagcactggacagggtgaggactcaggaagtcacggggtcagccctacagcatcagctcctctctgttgttggagaggccctgagccccattactcactatacgaggaccagagtgtctttggcaggtggaggctggctcacgggagaacaccaagtgagggggctcctctgtgaacccaagaaacttcaaggaaccccacagcgtctcccttatgacctcccatctccagattaggaagctatggattcccagagggtcctttggaagtatctagaaatgtccaggtaagtcagagaagggctgaactttcttagaaaaatcactttagtctctcatacatgaagaacattttccttaaaggattctggttcttttccctgatgttcttgtgcaacgttctgagggtcacctgggcttcgcccaccactgcttctactgctgctgtgtcactttcaaacagctccacctccaccggcccctcccttcccaccttccagcccacagtgtctgcaggctgtgggtctcccacatctgtcatgtcaggatcatgctgctgctttctttc

SEQ ID NO: 121931 - DNA, 1118 bp, Homo Sapiens
ttttttaacaggtcacttagtgctgatgtttattgttaaggctccaatcttttgggttctacaaaatatacacctgaaacactccaacttgctccttgatgattactcatgactggaaggagggaagtggcccagatcaaaataagcaccataagcttgaccaggaagttcctaaaggctctattcacttcctcccatagaacacctaagacaatgactgtgtttctcagtgtccttgatgcaaggaaactcacaaaaaaaatggccaattctgaaggtgaatcacaattttgttttcagaaaacagaattttgtatataactatcttttcggactttgctgctagaaaatctaagtggcaaatttattgtttaaattttatcttttcctcacatcaaggtcctaaaagttatctaccttccctgcttctatctgatggtctctatcatcctttaaatacttccttttataataaaggatgtctttatgagcaaactgctctaagtccttttggttgcaagaatggtccaattccaaaacaaagactaacactcctcccatttgccatctctcaaaggttatgagtaatgattgaatctgcacctctgcctgatctctgggtctttctccaaagcagagatgttctaaaggtttcaaggtggttggcttccctgactctggggtgttttactaaatcactgcttgccatggggactgacagaaatacccagggagccacgcatgctagcctccccacccaggtccagcttccatctgagactgaccctgggcctaggcatcagtttagttttcatctacctgttctcacggctagcagataggcaatctgaggctacagaaaacagctgtcagatacctcagatgagctacagtagcttgctttcctacaggtaaataataggtcctaatttaggggaaggaatccagggagctgagaaatgaaaggatccacatatggttgaaatgctagctgcagagcggaagtgactaccgccttgatctcgtgcctcttagcctggtgctctatcgtgctctttccactccagaacagggctcatcactgcccgcgtctgtcaggcctcgggctgaaaaggacc

SEQ ID NO: 121932 - DNA, 673 bp, Homo Sapiens
  misc_feature (67)..(105): n is a, c, g, or t
cttctttgtttgaaactgcagaccccagcaacttcatgataagttcacggtcttcttcatcctggtnnnnnnnnnnnnnnnnnnnnnnnnnnnnnnnnnnnnnnngtcctcgtttcattggctgcacagccgcaacatttttgcttgtgttctgatgagtttcaatgtgtacagtactttctttttctttatcctttccctctaacgcttctaaatctcctgagtcacttggaagttttttctttttcatttcccttctttccttggctgacaaatgtctccggctctgtgatttactgtcactagaattagaagattcctcttttgaagccaatttctggatggacctttggggttgaaggtgagacaagtcaatggtagtatcaggataatttaatgtctcttccccttcatccttcatttcaccaacagaatcctgatcttttctaacctcttcatattctccttcgtcttcagagctttcttcctgaatgagctcctcatttagttcatctctgccactctgaagagtgatatcctcttggtcaacctgagtcatgagttctacttccacaggagtttcatgttcttctttatcctcatcactgctcgtgtcacctccatctttggtcctcgtttcattggctgcacagccgcaacatttttgcttgtg

SEQ ID NO: 121933 - DNA, 1042 bp, Homo Sapiens
  misc_feature (446)..(446): n is a, c, g, or t
cgcccgcaatcatttttggcttggggttcggatgaggtttccaatgggtacaaggacctttcctttttccttaatgcctttccctttaacggtttctaaaatctcctgagtccacttgggaagtttttcctttttcatttcccctcttttcttgggctgacaaaatgtctcccggctctgtgatttacctgtcactagaaattagaagattcctcttttgaagccaatttctggatggaccttttggggtggaaggtgagacaagtcaatggtagtatcaggataatttaatgtctcttccccttcatctttcattttcaccaacagaatcctgatcttttctaacctcttcatattctccttcgtcttcagagctttcttcctgaatgagctcctcatttagttcatctctgccactctgaagagtgatatcctcttggtcaacntgagtcatgagttctacttccacaggagtttcatgttcttctttatcctcatcactgctcgtgtcacctccatctaattgttccatttcttctgatatgagttcacttgtacaacttgccagtgtctccatgtcttcatcctgtactctgacttttcgttcaccctgatgtctccaaacacaagactcatctaccttaaaaaggaagctaaaccccatcattagatatgagggaggaagaaaattcttttttcctcttatcatgaagcttcctgttgtcaaatattctccagttggtgctgttttagatacctgatgatggtacacccaccaagcactagtgataactcgtgcatcccaagcagcactgtagcaaagtgccattgtgccagcttcagtcaaggtccgtggggggatgggttctcctgttggattcttaattacacagctagtagctccatgaagatcagcatgtacataaatgtctcctggtgtcaagtatcttttcacaattatttcattctgttgctgatctcgtccacctataattagcggacgcgtgggtcgacgatatcccgggaattccggaccggtacc

SEQ ID NO: 121934 - DNA, 1234 bp, Homo Sapiens
  misc_feature (1124)..(1170): n is a, c, g, or t
cacaagccaagttttctcttttattgaggtgtttctgaagcatttgctatgatgggcactacactgttagtgttttctacttaaaagctacctacataaaacaaaaacaaaatgacatcagtaactcggacagtttaaacaaaacccttataaccagctgaatgatctgtagaaatccagttgtggaaaccggtaggtatgtgcacgagaggagaggccgttattccaaggggtcacctacagtgtggaagaacaaaaccctgatcccacagtatttctcaatgacccttaagatgccccggggtcctgggagagatggttcgcgtttcagcaggaggctcctgagcgccttcacttaggctggaattgccgaggagccatccacgcttaggcaaagctgcccgccacactttccagcgaaatcatcagtgcctgtaagagcagcatgctggaagaggtgagcgagccgtctgtcctgtgagcagcaggaccagggagacggaggtacagccctggcggggggggcgtgacgccacgagcctcggcgccggccactgggctttccagccggaaggtttggtacatctctgtctacccctaggggaaggaggtgagggagaagttgagagggcagcctgggagggggaggggactctgctcctgcgtgtgttctatcagggactggctgtgaggtcaggagcctctgcattctggcgcacaggctgggtgactcttgctctccagctgctgctgcagctgcacctttgtgctcaatgaatgcagcagccatggccgcacggtcctgcctcagcgcgagcctcctgcagggatggagcagcagcaaggggagcaaacccaatgacccacgcctttaccctggggattcgcacagagatggtgctgcctggacaccttcctctcctcagaacctgaggaaccactgctctcttaaggacgaaatgtgttggtcattccatctgcacagaagcagtttgttccaaagacaaccagccagggacagcctggtggctcccccaggtgtgctctggtgccctcgttggcctcacagggccacctggttaggaggaggagaaatctaacaccttggtggaaaccaagatagnnnnnnnnnnnnnnnnnnnnnnnnnnnnnnnnnnnnnnnnnnnnnnngcaagctgtctgaaatgagcagagaggtgagttagtgttgctttgaccccggaatacagcctgg

SEQ ID NO: 121935 - DNA, 824 bp, Homo Sapiens
  misc_feature (97)..(153): n is a, c, g, or t
  misc_feature (531)..(631): n is a, c, g, or t
gttttctgaggactgtcttgctatagttaagtcagatcctagatgaaatatacttgttcatactgtactaggttcttaggaaacaacagaattcctnnnnnnnnnnnnnnnnnnnnnnnnnnnnnnnnnnnnnnnnnnnnnnnnnnnnnnnnnccatcagaactgtgagtggaaactaaggtgatgatctgggagcaatacactaaaatcttgggtcgagacctatatgaaggctggcagtggagctaaacctggacacactgaagacaagggagctgaaccagggctcctacatgaagcagggataactgatggcagtaaatgtggtctcaaattgcagatggtctggaggaaaatttcccaaatttagagcctcaggattcccaaagatcctccaaatatgagctcacaatcaaagatcagagacgttgaaaaataaaaaacaccttaagtgggcagcataaaaaacagctaatttagaaccccaaaggcttcagatgtcagaatattagagacttatgataataagcnnnnnnnnnnnnnnnnnnnnnnnnnnnnnnnnnnnnnnnnnnnnnnnnnnnnnnnnnnnnnnnnnnnnnnnnnnnnnnnnnnnnnnnnnnnnnnnnnnnnncttatcctcactctatggattaaaaaaactaaggcacaaagtggttaagctccttgcctgagattatagactgtaagttgaacgtgagcacttggaatacagagttcatgctgtaaactaccacactatagggcctccaatatgataatttataaaatatttgaataaaaaatgaatactagttccacatttt

SEQ ID NO: 121936 - DNA, 1446 bp, Homo Sapiens
  misc_feature (801)..(810): n is a, c, g, or t
  misc_feature (948)..(964): n is a, c, g, or t
  misc_feature (1326)..(1326): n is a, c, g, or t
  misc_feature (1360)..(1360): n is a, c, g, or t
  misc_feature (1367)..(1367): n is a, c, g, or t
  misc_feature (1379)..(1379): n is a, c, g, or t
  misc_feature (1382)..(1382): n is a, c, g, or t
  misc_feature (1385)..(1385): n is a, c, g, or t
aattaatggctcatcataatctattcaaaactactgagttttaaccataagaagtcaatttttgaaaacacaaaagtattttaagcctttacatttgctgttcattttccaaagatacccttcccatcagtatggactccactcctggttatcctccaagactcaaatgtcaccacttttgtagaatcttccttagccaccttccagtagtttggtgtgcttatttctatcctaacaatcaatttgggggtatcttttaaaattgcagaaattgtatggaattagaggaaacaaagccacgttcaaattcttataaaaattttaaagtgagtggcttaatttcatctgtaaagtggggacaccatctaccatgtagttattagatgtgaataccagagaaaatacatgtagaaagtgctagtgcctgccacatactatgtgctcaataaaactcagtgttttatatgcctatctccaataaatggcagaaaagactaacctgtctcagagtgcctggctcatagcaagtaccatgttcatgtttcaaaaaacagatgaaagacaacaagaaagtcacattctaaagcttttcaagaaataaagaagtacaaacaaagtttcttcatcattctatttattacatgtatgaatattaacatctcatggtgtccatctaagtcaaaaccaacaaaagaaaaaagttaaccatatctcaagcaaacattcttacagattcccgttacttaaaatagaaatatgttcatctgcattaaatcatttgacaatttgaaaaagtctttnnnnnnnnnntcacctttagtacttaaatatatttgttaattgtttgatggcatcagtgtccaagttcaagaataaaactttgcatcattagatattttcaaaagtgaacatctggatggttctctatacctggagatgtgtttgtgnnnnnnnnnnnnnnnnnctgcaaaatatgtcctattttatctttaaaattttttcaaaatctggcttttctatttgagaaaagccctacggtgctctctcggaacccccttttgaaggatgaaacctcaaacttgcttctttaatcagtgggaggctactagaaaaaaaatcttatgttgaggttgctgttcaattccatttttacccaataaaaagtacagaaactatttgatggtgtgcataaatattacactccatgaatagcaaaaatattttttatttataatttacagttgcacagtgaaaaatcgtacatttttacacatacaatttcatttcgttaaatttgcacacatctacagaactttcacacaacangcacctgaaactctgcaggcagtaggaaatgcanatactanaatgtatttatntancanatgatagctgaaggcctgccctcagcagacaatttatatagatatgtctatatatacataa

SEQ ID NO: 121937 - DNA, 408 bp, Homo Sapiens
  misc_feature (75)..(86): n is a, c, g, or t
ttttatgcttggaatcgaatttcatgaatttattctaacacataaatcaggtaagagagaagtagatggatagannnnnnnnnnnnaaagaaattagcctccctgggtacttacagtagattgagtattgagagatttacaaagatataattctttggaagattacagaagatggaaacaaaatcaaatctttcactttcaggtactggagttcattaattctttcaccaaaagcacatcactgaaggaaaatcagaagtggttttttagttattattaaagtagttcaagacccagggaaccccttgagatgaaaacaaaacagtattcaacttttcttcacaagactaccttgtactggcaagacttagaggacttctggcttgaaaaatattgcttagaaaactt

SEQ ID NO: 121938 - DNA, 993 bp, Homo Sapiens
  misc_feature (874)..(908): n is a, c, g, or t
  misc_feature (912)..(952): n is a, c, g, or t
tttctttaatgattctcttcctttttcacaactgtgcagtcactgtcctattgtgttctattctgaaaaacaaatttttttgaaggtcaagtttttcaatggcacaaaactatttggaatgaacccaaaagatagcggaaagttgggtccctcctcaagtagtttcctcctcttttaacagcatctaactactctctatcaataatctcatcacagccgagttcttcggtcagacgattgacaaccatcagtgaaaaaagctcttcgataaaagctaactgatcaaacggggtcttctcataatgcatctgaaacccgccatccagggctggttctcttgttctcagaaacatcttgtcggcttcttcaagagcggctgatactctgtagccggcaccactgagctgctcctcttcgggatagtcgtagtcgtcctcccagtcatcaaattcctcgccctcgtcctcgctctcgaagtctgcgcccgccacctggcctggctgctccccagcgttgggcccgttagcaaggctccgtttcccctctggcgccgccattggctgggcctcctcctcctccattgggccttcctcctcgagctgttgggccccgctgcgggagggacgcagggatagctcccggctcccgctgcctacctccatctgcggaaggtcaccctcgccaggcatcacatccatctgcaggtcactgctctcttcatacagctcggacaactcagccatttccgacattgtgcaaaccgctcaacctctaggaaaaagcttccagcaagacagatgctgcgcggccgtgcgttcgtgcccccggccgtaatggccgaattcccgggcatatgtccggtaccgtcgactgnnnnnnnnnnnnnnnnnnnnnnnnnnnnnnnnnnncggnnnnnnnnnnnnnnnnnnnnnnnnnnnnnnnnnnnnnnnnnatatagtcgagctagcgccctatagcataaacaaaagtctt

SEQ ID NO: 121939 - DNA, 1082 bp, Homo Sapiens
  misc_feature (129)..(129): n is a, c, g, or t
  misc_feature (168)..(169): n is a, c, g, or t
  misc_feature (171)..(176): n is a, c, g, or t
  misc_feature (178)..(189): n is a, c, g, or t
  misc_feature (191)..(195): n is a, c, g, or t
atttgggggaggaattcccaaggcctttaggtccatggcccaggattttccctaggggaaacagcctatggacccatgtttcacttacccctaatgggggcccgcgcggccaaaccgaatgggtctagnaaagcttcttcgaggggccgagggcggccgaccatgttnntnnnnnntnnnnnnnnnnnntnnnnngtacacagaacaagaaattttattatctccaatgctggtgcatgacaaataacaagcttaattagaggaggagacagagggaaacttcagataccaaggtaatttctgggcaggtttaaaacctttaaaagttgatagaataactgttcataaagtctttttagatatagcgctttttacttgacaacttttattaacagttcttacaatatgaagttcaactaaagtccttcatctgtcaagttaaaacagcaagcaaaacaaaatttctctagtatataacagcataagcaatggtttgttttctttgtacattcacacacatttagtgtctagatttgaaactttttaattaaggatgtcttaatttttgacttttaaaaatggttatgacaatggattttcttgatttatagatcacagtggctttataaatgatcaagatacatgtacaaacaaaatttcagatgctcttggaaacacatcttaagatacaaagcacacgtgatacatatttgagtttactcatccatttatcttacactgaaaatgtagcctttgataactgtggcttgactagatcacaaaatagaattttccaagttttcttaagctttcagtccaaataactcaaaagatatgtgtcctagttggatacatttttttctcattatataattagtatcagtgggcttttgtattggcagtttgtcttggtcatgacttattcttgcaaaaccatctttacagcaaacaaatatgaaagatattttccccaatgcaaggaaaataatctggatcaataacaaagtcaaagccataggtgttttaggacgttcttgataattgattcacggtcttaaaatctttttcttttcttaatgatt

SEQ ID NO: 121940 - DNA, 878 bp, Homo Sapiens
  misc_feature (71)..(71): n is a, c, g, or t
  misc_feature (81)..(81): n is a, c, g, or t
taaagaactggcagaatgtgatggataacagatgaagagctcaatttatgtttattggaagaacatttacnttaaatgatntgaggggtgggagggagtgaactactgagtttgccagagtgaaaatccatctgaaaaactcagctacctttagtttttagtcctcatttttggtcttgtctctgcggactgtgaagaatcacaatgctctatatgccctggactgtgtggcaaatgcaggttgcagcgtgtgtgttacatgaggatcttccacaatttcagaatgcacgccagagctgaagggggaaacttggtaacttgcccattattctctgcttttagccagagttaaacagactgatgggtctggtagccaacaacttggcaacttccactccttctcacctcgtgagattaagggctgtgaaaagaaatctagtctaactccaacagaaatctgtctctgttaagtgttttaccttctgtaagtagagatggtagagccaagatttttcttttggtaatttccctgtctataaagtgagaccaaagggatatctgttccctgttacctttttggagaattcataacatttgaagatcaaaaaattgaatgataaatatgaatggcttttcaattctgtggactttgtaccatttggcttcaccttgtactgcaagatgaatttgtaaacaaaacaaaattggactgtctggaaagctaaagttctgaaatatggaatgtactgcctctaatttttctttgtcttcctctcactggcatttttttctctcccaggtttcttaagaataatgttttttaaaggaggctttttgcccatcaagaataaaaagaaataaaaccaaagggttaccgg

SEQ ID NO: 121941 - DNA, 737 bp, Homo Sapiens
  misc_feature (660)..(660): n is a, c, g, or t
  misc_feature (713)..(713): n is a, c, g, or t
ggttttggcttcagaattttattttaaaggttatacaggatcagattatgagactgttgcaaacctgggtaatctgtcaggtgtatgagatgaaagagaaaagccagtcaaatgaaaagacaaagtaaatatgtttttcattttatagaaccattcagtagtaatgtaaccattcagttaaccactggttaactgttatgataactgaatgttaatcagttaaccattcaaaactaaacattcagatttctctatacatgagccacattattaatgtgatctctaaatcttttggtaagttaaaatattcgtgtttattaaaaagtaaaagtgtttgtaattaaaaattatattaattaaaatcttaggcacttaaattaaggtatgtgtcactttagacatattaaaatagtgtataagaacaagtttttaataaatatctcaaaaggctgatatattatgcctagacatgcttccactgtgtttttagtgtgtctgattcttttaacctcgatctctttggatggcatgtggtgggggaataatgggcaccttgttcacaaacacaaaccttctcctgagatacagtctggtgatgtgtgaacatactaaggtctgaaaactcttccaaaaccacaatggtatacacactcttttcancacaaacatttgtcattatcattgatgctatatggcttccttgattccttgtncctttcatggaagaattcaattac

SEQ ID NO: 121942 - DNA, 692 bp, Homo Sapiens
agcacatgaagtcctgcacccagtcagctactgctcctcagcaggaagcggatgctgaggtgaacacagaaacactaaataagtcctcccagggagctcctcgagcacacattcagcaccttctgaatacgccagcgcctccaaagtgaaggatgacgtcagctgagaaaagcaaggagtagtggctcgacccttgacctttctggctccagagagacgccctcctccattctcttaggctccaaccaaggctctgaccattcccggagtaataaatccagttggtgcagcagtgatgagaagaggggatcgacacgttccgatcacaacacctgtaccagcacgaagagcctcctcccgaaagagtctcggctggacaccttctgggactagcagtgaatcgggacacaaaccacccaccccattgggtgaaaaacccagacgccaggaaaagatgaaacaacaaaggcaggagaacagccactttcagacttgaaaatgacaaaaccctcagttgagccgtgccacggcgcgggggctgctacactacaggacacccagcatcggctttgactgcagactgttcacccacacgagccctgtgcttttggtgtaaataatgtacaatttgtggatgtcattgaatctagaggactttcccctttttatatttgtattaactttaacttatt

SEQ ID NO: 121943 - DNA, 717 bp, Homo Sapiens
cttggcagttcagcaccttttctacaaatctttattctctgtgagcatgacaccctaccgttttttcaaccggttgtcgttaaatcctaaaaaataagttgttctacctttctgttctacagacccacagatgcagggcagtcagcggtggcagtgtttgaaccatcaattgggaggggaaggtggtttcctgtgcaggaggggcaggtcagattgcaggatagttgtgctcaggcgcaggtgggcaggcacgctaaacacattggttttccccctcagaccattcccggagtaataaatccagttggagcagcagtgatgagaagaggggatcgacacgttccgatcacaacaccagtaccagcacgaagagcctcctcccgaaagagtctcggctggacaccttctgggactagcagtgaatcgggacacaaaccacccaccccattgggagaaaaacccagacgccaggaaaagaagaaacaacaaaggcaggagaacagccactttcagacttgaaaatgacaaaaccctcagttgagcctgagcccccggcgcgggggctgctacactacaggacacccagcatcggctttgactgcagactgttcacccacacgagccctgtgcttttggtgtaaataatgtacaatttgtggatgtcattgaatctagaggactttcccctttttatatttgtattaactttaacttatt

SEQ ID NO: 121944 - DNA, 1360 bp, Homo Sapiens
tttaataagttaaagttaatacaaatataaaaaggggaaagtcctctagattcaatgacatccacaaattgtacattatttacaccaaaagcacagggctcgtgtgggtgaacagtctgcagtcaaagccgatgctgggtgtcctgtagtgtagcagcccccgcgccgggggctcaggctcaactgagggttttgtcattttcaagtctgaaagtggctgttctcctgcctttgttgtttcttcttttcctggcgtctgggtttttctcccaatggggtgggtggtttgtgtcccgattcactgctagtcccagaaggtgtccagccgagactctttcgggaggaggctcttcgtgctggtactggtgttgtgatcggaacgtgtcgatcccctcttctcatcactgctgctccaactggatttattactccgggaatggtacttctgggcggggtactgttgttgtgatcggaacgtgtcgatggtctgtggtggttgggggcataggccagtttgcttgtcatcactttttgcttaacagagccttggttggagcctaagagaatggaggagggcgtctctctggagccagaaaggtcaagggtcgagccactctccttgcttttctcagctgacgtctccttctctttggaggcgctggccgtttctgaaggtgctgattgtgtgctcgaggagctcccctgggaggacttatttagtgtttctgtgttcacctcagcatccgcttcctgctgaggagcagtagctgactgggtgcaggacttcatgtgctcaggccagtgggcttgctggcaggggtagtcacagtagctggtgttccaacagcagtaaaagatggcctccttcttgcagttggcgcaccactgcttcttcttggtctcatccaccgcctgctgcttctccaactccagctgcttcttcacctcggcgatgagccggtcccgctcctgctccaggctctgccgcatctccgccatggtcagctctaagttgtgtttcatttcggagagctcttgctggtgcagccactggagcttctctatctcgatcctcagcctgcgaatctcagctattgtgcttccagtagtgtttttagaaagatcgttgtatatttctgtcattgttccttttattgcatccatcattttgctagtgtacttggcaatatcagcggcgacatcagctgaggcagtggcgatgggcaggtcagcgttgactgaggacacaagggtgctcatggaccccgagctggtgaccaggggcgatgactgtgtgctggtcaccagggtgatggtggacgtggatgggctctgtgtgatctccttctgctggacagct

SEQ ID NO: 121945 - DNA, 383 bp, Homo Sapiens
  misc_feature (77)..(87): n is a, c, g, or t
tttaaattatttttctcattaagattttaatgtagctgtaaatgaaattctcgttttaaaaaaattaaagtttccannnnnnnnnnnagaataaagatttagtgcacaaatacagcccaaagccaacagaaaaattgctttgccctgtcatttccctaagaaagcactgaagttactcaaaataggctgaaagaaaaaaagcaatcctctgagttctaggtttcacaaaaggaccacgtgttaaactatgtacatcgatttgatgtgcaagtatgcaataaatatgtacacatacattcctatctgctttacatcattctagagtattcatagtatatcaagatgggatttagaaatgtgaaaaggccataacagtgaaaagg

SEQ ID NO: 121946 - DNA, 1291 bp, Homo Sapiens
tttcagtgtaaggactaaataatttatttttaagacaatttgaacttccattttgttaaattgttcttaattattacttattaataacttcttctttgagtttctctgcaagcaatctcctctttagtaatgtttgcttctcctctgctgtcatttctggtttctctgtcatttcctctacctccccagtgggttttcctttctgctccatattttgtatctgtttagtcctcatatcctttctcatggacatcaacttatctctcttctgcttgagatagtgttctcgttgccgaagttcttctgttccaagtactgataagtttgctattggtccttcaatgctcgcatgctctaagccaggaatcttcaggcctttttgtgggagggaggaagtttcagacctttccacttttcttcccaaaggttctattgactgattagcaaaatgcattttaacttctgagggtgggtgtgcaaaatgttcaccatccccttgggaattattcattattgcagcttcactggaatgcactgtgggctcttctgttttagcctctgataactgttttttcctcttcctttcttcttcctggtcatattcctcttttgattttctaagaacttccctcaggattttcatctcttcgtgttcaaggtcactgaccacatcagagccatcggttaagcagtcaggtaatacaccatttctctcttgaattattcgaatggcttgcagctgcatttcaatgtttttctggaccatcattgctttaaagatagtaaaatcttctgctgccaacacaggttgcaaaatggcctgtgatgtatgggtctttgcaagaggagaagtgcatgcttcttgaaattgatcttcattaattccaatttctttgaggtaaccttctaacagcttttcaactagttctttgtattcctgatgaatctctgtataggtcaatttgctttcttcttcatcatcaaaaacttcacatttctgttccacaaagtccaagatggggatggaccagtctgggcctcgcaggaaccccgcgatgctctccactacccactccacctcgtcttcttcttccgcagccatcccgccccaaaggggcaacggggaagatccctaggccagaccgccggaccccggttaggcctttgggccacaaggagccgagagggagtaggggaagagctggcccgcagtcgctcagcccccaggatagaagctaccccccggccgtaatggccgaattcccgggcatatgtccggtaccgtcgactg

SEQ ID NO: 121947 - DNA, 864 bp, Homo Sapiens
ttccgcccgccgcgcgagggtggggctacaactctgcccgccgcgcccgggtcgaccccgcgccgtgacttagccaggcgctcggcgccgcctaatattcagaagggcgcgggagccgatcgcgccgcgggaccgatgggggcgattttgccggcaccgcgcgcgcccgtgtgcttcggtgttaaccgcccgtgcctgcccggtggtagatttcggggcttgagaaagggtcccctcggagttgccatccaggtccataaatgcccgccaattcgcccgtttccaggggttgctctcaagaagaacctcatatgtgatgaattatgtttttgcctctcacaatgtctaaaatattacgctttgtcaatcaaacattcaaatttaagtgagtgtttaaccctgggcatttgttaaaactgtatgttagcagaataccacaaagcaaaaacctgtgatgtatgggtctttgcaagaggagaagtgcatgcttcttgaaattgatcttcattaattccaatttctttgaggtaaccttctaacagcttttcaactagttctttgtattcctgatgaatctctgtataggtcaatttgctttcttcttcatcatcaaaaacttcacatttctgttccacaaagtccaagatggggatggaccagtctgggcctcgcaggaaccccgcgatgctctccactacccactccacctcgtcttcttcttccgcagccatcccgccccaaaggggcaacggggaagatccctaggccagaccgccggaccccggttaggcctttgggccacaaggagccgagagggagtaggggaagagctggcccgcagtcgctcagcccccaggatagacc

SEQ ID NO: 121948 - DNA, 670 bp, Homo Sapiens
tatagggtatagaattgatgcttccctcaagtcctgactgctctttctgaggcagccaggctaggccaagaaatgagctgctccagcttctccagagcacagcagcctcccagggcctgtcagcatctgcagcagctggaaggaggtcccagctcttctgagacataggccatttgtaggattctccagtgctccaattcactaatgtctcctaatggctcagaacaggctaaagcttctcccagataacccctcccccaaaactgagtcctcagggacagttgttaactgaatgacctccaggttatctactttgggaggtgcaggaatgctataaactgaattttttcccagcagcagcagaagccaggcacccttgagtcaattgtccttcattgtccagagctaccaagtggcatttcagagcacaggaatttactcctccacccagatgtccctctcatatggactgagtcacacaccccaggtcctagcagcagacatctccaaaccaacatccttgtgaacactgcagatctctacgccagctctccaatggaagaagaaccacatagagcacacctgccccccagggcacttggactatcacagtaaaaatacatttatatcaagtaaaaaacataatgcaggacaaatatatacatgtacc

SEQ ID NO: 121949 - DNA, 2080 bp, Homo Sapiens
  misc_feature (1050)..(1066): n is a, c, g, or t
  misc_feature (1312)..(1320): n is a, c, g, or t
  misc_feature (1797)..(1817): n is a, c, g, or t
  misc_feature (1924)..(1980): n is a, c, g, or t
caatgggcccaccagcaaaaacagaggaccaaagccagcaccagggacgccaaccaggcttcacgtcaggtgaaacgcaaacacagaacgtaggtggcccaacggggcatcgcctcagaagcccacaatgggtctttaaagctgccgaaagtgaaagagacgtggatgagtaaaaatgtgaataggttgttaacatgtgccccccaaaagtgcccaccaagatgaaagttaccaacggagaaatcatatgggaaagttactactttagcccatctggacttggacttccttggttatcaaaagatgaatgacatagttcggacccttcagaaggacaccaaaaagctacaattttatgtttcaatccatgctgtaccttcagtttgcaatggctcagctagtttactcaagggttttgggaccagacatgactcacgtcctgcagtaaggagaagcaaaaaggagcccggtgaagagtacgttgtgctgtgtcttgggtgtcatctagctcctcacagcaaacagcctgtttttgttcaggcctgaagcctggaaaaggccgccgagcctagccagagcatccacaacgaaccaatctgagatccgagtggaagatgagagccccggagctggctgaggtcccccaggaagcttcccactctgcagtggcaggaaggccatgcctctgcaggacgctcgcactgattctggaaggggcccaggccagagaatacacttgggctcagttcaccagcccaaaccacaggggaaggagccggacaccggcctctcaccattttacacccaaagacaggaggtcagggctctgatgctactcttctgtttgtaaaatatggaaccactttctttgtactgtttgaggtgagcagtggctccaaactgagcaagtggttaaaaaatgccaaatgcaattatactgacttataattatttcacagaaatatactcttactctcagactatttaaataagcaggaacaagatgcaggagaagcagcagcagagaggaaagaggaatagccagggaannnnnnnnnnnnnnnnncttctttaaaatacatacgaagtgtaaagagaaaatggccaaaacctcaaaactaccattgttgaaaacaatattaaaaggacacaatctaaaatcatgctacaaaaatagtgttatcttgtttaactaaatgtacatctttttttccaattccatgattgacaagagtgcttatgcgacgcatggaaggcaccagaggtgaagtgattatttgccttaaaatatacaaagaattgcctactttgnnnnnnnnntagtcatacttgtaaataaatagtttagtgtttctgccatgggttcctgaacccctacaaatttcaacatatacaaatagtttcaattcctaccattctcttagagggaaccacgtcaaacaaaatcaagttaggaaaagcactgattttatccaagtaggtcaatttgaggcaagattcaaaaactcattttaaaatgggttacagagtgaaagagttgggaacaggcagccccctttgggcctgggtcagcctacgagtccatcccaggtgtcctgccctcacatctgccagccctcaggccggccaggtctcccttcaaaccctgagtatttgccttcctcacttctgcgaagaggggaacagaatcttgaagcttgcaaaatcgattctggaaaaagcaggcaagcaaagcagggcctgtggggggaagcagggtgagtcaggcctcaatctggtgcaagggcaccagcaggnnnnnnnnnnnnnnnnnnnnnaacatccctacgcgtctcctcaccatccctacgcgtgatcctcgtgccgaattcttggtctcgagggccaaattccttatatgagtcgtattaattcgtatcatgtnnnnnnnnnnnnnnnnnnnnnnnnnnnnnnnnnnnnnnnnnnnnnnnnnnnnnnnnntcataaatgtaagctgtggggcctaagagtgagctactcacattactgcgttggctcatgccgctttccatcgagacctgtcgtgcagctgcatatgatc

SEQ ID NO: 121950 - DNA, 631 bp, Homo Sapiens
  misc_feature (40)..(40): n is a, c, g, or t
  misc_feature (56)..(217): n is a, c, g, or t
agaattcggcacgaggtcagattttgtagtactttctttntgttgttgttgttaannnnnnnnnnnnnnnnnnnnnnnnnnnnnnnnnnnnnnnnnnnnnnnnnnnnnnnnnnnnnnnnnnnnnnnnnnnnnnnnnnnnnnnnnnnnnnnnnnnnnnnnnnnnnnnnnnnnnnnnnnnnnnnnnnnnnnnnnnnnnnnnnnnnnnnnnnnnnnnnnnagcttttattaatctgtgaatttctttaccaacacaactttacattcttcctttccatgtgtggatcatttgtcttcttattatctgtactggattttgctgattatatttccgtgacattttaccacatccctgtgagccccgtattgcctgtaaattagtagttgaaactaaagactagatcagattcaagtttttgaagttttggtgagaatatttcctacgtggtggtgtttacttccttcaggggcccacagtgtctgattgttcctgattgagtgatgttggtgaccatagttcatcattgcctagatgtcttgttccattagaggccataaaacgataatgttctctgtttctccttcttcttttattacctgcaatatttcagtaaagagaaacttcccctcgttt

SEQ ID NO: 121951 - DNA, 723 bp, Homo Sapiens
  misc_feature (79)..(94): n is a, c, g, or t
  misc_feature (366)..(366): n is a, c, g, or t
  misc_feature (452)..(452): n is a, c, g, or t
  misc_feature (482)..(541): n is a, c, g, or t
ggttttaacgacggccagtgccatgctcgaaattatcctcactaaagggaatacgcttgcggccgcggctgtatgctcnnnnnnnnnnnnnnnnctgtaattacaggcatactcagacttaaaggtttatcttccttgtgtatattctgcacattgcctttgtttctgagagacatcttccttcctgctggtttcaatctttctttcttctcttttttcctagttgctttgacttgcccttgaccagatgcagaatcagagtcagaagagtcgagtttgacttgacgatgccttcttgatttggatgcctgtatgacaactgaaaaggcctttgattttattttcgctaatgattctgcatctggncaatggcaagtcatagtacctaggataagagtgaataatgtctgaatgttatcattatgataagaattatcattctcatattcatnggcattgtttataatgctcatactagaaannnnnnnnnnnnnnnnnnnnnnnnnnnnnnnnnnnnnnnnnnnnnnnnnnnnnnnnnnnncagctatcgccgttacattattcccttacatcatcttatagttttctttttttatttaatgtctatcataacacttctctgattggttatatacctttcactcttttatactactttctctcttctttttccattttcattctcctttactctactattcattttttagttcccttccttat

SEQ ID NO: 121952 - DNA, 983 bp, Homo Sapiens
  misc_feature (104)..(185): n is a, c, g, or t
  misc_feature (316)..(316): n is a, c, g, or t
  misc_feature (955)..(955): n is a, c, g, or t
tcctttttttacttacattaaatacatcggtaaatcagcagtcgcattctgttaccacgattgttatgttgggagaggaagaaaggcaaatgctttctcagaannnnnnnnnnnnnnnnnnnnnnnnnnnnnnnnnnnnnnnnnnnnnnnnnnnnnnnnnnnnnnnnnnnnnnnnnnnnnnnnnngaaaactaagatccccaagcccaacagagctcaaaggaaggcagaagaggtggtaggaagtagagggaaggcagccgataggcccagaagctaaggccaaatcctgttcctatgggggtggggggagggangaagcctggggaagtggtttcccaggcccaagataatgaaacatcttcactcctgctccaagggggaaagctgcacagagaaagaacttcatttctagaagactttggaaagccatcctagttcttccacttgtaaaaaggatgcactgggtgctatggggggccagtggcttctgggaaaggaagggggaaatgtgtgtgtttcagggccatgggaactaaggctgcccctggaaaaggaagggaattgaggcctaagtggaagaacctaagctgggtccttcagaatctcagcttcatagatttctcagctgttctgggatagaaggcagtctgcaagccaaaagggcaggaaggttccaatcctaggtcactgtgacctttcctttctttctttcccaaaactccgggctggaacaaggaacttaaagttctcttttgccttgatggcttctcagagacatcttaaaacacctgatgaaggatattgagagagactagagatttagaaggggccaaggtcctctggataatatgagccagtttgtagggtaccttcagtggcggtcattccctctccacaggaacaggtggtatgatacgagggcaccacaggaggcctctgtggtactagccccntattggtacatggattaaaccacatccc

SEQ ID NO: 121953 - DNA, 543 bp, Homo Sapiens
tttactgttttattgtgttatttttatactgtgagattggggagttctggggtttccccccttaatatgtaaaagcagtattaaacatttcagaattttagttgctggattatatatattgactttttacactttcaggatagatttgaacagggaccattaataactttttcctaaagaaattcagttcagtggcatttgaatgagtgcttactaggcacttgacttttgccttagctttggagatacaaagataattaaaactttaaaatcgctatcacagtccacaagggaaatagatacttctgaaatgtgatgggtgttctggttataaagttcttcaaggctcaaggagaaagtgattctacctgggagttggtgtcaggatggtgactgtgtgaaggaaggcttcaggaaagaagtggtattttaagagtcagccatgaatgagagcatggaatgggggaagggtattccaaccaggaagagagggggcagaagacaagcacagaaagaagaaaaagttggaggaaaggcggttga

SEQ ID NO: 121954 - DNA, 1380 bp, Homo Sapiens
  misc_feature (857)..(869): n is a, c, g, or t
  misc_feature (882)..(967): n is a, c, g, or t
  misc_feature (974)..(974): n is a, c, g, or t
  misc_feature (1104)..(1112): n is a, c, g, or t
tggaatttggttgttctgttttacgtttctcctttcccccaaccaacctcagaagaggcaccttcagaaacacacatttcttaaaaggaaagtgcagcttcaagatattgtgtaaatacggagccaagacatttctggagctgtgctctgtctcctaaacctcaatgcctttagggcttttctcagtggtccagctagccttctctttggaggaggatgaagccgcattgcacattctctgcttcctgtcgtagcctctgttgtcaatggaaatgcggaagcccatctggtgcccgtcagtgagaagcaacgttctgcgctctctccgttagacctccatgctgtccccagtcttgtccattccatgctgctgtgttacaaactctcagaggtagtttgcaggggaggaaggggaatatgattttaaaaacaaaatatttacaacaacaaaaattcttaggatcacctgacctttgtaatgttatttatgttggggagggaggggggctgagaaggggaaatcagcagtgtgcaacatctttataatttgtactttaattacaaatcacaaggaaaccaataagttgaaatcctatataacaggtttatatatatagaatatgtatatttgaagccctctacagactgagtctatgttttactaattctttgttcactgtgttacccatcttggaataagttgtgaatgtcagctccctctctctgaggcctccagacttagctcctcaggagggtaatgagccaaggttgagtgtttccatacaatgcttttacctttgatcccaggagaatcagaaactccaacattttggaatcttcaagggcacatactgagnnnnnnnnnnnnnttgtttatgagcnnnnnnnnnnnnnnnnnnnnnnnnnnnnnnnnnnnnnnnnnnnnnnnnnnnnnnnnnnnnnnnnnnnnnnnnnnnnnnnnnnnnnngaccttngggacgcttcggcccccaaaaaatttttcaaaacaacccatttggcacggggccccggcaggaacgggacccgggaaaaacctgtttctaaggaaagctgggtttcgcccagggctaaaaatccccgccnnnnnnnnncccccggggccaacccaagagggggaccaaagcccattggggttccaagcgcatgaaggccatccgaccccgaaatcaaatgaagcccgatcttaaattaccccccgccctggtattaattcaataagggttggtgctaaattgaaaatttctcgccaacggggaagcccaaacccaaaatggcctggggggacacttgaaatcccttgggcgggcattggccaaactatgaatggcccccggggtataaaaaattggggccgaaggg

SEQ ID NO: 121955 - DNA, 703 bp, Homo Sapiens
  misc_feature (232)..(286): n is a, c, g, or t
  misc_feature (617)..(617): n is a, c, g, or t
gtcggtaagaatcaccaatttattgaatgaaaaacccaacatcaactcagtccctcccacccccatctcctctctctggcccaggagacgctcaggacagcagggctgagccctgggaagggctggaggagagcttgggggaggtatggagaatgagaaaaacactttcaaaatgaagttctgtgcaaaaacttctgggaaggagtgagaggacaagagaaaagctccaaannnnnnnnnnnnnnnnnnnnnnnnnnnnnnnnnnnnnnnnnnnnnnnnnnnnnnncctgtgtcctcaaccactcctgagaacacggacggtcaggaatgaggggctcagaccccgggttggtgagagggaggtgacagggagggaaggagcctgctggagggaaacctggctgggaggatgggtctgggcccaggctggggcctaaggagggggaagaacagagcagggaaaggcagaaaaactggacacggtgggaggagggagatgaatgggagatgaaacagaatgtctgaggggccacagacagcatgtatggtggtgggggtctgcctcccatctctccaagtccaggcaaagctgtgctgggtgaggggctgggaggcanaggcaggagcatcattaacaagggtggaagccacgaagacagcgaccagtgcacagggtgtgtcacatggtacaaccaagagactt

SEQ ID NO: 121956 - DNA, 1630 bp, Homo Sapiens
aaaaaacggggtttttggtgttggaaaaggacatcttttctgttttccggacctctgcttgcctcatgccaggtgagacaccttcatgcctgtttccatgattgagaacatgggagtacgcttctttccacctacgttcctggtggattttcactggagttgggctgcactgtggaaaaggggttgggcagctcctgtggcacagtgagggggcatagaagcccaaggcagtcggtaagaaatcaccaatttattgaatgaaaaacccaacatcaactcagtccctcccacccccatctcctctctctggcccaggagacgctcaggacagcagggctgagccctgggaagggctggaggagagcttgggggaggtatggagaatgagaaaaacactttcaaaatgaagttctgtgcaaaaacttctgggaaggagtgagaggacaagagaaaagctccaaaggggctgtggggcgcagatggccgggctggggggtgcagagggctgggctggggccctgtgtcctcaaccactcctgagaacacggacggtcaggaatgaggggctcagaccccgggttggtgagagggaggtgacagggagggaaggagcctgctggagggaaacctggctgggaggatgggtctgggcccaggctggggcctaaggagggggaagaacagagcagggaaaggcagaaaaactgacacggtgggaggagggagatgaatgggagatgaaacagaatgtctgaggggccacagacagcatgtatggtggtgggggtctgcctcccatctctccaagtccaggcagagctgtgctgggtgaggggctgggaggcagaggcaggagcatcattaacaagggtggaagccacgaagacagcgaccagtgcacagggtgtgtcacatggtacaaccaagagacttggcgtgcaaagaaccaaagaaacactcaggacacacacgacatctgcagggaacctgggggtggtgaggaagtcgtgcacgggtggtggggggagactgggaggcccctctgtcctagaaacgctgtgtcaccatagcaacagggtcctggaggcaggggagctgcctcctgcccctgtgagctgtgaagtaggggtcctgtgggctcagggtgccccccttaccctcccttgggaagctctggggcaggtggagaaccccataagagttgaaagtggccttgggtcctgctggaggcagcagagtgagtggatctggcagctgcatcctagaggacaccctggtggctggaggggctgggggaggactaggctctcctgctggggaccaggattccagctttctcatttccgagaaggaaactgataccacaaggaagaagttttggaagtcggggtgaaggaaaggcctggggggacccaagatgtccgttccccaaagtataaagcccgttcgaagcctgcggcacttcttgcctgtagaacccttccaccccagccgaaatacaaccataatctcccgggaaaaccccggggggggcgccaaagcccgagccggttttggcccattaaaaaaccccccgccttggaaaacgaagaagttaccctggccttttctggtaaaaaaaccgaattcc

SEQ ID NO: 121957 - DNA, 690 bp, Homo Sapiens
  misc_feature (64)..(75): n is a, c, g, or t
tttgagggccaccacttttcccgtgggaatttgaacgacagaatctggattttctgctttgggnnnnnnnnnnnngaagctattgtccacagattgatgcttccataatggaatcagctttaattgcaaggaatgaagaaaaacaagagtggaccttcaaagctacaacattttcctcctcccctccctccccaccagccccttccccaccaagaactgctatgatgtcccaaagtgaggtgttgttgattccagtctcaatgggattttctgactttaatgtttgcaaggcatttcaccagaatacagctataaacggccgctcccaacaactgggctctgactcacccacacccacttagtgtccactaagtagtccagggtgactcagtttaagcacatctcaggtgaggtcactctgcatataccttggcttacctgaaatagcctgaacttgaatctcacataagggaaaactagtcatcaatcaccaactcattgactaccctcaggaagtcctgcagaaatcaagagtccttgaggagaacacgtggatcataccaaaaccagggtttaaatccattctgcttaagagttctatcagtcagtttaaccataaattacgctacagaaacaaacaacccaaaaacctcagtggcttacagatttatttttcactcaccctcgttc

SEQ ID NO: 121958 - DNA, 1242 bp, Homo Sapiens
  misc_feature (635)..(647): n is a, c, g, or t
tgaacagtgcctaaatctttattttcataacctacattttttttcaaattagacagttttacactgaatgacacaaaaggaaacttaaattaccaatagtttacatgtaagcttgattccagtcttaatgaagcagaacaaaaacgaaaccctcgaggagcgaccacatgacccccgcgctgtgagctgctggcggccagcgccctcgcctcgattgtctgcagccctgtagtgggccgcgaggcacgcaagccgcaactacagctcgccagcggggcacacagacaggcatgcaccaccactacccgtcgcccggatacactgaactggttttgaagcctgaactgcagagatcctaatatagcaacgcaggacgtttacggccacccgccagtgacagccggtgatgtgatgacaggagggcctgggtgaaaatgtcaagacactcactctcagagaacgacgactccacttgaaattcatgtctggtgaaacgggaccaggtttttattcttctatttcaaaatgataagcatcatcacacgattttacaagttaaaatgccatttgtcactgctgcatctctgattctataacctgagatactgctgggggtaaaggagggtgttaacttnnnnnnnnnnnnngtatgaaagccactctcatcgctgtatgtgacacagcacagttggcatggaccgccacagcttcctattatgataactctcattttcttctgagcagaaactcttgaagtagtatcaggttttttcagacattatatagcaatctgtatttcacctttaattaaaaaggatgctataaaaatcacctccgagcaaggtttcagttcttgatgcagaagactgctgctggctaggcagtaactacagtgtattgaccggagggcagcagagccctccagtggcgactggctaatgcacgcgctgccctcctcatgcagctgttgagctcccacttcggtcgacaaagtgaaggactaagctggctctaaccacacacacacactgcgctgcaatgctcacaccttgggggaaaggacttctcattattaaaaaccaaggactcactggcggacgggcaggccttgtgttttgggaatggctgatggcgccctggcccttccgtagcgaagatgcagctcgtaggcccaggcctcgaggttgcctcccagctttctgagtattgagagtttgggtttcacagatcaattatttctga

SEQ ID NO: 121959 - DNA, 747 bp, Homo Sapiens
  misc_feature (501)..(617): n is a, c, g, or t
  misc_feature (623)..(658): n is a, c, g, or t
  misc_feature (693)..(693): n is a, c, g, or t
ccttgaggacagagaccatgttttaatgacttcgatatctccagcagcgatcaccggccagggcacattgtagactgtccagaaacactgatggaatgcatttgaatgcattttcctctggttctatgttctgtccttctgttgttccccagcaggagagttctcatctgacatccagaagaggacggccccaccagcaggatggtggtgggactgggagatgctggcctgtttctggaagtatgttagttgccaacgaaactaaataaccatgggaacagacgttaagctaattggttactacaaagcaggggtgaagggacgtggctgatgtcagggctgtgcagttagggtgaaaactccatgggatggctgggagaccggaggctggcaggaatgggcggtggtgggagggagcaaccccttcttacagggcaagtcatttggaagttagaacctgtaaaatccccactttagtttccgctagtggaaattccttcnnnnnnnnnnnnnnnnnnnnnnnnnnnnnnnnnnnnnnnnnnnnnnnnnnnnnnnnnnnnnnnnnnnnnnnnnnnnnnnnnnnnnnnnnnnnnnnnnnnnnnnnnnnnnnnnnnnnntactgnnnnnnnnnnnnnnnnnnnnnnnnnnnnnnnnnnnntgctgttggcgtaagccatgaacctctcaccccancttgggacaactctgaaaggcatctcagctttagagctccctgtactaaacata

SEQ ID NO: 121960 - DNA, 2834 bp, Homo Sapiens
  misc_feature (356)..(364): n is a, c, g, or t
  misc_feature (599)..(748): n is a, c, g, or t
  misc_feature (896)..(979): n is a, c, g, or t
ggggggagcggggcccacctatgcaccttatccaggcgcgggcgatacgctgagggagagagggggaattccgtgtgtggcagctctcttttatttgtatgtagcgcgcgccacaagatggccgaagctgcctttctttcctcccgggcgttgtgcgcggtttctctatttaacgcgcggggttttccccccgaccccggtttaaagataccccttggaggggtgtttggagcaaccccccactttttggaatgcgcgggagaaaagaaatgtctttttattggggaaaattggggaggcgtattgcgctttattttgtcacccctttatagagccgcccaataaaccaaggttannnnnnnnnaaatggcccttcccttttaaatttcacagctcacagggggagattttgggaattttttttataagcacaaaaaaacctcttcaaaaatggggttgggcgggtttttgccccagacccccctgttgggggcctaggggccccaaaaaaaccccgggggcttggattttaaaatccccaaaccaattggaaccccctagcccccgggggaaaaaatttcccaaaaacatacccgggnnnnnnnnnnnnnnnnnnnnnnnnnnnnnnnnnnnnnnnnnnnnnnnnnnnnnnnnnnnnnnnnnnnnnnnnnnnnnnnnnnnnnnnnnnnnnnnnnnnnnnnnnnnnnnnnnnnnnnnnnnnnnnnnnnnnnnnnnnnnnnnnnnnnnncaagtagcagttttccccgtcccggcgttttaaaaagccggccaagccctaatttataatacgcccccctatagggccccctttttacaaaaaaactgggtaccggtaaacttgggccccccgggggatattttagaggggccccccnnnnnnnnnnnnnnnnnnnnnnnnnnnnnnnnnnnnnnnnnnnnnnnnnnnnnnnnnnnnnnnnnnnnnnnnnnnnnnnnnnnnaagagttttttcctcttttattaagtccgctatactaactagaaggagaatctgtggttttcgcctgatagaccacagggccaatcaccacagcttcttgtagagaacatggagagtgccaagatcaccatcaggtgccgcttccttcctgtggctttccatcttccagtcagcctggtcttttgccttgaagggccccaaaacaacagccctggctatcatcttcatcccaaaagcggagaagatgggcaggcaagaacacggagggtgtcacagagaggttcccatcaggttcacagggcgcccgctgtacctcttggagatgtcagcttcaatcagcttctgcagctccttggtcttctccagtagcaggtccagcttaggctccagagccgcctgctcctcaagtgcctcctgctgcttctgcaccatcagctctttcttcaaagccagcagctgggactgcttcagcttttgctggaggaattcagtcactcggtccacataccttggtgaggccaggatcataaacaggtgttgcagctgaagactggtaagcttgccaatcagatcctccagcactgacaccatggtaaccatcttctctttggtctggccctgcaggatggctggagccagctggaactggctcacagacaggacatctgcctcctcactcaactccactgctctctgggctaagaagatctcaagctccatgagctcatcaaggaactgattccgggtctcagtgtattcaagcagtgtcagggcatctgggcccctggcaacaccttctggagcctgggttcctgcttccagcactgtgatctgcaaagcaacagcatcgtctccccagtctatcccatcacctccaggatcctttgaatctgattccgggaagatgccccagtcgattccagcagcctcggcagagatgccagagtcagtcccctcagacactgcctctaccccaaagtcgccccagtcaatcgcatcttctgccacctgctcaggaagctcctcgaggtggggtcgttccaccacagagggctctgtccctgtcctccactcgtacaccgttgagtttccccgcttctgcacgaaccgcagcattggcaacacctgctctgtggggctctcacacacaaaccccacagacgcctggtacacgtcaatggcttcccccagggactgctgagccgctgccccaatctcagccagctgactcggcaggtccttcaccagggccagcagttctcctcggacattttcgcccgtgatgccatactgcttgcaggagtggtagaactgctcccgcatctcggcagcccctgcctggcactcctcctccttgcggctgtattcttgctgcagctgctggcacttggcaatctgcttcttcagtgaggggatctcatagttgacattccgaaccaggaggctagagagttccactaagtaggtgttgtccttctcatacagagctataatctcctgccaatccttcatccgctgtgaagagtatcggccaaaaatattcttcgtggaggcctctgtgcctttgagaaggtccaggattcttaggcagtgaaagtagtgaatgtaggacccagacagcagctgggcgatctcttcgctctctggcatgtcctggatggcagcattgatcttctcgcggatcgtcagcaccagactctgccatttcaggctgcagtgccttctgtccaccagccaatcgagcagcttgctggtctggatgtcgatgggcacgtgctgatggtcctccatctttcctccacttccgccctcgtgccgaattcaccacccagtcctcgtacctagcctatagttt

SEQ ID NO: 121961 - DNA, 391 bp, Homo Sapiens
cagacacgtgtctggccaagcgaacggagcgcgctgaactagagatggaagggccagaggaatgcctggcgacggaggcgcagttctcgagaatcatggaggagaccagtggcatggaagaagaggaagaagaggcagtctatagcagctgtccctggccgcaggggtcgaagagatggagaggttgatgccacagcatctagcatcccagagctagagcgccagatagaaaaactcagcaagcgtcagcttttctttcgcaaaaagctgcttcactcatcccagatgcttcgggcggtctccctgggtcaggaccgctacagacgtcgctactgggtattgccgtatttggctggtatctttgtagaaggaacagaggggaacttagttc

SEQ ID NO: 121962 - DNA, 1115 bp, Homo Sapiens
  misc_feature (140)..(166): n is a, c, g, or t
taatttttgttgctttattaaattttttctcacagaattctttataaaaacaccatgtccctaaaatgtcattcaacatatatgcacaccttcgatgtataggacactgatcaaaaaagacagagaaatgtgtccctggnnnnnnnnnnnnnnnnnnnnnnnnnnnaaaggcagggtctcagtatgctgcccaggatggattcaaactcctgggctcaagtaattctcttgcctcagcctgggactacaggcacataccaccacacctggcttcatgttcccggtattagtacaatgccaaaatatttaaaattcttaaaggttaactcaaatatcttaagttttacttcacttacaatttcaataatgctgaaattttgattgaatattgtgtttgtagtgctacctctttttcgttcataagaacaaaagcctatcattctcttagtttctaaaaaatatatgttcatatggtttagatacatatataaatatgttacacaaaacaatgttttttgagttgtaaataaataaaaattttaaggaaaccaaattaggataaaagttaaagttataatacatttaataaattaattctaaagtttagatgatgttttggttcttcttcatgaaagaaatgtacgaactgtacccttgattgtactcctacaaataggacactttcttaaagaaggagcacaatctttgcatactactagatgaccacaaggaataaacactatggacacttctttgtccatacacactttacatgttctttcttcttgtagtctccgcaattgttcttccactggtagatctgaaacatcttctgtgggaatatattttatgtcctgttgcacaaataaatgctcatataacacagcttcagcttcttgcagagagtttctgaatacagtggctgcaatatttccttttactaaaatcgtatcaatcagttctcttgcttgtaaagacgtctgtgtcttctgtttaataacatcatgttcttgttcattaataattccggcagttagtagactatccaggattggaattacacaagtcaaatgttgaaaaagtgccattctattcttccggattaacctcgtgcc

SEQ ID NO: 121963 - DNA, 1725 bp, Homo Sapiens
tttgtcttacagagtatgaagtcgacggcgcgccgaattcggcacgaggctgaggggcggccgggccagaacggcttgtgtaactttgcaaacgtgccagaaagtttaaaatctctcctccttccttcactccagacactgcccgctctccgggactgccgcgccgctccccgttgccttccaggactgagaaaggggaaagggaagggtgccacgtccgagcagccgccttgactggggaagggtctgaatcccacccttggcattgcttggtggagactgagatacccgtgctccgctcgcctccttggttgaagatttctccttccctcacgtgatttgagccccgtttttattttctgtgagccacgtcctcctcgagcggggtcaatctggcaaaaggagtgatgcgcttcgcctggaccgtgctcctgctcgggcctttgcagctctgcgcgctagtgcactgcgcccctcccgccgccggccaacagcagcccccgcgcgagccgccggcggctccgggcgcctggcgccagcagatccaatgggagaacaacgggcaggtgttcagcttgctgagcctgggctcacagtaccagcctcagcgccgccgggacccgggcgccgccgtccctggtgcagccaacgcctccgcccagcagccccgcactccgatcctgctgatccgcgacaaccgcaccgccgcggcgcgaacgcggacggccggctcatctggagtcaccgctggccgccccaggcccaccgcccgtcactggttccaagctggctactcgacatctagagcccgcgaagctggcgcctcgcgcgcggagaaccagacagcgccgggagaagttcctgcgctcagtaacctgcggccgcccagccgcgtggacggcatggtgggcgacgacccttacaacccctacaagtactctgacgacaacccttattacaactactacgatacttatgaaaggcccagacctgggggcaggtaccggcccggatacggcactggctacttccagtacggtctcccagacctggtggccgacccctactacatccaggcgtccacgtacgtgcagaagatgtccatgtacaacctgagatgcgcggcggaggaaaactgtctggccagtacagcatacagggcagatgtcagagattatgatcacagggtgctgctcagatttccccaaagagtgaaaaaccaagggacatcagatttcttacccagccgaccaagatattcctgggaatggcacagttgtcatcaacattaccacagtatggatgagtttagccactatgacctgcttgatgccaacacccagaggagagtggctgaaggccacaaagcaagtttctgtcttgaagacacatcctgtgactatggctaccacaggcgatttgcatgtactgcacacacacagggattgagtcctggctgttatgatacctatggtgcagacatagactgccagtggattgatattacagatgtaaaacctggaaactatatcctaaaggtcagtgtaaaccccagctacctggttcctgaatctgactatacccacaatgttgtgcgctgtgacattcgctacacaggacatcatgcgtatgcctcaggctgcacgatttcagcgtattagagggcaaagcaaaacttcccaatgggataaaatcagtggcctgggtgttctgaagtggggtaaa

SEQ ID NO: 121964 - DNA, 522 bp, Homo Sapiens
ggaaaagtaaagtaaacagcctccaactgctgaaccttgacaacccaaattaaggaagcaggagagatcaaacagaactgctgctgggtggttgtcaggagctgctacacggagaaccctggactattcgatcaagcagcaaggctatatgttcacttatgcagaaatggaccattgcagatgctaatcttgttgtgcaagcgaaggctcacttggaaggaaatactcagcccctctctgggcagcatttgagttccttatggatgccgagtcgcgaaacaagttattttttttaatgtatccttctttatgaggagaatgctacccaaaaatgtattaaaggaatattaagtcgtccagagactgtcttgctaccaagaactgtgcaatggaattctttttaccaacattagactcctacactagagttagataacgttttctcacattgagtttagaagatctgccttgtcagggaagccaaggttttgtatgtgagagtttaaatctgatgtgaagctc

SEQ ID NO: 121965 - DNA, 684 bp, Homo Sapiens
ggagtttttcagaacaaatgtttatttaataattaagggcaaacaaaaacattaaagcataggaatacatcaactgaatacaagttgtcttgtttggtctgaaatcttgaaaaagttaatctaactacttacctgaggtagatttaggttggcactgcttcaagggaacctccgtccatcccagaagttaccttctagttttggttacaggctcccaagtggtcctctccaacctcaggttatgctatatgaataataccaacacctttttctcccatggttaaaagccttcagccttgtttcatacccccatagttctctgtttgggggatggtccatcattaatttacttaaaaactagagacaactaccagtaagatcagttgaaagaagggtcaagtcattgccctgttaatgataccaactttgaccccttctccatgttctctctaatgactaacaagtagccgtaaggactacttttcatcaccaccatgcctcacacccaatactattttaagtatactacaaatgtcaaacatatactagtgataggcatgattttcaccagagaaaaaaatacatcttgtgtgtcttatactgggcaactttttatgatacaagagctatttctaaatattacaaaaacatgtcagatcagataaacttccaggatctttttct

SEQ ID NO: 121966 - DNA, 1128 bp, Homo Sapiens
  misc_feature (604)..(663): n is a, c, g, or t
  misc_feature (1066)..(1066): n is a, c, g, or t
ttttttttagagcagattgaatttacattttacttaaaaaaaggggggtgggggaagtacatacacaaggaggaaaatggggtgaggaacaataaagatctgaaatggatttctatgattttcccctacaatgatcgattttgtctgttgggcagtatttttcctgctggcgtacaactgtttacagtattaacaaggttgtagacaaaggaactgccaaagtttaggcccggatggaaaggacagtaagttatcatatacaatttaagtttacaatacacagcattttctttaaatgatgtaacgcagtcgcaaaaagaagttaacaatactaacacgagaataatcaaatttttgttgttatccatgtgcagcaactaactgctttacaaaaaagcaaaataatacaatatatcatcacatatatttacagtatagtaaatatactttttttgtcaaattttacacaaactatttacaggtgaatatactgcattaaaaaaacttgtgtggctgacgctaataatgaatttttgcctaaattcattgcgtaacattgagttagacatgcctcattatgcctgggagtcggggtaggatgtannnnnnnnnnnnnnnnnnnnnnnnnnnnnnnnnnnnnnnnnnnnnnnnnnnnnnnnnnnnctgggagggttgctggctggcactctgtctccccaactaggacacaggatagaagctgactgtttaggatgtgtcctgggcacctggctcagtcatgaacaggtgttgagtgaatggaagacagagctgtagccactttgccccaaatctactgaactgcatctccatctgggcaactaagggcatgcccctcggatgggagtactggcataacaggtagattatccaggacaaaaacatgactgagttcctggtttcctctttaacaagtcaggggaaacatctacaaaccgaaacgaattacttataatatttttaacagaacttatgtcaattacgcagaaatgggcaacttggtctaaacttcagaatttcttttatagattacaagtatgaagactanaaaagtgttgcatttctcaagggacacatagtggtgagaggtttatctcatgtacattttag

SEQ ID NO: 121967 - DNA, 365 bp, Homo Sapiens
acttattacttatttttttctgatattcttacaccagatatgtacgaaaatgatctgtcctgttggtgtaattaggaatgtccatgcagatacagttaaacaactgtaattgactgttctgtaaagttattttgggcaaagttgcggagacacattcctctgtccacctaagaaatcagaagactcttctgttgatttatgtttaatcatttcagtagtttccccacagtgatcatttctgcattttctggcttttgttttcttggctgaaagtgaatggtgactgttaggaatgtcagggactagtgacccagtcctgtttctctgtgttttagatagtaaaaagaaattctgtacccaaagtg

SEQ ID NO: 121968 - DNA, 731 bp, Homo Sapiens
atctgtttaagtcatttatttcaatacaggcattgttttaaatttgcaccttgtctttaacacatttcataaccagagaacaggtctgagaacaagtacataaaaggattatttgacaaagttttaacaaaagtgcttacagcttatttgtttcagatatacagaactgccagtcacaaagagccactaagtggcaatacagccacaaacttgcctgggaagtaaaatattttacatatttacactgtacatttaaatgggatattctgaagcattattattatcaataaactctaagcaagaagttctcttaaaccctctggcacttaacaaagaatattaattttatggggctatgagttttacagtttgattcccatctttgccataacctaaatggatttttaccccctccagtacacatatttacctcctacacaaagtagctgttattagcttatcaccaaccaaacctttgttagtagcagttggaattttgttggcatcaatgtatttacaatgtaggagtaaattatttagaggggagtctctaaaaattaaaataacttcattaaaccctattttaaacagactttacagtataaaatttatggttatagaaatctagtatctaaacaagtttataatttataaggtatttattacgattgattcgcctatgatttactccatttacatgaatgtttattttaataatgactatatctttc

SEQ ID NO: 121969 - DNA, 694 bp, Homo Sapiens
tttcttttgacattgcaaccgaaggtcataaggccgctagctccgctgggacagaggcttgagagaactaacggctcggtgccttctccctggtctcagaccatcgtctctgcactgcgaaggcatttggtagcctcaccactgagatactaactagacctagactaggagctttatcaggttctaggaggtcctttaggaagactctcaaaggcaaatccctgatcccccgccccacccttagccctgccctctcaccagagcaaaattcactggggacttttcccaccacacatggaaatctgtccactcggaatacctctgttttccatttcaaattgtagggggaggggatggaacacttccagtgatggtaagagatctgttatgaaacgaaacaccccccgtgttaataacttggtctgaaatctgtttttatgagccgggccccctgtgcctctagtatacttgtattgactctcatagttacccttttagttttactgtgttctgtgaaaatttgtaattggttgagaatcactgtgggcgtccattcttattcaactaaatctccacaggttttttgagctggtgtggattagtttaactcttgtattcaaccattagtgctaccaccttctcacattacaatacaattactggaagcaagtactgcatttcctatgcaacaaga

SEQ ID NO: 121970 - DNA, 1056 bp, Homo Sapiens
acaatagtgttgaggattttttattgtgttttccacatagataaaaaaataaggctttttgatgaaaagaatccattacaaagtcaaaaatccattacaattataattgaatcagtaacaaaatttagctttaaatgagtcaagtattctgcatttgaaatttaatatcacaaacattcaagattagtgaattttggtaagaaaaaaatactagaagaaaggaaaaggacaccttttcaacagatagtaatttataaaaatttttttaaaagtgctttgggaaaacacacagtatcattacttaagaaaagtcatttaaggaagacttaagtgcttcaagtggagtgtattacagactaaaaaatgttttaaaatttgccaagaaatttaagtgttaaaaatactcttctccttattcagtttcatgtttaaggaaacatttgacagacaagtaaaccaaacgcaaaaaaaagttcacctgcattttaaactaataaattctggatctgtaaaagctcttggtttgtacacagaggccaatgctgacatttattgatctatttttatgtagttaaaaaaatacagtaacaaatctttcttcctatccccccaaaaaactaggggaaatattttaaattgtgagtgtgtgaatgtagctatatatatatatccctaagtgtacaaaacacacaacatcactttacttggaaaattattttcatcatactgtaaacatctcttcccctacatctggacattttgaaatagtctttggtattactagttattgtgctttgaaacagaaacttgcagaatttctgtagtagtgctacataaagatataaataagaaaaatgcacttggaataagttacatttagctgcttttgcataattttcaaaaactacagtgtatgcctagtcacagttttatgagaaagaatatttcctttttcaacttaattttaaggacacttaatcatttgcgacgcgtggtcgacgatatcccgggaattccgacgcgtaccacctgcttttttaacaaccgtgttaatga

SEQ ID NO: 121971 - DNA, 2510 bp, Homo Sapiens
  misc_feature (418)..(454): n is a, c, g, or t
  misc_feature (481)..(546): n is a, c, g, or t
cacccccgttttataaacaacaaagcaccccccggaaaataaagattctgctcaacaatatcattcctgcgggtgagccccaatcttttcttttactcgcccgccgatataatgtcgcgcggttgtgtttacaccaccctgattatacacccctcggaacacttctaatatatttttccccctcggaggcccgttataataatcctccctgtgggtgtttgtgctccccaccttgtggttctcctccccccccgcgcagttgggtgtgtcttttctcccccgaaggagtcccccccgtggtcccgcctgttgttctcctccactgatcgcgcgtgttttttaacccgcgcgccccgcgctcgccgcgtcgctgttttattatgcgccgcccctttggggggccccctttacaaaaaannnnnnnnnnnnnnnnnnnnnnnnnnnnnnnnnnnnnttttggggcggcgcgccgccctctccnnnnnnnnnnnnnnnnnnnnnnnnnnnnnnnnnnnnnnnnnnnnnnnnnnnnnnnnnnnnnnnnnnccgtgaagaagataaatatattttggaagctgcctgtgtcctctggggtgaaaagccagcatagagggccccaaacgcccaccctgccaacccatgccctcctctgacctcgctccctttctccccatagacccgccccacccccttctgtgtcgctgggcttcaggacaaggggcaagagaggcaaccagggagacaaggggaagtgtcttggggacagggggccacagcagttgtggccacatggtaccccagggccgacgcagggccgacgggcaagaggctgttatctccagcctggcgcttccgggcctttcttgaggccaccatgggaatgtgatgtgtgagagaggggctaggagagacagagacacacgcacctgggatcggcggtccggacaggggcagggaaaccacacgccctactttgccctttcctgtccatcccagacctactcagatccctcagtgcctaagaaaacaggacagtgaggactgggggttaggggacggggcttaggggctggggcagggcccgtgagaggtggacggtgggaaagagggagggaggggtgactgtgtggtggtgctgcctctgaacaccctccccttccccagtccccagccctatggtgatttaaaggggctgagaagccaagaggcagcgggcccatggaaagcaggaagacttgggggtggcaggtggccactaacagcccagcagctccaggcgcagggcgatgcggttgtgccaggctacaggcaggatgcgcacatagcgagccaggatgggcgtctcaaacaagttcttcttgtgggagtggttgtcccagttgccagggaagatcttactgctgccagtcctggggtcctggtactcagtccagttcgcactgtcattactgtaggcaaccttgtaggatgccacaaactggacagagccaaagttacgggccccctgggtgatgatgcctgtcacctccttcgaggagcccaggtccacctgcagccactgatcgttaccgtagctccccgcaacccaggcgttgaagttgccctgcttgtccagccgtgcataggaggggttccagctgaagagatgcaagccccaggtcttgtagctgctggaggccgtgatctgcttgtcagggatgctgttattcttcaggcccaggggattggcgcatccgttcagctcacagcccagtagctcaaagcgcagagtgcaggccgtgtggcagctcgtggggtacaatctcacgtactgagcctccacaggggtctcaaacaggttgacatgcaccgcgtttttgttccagttacccacaaactccttgtgttttttattaacatcatggatgaaatcgaattcgtgtccattaaggctgtaggccaccttgaaggccttcaggtactcatgactggccaagcggctggcaccctgcgtcaccacacctgttacccacatcctccgcagcaggttcacctggatccaggggttatcgtcattgctgctgggtgtccaggcattgaccatgcctgcgcggttcaggcgggccagctccgggacccaatgctgcaaacccaagaaggtcacacgcacagatgaggcggcgatctgtgagttggcaatgttcccattctccatgcccagtggctcgacacatttcgtctcacagtggttgcccgcgtagcccttaaggcacgtgcaggtgtacgaggggaagacatctcctcgcacttcttgggaaatctcctcgcataaaccaccgttgtggcaggggtttttggaacagatatccagggcgacgaggaggctgggggcgcagagcagcgcgccgcacagcgcggccagcaggcgggggcgcggcatgctgcggggacgcgggcgctggaatgggcacgctgggctgctcagaccccgcggggttctggcgccttctcctctgggaccggaataaatc

SEQ ID NO: 121972 - DNA, 150 bp, Homo Sapiens
gcctactactactactatacggctgcgagaagacgacagaagggggtggggcgggtctatggggagaaagggagcgaggtcagaggagggcatgggttggcagggtgggcgtttggggccctctatgctggcttttcaccccagaggaca

SEQ ID NO: 121973 - DNA, 1529 bp, Homo Sapiens
  misc_feature (149)..(149): n is a, c, g, or t
  misc_feature (1008)..(1008): n is a, c, g, or t
caaacacacacgacttcatttctgtattaattcctgcctcatcatcttttctcattgatgctccttaatgtcaaaggaatctctctctctcacacacacataagaccaaaacaaatatcgtgaacatgcaaaaaaatagtctacgcttntgaatagtgtgcactgttgaatagtgtgcactgttggatagtgtgcactgttgaagtgtgatgtgcctaaggcaacaggatcttgggaaagctctagatttttggcttcgaaataaaactgcatgttgaatagcaggtttttacatttattattgttgtgtatttcctcccctttttgcaatactatctacgctgagttatctattgccaactagcaccaattctccaaatcaaagtgtgtgaggaaaacacactcgtgcaatcctctttaacagaagatacaccaagtaacctgtctgtctacttctgttacccagaaataaaagaacttgaagggctgcttggctggaggggtccgggtgggagagcatcctgccctcagtcggaatccatggtgaacagctggatgtcctgtggattccagtacaggccgactgctgagttgtagacaagagaccagacataggggataaaaaactcctcgggctgctcctcttccacatatttgaatttcaattctggaaatttcttcagtctgtctttgggcagcgcaacgacgccttgcttaatgatttccaggacccgttccactgacagctcagctccagcttgcagcaaccttgagctaaagaaggagatcaccagatcaatattttgcattatatcctgaaatgaaggatgagttcgaaattgttcaaagagatcgcgtttgtaaagcagggcgtataccaagtttgggttgtggtgaagggaatttgtcaggcaggagttgatgatctctaacatcattcgaatcacttcttcaatgacatttaggtcttgtgcataatctggtagaggaacatcattagaactcagncgaacctctccacttcccccagagttcccagccctatggtgatttaaaggggctgagaagccaagaggcagcgggcccatggaaagcaggaagacctgggggtggcaggtggccactaacagcccagcagctccaggcgcagggcgatgcggttgtgccaggctacaggcaggatgcgcacatagcgagccaggatgggcgtctcaaacaagttcttcttgtgggagtggttgtcccagttgccagggaagatcttactgctgccagtcctggggtcctggtactcagtccagttcgcactgtcattactgtaggcaaccttgtaggatgccacaaactggacagagccaaagttacgggccccctgggtgatgatgcctgtcacctccttcgaggagcccaggtccacctgcagccactgatcgttaccgtagctccccgcaacccaggcgttgaagttgccctgcttgtccagccgtgcataggaggggttccagctgaagagatgcaagccccaggtc

SEQ ID NO: 121974 - DNA, 1188 bp, Homo Sapiens
  misc_feature (92)..(103): n is a, c, g, or t
aaaaatagataacatttattgagcacctactgaatagaagacattttagatcttagctcatctaatctgtttatcaacgttatgacataggnnnnnnnnnnnnctattttacagatgagaaaaatcgaggcccagaaatatgaaattacttgtccagtcacacagctagtaaatggcccatttgggattccagccccacttggcttgtgctttcaactattttccatattaccctattggaaaaggatttaaaagaggctcttgctacatcagggtccccatttgggatctagagattgcttggtttcatctccccttccacctattctctgtcttgctcagtctcagttctctttcttctgggtggaatgggttgtaagcccctttgcaactcaggcctttgtaactgttgaataggcaaatgaaggaggaaggctccgaggatggaagccagctgtgcacttcgctgatgatctgggatgcacagaggtgggatggggcgggtgagcaatggaaggctgctaatgagcgtttcccagtgttgcctccgagggcggctgcagcctctgcgctgctgtttggggttgttggagccatcacagcacagccaggatttgcccttaggcttggtgacaggttggatcaccttcactcagaaggcctggccactctttgccatgtctgatctgtggtgtggatgacggcagctgacatggactcctcgccacctggactggttcagccatctctttccaggccatggtcttcctgcttcagctctcctccctcagctcccccatccattcccctctgaagtcggaagtcttctagaggtgtacatttgaccttatcatgtcagctccaggttagagcctggagttactataacgattacctccagggcgaagttcagactcattagccttccaggaaaagcagctcttcttgccctgcccctgtttgactctctgtgatgggggtcccaaactaccttaggtttgataattcacttgagggactcacaaaaattagaaaagctgatatactcatggttatggttcattgcagcaaaaggagacaggttaaaatcatccaaggaaaaaggtgcataggtcggagtccaggaagacaccaggcataaatttccagttgtcctctcccgggggagtcacttggatagcactgaac

SEQ ID NO: 121975 - DNA, 650 bp, Homo Sapiens
ttttctttttaaagcactttattgagatgtttctcacaaactagggggagaaataagagaaaaatccttattttaaaacacaagtgaaaagcaccaaagacaattcggcaccataactctgatgaactccagagttcctggtttccagttcttttctacactataatttagtattcaaagctttctgaaagaacaacaaatccagtaactcctgaaatgatgcataacaagcagtgacactactcccttaggtacacatacatactaatatagttcaccaaacataaatcttcccttgtaaataaacagattaagattaaatatatgataccatcttttcagaaacaagattattagtaccaaagcagactagaacatgaatgttactaattgaaaaactcataattccctttttactttagatggcttcaagtgttcaacaatattttaaagacctttttatgcaggttaaaatatagactatttttctttaagagagaaatgtacgaacagtacccttgattatacccctgcaaatagggcattttcttagagaaggggcacattcctggcatactaccagatgaccacaaggaataaatacaacagaaacttctttgtccatacacactttacaagttcgttcttct

SEQ ID NO: 121976 - DNA, 2066 bp, Homo Sapiens
  misc_feature (305)..(366): n is a, c, g, or t
agggggatgcagagccaatcggtaggtgcaccccaccctcgcagcaccctgcgagcagttagcgcacctggatttagttccttttatttccctttcaggtaccagacaaagtaaaaaagacggacggatggagagaggaacgcagccggctggggtgggagcggaatggagctgggggaggggccctgctcacatcacatccacaaagaactcactggggtttcccatggccatgcggaaggactgtctgctggcggtcagttccgggggcactgaggccaggtcgcggcccggaggggctcctnnnnnnnnnnnnnnnnnnnnnnnnnnnnnnnnnnnnnnnnnnnnnnnnnnnnnnnnnnnnnncactccgggaggaccgtagctcgggtgtgtgtggtggctgcgaaggctgctggccagggaatggtggctgcggtggctgtgctcgctggccgccggccctgagcgctcgctgggcgcccgctcccgcggcccccgcaggctgctgcgtgtggtgtggtccgattcgctgccgctgcccccggacttggagtccccggccttcgggtccttctccttcctccgatcgctgccgctacggttggagccactgctccgactgccttcgctgtgctgactgctggcgctgcccccgccgtagctgtagcccagctccgggaagcccgggtgcgggttgtatgggtgcgggggtggcgggtactggtacgggaaagccatgggccaaggggcggcccccgggtgcggcaaaggggccagtgtgtcctggtcagaggcgccactggagccatcgtgatcgtggagagacaggttggccatgttgccgcagaggtcaccgaagatgtagtagcactgctcggagaaggtgatcttgttgacggtatggcggatgaagccagctttcagcaggttgctggcatacttgcgggcctccctccggtccgtgaagccttccacattgtggtacagccagtcccaccacatctgagccgatgaaagcattaggggatggtaatcttgagccacatgcggtcacggacctccaacccttgattcaggggaggccatggcttttacgatggcagccatgtcactgtggatggacaagtggaagtcgtctaggcgctctgtgtcagggatggaactggtgatggaggagctggtggaggtgatggtgctcagggaggggctcatgccgtatgcagggaaggtgccggtcatggctgcagtgtgggagacccaggccgcagggtcaatgggccggatgggctcgctcctgggcaatgtgaagcaaccacgtggacttgggtcccagcacttggctacagtcagggtgatgggccccggtttgtgcacaatctcccgcagtacccggactgcatcgtcattactcatgttctcaaagttgatctcgtttacctgtaacaacatatctcctggctcgatgcgtccatcagcagccacggccccacccttcatgatagagccaatgtagatgccgccgtcaccacgctcgttgctttggcccacaatggagatgcccaagaagttatatttttccatgttgagagtgaccgtgatgatgttgagtgacatggtggagtccgtgatgctgctgaaggacgaggaccgctcaatccgagaaaccttctgcttccgccgccgccgcttgtgtcttctcatcaggcgtgaggcactgcgtctgttctgtggagctgctgaacctgctggtggagtcatcctcatctgagtcaaagaagctggtggtctccagctcactgctcataagggtggatgagctatcataaccccctggttctcgccgccgttcccccttcgcagttccatttagccgggttgcatgctctgggccatccctccggcgtggccgctctcgctgggcagacaccaaagagtccgtctctgtgtcattgtccaggttctcctggctgcccccggatcacgctaacggaggcagaaactacccaaagtcgtagcataaggatgacagcgtcgggaaatctgtgagaacacctataacgcaa

SEQ ID NO: 121977 - DNA, 1112 bp, Homo Sapiens
  misc_feature (76)..(94): n is a, c, g, or t
  misc_feature (323)..(380): n is a, c, g, or t
  misc_feature (412)..(412): n is a, c, g, or t
  misc_feature (692)..(692): n is a, c, g, or t
  misc_feature (887)..(887): n is a, c, g, or t
  misc_feature (938)..(938): n is a, c, g, or t
  misc_feature (1010)..(1010): n is a, c, g, or t
tggtacacgaccggccacgtgccttgccaaaattaaccctcactaaagggaaaaagcttgcggccgcctgctcggnnnnnnnnnnnnnnnnnnnctggatttagttccttttatttccctttcaggtaccagacaaagtaaaaaagacggacggatggagagaggaacgcagccggctggggtgggagcggaatggagctgggggaggggccctgctcacatcacatccacaaagaactcactggggtttcccatggccatgcggaaggactgtctgctggcggtcagttccgggggcactgaggccaggtcgcggcccggannnnnnnnnnnnnnnnnnnnnnnnnnnnnnnnnnnnnnnnnnnnnnnnnnnnnnnnnncgtagagagggggcactccgggaggaccgtanctcgggtgtgtgtggtggctgcgaaggctgctggccagggaatggtggctgcggtggctgtgctcgctggccgccggccctgagcgctcgctgggcgcccgctcccgcggcccccgcaggctgctgcgtgtggtgtggtccgattcgctgccgctgcccccggacttggagtccccggccttcgggtccttctccttcctccgatcgctgccgctacggttggagccactgctccgactgccttcgctgtgctgactgctggcgctgcccccggccgtanctgtagcccagcttcgggaagcccgggtgcgggttgtatgggtgcgggggtggcgggtactggtacgggaaagcatgggccaaggggcggcccccgggtgcggcaaggggcagtgtgtcctggtcgaggcgcactggagcatcgtgatcgtggagcacaggtggccatgttgcgcacagtcacgaagagtagtanactgctcgagaaggtgatctgtgacggttggcggatgacgcagctttcccnggtgctggatactgcgggcctcctcggtcgtgagcctccaatgtggtaactcgtgcgattcttggctcaggncaattcctaaggagtctataatctatcagtccaacgttctggtgaatgtatcgtccagtcaaaaatacagcggacataatgaagctggggccaaatgactac

SEQ ID NO: 121978 - DNA, 743 bp, Homo Sapiens
tttttagggggctgcagagccaatcggtaggtgcaccccaccctcgcagcaccctgcgagcagttagcgcacctggatttagttccttttatttccctttcaggtaccagacaaagtaaaaaagacggacggatggagagaggaacgcagccggctggggtgggagcggaatggagctgggggaggggccctgctcacatcacatccacaaagaactcactggggtttcccatggccatgcggaaggactgtctgctggcggtcagttccgggggcactgaggccaggtcgcggcccggaggggctcctgggggccccatggccgcgggcggcgggggcatcatcagcatgggggggccgtagagagggggcactccgggaggaccgtagctcgggtgtgtgtggtggctgcgaaggctgctggccagggaatggtggctgcggtggctgtgctcgctggccgccggccctgagcgctcgctgggcgcccgctcccgcgggccccgcaggctgctgcgtgtggtgtggaccgattcgctgccgctgcccccgcacattgagatcccggccttcgggtcctatttcttcttccgatcgctgtcgctacgggtggagccactgctccgactgccttcgctgtgctgactgcttgcgctgacaccgccgtagctgtagaccagctacgggaagcacaggtgccggttgtatgggtgcgggggtgtgcggtactggtactgaaagcc

SEQ ID NO: 121979 - DNA, 711 bp, Homo Sapiens
  misc_feature (201)..(210): n is a, c, g, or t
ttgtcaatgaaaccaaatctcgccccgtaacgccaaccttctgtccaaacactccccagcaaatattgccacccgttgtggggttacaacaccgtatgtacgccccgtggaaaaaggtgttaatatgttttccccctttagaggcgccttttaaaaacctccctcggtaaggggttagatgttggccccacaatagtcgtnnnnnnnnnnaggagtttttggggtccctcccccaaagatgtcccagcttgccgcgtttgcgccacggcgcacggaccggtgggtgttaccgccggcccagtcgcctggtgccgttattaactccgcgtcgcctcctattggggccccccttggagcccaggaaaaccggggcacacgcggcaaccttctgggcccctcgtccgcgggtaacatcttcgacacgcgccccgccctgtttgttcttgctttgtggatttagttccttttatttccgtttcaggtaccagacaaagtaaaaaagacggacggatggagagaggaacgcagaccggctggggtgggagcggaatggagctgggggaggggccctgctcacatcacatccacaaagaactcactggggtttcccatggccatgcgcgacgcgtgggtcgacgatatcccgggaattccggaccggtaacagcctgcttttttaaaccacctggttcctatagtcacaatggccgc

SEQ ID NO: 121980 - DNA, 1087 bp, Homo Sapiens
  misc_feature (755)..(755): n is a, c, g, or t
  misc_feature (1042)..(1042): n is a, c, g, or t
ggcctgggtggcgaattcggcacgaggccgaagccctgcagagagagaagatcttctttgagaaccacccatatttcagggatctgctggaggaaggaaaggccacggttccctgcctggcagaaaaacttaccagcgagctcatcacacatatctgtaaatctctgcccctgttagaaaatcaaatcaaggagactcaccagagaataacagaggagctacaaaagtatggtgtcgacataccggaagacgaaaatgaaaaaatgttcttcctgatagataaagttaatgcctttaatcaggacatcactgctctcatgcaaggagaggaaactgtaggggaggaagacattcggctgtttaccagactccgacacgagttccacaaatggagtacaataattgaaaacaattttcaagaaggccataaaattttgagtagaaaaatccagaaatttgaaaatcagtatcgtggtagagagctgccaggctttgtgaattacaggacatttgagacaatcgttgaaacagcaaatcaaggcactggaagagccggctgtggatatgctacacaccgtgacggatatggtccggcttgctttcacagatgtttcgataaaaaattttgaagagttttttaacctccacagaaccgccaagtccaaaattgaagacattagagcagaaccagagagagaaggtgagaagctgatccgcctccacttccagatggaacagattgtctactgccaggnaccaggtatactggggtgcattgcagaaggtcagagagaaggagctggaagaagaaaagaagaagaaatcctgggattttggggctttccaatccagctcggcaacagactcttccatggaggagatcttttcagcactgatggcctatcaccaggaggccagcaagcgcatctccagccacatcccctttgatcatccagttcttcatgctccagacgtaccggcagcagcttcagaagggcatgctgcagctccctgcagaccaggacacctaccagctggctcntgaagggagcggagcgacaccaagcgacaagcggaaagtcctgga

SEQ ID NO: 121981 - DNA, 761 bp, Homo Sapiens
  misc_feature (713)..(713): n is a, c, g, or t
  misc_feature (728)..(728): n is a, c, g, or t
tttctgctagaaatgagtttattacagagagaggagacagggctccgacaggacgcacacacacggcactcatgctcctaaaacactgggtttgtgaagggacattataaaaatgaggaaataagctgtgatgttcagcatgtgtcagtttctaggaatacagagaaggggagagctgcaaggtggagcgattctgagggctgaaaatccctttcccagtacgaagacagcatccttcaatcccgccagctcatgtgcatctgagggtggggctctgtcttcatgctagaaaccaaactgctctcacagcttcctgctaaatcaccacggctaacggataagcagagacggactatccagtctgactactgagcactcaagtcgtcagtccagtggctacccgggaacgggggcagacagtgtgcgtgcacgtctacggggctggacagagtgtggttaaccggggaactgggcaagccggcgccgagcctgcgtcagccgtgcaagccgctccttcaggaacttccgcttgtcgctggtgtcgctccgctccttcaggagccagctgtaggtgtccttgtcctgcaggagctgcagcatggccttctgaagctgctggccgtacgtctggagcatgaagaactggatgatcaaagggatgtggctggagatgcgcttgctggcctcctggtgataggcatcaggtgctgaanatctctcccatgganatctgttgccgactggctggaagcccaaatcca

SEQ ID NO: 121982 - DNA, 2418 bp, Homo Sapiens
  misc_feature (47)..(81): n is a, c, g, or t
aaaacccggacgagcgcagcgaagtcatgtgagcgaggaagcggcgnnnnnnnnnnnnnnnnnnnnnnnnnnnnnnnnnnncagtcgacggtaccggaccatatgcccgggaattcggccattacggccgggggagccgggtggatggtactgctgcatccgggtgtctggaggctgtggccgttttgttttcttggctaaaatcgggggagtgaggcgggccggcgcggcgcgacaccgggctccggaaccactgcacgacggggctggactgacctgaaaaaaatgtctggatttctagagggcttgagatgctcagaatgcattgactggggggaaaagcgcaatactattgcttccattgctgctggtgtactattttttacaggctggtggattatcatagatgcagctgttatttatcccaccatgaaagatttcaaccactcataccatgcctgtggtgttatagcaaccatagccttcctaatgattaatgcagtatcgaatggacaagtccgaggtgatagttacagtgaaggttgtctgggtcaaacaggtgctcgcatttggcttttcgttggtttcatgttggcctttggatctctgattgcatctatgtggattctttttggaggttatgttgctaaagaaaaagacatagtataccctggaattgctgtatttttccagaatgccttcatcttttttggagggctggtttttaagtttggccgcactgaagacttatggcagtgaacacatctgatttcccacagcacaacagccctgcatgggtttgtttgtttttttactgctcactcccaaccttttgtaatgccattttctaaacttatttctgagtgtagtctcagcttaaagttgtgtaatactaaaatcacgagaacacctaaacaacaaccaaaaatctattgtggtatgcacttgattaacttataaaatgttagaggaaactttcacatgaataatttttgtcaaattttatcatggtataatttgtaaaaataaaaagaaattacaaaagaaattatggatttgtcaatgtaagtatttgtcatatctgaggtccaaaaccacaatgaaagtgctctgaagatttaatgtgtttattcaaatgtggtctcttctgtgtcaaatgttaaatgaaatataaacattttttagtttttaaaatattccgtggtcaaaattcttcctcactataattggtatttacttttaccaaaaattctgtgaacatgtaatgtaactggcttttgagggtctccaaggggtgagtggacgtgttggaagagagaagcaccatggtccagccaccaggctccctgtgtcccttccatgggaaggtcttccgctgtgcctctcattccaagggcaggaagatgtgactcagccatgacacgtggttctggtgggatgcacagtcactccacatccacccctgaagggaagggaaaaaaggggcagagccttgacacttccagtcttagacaggggacaatttctttgtagttgttctgataataaactgggttccatgttgcatttcatctgtgtactgaaccactagcctaatagaccagcacggtcaactagaatgacaaacattagctactgggaactcttgttgtctcttcctcttcagaactcttgtccccccaggctccccacctctgcaagatgggatacactcttcaggaccacagtttgaaatgtctttcataaaatgtgctacaattagccttcggaatatttgctgggtgatttaaatgtgtgggtctcatttccatgctagccatggtcatctgacagtctctacactgtgaatattgcctggtgatcaagactctcctcaaagaaatgacttgctgtcatcccacatgaactcctgatgttttttctacaaaagtccataaaatgtgaaaactggagaagatcttagaggttgaagcccaccttctcttttcacataggagggaacagaccatggaaatttaaacgacttcctcacggtcacagaactagttttttaatcctcaggcagtgcatccccccaccctacaactgagcacaacctctttccccacagtgcaattcagaatatgctcagggaatgccagccaccttgtaaaactgctgggagaaaagcatgattcccacaaggactaagtatcagtgatttgtaattttcctgttttgtattatctgctttgctgatgtagacaagagttaactgagtagcatgctttattaagcatgagaaagaatcttaagaattgtcaataaaattaacccaaaactttaataatgtgtctgtaaccaagaaaatattgatagcatcatcctaatgaaactaaacatttattttaaacttattaaattgactcttaaactaaa

SEQ ID NO: 121983 - DNA, 1224 bp, Homo Sapiens
  misc_feature (848)..(890): n is a, c, g, or t
ggcacgaggttcgcttcaagttcattacgtttaatttttttccaaaaaagttttgcattgacagctgtacaatactttggtgttaacctgtggtcttccttcacctcagtgaactctgccctgcccatctgtccagaggaagtcttagctcctaccccccaccctccctggcgcttggatgggaggcgacacagtatgggattgtgaaatccctgctgcgatgctgggtatctggaaggggagaagggggtggaagcagcgcagggaatgctgtgagatgagaagagctcacatcgatgggaaatggccctggcccaggctccagaatgtgacagcaacagtggcctggctgttttcccgggggtcggtgggcgggactggcaaactgggaggagaggcaattaagacgcaacaatcaaaccaacctttaaatagtaacttttaaaaatataaaaacagttcagtacaatgacttttcattctttttttcttcgggaataactttcttctaccctcaccctcccttctggctagagccttaacaagaggtggcagatggacatctgagacccagagagactctggacgccccacgcgcccagccttggagaggcacagggtgtgtcgccagcctccacatcccatgcccggtgcgctcagctggggagcaacctcactgaaggtgggtggctttccctggagcccctcccacctcctcagcagacggaatcacacattacaaaataatccataaaaatgcagtataaaaattatcttcgatatgctacatccatggagagcctgccaccaggactcacagcggcctttagcttttctttaaaaggagnnnnnnnnnnnnnnnnnnnnnnnnnnnnnnnnnnnnnnnnnnncccaacccaaatcctaacacctcagaacatgttggtaccaaaaggtggcactctgccagaggcgatagtctacctaacctgtttgggccacaagagactgcaatctgcaagaaatatccacagtgtgccaggatctgtgtccccctctcccacccgccaacccccactgctctgcccagggtgggggtgagggggatcctcttttcagactcacaaccctgtaggtttatacactttcccccctctaaggggagaggaagagactgtaggcgggaagggggagaaggcattttataaaaggacatcacttctaattctttttattcgaattaaa

SEQ ID NO: 121984 - DNA, 460 bp, Homo Sapiens
  misc_feature (120)..(120): n is a, c, g, or t
ctgtttttatatttttaaaagttactatttaaaggttggtttgattgttgcgtcttaattgcctctcctcccagtttgccagtcccggccccccggtcccactccctcggggaaaacagnccaggccactgttgctgtcacattctggagcctgggccagggccatttcccatcgatgtgagctcttctcatctcacagcattccctgcgctgcttccaccccccttctccccttccagatacccagcatcgcagcagggatttcacaatcccatactgtgtcgcctcccatccaagcgccagggagggtggggggtaggagctaagacttcctctggacagatgggcagggcagagttcactgaggtgaaggaagaccacaggttaacaccaaagtattgtacagctgtcaatgcaaaacttttttggaaaaaaattaaacgtaatgaacttgaagcga

SEQ ID NO: 121985 - DNA, 436 bp, Homo Sapiens
  misc_feature (337)..(337): n is a, c, g, or t
  misc_feature (348)..(366): n is a, c, g, or t
  misc_feature (380)..(380): n is a, c, g, or t
gcttcaagttcattacgtttaatttttttccaaaaaagttttgcattgacagctgtacaatactttggtgttaacctgtggtcttccttcacctcagtgaactctgccctgcccatctgtccagaggaagtcttagctcctaccccccaccctccctggcgcttggatgggaggcgacacagtatgggattgtgaaatccctgctgcgatgctgggtatctggaaggggagaagggggtggaagcagcgcagggaatgctgtgagatgagaagagctcacatcgatgggaaatggccctggcccaggctccagaatgtgacagcaacagtggcctgnctgttttcccnnnnnnnnnnnnnnnnnnnactggcaaactggngaggagagggcaattaagacgcaacaatcaaaccaacctttaaatagtaactttta

SEQ ID NO: 121986 - DNA, 1025 bp, Homo Sapiens
tttttttaggatctgtaaactacatttattgaatacttactggacacatcatatacaaaaaaggatgggggcaggtaagaacttgaagaaattaaatatacacattaagtttcttcactaattctagccactaaagaagtacaaaatttgtacaagtaatactttataatgaaattttgatgcctgtcaaaagggtaataagctatacatatactacaataaacatttttaaaaactgtgcttaatatcatagaattttcttaaaatgggttggtaaaatacctatatagcatccattcttacacacatattttccattaaagattgcttaaatagtacaaattcctattgctaagaaattcatggtcaacagctgtatatgaagttcctctaagaaacatcacagcatttgcagtaagtccatttctccagtgaagcccaccttattttcagtttagcttactaccaagttctcatgagaactgtttatatgtcttttgcttggtcatcttcttcaagttttctgatttcattttttaaacaatttatagtttcacgacttgcttttaatctctccttaagctctgcaatctcaaagcttgtttttttcttagcagcttctaatttttctctggttttcacttcaagctctgcaaattctgtttcatgcttataggctcctaatgttagctgacgagatgttgtcaataattgttgcatcattgctgttgggtcttgaaatatcatttcatcatagaactctgaaaccactgtctttttccccagcattgcattggtgtctgattgaaacagctttagcaaatgatacagggttacaggtctttcattagggtcaatgaaaaatattttgatgattatttcgaattcaccccatcctgtttcagtaatttcatatggaggtttagtaacaactcttaaaggattgccatagctttcatgtaatttaaactggattttcttcacatatgctgacatatcctcatttctatatggtttcacatacc

SEQ ID NO: 121987 - DNA, 871 bp, Homo Sapiens
  misc_feature (738)..(749): n is a, c, g, or t
tttttaaactttcaaaacatgtgcatagctttattcatctacttagatctaaccttttcacggagcttcggcaaaattcgagtgtgcaaaatgcatttctaaaacgtaatgcaagcaaagctttcacatttacactggcaggaaatacagagagaaactaacaggtcgcattagggaaaattcagatcttttgtttgtgtaatgacaagaattgcacagtttattattttgagacaattgttgcagacataaatatttaaaattttctaagcaaggtgcttttaacaaaatttttaaagttggaaagagctgataacttggatcatagctcacacagaattccaaattaaagtggactccattatctccctatattttgcaaacaatgctttgtataacacttctttaaaacactaaaagagacagcaagctgaaacttttttcaaagcacacaagaaatgtttacttgaagaaggtgctgaggggagaagggagtgaagaatccttttactatttcccactacaggacagccactaacagactaagaacaaaaaagatacaacaaaaaaagtaaatcacttccccagcttataaaatagttccagtttcgcaagatctgtaactttaaacagagagcaccagttgggcaatagaatgagcatttcatactgcataaaaattagtgaggtggtaagaaccatcgactatctcaggcattactacatggcgtttccaannnnnnnnnnnnaatatacatgcaaggcacattgatataaaaatagatctctggccaacaaatatattaaataagcaaattaaaattttggctttgcgatattggcaacatcaaaatataaccagatagctttg

SEQ ID NO: 121988 - DNA, 1539 bp, Homo Sapiens
  misc_feature (961)..(969): n is a, c, g, or t
gttttgcacaagtctatggctttactacttttcaagacaaaagtcacatattaaaatacaaactactcaaaagcaaatagttgtcaagaatgtggtttacaagacagatcttacagataatacagactatattatgatttatctgtttgaaaacagaaagtagtgtattatactgaattctggtataaggtgcgcaggaaactttacttacaatcctttattttcataaggtaaacaccaaagtatttctcacatatattaccaccagattttttttaaaccaaattccggtttaaaaatcacacactgacaacacagaaatacgaaatgctaggaaaagtctagcatatgaaggaaaaacatgtcttatgcattctaatataattttttacaatctagcataaaggcaaatgcggtttttttaaaaatgcagtccatatacaattatagaaaaaacattagtcaagccacctaatataaccaatttcacagatagcactcatttaatataatgtccaaaaatttccaagtaagtgtctacgtatcagttagaataatgcccacaaggatctccaaactacaaaatatcagcaagtaaatgaaaatcacacatttctctttgaaagactgaagcttgactatgagttaaaaggcaacaactatgaactaactttctttaaaatgacttaaactgcccaatctagagcaatacatgtttcctagctatacatgcaaactggactgtgtggtaaaaatgactcagttacttaaaaaaagcagaaaagatccaaaataaccagagctcaagctaagctggtgaaaccacagagacactgaagcccagcaactcccaagaagctgaggattaagattaaaaataaactctggatactgaatcctatatcaacactctgaatttatatttattgttagtaatttctattattcttttctttgggtnnnnnnnnntgttttaaaaagaaccaatgttttggaataagcaatgtaactctgatcattctgctatgtgactaccaaaaaggctgttgttcttttagccctaccacttggtaagatagaaagctctccacacacaaggcccagagaaggctgatatcacaagtcagtgtgagttacactcttctcatgcaatggagctactaaaatacatacatttggtcttacaaaaaaattacaaaactaacaaatctttttctccagaattataaaagatagaatctatgaatcagtactaatgtgatcacagaaaaatagcaaactgaagtcaaaaagcacaggctgcccatcatagagtccccagtctatttaatattttcgacctgctctgaggatggagggtgtcaacaccttagaataccatgatgggctttaaaactgggtaaagaatcatccctagggttagggcaaatgtaacttcacttattgcttacacacaggaaaaaatctgtttccttttccaagatattcttttaaggattacttgacagtggttcttttaaaggtatcaaaagatgtcct

SEQ ID NO: 121989 - DNA, 800 bp, Homo Sapiens
  misc_feature (215)..(277): n is a, c, g, or t
  misc_feature (543)..(554): n is a, c, g, or t
  misc_feature (556)..(667): n is a, c, g, or t
  misc_feature (677)..(690): n is a, c, g, or t
aattttctttgttgggtttttgagcaacctcatgtccccttcccagggagctttttaatttacctcttagaactcaagtggatgggaagtagagcactatgtgtcagtatgctttgttttctgacacgattacacagcgaggctttaatgccatttgggtaggtgagcttctgcacttctgttgtgctgaactgtatattcttctctcatctccnnnnnnnnnnnnnnnnnnnnnnnnnnnnnnnnnnnnnnnnnnnnnnnnnnnnnnnnnnnnnnntttacctttgttggattatccttccaggttttcataataaatttatattttgtaaaaggattttgttgtaccaggttttgcatcctcactgaatctgactggcttttattttcctctccaaaatcaggtttttgttctcaacatctttccccatcatgtctagtcactgttttggttttggcaccatcagtatcaaatgtacaaacggttcttgctaaccaacaccaggtatatctgatgttcagatgagttccaataaaaataannnnnnnnnnnncnnnnnnnnnnnnnnnnnnnnnnnnnnnnnnnnnnnnnnnnnnnnnnnnnnnnnnnnnnnnnnnnnnnnnnnnnnnnnnnnnnnnnnnnnnnnnnnnnnnnnnnnnnnnnnnnccttggcggnnnnnnnnnnnnnnaaaaaatttttaaaaccttttttttgggcccggggccccaaaggaaaaggaaaagggccaaacttgtttccaagaaaaaccgggccatgaatagggctgggattcccccc

SEQ ID NO: 121990 - DNA, 2126 bp, Homo Sapiens
  misc_feature (124)..(152): n is a, c, g, or t
  misc_feature (517)..(542): n is a, c, g, or t
gccacatgcatagcaggccccttgggggctaagggcccacactgctccctgtgtggccgtggtagacactagctcctggcctcatccccattccttcacaggtcagagtggagctatgcaggcnnnnnnnnnnnnnnnnnnnnnnnnnnnnnagtggtggtggtggtggcggcggcggcaggaccttcggctactctgctggagccaatgtggggagggaagggcagacaggccgtatggtaggggaaagaacaccaaaatgcctcatttcaaataaaaaagaaaacagcagtctatacacagttgtttgttttggttcagtacaaacagaataaaaagtcattgcttttgatggtcagcaaacacccaattctgaggaggaggagaggtgatgcccagcaggtggattaggacccccagtggttggcggggtgcctggctttgcggccctctcccaggaggcagagagcacagctttaggtagtgtaagcctttttccttttatttagaataatcnnnnnnnnnnnnnnnnnnnnnnnnnntaagcaatttccccactcccaagttgggccagtaaagattacatgaaaactggcacacctattggctggaatacagatgcaccaaatgaggatttaaaaactttccgagcgaaaagtagaacaaaaagaaaaaagaatctcctagcattttcccccaaggtttcactctcccgccacacacactctccaaaggaccgctacagatccaactctatgtcagtttcttggctttgttgtagagggaatccactactttgctcatgttctgaattgtttccagagcagcttcgtaagttttatctactgggggttcatcgaaaataatcaggacaccctccccctggtccaaaatcccatgaaatttcttgtcaagaatcatctgtgataatttcctttccacgtcggccttggagagtttgatgagactagatatgtgttcaatctgtactctggaaaaaggctcaatgactcggatcagattctgttctagtaagttatcatacaacttggccaagtgtgtgctgatgattgggtcatcccggagctctgcccggtaatctgtcagagccttttcaaaatctgccagtgatctgttcttgctagcctgagccacgcattttaatgcttctgtctgcctccctgcataccgaagtgcaagcttcccgctcaccaaagcctggacatcttctggggtgttgagcatgattttgcacagcaacatgtacttcagagatgtgatggccttggggctgtcgatggagtcataaccctcaaatgcctcatagaagtatgagtacgcagttttccagtccttctcttctgctgcatggataatacccgactgcatgtccaaggtggcctgcaatttaggggggcagtagatggcatttgctgtggttcgagcagaagttaaggcagctcgggctttcggcaggttgctcagggcatggtatgttttgctttctaaaagctgtacttccaccaaaagagctttgtcgtccatctttttcaactcccgcagcagctgagaacccaaatgcaatgcttcctggtacctcttggtatcaaagtacaaagacaccagtcttgcctccaaagcttggcgtaagaaagttcttttctctgacttggcccattcgatgcactctaaacacagctcgacctcctgccctgtagctgcttccatatcaagaaacagatcaagaagagatcggaccaggcgagctgctttagccttgctgatggaattcaagaagggtcgtacatacttcaggagtcctccaagctctgcagcttgtccagtctttgccaggagagatcccagttccaggatgctctgctctttgacttgcactgcctcttcatcgttttcctgaatgtcacgcttcacgatggagtggaggatgtcgatggaggcctcccggtcggtgctgagtagagactgggctctctggaactccaccaccgccgccgccgccatcttaccgctctcgtcggacgcgtgggtcgacgatatcccgggaattccggaccggtaccagcctgctttttttaacacagctgttctatagtttcactaatagc

SEQ ID NO: 121991 - DNA, 637 bp, Homo Sapiens
  misc_feature (60)..(140): n is a, c, g, or t
  misc_feature (337)..(346): n is a, c, g, or t
  misc_feature (540)..(594): n is a, c, g, or t
ccttttacaaaatataaatttattatgaaaacctggaaggataatccaaggaaggtaaannnnnnnnnnnnnnnnnnnnnnnnnnnnnnnnnnnnnnnnnnnnnnnnnnnnnnnnnnnnnnnnnnnnnnnnnnnnnnnnntacagttcagcacaacagaagtgcagaagctcacctacccaaatggcattaaagcctcgctgtgtaatcgtgtcagaaaacaaagcatactgacacatagtgctctacttcccatccacttgagttctaagaggtaaattaaaaagctccctgggaaggggacatgaggttgctcaaaaacccaacaaagaaaattnnnnnnnnnngagagagagaaaccacaccccacagtctcatttccgatgttcattgtttaaaaaaggaataaatccatctgaaagtaggagaggaggagtgggagagggagagaagctcatggctttcacagacagcctgactcccctggaggggagaggaggaaggcagagagacatgatggtctcctggttgagaggggaannnnnnnnnnnnnnnnnnnnnnnnnnnnnnnnnnnnnnnnnnnnnnnnnnnnnnngggcaattaaaacactgacgactaatctagtttactgtgttta

SEQ ID NO: 121992 - DNA, 1057 bp, Homo Sapiens
  misc_feature (536)..(563): n is a, c, g, or t
  misc_feature (928)..(956): n is a, c, g, or t
ctctccaaggccgacgtggaaaggaaattatcacagatgattcttgacaagaaatttcatggtattttggaccaggggaagggtgtcttgattattttcgatgaacccccagtagataaaacttacgaagctgctctggaaacaattcagaacatgagcaaagtagtggattccctctacaacaaagccaagaaactgacataggtgagtgctggcttcaggaccccagggttgggcagctctgtcttctgcgtgtcgagactgaaaacctcctcctggtgtcctcatggcttcctgattgacactgctctgtcttctcttgcagagttggatctgtagcggtcctttggaaagtgtgtgtggcggaaaagtgaaaccttgggggaaaatgctaggagattcttttttctttttgttctacttttcgctcggaaagtttttaaatcctcatttggtgcatctgtattccagccaataggtgtgccagttttcatgtaatctttactggcccaacttgggagtggggaaattgcttnnnnnnnnnnnnnnnnnnnnnnnnnnnngattattctaaataaaaggaaaaaggcttacactacctaaagctgtgctctctgcctcctgggagagggccgcaaagccaggcaccccgccaaccactgggggtcctaatccacctgctgggcatcacctctcctcctcctcagaattgggtgtttgctgaccatcaaaagcaatgactttttattctgtttgtactgaaccaaaacaaacaactgtgtatagactgctgttttcttttttatttgaaatgaggcattttggtgttctttcccctaccatacggcctgtctgcccttccctccccacattggctccagcagagtagccgaaggtcctgccgccgccgccaccaccaccaccactnnnnnnnnnnnnnnnnnnnnnnnnnnnnngcctgcatagctccactctgacctgtgaaggaatggggatgaggccaggagctagtgtctaccacggccacacagggagcagtgtgggcccttagccccca

SEQ ID NO: 121993 - DNA, 964 bp, Homo Sapiens
ggccccgtggaggcccacccgccaattttaaaatggtcttccggttgtgccctccccgtgcattaccggaaagtgccaaagctttccccgcttcaccaaaagcccggggccatcttctgggggtgttggagcatgattttgcccagccaacatgtactttaggagatgtgatggccttggggctgtcgatggagtcataaccctcaaatgcctcatagaagtatgagtacgcagttttccagtccttctcttctgctgcatggataatacccgactgcatgtccaaggtggcctgcaatttaggggggcagtagatggcatttgctgtggttcgagcagaagttaaggcagctcgggctttcggcagtttgctcagggcatggtatgttttgctttctaaaagctgtacttccaccaaaagagctttgtcgtccatctttttcaactcccgcagcagctgagaacccaaatgcaatgcttcctggtacctcttggtatcaaagtacaaagacaccagtcttgcctccaaagcttggcgtaagaaagttcttttctctgacttggcccattcgatgcactctaaacacagctcgacctcctgccctgtagctgcttccatatcaagacacagatcaagaagagatcggaccaggcgagctgctttagccttgctgatggaattcaagaagggtcgtacatacttcaggagtcctccaagctctgcagcttgtccagtctttgccaggagagatcccagttccaggatgctctgctctttgacttgcactgcctcttcatcgttttcctgaatgtcacgcttcacgatggagtggaggatgtcgatggaggcctcccggtcggtgctgagtagagactgggctctctggaactccaccaccgccgccgccgccatcttacccggacgcgtgggtcgacgatatcccgggaattccggaccggtacc

SEQ ID NO: 121994 - DNA, 986 bp, Homo Sapiens
gtgaatataaacaagtggtgcaaaaaagcaggctggtaccggccggaattcccgggatatcgtcgacccacgcgtcgcccacgcgtcgcagcaacagccatttccaaagcagccaggaacatcaggtgcttatcctcttacttcaccccctacatcttatcatagcacagtcaatcagtctccctcaatgatgcacacacagtctccaggaaatctgcatgctgccagctcccccagtggggctttgagagccccatcaccagcgtcattgttccaactcctcccccatcctcgcatggaatctcaataggaccaggggccagttttgctagtccacatggaactcttgaccctagttccccatacactatggtgtcaccaagtggacgagcagggaactggccaggttctcctcaagtgtctggcccctcaccagcagcacgcatgcctgggaatgtcaccagccaacccctcactacattctccggttccagatgcttctcattcccctcgagctggaacaagttctcaaacaatgccaacaaacatgcctccacctcgtaaactacctcagcgctcttgggcggcatccatacctaccatcctcactcacagtgccttgaacattttactgctgccctctccaactccaggctggtgccccggctggcaggtagttacctttgttctccacttgagagattccttgggatcagtcatcatgagacgacatctttcaaagaattattcaacaagaaacgctgcagatgataaattctaatgaacccgggggtgatcctgtttaacgactggtgcgctgaaatgcgaagtagtcttagtcccaaaacaacaaaaggttcaggttaaaagtggactggaaatgcggcactcggaaccgtggaacctcagtcgggcactcttgacccgcgtgggggcccttaagttaaggtaactccccaggtagggcccactcccggggggcctag

SEQ ID NO: 121995 - DNA, 1078 bp, Homo Sapiens
ttctagttaagtttttcatgccaaatttgggcccaagttggttgcctgaataatttgggtcctccccggaggttttttccccggtaatttggtcagaacccttttccaaattctgcccagtgatcggttccttgctagctggaacccaggcatttttatgttttctgtctccctcctgccataccgaaaggcaagcttccccgctcaccaaaggccgggacatcttctgggggtgttgagcatgattttgcacagcagcatgtacttcaggagatgtgatggccttggggctgtcgatgggagtcataccccctcaaatgccgtcatagaagtatgagtacgcagttttccagtccttctcttctgctgcatggataatacccgactgcatgtccaaggtggcctgcaatttagggggggcagtagatggcatttgctgtggttcgagcagaagttaaggcagctcgggctttcggcaggttgctcagggcatggtatgttttgctttctaaaagctgtacttccaccaaaagagctttgtcgtccatctttttcaactcccgcagcagctgagaacccaaatgcaatgcttcctggtacctcttggtatcaaagtacaaagacaccagtcttgcctccaaagcttggcgtaagaaagttcttttctctgacttggcccattcgatgcactctaaacacagctcgacctcctgccctgtagctgcttccatatcaagaaacagatcaagaagagatcggaccaggcgagctgctttagccttgctgatggaattcaagaagggtcgtacatacttcaggagtcctccaagctctgcagcttgtccagtctttgccaggagagatcccagttccaggatgctctgctctttgacttgcactgcctcttcatcgttttcctgaatgtcacgcttcacgatggagtggaggatgtcgatggaggcctcccggtcggtgctgagtagagactgggctctctggaactccaccaccgccgccgccgccatcttaccgctctcacaccgtccccggccgatcccgggaattccggaccggtcca

SEQ ID NO: 121996 - DNA, 1075 bp, Homo Sapiens
  misc_feature (1023)..(1023): n is a, c, g, or t
  misc_feature (1065)..(1065): n is a, c, g, or t
gcatagtgactatagacagtgggcattaagcaggctgtcacggtccggaatccgtgatatcgtcgaccacgcgtcggcgagaactctggaactgggtattgataatgacgattcagaacatgaaaatgatgatgacaccaatcaaaggctacttgaatgataaggatgatgactctcttcctgcagaaactggccaaaaccatccatttttccgacgttcagactccatgacattccttgggtgtatacccccaaatccatttgaagtgcctctggctgaagccatccccttggctgatcagccacatctgttgcagccaaatgctagaaaggaggatcttttggccgtccaagtcagggtctttattcttcatctgccagtagtgggaaatgtttaatggaggttacagtggatagaaactgcctagaggttcttccaacaacaacatgtcttatgctgccaagtctgaaaaatgtaatgaacatgcaaaaccggcaaaaacaaagcaaggggaagaacagcccgtgctgccagaagaaactgagagttcaaaatcagggccatctgctcatgatcttgctgccacaattacaaagtagcttacctagcagaaataggacttactgaaagtgaagggccacctctcacatctttcaggccacagtgtagctttatgggaatggttatttcccatgatatgctgctaggacgttggcgcctttctttagaactgttcggcagggtattcatggaagatgttggagcagaacctggatcaatcctaactgaattgggtggttttgaggtaaaagaatcaaaattccgcagagaaatggaaaaactgagaaaccagcagtcaagagatttgtcactagaggttgatcgggatcgagatcttctcattcagcagactatgaggcagcttaacaatcactttggtcgaagatgtgctactacaccaatggctgtacacagagtaaaagtcacatttaaggatgagccaggagagggcagtggtgtancacgaagtttttatacagccattgcacaagcatttttatcanatgaaaaatt

SEQ ID NO: 121997 - DNA, 828 bp, Homo Sapiens
  misc_feature (779)..(779): n is a, c, g, or t
ccatttgaaataaatttattctgaaataaagaattatattatttgaaattacaaattaatacaaaataatcttagctttaatttctaaaatcaaattcactttaaaacgtcttctaggaaaatgactatacaggtcaacactggactttaagcgtgactaggcaatatgtacttcacgagattaaccacattagtagtttttgtcttatcatttgaaatgtgaatttactccccattttgtgctcaatactaaaacacaattcctcagcaaagatttgctctacctttatgcttcaaagttttccaaaaaataaaaattttttagttctataaattgaaaataatatattaatggcccagcattaaaatgtggaagagcaaatcagaattgtttttagctgaaggtatgtttccaagctaacacagacaagatgaaaccaaaaccattttatggaaatatactttagaaatatttttaattcactatattaaagtgtttttaatgatgaatttttaaaaatagaaacaaaaatttttagaaaggaatttgtaacactcagatctgtgtttattctatctaaactatcaaaatcttaaatgaaactgagacaaggtgattgcaaatactaaaaattcacttagtttgcttaactgagcatgcctgaagcattctgggcatgaaagatgacagtcatgaggccacagtgttgtcctgggtgcagcagctgagtgctacatgtgattcctaaatgacagagacgctcctcaggacacagtgngctggatgaatttcgacaacatcagctttatgtgagggtcagtgagcgg

SEQ ID NO: 121998 - DNA, 816 bp, Homo Sapiens
  misc_feature (237)..(250): n is a, c, g, or t
gagttatttacatttttaatgtaattttaaaatcctggatcccaagaagtcttggcttgaatttgcttttcttcataacaaacaattctgtctcccacttgaaattccatattgtcttcatctaaactgagaccacaatccattcccgttttgacaattgaaatgtcatctttatggtgtttcaatgaggttaatgagcccttccaaattacatgtccattacgggttagtttaaannnnnnnnnnnnnnctaactgtcccttttggactctgcagccagccacaggaacttttttcttcccttctgttacagagaaggtagctagtatagatgcctcacctactgggtgctcttccacagcacagggtaatctgctgctcagttcctcttgcaaatcttcaacaagacggtaaattattttgtgaagtttaatttttactcctttttttgcagctgactgttggataacattgcctgcattcacattaaagccatatataacaccatcaaatgtttcagcaaggttaacatcatttgcacttatatcacccactccaaaatgtactaattctagttcacactcgtgtgaagcatcataggtatctataatgttcaaaatggcctcaacagaaccatcaacatcacctttaataatcacagaaagtacatttgaatctctttcccttttctcttttggctttaagggtatttgttcttttctttttaaaaaccgtagaattgatctcttcttccacagtagatggcatacttctcacgggctttctgatgtgctctttgtgttcctttcgcttttc

SEQ ID NO: 121999 - DNA, 1068 bp, Homo Sapiens
ggcattgtactataacaagtggtaaaaaagcagcggtacggtcggaattcccgggatatcgtcgacccacgcgtcgatatttgctcaggagttttcttctctccctagtttcgtctgttttaactgttggctctttcccattttctgtctggtttcccatttgtcaatttaatgataatatattgtccctctccaggatatttgcagcccagcctccgataaaaacaatagcagccaccatttacttatccttactatgtgtacttttagactgccttttatctctaatcctcagaacaatgctgaaaggaagggtttattattttaatttaacagaagaggaaaccgaggcttagggaagttcaatgacccacccaaggtcacacaatgcagggtttggcacttaagaggctcaaagtaaatgtttgctgaatcaatgttgaaagaattagacctcaacccaggtctagttcactccaaagcctcttgctctttccacacactgcaccacacctgcctttgtggcccgcaaagctgtaaatttggcctgtgaaagtcagcaagtttctgaaaaggccttagcaacacagaccaagctgaagacaggggaggatgtcagctaccgtggatgggccccattccccgtgatctagttctgaacactcaaattcagaaagcaagccggctcacttgtcaagttagtgtttctaaacagatgattgcttctcagaacgtttttgactaaaggaaccaaggaggcaggtagccaaacctacaggcagcatcgaatagagatggggaattgctccgaagattgggttcccactttttaaatgtggtcgtgttacttgacaacatgaaaactttcctctcagcatttgtaagcattttagaaataaggatggaattttatggaaagggcaggggatccatcaatcaggctttccgtgtcctactctgtcactggctgtgtgcctttaaaccagtcacttgacttttctgggcttcagtttcctcaactgaaacataaaatttgtattatataaatatgtggtctcctcaagttat

SEQ ID NO: 122000 - DNA, 1109 bp, Homo Sapiens
  misc_feature (154)..(164): n is a, c, g, or t
gcatatagtgtgagtctactggctcagtcacaaagaaacaccaccatcaaaaagatatttaagtttaatacaaattttatacaaagaaaatgtgaaaaaatacttccatatgctaaaagcaattatgcttcacaaataaggccagctaggctannnnnnnnnnngacaactgcaattcacaaatgttctttctctcctgttttcttctaatactctcttatttcttctctaatatgggtaactagctggaaactgtacagttcgcatcctcttaacaatgaagagaaagtaaacaagactaaaatgtacaacaaaacgtactggaatgatatcgtacaattaattttctcatatacatacatcaccttttgctttttcatcaatgctttttgttttacacaacatacaaaatggctctacagcatacgtagtgtacggacagcatgacgggccttgctttctctcatactgcctgtgtttcatgcttacataaaaacgtgaaattccatcatataaataatacgtacatgcttcatcccagactcaaacgtcctctgcgtgcaccttgcctttgagtccttgcttccaagaagcacagcatctctgaccaagtgtgtgtgagtgtgtttaaaggaaccacaaagcaaagataaggtttctctttttttcagagttcatgatcctaagactttctgtgttctctcctgtgactgagctgagtggggcttgtttgtttctcttctgtaaacaaggatattgttttttcccttttaggagtagagtcatcatttcaatcacatgaaagaaactagcttctccctgtgtccgtctggtccggagagcttgcgttttaggaacgtggtaacgtagtagctgaaaggagccaacggcttgatgggatagtctgtgccgaaactcccgatcccaacatgctgcgtacagacacacgagcgaaaacggttcgccctcccctgggtatccaaggatgaggacgtgagtatgaaagtggtccccgggcccagtatccattccgtcgtgtgacagacaggctaactgaccatcccttctccaataccaaaacattcttttttgttgttggggttggttgc

SEQ ID NO: 122001 - DNA, 931 bp, Homo Sapiens
  misc_feature (696)..(696): n is a, c, g, or t
actttaaaatgctttattggaattattttgataaaagcaaatacttgtatataagacaaatataggaaatagaagctatctacttgaagtgccccctaattttcaggcatttttcccccaataaggtgacagctgctcacacaggataatacaggaaagttgtaagttcttaggatatgcccagcaccaggcggaagatattgtgtcagcaaattccatagcaaggaaggagaacaggcatggctctccacctctcccagcctgaaggtcaagttgcaggaatcactgtctaagcatgacagccatacaaagcttctctccatgagggggagattccaaaccttagaccttcactcagattagtgcagaatctctgtgaaggtgcattgtccctggctgggcttccagagttcattctttactcaaggataacacggcgatgaacgtcttacaactcctaacggggaaatgaaacagaacaaaagattaggaatcttggccatgaactcgttgagcctgagaaatgctggaccgagggggcggtcagagcgctgcggtgatggcatcagcgacacactcagagttacctggggtcatcatcactcccttcctatccccgggcgaccgccacccccattttgcaatcactcgcccaaccccactcacagttgttttgagtcagcaggggctgtgggngcgctagccgagttccccctggcacgagctaggtcagttccaagcaaagacaccagaaactccagtgtgcaacggtagttcacccaactgcactggggaacgcctctcctaccccaatcaggcgcgacgtgggcgcccgcggctgctgcgcaaggcagcgcaagcgttgggatccctgctcccctcactcacagtcgggcactacactctcatatgccaccacgagccacttcgc

SEQ ID NO: 122002 - DNA, 863 bp, Homo Sapiens
  misc_feature (433)..(433): n is a, c, g, or t
cctttaactttaaaatgctttattggaattattttgataaaagccaaatacttgtatataagacaaatataggaaatagaagctatctacttgaagtgccccctaattttcaggcatttttcccccaataaggtgacagctgctcacacaggataatacaggaaagttgtaagttcttaggatatgcccagcaccaggcggaagatattgtgtcagcaaattccatagcaaggaaggagaacaggcatggctctccacctctcccagcctgaaggtcaagttgcaggaatcactgtctaagcatgacagccatacaaagcttctctccatgaggggtaggttcttaggctttgcccttcactcagattcgtgcagatatctgtgtcagcaagttgcattgtccctggctggagaacttgcatggttcattccnatgagggggagattccaaaccttagaccttcactcagattagtgcagaatctctgtgaaggtgcattgtccctggctgggcttccagagttcattctttactcaaggataacacggcgatgaacgtcttacaactcagttgttttgagtcagcaggggctgtggggccgctagccgagttccccctgccacgagctaggtcagttccaagcaaagacaccagaaactccagtgtgcaacggtagttcacccaactgcactggggaccgccctctcctaccccagccaggccgcgacgtggccgcccgccggctgctgcgcaaaggcagcgcaagccgttgggatcccctgctccccctcactcaacagtcgggccattacaactctcatactgccaacccacgcctcgtgccgaattcgccacccaggcc

SEQ ID NO: 122003 - DNA, 915 bp, Homo Sapiens
  misc_feature (26)..(26): n is a, c, g, or t
  misc_feature (98)..(98): n is a, c, g, or t
  misc_feature (100)..(100): n is a, c, g, or t
  misc_feature (102)..(104): n is a, c, g, or t
  misc_feature (110)..(115): n is a, c, g, or t
  misc_feature (117)..(126): n is a, c, g, or t
tagggcccattttccactttccttantggggccccgcgcgcccaaagggaaaggttttgaaaaactttttcgaaggccggaggccggccgaataaggntntnnntttttnnnnnntnnnnnnnnnnttaaaaatgctttattggaattattttgataaaagcaaatacttgtatataagacaaatataggaaatagaagctatctacttgaagtgccccctaattttcaggcatttttcccccaataaggtgacagctgctcacacaggataatacaggaaagttgtaagttcttaggatatgcccagcaccaggcggaagatattgtgtcagcaaattccatagcaaggaaggagaacaggcatggctctccacctctcccagcctgaaggtcaagttgcaggaatcactgtctaagcatgacagccatacaaagcttctctccatgagggggagattccaaaccttagaccttcactcagattagtgcagaatctctgtgaaggtgcattgtccctggctgggcttccagagttcattctttactcaaggataacacggcgatgaacgtcttacaactcagttgttttgagtcagcaggggctgtggggccgctagccgagttccccctgccacgagctaggtcagttccaagcaaagacaccagaaactccagtgtgcaacggtagttcacccaactgcactggggaccgccctctcctaccccagccaggccgcgacgtggccgcccgccggctgctgcgcaaaggcagcgcaagccgttgggatcccctgctccccctcactcaacagtcgggccattacaactctcatactgccaacccacgagcccaccctcgtgccgaattcgccacccaggcctcgctacctaaggaccgttatagttacctgccc

SEQ ID NO: 122004 - DNA, 816 bp, Homo Sapiens
  misc_feature (327)..(375): n is a, c, g, or t
gggctttttgcgaagtgggctcgtgggttggcagtatgagagttgtaatggcccgactgttgagtgagggggagcaggggatcccaacggcttgcgctgcctttgcgcagcagccaggcgggcggccacgtcgcggcctggctggggtaggagagggcggtccccagtgcagttgggtgaactacccgttgcacactggagtttctggtgtctttgcttggaactgacctagctcgtggcagggggaactccggctagcggccccacaagcccctgctgactcaaaacaactgagttgtaagacgttcatcgccgtgttatccttgnnnnnnnnnnnnnnnnnnnnnnnnnnnnnnnnnnnnnnnnnnnnnnnnngggctcaagcagtcctcctgcctcagtctcccaaagtgctggaattacggggaatgaactctggaagcccagccagggacaatgcaccttcacagagattctgcactaatctgagtgaaggtctaaggtttggaatctccccctcatggagagaagctttgtatggctgtcatgcttagacagtgattccctgcaacttgaccttcaggctgggagaggtggagagccatgcctgttcgtccttccttgctatggaattttgctgacacaatatcttccgcctggtgctgggcatatcctaagaacttacaactttcctgtattatcctgtgtgagcacctgtcaccttttggggggaaaatgcctgaaaatacggggcacttcaaggaaatagcttctattccctaaatttgcctatataccagaatttgctttattcat

SEQ ID NO: 122005 - DNA, 804 bp, Homo Sapiens
  misc_feature (47)..(47): n is a, c, g, or t
  misc_feature (49)..(50): n is a, c, g, or t
  misc_feature (77)..(79): n is a, c, g, or t
  misc_feature (82)..(82): n is a, c, g, or t
  misc_feature (85)..(85): n is a, c, g, or t
  misc_feature (87)..(89): n is a, c, g, or t
  misc_feature (92)..(95): n is a, c, g, or t
  misc_feature (527)..(569): n is a, c, g, or t
  misc_feature (577)..(625): n is a, c, g, or t
aatgttttggaaagcttttcgagggccgaaggcggcccaacatgtananntgttttttgtaagtattaggtcccttnnngtnaangnnnagnnnntgtggcgaactttaaaatgctttattggaattattttggataaaagcaaatacttgtatataaggccaaatataggaaatagaagctatctacttgaagtgccccgtaatttttcagggcatttttcccccaataagggtgacagctgctcacacaggataatacaggaaagttgtaagttcttgggatatgcccagcaccaggcggaagatattgtgtcagcaaattccatagcaaggaaggagaacaggcatggctctccacctctcccagcctgaaggtcaagttgcaggaatcactgtctaagcatgacagccatacaaagcttctctccatgagggggagattccaaaccttagaccttcactcagattagtgcagaatctctgtgaaggtgcattgtccctggctgggcttccagagttcattccnnnnnnnnnnnnnnnnnnnnnnnnnnnnnnnnnnnnnnnnnnntgagcccnnnnnnnnnnnnnnnnnnnnnnnnnnnnnnnnnnnnnnnnnnnnnnnnncaaggataacacggcgatgaacgtcttacaactccccagccaggccgcgacgtggccgcccgccggctgctgcgcaaaggcagcgcaagccgttgggatcccctgctccccctcactcaacagtcgggccattacaactctcatactgccaacccacgagcccacttcgcaaaaagccc

SEQ ID NO: 122006 - DNA, 1442 bp, Homo Sapiens
  misc_feature (118)..(171): n is a, c, g, or t
gaaggttctcaagaattttattataaaacagaacaatgacacaatataagcttacacattaatatttacattatattcaaaatatattacagctttaatttatgaacagaaatatccnnnnnnnnnnnnnnnnnnnnnnnnnnnnnnnnnnnnnnnnnnnnnnnnnnnnnnacttgatcttgtaatttagaaaagaatgcttgagaggactttaaggccttgtctttaccttcatcctttatgaaggaagctttgccagttttggtcagctgttttaacttctccgaagctactgttttgctgtatttccctgcttgatctacactgctcttttcaagcagttttctccgcttctccttctcttttattttcatacgcttttgatatttctttttccttcgctctcgtttcttgtctgtagctgttttttcagcagctgtttttatatctccagctttatttttctccttgatctcctctggggccaggagagctgcatcactaacactcactggggctacttcctccatggttatggctggcagatttgacacaactttaatctctggtacaggcggtttagggataaagtggaagtttgagagggcatccaattttaagaagagggaatccatcatcttctgaatttctacatgttctggattttcttcttctgctgttttttgctggttgagtttgatgtactcctgttcataaatttcagcaaggctcaatttactcttctcatggtctaaggttaaacgctttttatattcatatgcatcctctttaggtttttctttacgtactacatcatcccaagcctgatctcttatcctctgtttaatgatatcttccagttgaagggtggtttcctctgtaatcacaggtgccatccggacagcatggtcaaagtgtagggtctcctcccaggagggtgttgtctggcctcttctgtggtgtcacttccccttgaagctgccacggctttttttctaacaactctttttctaaagatgcaattttttcattcatcttttcctgtcttttttcaaaggaggatttaacttcatcagaatttttctttacatttaaaacacctgtatcttcagtttccgcatcatctggtaaagcaaaggtcactcttttcaagctttctttatgttgtttattgtcttcattttcttgaaggtcatcatcttcatccgtttccgaaatacttagttcttctgcttcttcttcagcaatttcatcatcttctttgtttgaatccagctcatcatcatgaacatttgttatgtcttcatcactttcaactggatcaaaaaaatctttgtatttcagatttctggaacttttacctgacttaagttttttacttccaaacagtcccccttcatcttcatcagaatcaatatcttcaaaaaaatcaatatcttccc

SEQ ID NO: 122007 - DNA, 367 bp, Homo Sapiens
gctttaatttatgaacagaaatatcctgtcttttcttctttttcttttctggtttctttgcatcattgatttgcatttttacttgatcttgtaatttagaaaagaatgcttgagaggactttaaggccttgtctttaccttcatcctttatgaaggaagctttgccagttttggtcagctgttttaacttctccgaagctactgttttgctgtatttccctgcttgatctacactgctcttttcaagcagggttctccgcttctccttctgttttattgtcatacgctggagatatttctttttccttcgctctcgatgcttggctgcagctgctctttcagcagctgtttgtatatctccagccct

SEQ ID NO: 122008 - DNA, 1362 bp, Homo Sapiens
  misc_feature (795)..(814): n is a, c, g, or t
  misc_feature (832)..(1306): n is a, c, g, or t
tttttttgagttgttgtttgtttttagatccacagtacatgagaatccttttttgacaagccttggaaagctgacactgtctctttttcctccctctatacgaaggatgtatttaaatgaatgctggtcagtgggacattttgtcaactatgggtattgggtgcttaactgtctaatattgccatgtgaatgttgtatacgattgtaaggcttatgtcactaaagatttttattctgattttttcataatcaaaggtcatatgatactgtatagacaagctttgtagtgaagtatagtagcaataatttctgtacctgatcaagtttattgcagcctttcttttcctatttcttttttttaagggttagtattaacaaatggcaatgagtagaaaagttaacatgaagattttagaaggagagaacttacaggacacagatttgtgattctttgactgtgacactattggatgtgattctaaaagcttttattgagcattgtcaaatttgtaagcttcatagggatggacatcatatctataatgcccttctatatgtgctaccatagatgtgacatttttgaccttaatatcgtctttgaaaatgttaaattgagaaacctgttaacttacattttatgaattggcacattgtattacttactgcaagagatatttcattttcagcacagtgcaaaagttctttaaaatgcatatgtctttttttctaattccgttttgttttaaagcacattttaaatgtagttttctcatttagtaaaagttgtctaattgnnnnnnnnnnnnnnnnnnnncctcgtgccgaattcttnnnnnnnnnnnnnnnnnnnnnnnnnnnnnnnnnnnnnnnnnnnnnnnnnnnnnnnnnnnnnnnnnnnnnnnnnnnnnnnnnnnnnnnnnnnnnnnnnnnnnnnnnnnnnnnnnnnnnnnnnnnnnnnnnnnnnnnnnnnnnnnnnnnnnnnnnnnnnnnnnnnnnnnnnnnnnnnnnnnnnnnnnnnnnnnnnnnnnnnnnnnnnnnnnnnnnnnnnnnnnnnnnnnnnnnnnnnnnnnnnnnnnnnnnnnnnnnnnnnnnnnnnnnnnnnnnnnnnnnnnnnnnnnnnnnnnnnnnnnnnnnnnnnnnnnnnnnnnnnnnnnnnnnnnnnnnnnnnnnnnnnnnnnnnnnnnnnnnnnnnnnnnnnnnnnnnnnnnnnnnnnnnnnnnnnnnnnnnnnnnnnnnnnnnnnnnnnnnnnnnnnnnnnnnnnnnnnnnnnnnnnnnnnnnnnnnnnnnnnnnnnnnnnnnnnnnnncacaaaatcgacgtcagtcagaggtgcgaaccgacagactataaatacagcgttcc

SEQ ID NO: 122009 - DNA, 931 bp, Homo Sapiens
  misc_feature (44)..(53): n is a, c, g, or t
ctttctgcaacctgtactaccagattcttcctgtaaactaaatnnnnnnnnnntgatagtgcattttggtggtaattttaaaggtcttgattaggtcaataattgtttaagcaccgtctcattcatgttttctactttcatttcttaagcttttaaaattcatttaattaatattctgttgttgttttggggagtattcccaatgtatctttgatatttaacctggttaatttgtggacagtcacaacaatggatagaattatgtagtctccgttatcactaaaatgttatcttcaagagatgttaaatatttatatgctttgttgactagctgaaatgtgaattctgttagtgttgactaaagaatctggtagttgcttaattgggcaattaaacaatttatggctctattttgtaaaacaaactactggtaattatttttaatacctattttcattctgattactctttttttaagttaaagactatcagttaattaagattgagtttttatgatggttaaaaataattctctattggtttttcaatatatttttctgtgtgttctcagattatatatttccctcaatttagagtttgctaagtgaaataaactggttcactagtagagaaagaattacgtcgcttaatacctaatatcatagttgtacaatatgaacaaagaatacaaagtagcagtaaaatttatatactggaaaacaccaaaaatttagatgccttaatagtatatgcagttgaaatactcagctgtcccttttaaaaaataattccttggaacgtgcctggtggttaaaaattacgattcctcattattccaaggcttactttttgaagatcccctctgcaaaaattatagctcacttatctaaagggtgagagcctggataagattccaggtaatgtacattag

SEQ ID NO: 122010 - DNA, 606 bp, Homo Sapiens
tgaatagaagccattttaaagaagagaaatattctacaacagatgaagaaagttttaatttcttttcacattaaacattgtttaccacaatcagctaacagaaattactgtaacattggtcacgatgacttcataaaactaaagataaatgttatgaggaaacttcatttaacgtgaatggtaatgttagatactgtatttttccatggtaaaatacaacttatcttgaagagaaagcaaatagttcagatcagggagacatgctgaggttttaataaagaaaagcttggccttgtccagaacacttaacaaagttcaggacaatttaggtaaaagagatgagtgagacaccagcgttaggcagggacataggctcatcattcaggctttatgtacattactggatctatgcagctctcacctttagataagtgagctatatttttggcagagggatcttcaaaagtagccttggatatgaggaatcgtattttaaccaccaggcagtccaaggaattatttttaaagggacagctgagtatttcacgtatatactattaaggcatctaaatttttggtgttttcagtatataattttactgctac

SEQ ID NO: 122011 - DNA, 1686 bp, Homo Sapiens
tattaggaatgttggaacggtagttgaaatggcaacttttattaatgatgaatggcaatgacttttaagtttgatcacagagtgtttgcatattttcttactatttttggtatgatttaaaaattattggttcattaaccatttaaaagaggaataattcagtagaggcactaggaggttgaacaggatcattcttcagtaatattcagccttgacaagcacagcggctacaatacccaggaaagtgagcaacaggagaccgagtttttctttgttgaaccgtttcaagagaaaaaattttccccaatccacctttgactggctgttgggaggatatctgagtttgttagcaccttctctctttaaactttttaataaacagggacgctgatgagaaaaagtatcaaaactatgttttccgtgataagctcccatcccactggaacccactcctccaaatgggaaagagttgagcgtgaagtgcataatgacgtcattgcctgtgacacctccactggatgtctcatcaatcatccgtttgatgagcttatggttatgcgaaaatacataaagagccagaggcttttcacgttcatttatgaaatttatggcctcatctacatttttcacaggcactattggaagaattggtccaaaaatttcttcttgcatcaccttggttttaggatcaacatcggtaagtactgttggggctatgtagcgtgtggcctcatcagtctccccaccaaaagctatcttttgtccttcaagcaaacttagtatcctcttaaaatgacgaagattgatgatcctttcataatcaggagactcttttatattttctccataaaattccttcactgtttccttaatcttccatacaatttgattttggagggatgcttcacagagaatatagtcgggtgcaatgcaggtttggccacaattcatgtaattttccccaggttatgcgtctgcaaacaatgtccaggtcacaatctttatcaatataacatggacttttccctcccagttcaagagtcacaggggtcagatgcttggcagcagcttccatgacaattttgccaaccgcagtgtttcccgtatagaaaatgtggtcaaatcgctgcttcaggagctccgtggtttcctcaacaccaccattaataacaatatagagatcctggtctaaatactgagggagaagctttgccaagatcttggctgtattttcactcagttcagaaggctttataatcacagcatttcctgcagcgatggctcctatcagtggctgaatggtgagaacgaaggggtaattccaagctccgattatcagcaccactcccagaggctgtggctgaatataggcctcatccagcatggtgagcacgttcttcttaactggtttagcagtaacccattcaggaagattctcaaagcataaaatcaatttccccaaggacagtaatgacttcctgactgtacacattgaattcactcttgcacaggtcggcggcgatggccgtcaggatatccttctcgcgctcctgcaccatcctccgcagggcctccagctgctgcagccgaaaccgcagaggtcgcgaccggccggacaggaacgcctgtcggacccgccggacttcgagctccatggcctgtcctgcagagaactgcacggtccgg

SEQ ID NO: 122012 - DNA, 716 bp, Homo Sapiens
ttgtttaacattaagccatattttcccattttaataaatcgcttagcttaaaacagtacaatgggaaaatatggcttaatgttaaacaaaacaaatgaaaatcaaattaacattacttccccactctcatttcttcccccccaattaaaagaacccaagtacttatttcttaccatctgtcccagtaatccgccacacattttctgcttcctttaagcttctgatgtctccattagcaattacaggtatagacatattttccttaattattttaatggaatcatagtgcactggctgatgtctttcttcagcagttcttccatggactgtaatccatgaaactcctgttgcttcagccttttgacaaagatctacagttcttttaaggtcatcatggatccttattttaatagaaactgataatccaggggtttccacttgatttcttacttgtttcaccatgtcttgaacaagctctggcttgtttattaagcaagccccataaccttctgccattgcccacctctgagggcaaccacagttaatgtctattccattcgcataaggacagactatacgagcagcatcagataaaagtcttgcatcgttagcagcaaactgaacaatcaatgggcaatcaccttgatttgtggtaaattcgctgtctctggcttttatagatttgacaaatcagcggcaacaatcattggtgtgta

SEQ ID NO: 122013 - DNA, 711 bp, Homo Sapiens
  misc_feature (22)..(22): n is a, c, g, or t
aactaaagaaagtaaagttctnaaaaaatttaagatggtgtatacaaaaaaaaaagtttgggtctaacgtgtccaccaaagactgtcaagtgaagaatggtggagattcttggtgtttgagcagccaacctggatgagtgacttcagggacagagcagaggaaagcaaaatgaatttcctttatttaccccaaaacttgttgactgaatttttgtataggtccgggaaaataagcctaaacaaatagttgtagccttagaaaaactgttttcccatttctttctgagttagaatcagcatagcctccctgtcgccttaaatgtaaaaatcctattttgattaataccccagcctaagagttatagcaatacgagagactgaatctatttttgtttcgggtctttacctcatagtatgaaattagtaagacactgcatagattttgccctgaatactggtgtgcccaggtatgccgtgctctctctctgtttccagtggtggtaattttaaggcctaaagaaagctggggttaatcctgaagctaaaagtaaatgtttcttgaattgattttgttctgtggtacaaataacatctatgaatatcatatctgtatatatctgaaccaagttgtgtgcagagaggttgatataactatatttacagaaaatgatttttacaattaaagttcacattttaacatgatgttaccat

SEQ ID NO: 122014 - DNA, 782 bp, Homo Sapiens
catgttaaaatgggaactttaattgtaaaaatcattttctgtaaatatagttatatcaacctctctgcacacaacttggttcaaatatatacagatatgatattcatagatgttatttgtcccacagaacaaaatcaattcaagaaacatttacttttagcttcaggattaaccccagctttctttaggccttaaaattaccaccactggaaacagagagagagcacggcatacctgggcacaccagtattcagggcaaaatctatgcagggtcttactaatttcatactatgaggtaaagacccaaacttttttttgtataacaccatcttaaaattttttagtatactttatctttctttagtttacccaaaggaaggagttttcactctaatgtcaatatatttgcaaccatccaactcaaagacctctgtgtcgactgttcactttgtggatcatctctggctcatttaaaacatcctgcctcatccccacattcgctgactggccttagaaagcaaagtaaatttattgttagtctaaataagcattctatagcaaacataagtaattcacacctggcctactatgaaaattaaattttctgaatttagatcatattagctctaaaagccccacagtatgctaaaaatcgaaaataaattctaaaaagaggaaagcaaggcttttgtctccatcatcatttctttatatagcactagaaaattcttattccccttctaaatttgcaatttcatccaactgcccctaaattctagttc

SEQ ID NO: 122015 - DNA, 1180 bp, Homo Sapiens
ttttttctaagaaaagctatatatttttatttattaaatagatttaattatatgtcttctgaaatacaaaagatagaataaatcatagcataaaagggaataagatatgataacatcatgatggccaattaatacacataaatcgactttttctggacagacaccaaattacttaagaggattaagagataacttcagaagcagcactacctggaagattatttggcatttaaatactgatttccaaagtgctagatgggcaagtccaagcaagcatttgtggtcacatgcacatacatctcaacagttacagatgatgagaaactgtcactagtacaatttgaaacaaattcacctactctaactgctcacctgaaatgatcttgaacaaaatctctagaagtgtggcttgcaatttttttcttcagacatattctgcctcattttatcatctaagcaggcaatcctatcaggtctgagtagggcaaggcattgtgtttcttacatgcagaacatggagtttttctatttggttccatcaactcccaagcatttcaggcccacggaggtgagagttccttcaatgctgacaggtttgctatttctaacctatcatcgacagccttcaaggggtcccgtcgaggcatcaagactgctgtctgtgtctgaggccagcgtctgctcagtggacatggatgaaatgtcattgatcgatgaagactgagaaggagtggcgttgctacttactgctgcatctgaaggctgatcttttacaacaccattcttgcttctttcttcccaatccatgacttctttgtaaattagctctttccattcttcaattgcatgttctctttcttccaactgggcatcatgaatttgaggtggtggggcttctgcttcggcggggtcataccaaacagtgatgtatgggtgacgcagagcttcgtctacagagatccgcttgtcaggatcaatcactaacatttttgataacagatctctggcttgacttgtttttattttgtctcgctcagattctgatgggaatatccaatctggaaagagttcttcaaatttgattccaggatactttggtctgttttcgacataattcctcacacgttggctgaagtttcttcatgaactctgctgatggtgttcccagctgctcaataac

SEQ ID NO: 122016 - DNA, 940 bp, Homo Sapiens
  misc_feature (825)..(859): n is a, c, g, or t
  misc_feature (903)..(903): n is a, c, g, or t
tttttaatctacagattggtatttaggaaaaagaaaaacaagttcaataacttagttaaatataaggctcacctaggttttgtcaattaaagttcacaacctgaataagcaaagactggggcttttctgattaaggcacagtttaccttcatgcggacagaatcaaatcttttctttttccttaaacaatcacactgtattaaagggtgcaggaaaaggtggggaggaaggacctttttcatcgcacagactgtcacatctgcttctgactctagaatctgcattaagtgttcttcttacctgaaaactttcttgaattccagtctgactgtaactgtcaacataagattctttcagacatgatttgattatcttttattttggcctaaggccttcaattaagccgtcttatagaggataaagcttctagacctttaagctttctctcctcagtgccttcgtacctcagacttcaggcctaaaatgactttctctcccaaaacacaggtttttagaataccaacatgaaagagtgaaagcaccacctgaattacataacacaagtataagagaaaaaggatatcttactttctattttgtctcgctcagattctgactgggaatactccaatctggcaaagagttcttcaaatttgattccaggatactcttggtctgttttcgacataattcctcacagttggctgaagtttcttcactgaactctgctgatggtgttcccagctgctcaataactttattccactgatcaatcccggccgtaatggccgaattcccgggcatatgtccggtaccgtcgactgnnnnnnnnnnnnnnnnnnnnnnnnnnnnnnnnnnncggccgcttcctcgctcactactcgctgcgctcgtcgttcgctngtgacgcctagcgccctatagtgatctatatatgttt

SEQ ID NO: 122017 - DNA, 1705 bp, Homo Sapiens
  misc_feature (1509)..(1509): n is a, c, g, or t
  misc_feature (1511)..(1512): n is a, c, g, or t
  misc_feature (1525)..(1525): n is a, c, g, or t
  misc_feature (1588)..(1588): n is a, c, g, or t
  misc_feature (1594)..(1594): n is a, c, g, or t
tagcagtgagtactgtgtggaaaagtggtgtcgtgatacttcctcaactgttcagcactcagaatggcagatgttattcgagctgaactcttagaaattatcaagcgaatcgagcttccctatgcagaacctgcttttggctccaaggaaaacactctaaacataaagaaagctcttctgtccggttactttatgcagattgctcgggatgttgatggatcaggtaactacttaatgctgacacataagcaggttgctcagctgcatcccctgtctggttactcaatcaccaagaagatgccagagtgggtcctcttccataaattcagcatttctgagaacaactacatcaggattacctcagaaatctctcctgaactatttatgcagctggtaccacaatactatttcagtaatctgcctcctagtgaaagtaaggacattctacagcaagtagtggatcacctatcccctgtgtcaacaatgaataaggaacagcaaatgtgtgagacgtgccctgaaactgaacagagatgcactctccagtgactccccagcaaacacaaggtgcagcagggtcccaaaggtagctggatggctgaactgctggatatgggagatacatgacgcgaagacggatttcacatccacaggacggtcttgaagaaaataacactgtgtatattattttaaaataaaaaatagaagtttttattgagttctttaaattacgactccatgcttttcttcttcttggaaaagtttttaaatcaaccactcataatttgaccaaaattttaaaaaactggtattttgtaaatgtgtcagagacacatgggacagaaccctactttttgtagaggaacttaatctgaataaagtctgagtttttcagtaaatctccactgagttttctggtaattttacaaaaacaagcccatcactgtccattggaaatgggttagacagatagatattctttcagtttatccatgatttcgttcatcttgtcgcctggaattaacatcacagttcgcaagggcgtcattggtacgtcatcaaaagaccatttgcctcccagacaagtgtcgctctcctcctgcactgagtagttgaacttgagaattgccttctcatagaaaaattcttcctctgcatttgcaaacattaacgcagctttctttttgttgctaggtttctttttggaattgttttttcctgcttccacaaatgtcttactaatcagaaggtaaaagtagcacttcccacatggcttattggttctgtgtgcccccgccagttctttctgaagctgctggtacatgggcagagcgatctgtggagggacattaatgaatctttcacttaggagaaggccacaggcttggtggtgtcatttaaaaacttgtccagctgttcaacatgctcttttcacagttcttctcacagaagcgtagaacaactcttgattttgttcaacacactgggtacctttcttttcagtaattnannaggctatgaacanaactcatctcatcatatctcattgcgtctctgaacaccgttgctatcaactccataggtctgntgatanaatcgttgtctgcatgtcaaagagcttaaaagcgcgcagatcttatcgtcaacatacgaagaaagtaatcaatcatccgagaccgcctaacttctgacgcaacctaccatc

SEQ ID NO: 122018 - DNA, 1635 bp, Homo Sapiens
  misc_feature (1482)..(1516): n is a, c, g, or t
  misc_feature (1520)..(1571): n is a, c, g, or t
  misc_feature (1592)..(1592): n is a, c, g, or t
  misc_feature (1600)..(1600): n is a, c, g, or t
aaaggtgatagtcatctttaatagtattttttctttagctaaggtactagcaaagcaaattgtttgactcttaaactgatctcttcttatgaacaatttactggatttttttgatagcccctttatcagagtaattagtatcttaccccagagaacttactagaaacttgtttcaagtatactgactttaattttagcaaattttggcttataattgacgataaaattttcatcctaatcattacaaaatattctttattacttttaaattaaaaattagaaaaaatgaaaacaaggtatctcaaactctgaaagacactgagacttcagaaaatcctaacatttgagatctcaaacgaaactaacaaatattgactaatttaccattactaggtgccgagatgttttatccctccaggagactatgagcctcctaaatatccctgacttattatgacagagcaattccaacagtcatgaaggttccctggaaatcacttagagttgatcttgattgaattagtccagccttcagagaaaccagggctgtcacttgcccccgtgaaccaccattgtgctgtatcggaactggttccaatcctcttcttgtgtctggacctccaagcacctcaggttttccctgctcctcatagaaaaattcttcctctgcatttgcaaacattaacgcagctttctttttgttgctaggtttctttttggaattgttttttcctgcttccacaaatgtcttactaatcagaaggtaaaagtagcacttcccacatggcttattggttctgtgtgcccccgccagttctttctgaagctgctggtacatgggcagagcgatctgtggagggacattaatgaatctttcacttaggagaaggcccacaggcttggtggtgtcatttaaaaacttgtccagctgttcaaccatgctcttttcacagttcttctcacagaagcgtagaaccaactcttgaatttgttcaacacactgggtaccctttctttcagttaaatttaaaaggcttatgaaaccaaaaacctcatcttcatccatatcatcattgctgtcttctgaaacatccgtttgcttaatcacactcccaatatggttctgttgaattaagagatctgttagttctgcagtgttcacaggagcctttagaaaaagctgctgcagtaatttcttaattccgtcataatcattatctgatagggaataagcttcaaattcaatattcacttcctcgtcaatgacctcgtcctcttcatccttttccttgtcactgtcatcatcgtcttcatcctcattttcgacttctttttcctcttcctcgtcgcgctggactgggggatccggcggctgcggaaccccactttccacggcacgccgcttagacctggacgccatgttgccgctcccccggccgtaatggccgaattcccgggcatatgtccggtaccgtcgactgnnnnnnnnnnnnnnnnnnnnnnnnnnnnnnnnnnncggnnnnnnnnnnnnnnnnnnnnnnnnnnnnnnnnnnnnnnnnnnnnnnnnnnnntagcgccctatagtgagtatngtgttttnggcgtgtgtgtgcatggggttgtgatggaggattt

SEQ ID NO: 122019 - DNA, 1023 bp, Homo Sapiens
  misc_feature (212)..(212): n is a, c, g, or t
  misc_feature (214)..(222): n is a, c, g, or t
cccgggggcggtgttttagtgttggggggaaattcccaaggcccttaggttcatgaacccggggtttttcctttaggagaaccaggttatggccccagggttccacttacccttatggggccccggcgccgcccaaaggaatgggtttaaggaaagcttcttgagggggcggagggcggcccgaccaagatttagtttaatggggaaatggntnnnnnnnnncaataaaaaaatagaagtttttattgagttctttaaattacgacttccatgcttttcttcttctggaaaagtttttaaatcaacccactcataatttgaccaaaattttaaaaaaactggtattttgtaaaaggtgtcagagacacatgggacagaaccctactttttgtagaggaacttaatctgaataaagtctgagtttttcagtaaatctccactgagttttctgggtaattttacaaaaacaagcccatcactgtccattggaaatgggttagacagatagatattctttcagtttatccatgatttcacagttcgcaagggcgtcattggtacgtcatcaaaagaccatttgcctcccagacaagtgtcgctctcctcctgcactgagtagttgaacttgagaattgccttctcatagaaaaattcttcctctgcatttgcaaacattaacgcagctttctttttgttgctaggtttctttttggaattgttttttcctgcttccacaaatgtcttactaatcagaaggtaaaagtagcacttcccacatggcttattggttctgtgtgcccccgccagttctttctgaagctgctggtacatgggcagagcgatctgtggagggacattaatgaatctttcacttaggagaaggcccacaggcttggtggtgtcatttaaaaacttgtccagctgttcaaccatgctcttttcacagttcttctcacagaagcgtagaaccaactcttgaatatgttccccacactgggtaccctttctttagttaaatttaaa

SEQ ID NO: 122020 - DNA, 920 bp, Homo Sapiens
ccaagaaagaaaacctcatgtccttatttttactaatgtatagctgatgatttctgtgataagctgtaaatttaaaagcgtgactctcatttgaataactgtagagtaagcaaaccagaaattctcaatctattggcaacgggacaggttattgggttagattttagggtacataaactttatatgagagggactgtctgttggaagcataatacactatctaagatgttgggaattgtgtttattccatgttaacagtgaatggaaagtaggcattgttaaggctttaaaaattctcctttgatattagcagtctattaaaaacatgacttgggtaaaccaagtagatctcatgaaataggcttgaggaaatatttcaaaggccctaaagttctgaaacagacttccttttttgagtaggatacttatttctttaaggtttcttaaggggaggcttcaatctatgttataaattatattttaaaagattgtttttaataatgctatgcattttaagtacaattcaaacctatcctttatattaaaaaggaaaataatatcaaaatatttatctggcaaaagaacttcatgattctgaagaaaccaccaccaaagttctcttgataccactgaggcaatgtttgatttcttacccatcactcagggagtttgaaataagcatgacagaagtacaaaatgtgaactaaaaacattaaacttggctccatgtggagatgaattatgggcagcctctccaccattacagagaaaaagatggggcaaatacttaagattcaaaattttgtcttcttttacaaaataattagaattataaatagatgcatgattcaatttagaaaaccgggtaattgctgaagaattaaaatattttaatcacatagctgttttacctgattcgg

SEQ ID NO: 122021 - DNA, 984 bp, Homo Sapiens
  misc_feature (701)..(701): n is a, c, g, or t
  misc_feature (709)..(709): n is a, c, g, or t
  misc_feature (713)..(927): n is a, c, g, or t
tttttacaatatagcatgctgtttattttagcttttacaacaaagcgagggtttaaggagcctgagaagaatttcacaactattgactatacagagtcttcaattccaaaaacagttaatagtaacttggtggcacatacaacatgcattgaatactctgtattattcagtaactaaataggatcctgcatcattctcttcacagttcacaatcatacattcattctcttttacctgaaacagtccattaatattaaggtgcaaagatcttggacaaaaaccaagaaagaaaacctcatgtccttatttttactaatgtatagctgatgatttctgtgatgagctgtaaatttaaaagcgtgactctcatttgaataactgtagagtaagcaaaccagaaattctcaatctattggcaacgggacaggttattgggttagattttagggtacataaactttatatgagagggactgtctgttggaagcataatacactatctaagatgttgggaattgtgtttattccatgttaacagtgaatggaaagtaggcattgttaaggctttaaaaattctcctttgatattagcagtctattaaaaacatgacttgggtaaaccaagtagatctcatgaaataggcttgaggaaatatttcaaaggccctaaagttctgaaacacctcgtgccgaattcttggnctcgaggngcannnnnnnnnnnnnnnnnnnnnnnnnnnnnnnnnnnnnnnnnnnnnnnnnnnnnnnnnnnnnnnnnnnnnnnnnnnnnnnnnnnnnnnnnnnnnnnnnnnnnnnnnnnnnnnnnnnnnnnnnnnnnnnnnnnnnnnnnnnnnnnnnnnnnnnnnnnnnnnnnnnnnnnnnnnnnnnnnnnnnnnnnnnnnnnnnnnnnnnnnnnnnnnnnnnnnnncgcggggagaaggcgtttgcgtattggggctcttcggttctcgctcaatgatccttg

SEQ ID NO: 122022 - DNA, 688 bp, Homo Sapiens
gaagcagcagcgtttattcaagatacaacagtgagggaatccagtcacgttcccttctccccagagagggcgcatcttgacaagtgatccagtagaaatcttttagactctaagttaagttcataaaaaccactcccttcaccctgtctcccagggtcaggcctggcctctgagatgaactggcttggggcgccctcaggtggccacataaaaaaccacagtctgaggccagcctggggctcccagacctgggcgggatctttccaggccacctgtccttcggctttgggtcgctgtctcttggcagatggcccaacacttgggggtggcccaaggacacctcaggaaggttcccgctctacggatggcccgattagccagaggtttccaggccatctgtccgcctccaggagatggactgggacctttagacttcggtggagaacaggatgctctgtctcttgctgtccggggcagggatggcctccagctgcaggaagtacagcagcacctggacctgggacatgacctccaaggaccagctgtcagtcatggtgataggctggctggggttggcagggagcttgctctccttctcggagggccggagcagcgtggggccaaagaccgtggcgaggttgtgcagggacatcttattgactgcctccttctctgccacccttttcag

SEQ ID NO: 122023 - DNA, 540 bp, Homo Sapiens
tttctcagttcatataatttattgcagttagcacacagtttaaaaattcaccaacacaccaatagtacaaaactaaacagcattataagttattccccctcaggaaaataaaacatactatgattgtcaaagctagatgtcagtctaagttttagaacaaaggaagaatgtgaaactaagaaaaggaaaaagcaatcactcacaatgaccacaaaaagaaaatccaaaagaaagtccgttttctcacagacattgattgtcttctctaaattaataaaaattattttaacataaactgtattttaaaaaaactagaaactcttcaagtaactaaagataatgctccaaggccattttcacagctttttttgtttgtttgtttgctttaaatgccattacagccaaattaacacacatttaaccaaatatttccaaaacagtccagcaacacacaatggagttttccattcagtatcttaagcacaaaaataggctatgtttacagtagttaaggcgatcaaattttaaacaaaagcaatt

SEQ ID NO: 122024 - DNA, 1035 bp, Homo Sapiens
gattgataaaattttctagactttatttaattattacatgtaattatatattttatgagaattttgtcaacagccagataaaaatgcttcttattcttgtttgggttaccatgggattctttattgaccagcagcaagccagtcctcttttttgctctttaaatccaaagtgcccatagccaacagccaaaagatctggatttgttttattccaggcaaggctgctcacattgaggcctttggttaagtcacaggaaaaagaccaaagtcgttccaagttggcgggtattgttgattcttctgcatgtatttcttcttcctcctccttcttagattcttcctctacctcttcatgttttgcactttctaaaacatcttcaggctcttcaggttcaggttcttttaaaacaggaagctgacgataagctgcaagtttgggctgaaatatattttccatcagaacccgttccataaaaaataagtcctgatgaaatttgtcagattttaatattgcatctgagtggtcttcctcatcttcatggatttttgccagaattacattttctatgtccattagagaactagtttcactatttttttctgtagtgctccctggcaatctttggtcctgatctttaggaagtacatttgctttactacttgactcaaccacagattgttttactgataaagatacaagttccatagcattgtaagaatcatacaaatcccaggcagtggacattatgcctttatcttccattatgattttatcacattgaacatctttattctttggtgctccattgaaagtctgcatcatcctttcaacatataggtcattgcctaatctgtttctacaaaggacttcataattcttgtttctctgagttactttctcagcttcttcagattctacagagaccatgactgtgggcaagtcaaaaaatctcagtgtttctgtctctgtgagtattatctctatattcttctcccaggtcttcttttgttacaattttataagggcagcacctg

SEQ ID NO: 122025 - DNA, 1349 bp, Homo Sapiens
ttttttttgagttttaaaattctttatttaaaaatctctaactgtaatgtttcataaaaaatatacacgtttctatttacatattccattaattctattagtttgaattagattttaagtccaattttgaaaagcttgcagaatttcttctgaaattacttaaaattactgtatgcataaacttacaaaaacatatgctataccaaggcagagaaaagaaaaaaagtgaagtggctacaaaggtccctggggcatcacctgctcacctaggaaccaggagtactggatactgttccgttactggtaacctatctggatgtaaaggttcataagttacaatgctttttttgtttaaaaaaaagtgaaagtctgtactttacaagccaaaagtgaaaatgccacacatcctctttacgctttcatgtacactaagtcactccatttggttgataccaactaagatacaatttctgagatcataatcttttcatgaaattaaagcagaaaactgtccaggaaaatcagacttcaaagttggtgcaacttagctgatctcatgaaaattctttggaatcttctgttggtctataaccaatcaaggactctttaccgctatcatccacaagtagatccactagcacatgtggtttatcataaccaaaggaggtgggggcttttattacggttatgagctcttgtccttctgtttttatttcacctttattatttgggggaaattctgagtcagataaggagctatgtgattccagacagctggaatcagtatcaaaaccatttctggagtgatcactctcagaacaatttctggagtgatacgagtttaaagcgatgctgccaggttcagactggttactacttaaaggtgaagaactctctctctctattggagtcagatggctgcccgggaccacgtcaggaatattttcttcagtagtcaccacttctgttatactagaaagttcttctgtatgttccacttttcctggattgtcttcggtatgcatgcctggaactgttgctggagacaacggctcttcacagaccacctccttttctaaggaaaatggctggtatgacgtgatgagtgatacatattttgattcaggttttgtctctaaagtagcacttcttaccacagagataaaggacttgggtaatattatgcttttttccttcaatggattaattttcttaatataaaaacagatgaataccaggctaagcactagaaagagtagtaaagcagcaacaactggaatccaaagagaaccttttatactgctattgaaaatggtaatacaaacttcttgacttttcagttgtaacac

SEQ ID NO: 122026 - DNA, 489 bp, Homo Sapiens
aaaacacgcacatattgtttaataattcatgatgcaaagaatgctacagagtgaaatcaggatttggaaagaggtaatcaaaaaccaaaggttaaaagtggctcatataacttgaaaatttttagatcaatggaatgccactttgaaaaagttttacggtcagctgttaatgaaatgacttacatttttggaaggactcctattcggtatgtagtctgacctcgcctactcgagtagttccctctagtatccttgccagtctttggcttctaagatctgagaatttctggggatggggagttcgagtcacaatattaagaactagtttgaagccagctccagggtagtctgtctttaagtctccactactccgctccaaggtgactcataaggtcggtccgtcaactctgcattatatggcctcaacaacgaaattaaaacacatactttaacctccagagcctcctttggcagtgcaaatcctcgtgc

SEQ ID NO: 122027 - DNA, 1242 bp, Homo Sapiens
  misc_feature (1088)..(1088): n is a, c, g, or t
  misc_feature (1092)..(1092): n is a, c, g, or t
  misc_feature (1108)..(1108): n is a, c, g, or t
  misc_feature (1117)..(1117): n is a, c, g, or t
  misc_feature (1119)..(1119): n is a, c, g, or t
  misc_feature (1153)..(1153): n is a, c, g, or t
  misc_feature (1156)..(1156): n is a, c, g, or t
attgggggagggtggccgatgctcttgtgtgccctggacctgggatgctgctttgggaaaccaagctatggcgcggtgttcactttccctggatggggccccgggcgcccgaaagggaaaggttttggaaaagtttcttgaggggccggaggggcgggccaacaattagtgggggggagagtgtacgaaggtaaggggtcccaaatatgctgtatttggaagaatacagaagtatttttatttctttttatttaatgatgcaaaatacaaatgctggcttgatatatattcacatataactttttctctcacatttacaactcaacagatggtgaatccagaggaacagctacaatcactatacggagcatactacattagtgtttcaaaagtttattccagcccatttcttcttttgtactctaaaatatcttcattgtgttgtttgatgagatagatccacaagaagacagtggtgcccaaggtgaacccaactttcagccagtcaggtttggcattcggcggctctcgcacgtagaactttgatcgcactgaagggccgctcgggagcctggcgggggccagcagccgggaaaggggacgcagcaaggcggacggcgccatcttgcgtggcccagctcagtctctccgagttggcaacagaaccagcgccacctggcggccggaagtgcgggactcgagggctctgcagcagagctccgtgggggcgtcaacgtgaattccagcacggcaaggttctctagcaccccggcctcagccttctgtcatattagagctgatgggaactgtacacttggagtacccagctgtatgtgaaactgcatatttttggaaggactcctattcggtatgtagtctgacctcgcctactcgagtagttccctctagtatccttgccagtctttggcttctaagatctgagcatttctggggatggggagttcgagtcacaatattaagaactagtttgaagcagctccagggtagtctgtctttaagtctccactactccgctccaagtgactcataggtcggtccgtcactctgcatatatggctcaacacganatanacacatacttactcanaggctcttngncatgcaatattcactcggatcgactactactttncangctgatctagcacattcacaatacgatcgaagcaagcattcatggtcagtcttcacattcaactcgtagcccttccccaggtgtag

SEQ ID NO: 122028 - DNA, 853 bp, Homo Sapiens
cttccttccttttggtactcctaaaatattcttccatttgggttgtttgatgggaatagatcccccaagaaggccagggtggcccaaggtgaaccccaacttgtcaggccagttcaggtttggcattcggcggcttctcgcacgtagaactttgatcgcactgaaggggcgctcgggagcctggcgggggcccagcagcccgggaaaaggggacgcagcaaggcggacggcgccatcttgcgtggcccagctcagtctctccgagttggcaacagaaccagcgccacctggcggccggaagtgcgggactcgagggctctgcagcagagctccgtgggggcgtcaacgtgaattccagcacggcaaggttctctagcaccccggcctcagccttctgtatttcttggaaggactcctattcggtatgtagtctgacctcgcctactcgagtagttccctctagtatccttgccagtctttggcttctaagatctgagaatttctggggatggggagttcgagtcacaatattaagaactagtttgaagccagctccagggtagtctgtctttaagtctccactactccgctccaaggtgactcataaggtcggtccgtcaactctgcattatatggcctcaacaacgaaattaaaacacatactttaacctccagagcctcctttggcagtgcaaatatgtcacttcggatctgactaactaccctttccaggctgatcttaagcaacattcaccaaattaccgatacgacagccaggcccatttcatcggtcaagctctttcacgatttccagactctgttaagcccctttctccccagggctgttaacaag

SEQ ID NO: 122029 - DNA, 960 bp, Homo Sapiens
  misc_feature (258)..(279): n is a, c, g, or t
  misc_feature (355)..(373): n is a, c, g, or t
actccccagccacgtatttccacagcagcaacccacactggggttttaacagcttaactcttaccccctaattaaggctttgtataaacccctgattttactaccaaaacactgtccctgaaagaaaggagtggccgtcagacatcaaagccaaacttggaatgaatagataataaacctggcacttaccaaaggtagcttattagtatattccacttaagaagaggttacttttctgtccctccctgccccctcggnnnnnnnnnnnnnnnnnnnnnncatttcctttaaaattccccttaaaagtaggtttataaaaagtcagaaatgccttgtaccccaaacacagtgcttnnnnnnnnnnnnnnnnnnncttgtgctaacaactcttacaattcagatatatatttttataacatctaagactgcaagagttcttatattcagtagctctctggtttaagacgacctccatctccttcgcttacaaaacgctttctgccccttgaaggacaaagatctctgagttgtttggaaattattccagcctgaaaacattcttctacaaaccgctccagcacagagtatgaatgtgggacatccagattaatgtccggaatttcattgtaaattctctcataacctcttttcatttggtctacagtaatggtagaagacttccaaagggactttaataaatccaaaatcatcttaaatgtactttctccagttgactctaaaaccattataatagcttcatatacaagctcatggtgaaaatgaggtacttccagttccttaaggcaatgttcagcttcagatatgtctccagagagtaaatattctttcagcagcatatcaatctctttaacaaggtgattgacagattgctgcccacctccagagccccacacactatctttacgctttccacctttagacatactcagaagcacggta

SEQ ID NO: 122030 - DNA, 1074 bp, Homo Sapiens
  misc_feature (475)..(497): n is a, c, g, or t
  misc_feature (573)..(589): n is a, c, g, or t
  misc_feature (607)..(1007): n is a, c, g, or t
taaagaatcaatactgcttcacatgttttattttggtgtacattcttctagaaccaggttcatttttccagttttgtagaaaaatagatgttccagccaccttttacttaactgtctagtcttttaagaccaatcagtatgttccctggaaagatgaataagtctcatgactaattttttaaaaattctttaagacaaagaaataactttctttttttactcccaaagcacagtatctcaacagcagcagccaacatggggttttagcagcttaactttaccccctaaataaagctttgtataaaccagtgattttactacaaaaaacactgtccttgaaagaaaggagtggcagtcagacatcaatgcaaaacttggaatgattagataataaacatggcacttacaaaaggtagcttattagaatattccacttaagaagaggttacttttctgtccctccttgccccctcgnnnnnnnnnnnnnnnnnnnnnnncatttcctttaaaaattccccttaaatgtaggtttataaaatgtcagaaatgccttgtacccaaaacaagtgcttnnnnnnnnnnnnnnnnncctcgtgccgaattcttnnnnnnnnnnnnnnnnnnnnnnnnnnnnnnnnnnnnnnnnnnnnnnnnnnnnnnnnnnnnnnnnnnnnnnnnnnnnnnnnnnnnnnnnnnnnnnnnnnnnnnnnnnnnnnnnnnnnnnnnnnnnnnnnnnnnnnnnnnnnnnnnnnnnnnnnnnnnnnnnnnnnnnnnnnnnnnnnnnnnnnnnnnnnnnnnnnnnnnnnnnnnnnnnnnnnnnnnnnnnnnnnnnnnnnnnnnnnnnnnnnnnnnnnnnnnnnnnnnnnnnnnnnnnnnnnnnnnnnnnnnnnnnnnnnnnnnnnnnnnnnnnnnnnnnnnnnnnnnnnnnnnnnnnnnnnnnnnnnnnnnnnnnnnnnnnnnnnnnnnnnnnnnnnnnnnnnnnnnnnnnnnnnnnnnnnnnnnnnnnnggcatcaaaagcaagaccgtaaagggcgcgtgctgcgttttccatagtcgcccctgacagatcaaaa

SEQ ID NO: 122031 - DNA, 935 bp, Homo Sapiens
  misc_feature (465)..(482): n is a, c, g, or t
attcaaaatatgaaattttattataattgatgtttaatgcaattcactttacgaaggtttttgtggttttccctaaaatttctgttttaatgaaggctcctgatcatcctggatgtcaacaagttttcttcttcatgtgacgtctctgatgcacaataaactgattagtttttctaaaactgattatattcatagggtttcatctcactctaacataaagtttaagctaaactacgtccatttaactaataagccaaatttgtaagagcttaacagactataaacttaactcttgctttaaagcaacaaaaacaaaaccctgatgaagacctggaagtgaattgttcgtttttcagactctagcttccttgaccttgtgctttatggttttgaacacacaggacccaagtttgctgcagaaataacctccaaatccatattatgaaccaggaagactgtgagggnnnnnnnnnnnnnnnnnnaagggccaagggtaaatgtaatatttatcattagcaccatatcccatggtcagccccacctgaataaacggcatattgggatttttccacaaactatgagcctaatgaaaaaggaaatggataagggaaacaagttcccagcctatgtcacatgagtttctgcactacgtgttatgtggtaaggtatgcattccctcaggacttcccaaatccattacatgctagggttttctctctggtatgcattctggtgtgatgtaccctaagagctgccttacggacaaaagttttcccacattcatcacattcatagggtttctcccctgtgtgaattctctggtgtactctgagagttgaattttgggcaaaagctttcccgcattcattacactcatagggtttctcccctgtgtgaattctctggtgtgcactaaggtgtgatttctgggagaa

SEQ ID NO: 122032 - DNA, 643 bp, Homo Sapiens
ctgttcatttacatggtttattgttgtaaacattaaaattgtctttctcaaagaaagaatttatcagaaaaaaaatcagcatctctaactgtcatacaccatagaaaaaaaggcagtgactcatatcatgtgccatactagaaatatgcaaagaaaaatactacagaatatggcaatattaaaattcttactcaaacaaaataataaattaactgacaattttagacataaaaaaaattcaaagtgctcagttatttccagggagttatgtatattataagcactctggaaacagtcaaaagctgctgcatgcaagttttgtttagctttagacaacaaaataatcaagatataaactttctttttatcaacatcaacggtacatacaacacttacaaacaaggaatgttggacggtgttacaaacactatgtgtcccttttgtcaggattttctgatgtgtaatacttgtgcccacctattttacaattgagaaaatgtttaagctcagataactaccaatctttataaaatctaacagactacatagtgtctgaaatactatttatataatatagacattactgaagtagcaagtgcctataacattttcaacctagaatcaacatgcttgtccctttttt

SEQ ID NO: 122033 - DNA, 1936 bp, Homo Sapiens
  misc_feature (216)..(256): n is a, c, g, or t
  misc_feature (1561)..(1596): n is a, c, g, or t
tccgagatcccatcagtggtgagaggccacgagactcagctatgcaggtcaggggcaggaaggaaagacacaagcctcagtgatgccctacccagtgccaagcgtgggctcagtgcttccaacctccttgaatccacacagtcaccctggcagggactattcctgccccattgtgccgacgcggggcccaagtctcaaagaggtgctgtttgaacnnnnnnnnnnnnnnnnnnnnnnnnnnnnnnnnnnnnnnnnnttgtctatatggaattttatctcaaccttacaccggctccttctgagccagggcaaacaaaaattgtacgtctctaaaacctacgtgaggggctcaaatgctgtaggttgtttccaaaccctggggtccattcaatcctcttccaggctttggcaggagggcaggcaggccccgaggcggccccgggacgcactcacaaagacaagaatactgaacaccggaaggactcattattacccagaaatctttattacaaaaatattttgcaagccaaaaagtttaagttgcaactatatacaaaatggggcctgtttccttcccagcagtcttaaaataaactcctgaaaccatgctccttccgcagggttggttcgacctcttccttttcctggggttcaatacacaaggtatgtggattctccaggttgccaggctaaagctaaagctatacatcttccttggccttattcccttatttccccctccaagaattaaaaattaaattaaaatgaaaatggcaccaagaaaacattcttttaaaatactgaatgtgtgtgtgcatgcgtgtgcacacgtatgtgctgtctctgggtaaaagagagggagacgaaggtttacaagccaatcttttggaatttggaactagcctgagccaggtggctgggtcactgtggctcccagatgccacacgggagctctggccaaagctgtccacatggtctgttggctcagctaattcctggatgccatcattgaaatcaccaggtgaccatcccccagagagctgggtctatgctgagctcctgcagtttcacctgtaggacctccaggaatgggcaggatggctcagctacttttacagcctgagccagaaatcccttgggcatcccaaggccaggagtcatgaacattagcgtctcaactctaagagttatagtgaagactgaataaatagggcttgcgacatctgcttgccctgggcccggtcaggccctcacacccgactggaagggtgggggttaaagggtaactgggtcacaccctctggccaaccttctgggacagagggggaatcagcccgagcttcacagctgcaccatccccctggctgtcttcaatttattccagtttgatcccagtagggtttgagagcagaaatggaagatttcttcttcaaggatcagctcagaaagccgggatgggggcggtcactaaaggggtaggatagacggccagggccactatccctaccctctgtgtgttcctaaagtgcttatgagaggtggtggggaggggtgtcatctnnnnnnnnnnnnnnnnnnnnnnnnnnnnnnnnnnnngttgggtctcgataagactgcactgtcaagaggcagccctcagcagccctgggcaggctggacttaccacagcggggtcacagaaggctgcactaccagccgcgtggctcagctgagaacatggccaagtcagtcccagccagaaggctgtgtctccagggagtggctgacctgatccttcttgcccattcttggggttctgggacttggaggaactcaagtcttcgctgtaagaaaatccctccaggacaacaaactgttaaacctcagacttcacaagacccaaccatggacttcaacacatgacagacagccaagatcatgttgctgttgttttaag

SEQ ID NO: 122034 - DNA, 694 bp, Homo Sapiens
  misc_feature (608)..(608): n is a, c, g, or t
tttggtatttgctttatttttattgttattgataatacattagacattaccctcccatcaggtgcacagaagaaagtcaaggctggaatttcattctcttatctaaatctctctgttctctctcagggaatattttcagagaataggtggaatgaagtgaggctgtggagaatgttatctatgataggatagagggcatagaaggccaggagtcaggagacctgggttctgtcctggattatacaccagctcactgaggagctttgtcttctctggatcaagagtcccacctgaaaatgaaggaactggtccagataacactggagccctttcccccaagatgcactggcattcagaggatggtgcaggtccagtcctcttctgcctgtggggtggatgctgcctggagtgtgctgggtctatgagagaaatgagggtactcatgtgttccaatgtaaccatatttctgatacgtcctgggatcgtcggtctcatcgtctgtactgttgctttcagccagcagaatccaggagctcactggggacccatcccaattcttaaagcatgggtaattcagccaggcctcagcctcttgtgccagctgcctncacccctttgggtctcaccacccaaagtttcctgagggtccgccggttccagatcacaggcctgggttcgtgagctgccttctcag

SEQ ID NO: 122035 - DNA, 1428 bp, Homo Sapiens
ttttggtgttagagattatttattattactcttaggggaatgaattctggacaagggatgtgaaaattccagaaaccctcgattgtgaccaaaatgactgtaaaatatggagcacagcctgtcactatatgaatataaatggcctttggcaagaggtaagttctttggaaagaatggtctccagctatatgtctcaagcttcatggagaggggcagggatgaatggcagggaggaagcaggaggtctcaccagcagaatccaggagctcactggggacccatcccaattcttaaagcatgggtaattcagccaggcctcagcctcttgtgccagctgcctccaaccctttgggtctccaccacccaagtttcctgtagggtccgccgggtccaggatcacaggcctgggtttcgtgagctgccttctcaggtacttttcaataatggggtttttaaagtcataatactttgtccagtagatgcagagttgctggtagtttatgactaattccaagaccgtccgaaatccctgggctgtgttgaaatgtgttttcatgctccctcgctcccaagcatagaccgtcaggagctccagggcatactgaggtggcagcttcccaagcttcttcttacaattttggtaccagtgcttgactaggcggatgaggctcttgagcttggtggggcgctgcttcaggaagtctctctgtagttctgtgaagcaggtggagaactcgccctctttctgcaggtcggtgcactcctcgatgagcttgacatagatttgggggttaggtttatagccgccagtcaactgacccagggcatcaaaggcaggcagcacatcgaactccaccccctccccgagctggagcgaactcagtacgaagctgagcgcacgggggttgccccagcgtggagcctggacctcaaacttcacggaaaatgctctctctctttgacaggcttccagctgtctcctaatttcctggatgaactctccccggcgatttaactgatcctgaaaagtggtgagaggactgaggaagacaaccaggtcagcgtcagatcggcctctgagggtggtgcccttgcctgaggagccaccctttaccaccttggacacacacacagggtaggagctacctcggaagcacctttccttcaggaacccacagatgatgtcaatggcatggttgatttgcatgcggaaacacgtgtctggcaagagatagtcttcaatgaacttgtccagagatttggctggggtatttctgagatccatcattgacaggagagagagtggcaacagaactgcctcccagacctgtttgcttttatctcttctgctgactagttctagatcgcgatctagaactagtcggaacgcgtgggtcgacgatatcccgggaatccggagcggtacca

SEQ ID NO: 122036 - DNA, 1176 bp, Homo Sapiens
  misc_feature (938)..(966): n is a, c, g, or t
ttttctttctttgctatttaatgttcatcacttaacgttttgtgtgtaagtttcaggagggcccaagaaatgattacacaggaggcaaggaggggaggtgataggagggttgctgggggtctggagctcatggcccccagctcgggggccaaaagggttccatctcagctcaaggggagtaaaaaggggccccagaaccaaacacatgctaaaacatacttgcaagcccccaaaccccctccccacctgctggggaggaaaataaatacacccagactctgtcccactccccaggtgcccaggtgaggggccagcaggtgagtttcctcccctcatcacaggttgaggtcaaagaattgccatttactacagtgctcctagtcccttccacagggctgggggaaccctgggctggggagcggtggttgtcagcgcacagcctgcctggggcttgtcatgctaaatagaggggagccacactcactccaacttcaggcaaaacagaacaggccagggagggggtggaaagtccactgaggcctcatggcccccttctggccaagctcaggaaaaaacagtcctttgcagggttgtctagagctgggagaaatccccacaggtcacagtcgaagtcaattccttcttgccgcattcccacactggcccgcttttcttcatcgcaaccttctgggcccagccaaccccatgtttgcagggaaggggaggatgggggagcattcctccacgtgtaagcccttgaagacagacgccagctccagcctcggtcggcagtccttggcccgccaaacccgggggcgagtgaagacggccgagcagacctcaattccctccgatgcttctctggcagctgccccgggcagtatccagtctcagcccaagagaaaaaactcatggagaaaagtgagatttctcctccnnnnnnnnnnnnnnnnnnnnnnnnnnnnntgcaaggtgaggggtccttggtccctgacccctaggctgattctaggggccagtgttagctccgggtccatgtcgggatggagggcagcagactggagccatgccactgatgtcacacaggcatgcctgagagggacaggcagagggaagcagcaccctttccacgaacccccaaaacgttaagtgatgaacattaaatagcaaagaaag

SEQ ID NO: 122037 - DNA, 887 bp, Homo Sapiens
  misc_feature (615)..(625): n is a, c, g, or t
attaaaatatttcatcacttgttaaaacatatttttgatctgagtttggtaaagtattattttacctgctgttgtactaccacagactgttgacttttagtttcttaaagagaaaaattgcctttttactagaaagcctttgtatattgcaatttttctgtttgggaaaatctaaggatttactgtggttagtcttacagaagaaatgtggatttgataaactagtgcctatgattttaacttatgtttgatatatagtagtaagggttttatgaatgttgattattttgtgccaacagcccagaattgtcacttatatgtaagcagaaaacaatgagctctgcttccaaagttatttaattttctcagtgtttgaatgttattttttgtaagtgtgttaataaaagtgtaaagaattggaaaaaatataaatattcttaactcaagcatttgctggatcatttttctacaaaacttgtttgtacaatataaaacactctctgaagagttgactttttttcagtttcgtatcctggaaatcacattttgtaaaactggggaccattcataattgtcagatactttttaaaattatctcaatacatcacttttatnnnnnnnnnnngtttttttgaaagaaaattagatacatatgtggccccagatgtttgtataactctagaatgatctagactatgtatgtttaaattaactttttattgaatgtacaggtgtccatttttgacgttaagcatggtcctttaaggtcacatgacgtttgatttgcaaacatttctatagccgaacttgtatatgtggttgcctccttaataaacagcctgaccataatgtttattattaaatttatattctttaagtgtttaatt

SEQ ID NO: 122038 - DNA, 844 bp, Homo Sapiens
ccttgtcctgacatttatttttaaatggtattggataaataacataagtagttattgtaaataaaatctgaaagaagcagaggaagcatgatgtttctgaatccttttattttttaaaggacttttaaaatttgaaactacaaaacggatttcatacattctgccataaataaaaacaaacaataaggcaggactctacataagcaaaccaagaacaattgttttcagaaaatgtgataaaatgctttacaatcataagccatccagtttttaaaataaaactgttgaaaaactcacaaatcttcaagcggcacatacaagacacccttgaagagggaacaaaatgtggttctgccactttgtactgttctcacatttttgaaaacctaattttgcttagagcataggtctgttccgtattctaaaattcacacaggttggtttgttttttctcaagaaccatgtgatagaggcaccaatgacaatacaactttgtttccaagaaccttgtaacaaagcgttgtctcttttaaacataccacttgaggcaaaaggaatcctggacaggagttttctgcagaggcgtttaaaaccctaccgaatccgcttctgctgccgtgctctgtaaatgtcatgaacaggggggacaacggctcccttttcttcatcttcatctgaatcctcgttgggccttttgacggccttggtgagtactgcattactttccacggggccgttgccttctacagctagctctggggcccaccagttatgatcctcacagcttcctcaacagtatttggtatcttgcatcttcggaaaatttccatcagttcatccactt

SEQ ID NO: 122039 - DNA, 952 bp, Homo Sapiens
  misc_feature (734)..(734): n is a, c, g, or t
  misc_feature (773)..(773): n is a, c, g, or t
  misc_feature (826)..(826): n is a, c, g, or t
  misc_feature (918)..(918): n is a, c, g, or t
  misc_feature (926)..(926): n is a, c, g, or t
tttttcaagtttaaaagtcagaatatatttcactgaaaatatgtgtatgtgtgtgccttcaagagtgagtgctcctcaagggagactcacacagttccttacaacataaataagaaatagacgtaatggcttcactcagtagaaaactagcagcatcattctgggccatggggcattccccaggggtcaccatccagcagcctctccctgggggcagaggacgcctggtcagaacagctataactcatccatcatggcgagcaaatcgtcccctttgctggtgctcagccttggctgctccgtgatctcaaactcccccatgattcgagccagctcctcgctccgttgctggtcctgggtggcttgtatgttgataacttcataggataactcttctggcctggttagcgctgcttgttcctcttcttcatcggtggtaaagagattcaaccggaatccgggctcagggccactgggtttcttaatctccatccctcccatcagcctggccaagaaattcagctcttctttagcaagagggtttggagcaatgctttcctgggtccatgaggctaagttctttgatgatccagacacatgagtttccacaggctgattcacgctgtacatgttagttcccagtttcaggactcggtctccataaagttcaaaagaacttctttgggtgcagggacatagttccaccatgcttgaatctatctcttcattcttcnacttttgtgtgacatctgatgagtctggaactcagttcncaaggacaggccggacacggcacacaaggacgttatatctgacttgtccttanaaatgatactggaaaaatacattatgcattttctgggaatttcaagactcatatctgaggtggaagtggtatggttgggacatactatgagnatacatanaagggaagtgggcatgatacgtgtat

SEQ ID NO: 122040 - DNA, 1036 bp, Homo Sapiens
  misc_feature (104)..(113): n is a, c, g, or t
  misc_feature (832)..(832): n is a, c, g, or t
  misc_feature (836)..(837): n is a, c, g, or t
  misc_feature (909)..(909): n is a, c, g, or t
  misc_feature (982)..(983): n is a, c, g, or t
tttttttacttttagttcacattttttaatgtttaaaaactatgttaacagagcagttatagaacagaacttcttatatttctttatttacaccacactctggnnnnnnnnnncccagttctatttgattaactatgaatagcaaagttttgtgacttgtgactcacttaaatcacccatctgaaattcatttacaaggtttttacattaataaaacagtagtgtggtacatgtattggactcagatgaagtctaaagtacactggactctagagagtggattacataccaacgaccaagattcaagtgtttggggaaaaaaataccttagacagtctatgttggcgtcaacactaaaataaaaggcaaacatgcaggactttcaaagcttgattagataatggttctttgttttctttccttcaaatttgtgctcataattaatattcaggttccctctccccgctttcatagatcccaaagtttgagaaatgcagcaattcaattgtgaaaaaaacattcttctccccagcttctgttttcatatgtactgtgtagtggtatcagtgttaaaaatggaagatcattatgaagaaacaatttgtcatttgggtatatctgtttctataggacaaggatttgtgtctaaatattccttacttgtatctcagaggactatctgttaaataattgatcttaatgccagcataagaaatcaagggaactatttctcagacatttctttctcttaattaagtagggtttcaaggttccaagtttacattgagagaactatgttacctgggagagaatgtaatttttctaattccanacannacactatttctaggaacatttttgttttatgcagatctagagactctatttcagtgcgggatcacacttcanaatatcagctctatttattaccatctattacaacaatgagtattctgcatagctcagtgcataatctctttannacgtattagctgtacaatgggcagttcatagctctaataagctaagagaatgt

SEQ ID NO: 122041 - DNA, 565 bp, Homo Sapiens
ttttcagagtaaaacaatcattttattgattcttatgtcagttctgtagcataatgaatacattaatcataatcatattaaatgtttaactgatagtattttaaaagaatcttcaatcaagtgctaatcctcatcactaaataaacagcattctgaatagtcaagattgggaaatgtgataggtaattctacccactttttgtattgtttctttgttgaattatttttgaaaaccactacaaaattccttattttgagacaaggcaaatctaagcctttgtgcaccatcattgttccccaagcctggccacatttgcagatgatttcaccatttatttgatagtcggcacacttcttttgcagtgttttgttttctcttacaatgtaaagttccttgaattctggggtcatattgacgtgatgcattttctcaattacatggatatcttccccagaacaggctagcacactgcagtttttgcaaaggaaagttattagtgatgggttattcttgtaatgcttggcaatatttctcttggttttcattttcttttccacctcgtgc

SEQ ID NO: 122042 - DNA, 1304 bp, Homo Sapiens
  misc_feature (171)..(275): n is a, c, g, or t
  misc_feature (1242)..(1254): n is a, c, g, or t
aagagatgggatcttgctatattgcccaggttggtatgcagtggctattcgtaggcacaatcacagcatgctatgaccctgaactcctgggttcaaaagatcctcccacctcagcctcccaagtaactgggaatacaggtacccacacccacacccagctaatttttgtannnnnnnnnnnnnnnnnnnnnnnnnnnnnnnnnnnnnnnnnnnnnnnnnnnnnnnnnnnnnnnnnnnnnnnnnnnnnnnnnnnnnnnnnnnnnnnnnnnnnnnnntgacgactacgcccagccttttggtttcttatgtgtaggagaggataagtttctttctcagagtgtgctgcagccagacataatatttctccttggcagaaactctgctgttccaatcatacatgtagccattgagttcaatgtgaagatccaggagtgggcgttttctttcttgtctcagtttctgggagaggcactgcaggtacagggatggtgagctgtgagactgctccagcagggacatgtccgcagtacacaggctccagaagaagtcagcttctcggtgaactgtgcacagccctcgcttctgagccttgaattccacattcttcatcgctggcccatccacctccaagaggctgctgtcctccagctggccctctgacaccacatagttctgaataaaaaacatctttggcttccctgctagataagggcatgaatctcccatgaacatcctcctgatgtgatgcagggggagccctgagtgagtctgatccacaccatacacactctgggagcctcctcggctcaccaggacacacacaaagctgtcgtagtctcggtgctcgggcatacaggcaaattggccaagaatctgggatataccatgcatactgagatgcaagaatttctggacttcatagcccagggaagtgaaggtgtctcgaagaagctctgtctcattgccaatgcaatcgattatcaggcagattcctaggggcttgctcttcatcttgtatctctcttcaggtatgctctgaggcaaaaaagcttctgattcctgaatggatttcttcactggttcttgttgagcgccaagctgttccttaagtctttgttctttacttctcccattatggagcttcaaatacaaagaataaggtcatacttcctgttagttatttcagaggtacactatacattacacctctttaaatgtctcaataggattcttaactcaggnnnnnnnnnnnnntatcgtcccaacagttaaattatctaaagaatagcaagagctgttaactc

SEQ ID NO: 122043 - DNA, 446 bp, Homo Sapiens
  misc_feature (139)..(291): n is a, c, g, or t
atagccttatgatttagaggttacttgttcattcacctagacctcaaattgcattttacagctagtcaagtatatctttctctgatttgatagtgtgacctaaaaggggaccattgtttgaaatatcattagagttgcnnnnnnnnnnnnnnnnnnnnnnnnnnnnnnnnnnnnnnnnnnnnnnnnnnnnnnnnnnnnnnnnnnnnnnnnnnnnnnnnnnnnnnnnnnnnnnnnnnnnnnnnnnnnnnnnnnnnnnnnnnnnnnnnnnnnnnnnnnnnnnnnnnnnnnnnntgtgggtgtgggtacctgtattcccagttacttgggaggctgaggtgggaggatcttttgaacccaggagttcagggtcatagcatgctgtgattgtgcctacgaatagccactgcataccaacctgggcaatatagcaagatccaatctcaata

SEQ ID NO: 122044 - DNA, 805 bp, Homo Sapiens
  misc_feature (590)..(600): n is a, c, g, or t
  misc_feature (746)..(746): n is a, c, g, or t
ttttttttgattaaaaaaggactaaactttattgacaaactgctgcagacattttgacataagtttaagctacctatttaggcagacttacacatgtagcatttaatcttccgagaacaaaatgggaggacggtacaaatccaattaggactttaacttatgtacaaagtggattttgattcctttttcattcagctgcagtgtccctttttatatcatgctagtgttgagacatacttgactaacttgggaacagttcgatatattgacaaccgtcaacttaagaaaatcaacagcttttggccccagcgtccaagtgaacttttcatggagtgcagaatctcaaatggacaaaatactttgtctttttaaatactgaaaatttaattattagtactatgactgaaagattcttcatggctaaaaagctctgcatcaaactcaattcaggaggccttccctccccaccaccatcaacctcttcaaaacctactccctccctctaagtatctctcaacacagtatgtctggggctagatttcaaaacccacgtaatgaaaaagtcagttttacaagcctaattttgttgnnnnnnnnnnnatatcaattaacgttaaaaattgcatcaactatttaattcatgaggatctttcatattaaaatttaaccttaagattcaaccgccatgtgcttttatcaaggaaacattttttagagacgtctgagctcacttttacatggtggtngctactgccgttaatgtttgtgattttaaatctgcaactacaactttacggggatgctc

SEQ ID NO: 122045 - DNA, 338 bp, Homo Sapiens
cacacaaacctgttagtttcaaaaatgacattgcttgcttaaaggttctgaagtaaaggcttgttaagtttctcttagttttgatttgaggcatcccgtaaagttgtagttgcagaatcccaaactaggctacatttcaaaattcagggctgtttaagatttaaaatcacaaacattaacggcagtaggcaccaccatgtaaaagtgagctcagacgtctctaaaaaatgtttcctttataaaagcacatggcggttgaatcttaaggttaaattttaatatgaaagatcctcatgaattaaatagttgatgcaatttttaacgttaatagttataaa

SEQ ID NO: 122046 - DNA, 1777 bp, Homo Sapiens
tttactcaacttcttttttttattataaaaggtacacttctgtttatatttaaacaacaaagaaaaaagcatctacacacttaaaaaattaattcaatattcctaaatctattttaactcattttaaaatactacatacagaagccagaatgcagagttaagaatggaataaggtggggagaagaaggggaccacgaagaaaaacacttagacaattacttgtctgttgtgggtaaagcaacaggaatcctgggagatacaagaaatcagtaacaactttgctcataactgatattttcccctcatgtttgtttttaataacgtccatatgggtgctctctgtatgctcccttcactggcctagcaggaggggccttcagcgacggcctggtcccattccagtcgtcctggccataagcttcataagaatcttgaacctccccatgtccatagtcataatattctgagtccccttgactctggctgtaatagccttcgtagccttcgtaactttgttctgcgtatgtatcatcatatccatattcttcatatgtttctgggtgcaggaggtggaggcaaaggtatcctctggatgcccgctgtccgtgctcttggtgctggagcacccctcacagtaggtgggggtggcacgcctcgagtcacagtggcacctctggtgatggctccccttactggtgtaccacgtaccaaagccccccgaggtggtccaacaccacggcccctgggaacaggtggtggaggaggtgcagctccccggcctctcactggcaccccacgtccacgagagggttcaggtactccattcaagtaggacagctctagaaattgctcctgacagatatcatccatcatatccggtactagaaatttcttgacttcctccatggcatgggccataagagcataagcctcacatgggggtccaaagacttcaatgaagacatgcagatccatattcaagtgggcatatttggggtctccacctttgcgcagctcttcctccttggctttgtctctcattgagccctttcccaatacagagatctttgcaccagtctcttcctgcagtcttttgattgtattcccttgtggtccaagaatcttccccacaaaattgaacttgggatactgcttgacaggtatcagcactcgctctttcagtttcatgttcttatgagaaaataaatccaagtaattctcctcatcatccttttttgagtctcctttctgaatcttctcaatttctgccgtcagcagctgcatggcgtgagtgaaggacgggtcgagcgagtccttctcggccatgagttcgggcaggtacttgttctctggctccatcttgaccgaggctgtggccgaggggggcagcagcggggtcggcgctggcccgcccactgtcgcgtcgggacccgtggccgagggcggcagcagcggtggcggctgcgtggcgggcgaggcccgggcgcccccgcgggatccccctccgcctccccgggaccggtgaggcagcggcggctgccgagacggcgtctgacgcaccgaggggtgggcaccggaggggtccatggagccgctacggcccgaagaccggctcatgcgcgcggcggggtcgtcccggcgctgcatctgggaggatgtgcgatccaaggagcgagaaagcgacgcggcagcgacggaggcccgagcggcggttggcgggggtggcagagcgggagcggtagcgaccgaagccgacccgagcgacccagcgagagag

SEQ ID NO: 122047 - DNA, 555 bp, Homo Sapiens
tggggtccaaaaagcatatatcaaaacaaaagtaacgaaagcaaaacaaaatgctacatgtaaaagctaaagaaagaaaatgcagcatattcaggttctttttcttgaggtacctatataaatttaatcacctgccccaaagtcctctcgttaggttaaaaacacaatgcgtcctggggagccaattgcccggcacgtcttattactgagaaagtgcaagaatgctgatcatcttatgcagcatactaaaggatgatttactctttacaaaatagagcttaagtatcaacctgatggaagttagaaaattaaaaacatttaagtagaatcatctctctctctatttttgagatcctgcagcaaaaagcctcccaaatcaactttcaaagttctgccattaaggaatgttggttctcttgtaaaattcagagatctctttaaaatagtaaaactatatactacaggaaagatccctaatttttatttcttattggtataaaatcaaattcttaagactccaatatattgtacctccaaagaattaagtaaaaaaag

SEQ ID NO: 122048 - DNA, 1023 bp, Homo Sapiens
  misc_feature (587)..(980): n is a, c, g, or t
gtaaaaaataatcactttatttgatattatagttgtagatatggaatatattttaatgaaaaactaaaaagaaaatgccactcaacatcattggtatagcaataggccagcaggaaaaaaaattctgtgataaacttgtctctttaataccaagaagaaattctagtccaagcttcaatacgcttcctgttttttcactagatatttcttttactgctgctcttcattcttttccacatttcatattagaggattggtacagcctttaaaacttcattgacaggagcaaatccagtatccactgatttcttctcaaaggcactctaacccatcagatagcccggcagtttcattctcatgaatactctagccatgaaaaaactcaataggacacagacgaatccaatgaacagaagaaggaatctattgagttttgggatatttggtgcattcgatcggtccaggattatgaaacctaaacctcccattgtaaataggaagctggatgcaagtccttccataatatattgtccatttactctgtaggccaaaaaagcctacagccgcggcctcgttccgaattcttnnnnnnnnnnnnnnnnnnnnnnnnnnnnnnnnnnnnnnnnnnnnnnnnnnnnnnnnnnnnnnnnnnnnnnnnnnnnnnnnnnnnnnnnnnnnnnnnnnnnnnnnnnnnnnnnnnnnnnnnnnnnnnnnnnnnnnnnnnnnnnnnnnnnnnnnnnnnnnnnnnnnnnnnnnnnnnnnnnnnnnnnnnnnnnnnnnnnnnnnnnnnnnnnnnnnnnnnnnnnnnnnnnnnnnnnnnnnnnnnnnnnnnnnnnnnnnnnnnnnnnnnnnnnnnnnnnnnnnnnnnnnnnnnnnnnnnnnnnnnnnnnnnnnnnnnnnnnnnnnnnnnnnnnnnnnnnnnnnnnnnnnnnnnnnnnnnnnnnnnnnnnnnnnnnnnnnnnnnnnnnnnnnnnnnnnnntatcaaaagcatcaaaggcatgaaccctttaataaaggcgccg

SEQ ID NO: 122049 - DNA, 1858 bp, Homo Sapiens
  misc_feature (86)..(678): n is a, c, g, or t
cgcctcgccgaatggtaccacagctggctttagaagcgccacgctcccgaaggagaaagtcgacagtatccgtaagcgcatggtcnnnnnnnnnnnnnnnnnnnnnnnnnnnnnnnnnnnnnnnnnnnnnnnnnnnnnnnnnnnnnnnnnnnnnnnnnnnnnnnnnnnnnnnnnnnnnnnnnnnnnnnnnnnnnnnnnnnnnnnnnnnnnnnnnnnnnnnnnnnnnnnnnnnnnnnnnnnnnnnnnnnnnnnnnnnnnnnnnnnnnnnnnnnnnnnnnnnnnnnnnnnnnnnnnnnnnnnnnnnnnnnnnnnnnnnnnnnnnnnnnnnnnnnnnnnnnnnnnnnnnnnnnnnnnnnnnnnnnnnnnnnnnnnnnnnnnnnnnnnnnnnnnnnnnnnnnnnnnnnnnnnnnnnnnnnnnnnnnnnnnnnnnnnnnnnnnnnnnnnnnnnnnnnnnnnnnnnnnnnnnnnnnnnnnnnnnnnnnnnnnnnnnnnnnnnnnnnnnnnnnnnnnnnnnnnnnnnnnnnnnnnnnnnnnnnnnnnnnnnnnnnnnnnnnnnnnnnnnnnnnnnnnnnnnnnnnnnnnnnnnnnnnnnnnnnnnnnnnnnnnnnnnnnnnnnnnnnnnnnnnnnnnnnnnnnnnnnnnnnnnnnnnnnnnnnnnnnnnnnnnnnnnnnnnnnnnaggaccattctgatgttggagcgaccgcggctgtaggcgttcttttctgttgtttccctaattagaaaaagtatttatttctgctccgttcatacatcttattgttcaggaaacagttttacatacatatctgaaataatctaccatcacacactctagttaaaggcaaagcaccataggtaaagctgatcaactgtccagagttctcagcttacggaatcttgcttctggattttatgttaatttctgaaaatcagaaatgtcatctccaaaaaatgttaagagggttgtaaaaaataatcactttatttgatattatagttgtagatatggaatatattttaatgaaaaactaaaaagaaaatgccactcaacatcattggtatagcaataggccagcaggaaaaaaaattctgtgataaacttgtctctttaataccaagaagaaattctagtccaagcttcaatacgcttcctgttttttcactagatatttcttttactgctgctcttcattcttttccacatttcatattagaggattggtacagcctttaaaacttcattgacaggagcaaatccagtatccactgatttcttctcaaaggcactctaacccatcagatagcccggcagtttcattctcatgaatactctagccatgaaaaaactcaataggacacagacgaatccaatgaacagaagaaggaatctattgagttttgggatatttggtgcattcgatcggtccaggattatgaaacctaaacctcccattgtaaataggaagctggatgcaagtccttccataatatattgtccatttactctgtaggccaagaaagctactggcctctgatgcccatgttcatcagtcatagaaccgacacttggaggttcaacaataacatcataaattattcctccggtgatgaggaagtaagacaccaccaccagagcatacacagtcatggccgacggcatgtgcaaccagggcggcttcttcagcttcaggttgggacattcgagcactaagaacgggacacggtacaaagtctccatgttggtggcagcaagggccgttctcggcctcaagccccacgcgcctcccggaaacaggcccgccctcccccggccgtaatggccgaattcccgggcatatgtccggtaccgtcgactg

SEQ ID NO: 122050 - DNA, 958 bp, Homo Sapiens
  misc_feature (841)..(875): n is a, c, g, or t
aatataataatgtaaataatgaaaaatattttcaaggaaaaacttaaaaagaaatgccacttcaacatcattggtatacaatagaccagcaggaaaaaaattctgtgataaacttggtctctgtaataccaagaagaaattctagtccaaagcttcaatacgctttcctgtttttttcactagaatatttcttttactgctgctcttcattcttttgccacatgttcatattagaggattggtacagcctttaaaacttcattgacaggagccaaatccagtatccactgatttcttctcaaacggcactctaacccatcagatacgcccggcagtttcattctcatgaatactctagaccatgaaaaaactcaataggacacagacgaatccaatgaacagaagaaggaatctattgagttttgggatatttggtgcattcgatcggtccaggattatgaaacctaaacctcccattgtaaataggaagctggatgcaagtccttccataatatattgtccatttactctgtaggccaagaaagctactggcctctgatgcccatgttcatcagtcatagaaccgacacttggaggttcaacaataacatcataaattattcctccggtgatgaggaagtaagacaccaccaccagagcactacacagtcatggccgacggcatgtgcaaccagggcggcttcttcagcttcaggttgggacattcgagcacctaagaacgggacacggtacaaagtctccatgttggtggcagcaagggccgttctcccccggccgtaatggccgaattcccgggcatatgtccggtaccgtcgactgnnnnnnnnnnnnnnnnnnnnnnnnnnnnnnnnnnncggccgcttcctcgctcaactactcgctgcgctcggtcgttcggctagaacggagctagcgccctatagtgatcttaagtctt

SEQ ID NO: 122051 - DNA, 1049 bp, Homo Sapiens
  misc_feature (42)..(80): n is a, c, g, or t
  misc_feature (83)..(117): n is a, c, g, or t
ccagactgatcgatcactatagggcgctgccgtcgttgtagnnnnnnnnnnnnnnnnnnnnnnnnnnnnnnnnnnnnnnncgnnnnnnnnnnnnnnnnnnnnnnnnnnnnnnnnnnncagtcgacggtaccggacatatgcccgggaattcggccattacggccggggtgctgccaccaacatggagactttgtaccgtgtcccgttcttagtgctcgaatgtcccaacctgaagctgaagaagccgccctggttgcacatgccgtcggccatgactgtgtatgctctggtggtggtgtcttacttcctcatcaccggaggaataatttatgatgttattgttgaacctccaagtgtcggttctatgactgatgaacatgggcatcagaggccagtagctttcttggcctacagagtaaatggacaatatattatggaaggacttgcatccagcttcctatttacaatgggaggtttaggtttcataatcctggaccgatcgaatgcaccaaatatcccaaaactcaatagattccttcttctgttcattggattcgtctgtgtcctattgagttttttcatggctagagtattcatgagaatgaaactgccgggctatctgatgggttagagtgcctttgagaagaaatcagtggatactggatttgctcctgtcaatgaagttttaaaggctgtaccaatcctctaatatgaaatgtggaaaagaatgaagagcagcagtaaaagaaatatctagtgaaaaaacaggaagcgtattgaagcttggactagaatttcttcttggtattaacagagacaagtttatcacagaattttttttcctgctggctattgctataccaatgatgtcgagttggcattttctttgagttgttcccttaacaatatattccatatctacaatataatattccaattaaggggaccatttttaccaccccccttacattctggggatgaacttcgatttcaaaattactaaaatccgagcagatccgtagcgagaatcgggacgtggacagttacct

SEQ ID NO: 122052 - DNA, 934 bp, Homo Sapiens
  misc_feature (175)..(175): n is a, c, g, or t
tccgattatttacttctaaaccgaatcatccccaaaatgttaagaagttgtaaaattatcacttaacttgaaataatactggaaatatcggaaaaaattcttaatgaacacctcataacgaaatgcccactcaaacatcattggtatagcattaggccaaccggtaaaataaatnctggtgataaacttgtctctttaatacccagaagaaattctagtccaagcttcaatacgcttccctgttttttcactagatatttcttgtactgctgctcttcattctttgtccacatttcatattagaggatttggtacagcctttaaaacttcattgacaggagcaaatccagtatccactgatttcttctcaaaggcactctaacccatcagatagcccggcagtttcattctcatgaatactctagccatgaaaaaactcaataggacacagacgaatccaatgaacagaagaaggaatctattgagttttgggatatttggtgcattcgatcggtccaggattatgaaacctaaacctcccattgtaaataggaagctggatgcaagtccttccataatatattgtccatttactctgtaggccaagaaagctactggcctctgatgcccatgttcatcagtcatagaaccgacacttggaggttcaacaataacatcataaattattcctccggtgatgaggaagtaagacaccaccaccagagcatacacagtcatggccgacggcatgtgcaaccagggcggcttcttcagcttcaggttgggacattcgagcactaagaacgggacacggtacaaagtctccatgttggtggcagcaagggccgttctcggcctcaagccccacgcgcctcccggaaacccccggccgtaatggccgaattcccgggcatatgtccggtaccgtcgactg

SEQ ID NO: 122053 - DNA, 1135 bp, Homo Sapiens
  misc_feature (217)..(217): n is a, c, g, or t
  misc_feature (240)..(610): n is a, c, g, or t
  misc_feature (655)..(680): n is a, c, g, or t
  misc_feature (913)..(963): n is a, c, g, or t
  misc_feature (1042)..(1061): n is a, c, g, or t
ccccgtggctgagaagcgcacgtttcggaggagaaggcgacagtatccgtagcagcaggtcgaacaggggactggaggagcttcagggaaagcctggtttttatgtctgtagggtttgcacatttgagtggagtagatttttaatgtggtaaggggacgacattatgaaaacgccagcaagagcatgttgaggttcatggcttatgatggcatttgnaacaatatatttcatgagtattnnnnnnnnnnnnnnnnnnnnnnnnnnnnnnnnnnnnnnnnnnnnnnnnnnnnnnnnnnnnnnnnnnnnnnnnnnnnnnnnnnnnnnnnnnnnnnnnnnnnnnnnnnnnnnnnnnnnnnnnnnnnnnnnnnnnnnnnnnnnnnnnnnnnnnnnnnnnnnnnnnnnnnnnnnnnnnnnnnnnnnnnnnnnnnnnnnnnnnnnnnnnnnnnnnnnnnnnnnnnnnnnnnnnnnnnnnnnnnnnnnnnnnnnnnnnnnnnnnnnnnnnnnnnnnnnnnnnnnnnnnnnnnnnnnnnnnnnnnnnnnnnnnnnnnnnnnnnnnnnnnnnnnnnnnnnnnnnnnnnnnnnnnnnnnnnnnnnnnnnnnnnnnnnnnnaccaagaattcggaacgagggttggagcggccgcggctgtaggcnnnnnnnnnnnnnnnnnnnnnnnnnngtgcttctttgctttaggctcttctagaggagccctcgccccgcaccccgaccgcttctcccacgacagaactgcacttgtagccggagacaactgtaacctctctgatcggtttcacgaacacgaaaatggaaagtcccggaaacggagacacgacagtgtggagaacagtgacagtcatgttgaaaagaaagcccggaggagcgaacagaaggatcctctagaagagcctnnnnnnnnnnnnnnnnnnnnnnnnnnnnnnnnnnnnnnnnnnnnnnnnnnncaccgagaccgcgactccaggcatcagcaggactcagacctctcagcagcgtgctctgacgctgacctccacagacacnnnnnnnnnnnnnnnnnnnngcctacagccgcggccgcaagctatgccctttagtgaggataattttagcttgacactggccgtcgttacaacc

SEQ ID NO: 122054 - DNA, 1111 bp, Homo Sapiens
  misc_feature (250)..(487): n is a, c, g, or t
  misc_feature (534)..(551): n is a, c, g, or t
atcttaggttcctcctttgattaggggatttttgtttcataggggcggacttttgaaaacgccgcaagtgctttttaggttctgacatttttacatttgatcaatttcttcctgcttatcccctggtttttggataccgttttgcgccttggatgagttatccggtagcgccacccgaagaccgagccagcggagtcagtgagcgaggaagcggaaaacgccctatacccaacggccgtttcccgggggnnnnnnnnnnnnnnnnnnnnnnnnnnnnnnnnnnnnnnnnnnnnnnnnnnnnnnnnnnnnnnnnnnnnnnnnnnnnnnnnnnnnnnnnnnnnnnnnnnnnnnnnnnnnnnnnnnnnnnnnnnnnnnnnnnnnnnnnnnnnnnnnnnnnnnnnnnnnnnnnnnnnnnnnnnnnnnnnnnnnnnnnnnnnnnnnnnnnnnnnnnnnnnnnnnnnnnnnnnnnnnnnnnnnnnnnnnnnnnatgaattcggcatgaggctgatgttggagcggtcgcggctgtaggcnnnnnnnnnnnnnnnnnngattttttgtgcttctttgctttaggctcttctagaggatccttctgttcgcgccccacgccctcgccccgcaccccgaccgcttctcccacgacagaactgcacttgtagccggagacaactgtaacctctctgatcggtttcacgaacacgaaaatggaaagtcccggaaacggagacacgacagtgtggagaacagtgacagtcatgttgaaaagaaagcccggaggagcgaacagaaggatcctctagaagagcctaaagcaaagaagcacaaaaaatcaaagaagaaaaagaaatccaaagacaaacaccgagaccgcgactccaggcatcagcaggactcagacctctcagcagcgtgctctgacgctgacctccaccctcgtgccgaattcgcggtagtgttacccttctgatgttggaacaagggtgggaccagacactattgctaggtttcttggtgccatctgatctgtgtctgaattttctgccactgtgttcagatgagctgaaaggaacttaagtgtttcagagtgatgttcaggcaaatcgtgaat

SEQ ID NO: 122055 - DNA, 1254 bp, Homo Sapiens
  misc_feature (54)..(142): n is a, c, g, or t
  misc_feature (428)..(498): n is a, c, g, or t
gctcaataaaaatagtacgccccatgtggtctcttcaaacttgcttttttcctnnnnnnnnnnnnnnnnnnnnnnnnnnnnnnnnnnnnnnnnnnnnnnnnnnnnnnnnnnnnnnnnnnnnnnnnnnnnnnnnnnnnnnnnntatatctaattattcacctattttcctgtagacagacatacatttcactttttccagttattaactattataaatatgtaactatgaacattcttacacattcctcctagtggccacatgcaagagtttgctggacatacaggtgggagttggaagcaagatcataaggtctgcaaatgttcaagtctgtaagggataattgttttttaaagcagtggtgcctgtttacacatccacaatgttgtacaagtccctacagatctaacaactggtactgtcagacccnnnnnnnnnnnnnnnnnnnnnnnnnnnnnnnnnnnnnnnnnnnnnnnnnnnnnnnnnnnnnnnnnnnnnnnctacagaacatctatttatttaaaagccctatttcctcttgtgtagtcttcactatttttctatttttttaaataggaattctctatatttgtgattatgaatccttcatcagttatttgtattataaatgtcttctcaagttgtggatcatcttctcacttcaagtgtttgcttaatataagccttgagttttaacagaattgacttaaccatcttgtcctttatgattactactttatgtctcaagagattctttcctgccctaaggcttttttcatccaaacactgacaatttttgctttttgtattaaagcccttaacatatttggaacttatcaccaggtaaggtgagagaaagtaaaatttctttttttcccacatgaatagccattgttctgggattacttagggagtggtccttcctgtccccactgacttgccatgtcaccaggtcattttgcaaaggtcaacatatgcacgggtgagtttctaggcccttattttgttcccctgctcagaatgcctacctctgcaccatgacactgtcttgacaataaaacttggtatcacatagggtgcgtgtccccaacctctccttcatatttagaagcatttggtaattttaagtcctttgctactccatataaacacctgcttgtttcattcaataaatcgacgcgtggtcgacgatatcccgggattccggccggtaccagcctgcttttttgtaccactggtttatagtcacatgcttc

SEQ ID NO: 122056 - DNA, 837 bp, Homo Sapiens
aggttatcattccactttgcctttattttttataatatatttaagtagaacatatttaatatgtaaaaaactgttatctattagttataaagtataatgtattaatagcatatagtaaacacttgtaagcctaccaggaggaaccagaacagctgcataacttggcatctacctatgtgctcctgtcccttccacttcctccttctgtgggtaattactatgctcaattttggtttatcagttaccttcgtcctctttaaatagcatagttttattgtatacgtatgcttagactacatattctttggttttgcttgtttttgggctcaataaaaatagtacgccccatgtggtctcttcaaacttgcttttttccttaatattttctgagattcattcttattgtgaggtatagctgtagttcactcatttccactactgaataatatcccgtagaatgaatacatatatctaattattcacctattttcctgtagacagacatacatttcactttttccagttattaactattataaatatgtaactatgaacattcttacacattcctcctagtggccacatgcaagagtttgctggacatacaggtgggagttggaagcaagatcataaggtctgcaaatgttcaagtctgtaagggataattgtttttttaagcagtggtgcctgtttacacatccacaatgttgtacaagtccctacagatctaacaactggtactgtcagacccacctttgcaatcttatggatataaatggatctcatgtggtctattcaatttcctgacatgctacagacatcattattaaagctatt

SEQ ID NO: 122057 - DNA, 553 bp, Homo Sapiens
tttaattgcatagttttattgtatacgtatgcttagactacatattctttggttttgcttgtttttgggctcaataaaaatagtacgccccatgtggtctcttcaaacttgcttttttccttaatattttctgagattcattcttattgtgaggtatagctgtagttcactcatttccactactgaataatatcccgtagaatgaatacatatatctaattattcacctattttcctgtagacagacatacatttcactttttccagttattaactattataaatatgtaactatgaacattcttacacattcctcctagtggccacatgcaagagtttgctggacatacaggtgggagttggaagcaagatcataaggtctgcaaatgttcaagtctgtaagggataattgttttttaaagcagtggtgcctgtttacacatccacaatgttgtacaagtccctacagatctaacaactggtactgtcagacccaacctttgcaaatcttatggatataaaatggaatctcattgtggtcctaattcatatt

SEQ ID NO: 122058 - DNA, 1310 bp, Homo Sapiens
  misc_feature (46)..(66): n is a, c, g, or t
  misc_feature (1288)..(1288): n is a, c, g, or t
ggcacacagattgttgtttttttaaaaggatttttatactatattnnnnnnnnnnnnnnnnnnnnngggatcaatcaacatatatcttagaagtccttccaagagtcttggtatgcaacagccatggaggctgtgacctttttccttcttttctcagcctgcagttcatttaaggatcaccggagatgactcgtgctctagttcttaaaatcaaacttgttctgccaaatccaagaccctgaatttgtccaaattgtagaaacatgcttttaccacccgtccaccaaaatacctcccattcaagtcaacaaccgctttaattgctgattcaactctctcaaattctaaaaatatccgtactgcttcatcatcaggggcaccaggaatttcaaatatcacacattttccaactttgccatatttttcacattcttccttggtttcaacttccaagtcttcatccacctctcccgcaccaaccatgttccttagtaagaccactttagtaggacacttaagtatttcagtcagcggatttgaatctgacttcttggatgcatctgtcaggctcgtgatgtatcctaagctgtgcatgaacggggctgccagaaaagttttcttctttctttagcaaaggaagttcagctaggctgactcaaacttaattccctgattaaaatgctaacatatgtttgtctctttcctgaattccctcaacacagaacagactgtaaaaattaaatgaaaataaaacaccaactaggcatcatttaccaagagactgcaacataacatcagatctcgcaaagcaaacaatctgtaagagaatcagaaatcacatctatactgaaagggcaaaagggcaaagtagagacgacctctgagatggagatagcaggtatattcactgccacactatatggctctgtccttcatgctctaaacacataaccaagatttcttcctgaggactactcattttctgcccaagtctctcaccatcttttcctccacaagccttcatctctctacgtctgttctgaaaaaataaagatgagcctcaggattcctggtttcacaaaacggaagtggcagtgcatcatatgaacaggacggcctgtgttctagtgatggcagggccagccctctccctctggccacacgcctcattgtccccctgctgacacatgaggatcaagactggccatgtctgatatggatggggccagtcctttccctctagtcacacgcttccctggggacacacctttctctgtggcgtcgcccnacgatgatcttgccgcggccgc

SEQ ID NO: 122059 - DNA, 1099 bp, Homo Sapiens
  misc_feature (39)..(39): n is a, c, g, or t
  misc_feature (48)..(48): n is a, c, g, or t
  misc_feature (183)..(849): n is a, c, g, or t
  misc_feature (970)..(990): n is a, c, g, or t
  misc_feature (1013)..(1039): n is a, c, g, or t
ccaaacttctgtagttaccgtatagccccactcagactnttacacgcnaactcctcgtgtgtaacctgttccagtgctctcccatgcgtaatgtgtctaccggtggatcagacgtagtcccggtaagccacggtcggctgacggggttctgccacagccagctggagcgacgacgtcaccgannnnnnnnnnnnnnnnnnnnnnnnnnnnnnnnnnnnnnnnnnnnnnnnnnnnnnnnnnnnnnnnnnnnnnnnnnnnnnnnnnnnnnnnnnnnnnnnnnnnnnnnnnnnnnnnnnnnnnnnnnnnnnnnnnnnnnnnnnnnnnnnnnnnnnnnnnnnnnnnnnnnnnnnnnnnnnnnnnnnnnnnnnnnnnnnnnnnnnnnnnnnnnnnnnnnnnnnnnnnnnnnnnnnnnnnnnnnnnnnnnnnnnnnnnnnnnnnnnnnnnnnnnnnnnnnnnnnnnnnnnnnnnnnnnnnnnnnnnnnnnnnnnnnnnnnnnnnnnnnnnnnnnnnnnnnnnnnnnnnnnnnnnnnnnnnnnnnnnnnnnnnnnnnnnnnnnnnnnnnnnnnnnnnnnnnnnnnnnnnnnnnnnnnnnnnnnnnnnnnnnnnnnnnnnnnnnnnnnnnnnnnnnnnnnnnnnnnnnnnnnnnnnnnnnnnnnnnnnnnnnnnnnnnnnnnnnnnnnnnnnnnnnnnnnnnnnnnnnnnnnnnnnnnnnnnnnnnnnnnnnnnnnnnnnnnnnnnnnnnnnnnnnnnnnnnnnnnnnnnnnnnnnnnnnnnnnnnnnnnnnnnnnnnnnnnnnnnnnnnnnnnnnnnnnnnnnnnnnnnnnnnnnnnnnnnnnnnnnnnnnnnnnnaagaattcggcacgaggcgcggctgtaggcttagaaaagaaggaaaaaggtcacagcctccatggctgttgcataccaagactcttggaaggacttctaagatatatgttgattgatcccnnnnnnnnnnnnnnnnnnnnnaatatagtataaaaatccttttnnnnnnnnnnnnnnnnnnnnnnnnnnngcctacagccgcggccgcaagcttattcccgtttagtgagggttaattttagcttggcac

SEQ ID NO: 122060 - DNA, 1429 bp, Homo Sapiens
  misc_feature (275)..(313): n is a, c, g, or t
  misc_feature (647)..(647): n is a, c, g, or t
  misc_feature (1258)..(1278): n is a, c, g, or t
tgaagaaggcagctctcactcaggcaaagagccaaaggacgaaacaaagtacagtcctcgccccagtcattgacctgaagcgaggtggctcctcagatgaccggcaaattgtggacactccaccgcatgtagcagctgggctgaaggatcctgttcccagtgggttttctgcaggggaagttctgattcccttagctgacgaatatgaccctatgtttcctaatgattatgagaaagtagtgaagcgccaaagagaggaacgacagagacagcgnnnnnnnnnnnnnnnnnnnnnnnnnnnnnnnnnnnnnnnaaggcgtaaagacagacatgaagcaagtgggtttgcaaggagaccagatccagattctgatgaagatgaagattatgagcgagagaggaggaaaagaagtatgggcggagctgccattgccccacccacttctctggtagagaaagacaaagagttaccccgagattttccttatgaagaggactcaagacctcgatcacagtcttccaaagcagccattcctcccccagtgtacgaggaacaagacagaccgagatctccaaccggacctagcaactccttcctcgctaacatggggggcacggtggcgcacaagatcatgcagaagtacggncttccgggagggccagggtctggggaagcatgagcagggcctgagcactgccttgtcagtggagaagaccagcaagcgtggcggcaagatcatcgtgggcgacgccacagagaaagatgcatccaagaagtcagattcaaatccgctgactgaaatacttaagtgtcctactaaagtggtcttactaaggaacatggttggtgcgggagaggtggatgaagacttggaagttgaaaccaaggaagaatgtgaaaaatatggcaaagttggaaaatgtgtgatatttgaaattcctggtgcccctgatgatgaagcagtacggatatttttagaatttgagagagttgaatcagcaattaaagcggttgttgacttgaatgggaggtattttggtggacgggtggtaaaagcatgtttctacaatttggacaaattcagggtcttggatttggcagaacaagtttgattttaagaactagagcacgagtcatctccggtgatccttaaatgaactgcaggctgagaaaagaaggaaaaaggtcacagcctccatggctgttgcataccaagactcttggaaggacttctaagatatatgttgattgatcccnnnnnnnnnnnnnnnnnnnnnaatatagtataaaaatccttttaaaaaaacaacaatctgtgtgcctctctggttgtttctcttttttattattactcctgagttgatgacattttttgttagatttcatggtaattctcaagtgcttcaatgatgcagcatttcttgcact

SEQ ID NO: 122061 - DNA, 227 bp, Homo Sapiens
catattttacctttcttctattctttttgtctttccagctcccgctgtctcgtgtcgttcctctcttatggcgcttcactactttctcataatccttaggacacatagggtcatattcgtcagctaagggaatcagaacttcccctgcagaaaacccactgtggaacaggatccttcagcccagctgctacatgcggtggagtgtccaccgcaatgagtacagatta

SEQ ID NO: 122062 - DNA, 600 bp, Homo Sapiens
tttcgtttgtcttcacttttattgaaatacaaaatgttaaatatgcaagctgtactaatgaaggtgctccttgaagttgattaaggagggctgggctgcttgtggcttcctgcaggggagagaaaaaacagaaggtcaagatggttaccccttgctgccttcatcccatccctcatcatgattcttcttgcatcctcttccatgtgctcttgccacttcccttgacttccatctgtgacatcttagtctattcaccaaaatgtgatctttgtaaaacctaatttaaagcatattatttcttttttctaaagcactagaaaggcttcctgtctcgctcagataataatttttaaaggtttaccatgtgataacatagaaccacgcgatctggcttctcactgcttctcctaatttgtctctgccattttctccactcacgttctcttttggtcacactgtctcattgcagttctttaaacatgtttagtgcattgctatcccagggcatttgcactggctgtattctgtgctggaacacttttcctgcataagaaccacattattcactccccaactctgtccattctttgttctgatttc

SEQ ID NO: 122063 - DNA, 1344 bp, Homo Sapiens
tttttgtttgtcttcacttttattgaaatacaaaatgttaaatatgcaagctgtactaatgaaggtgctccttgaagttgattaaggagggctgggctgcttgtggcttccattttcaattgccaggaaagaggtagaaatatcttgtcatggacagtcgttctatggtgggcatttgagctttggcccttggagtttcaaatgattgctgtaccttccgaaatacttcctctaggtggcagcaccaagaatatttctggaagcatgtgatgagttgtgtgatgaagatagagcccattgtgctgtctctccaggacacgttgtgtggcgttgaagagcagaaagcaatgaagtccttctccacgtgggtcttgtaaacagcatcttcctccaggttctcagatgactgtgaagaggccacttccaaggatgctggagagtctctgacccacagttccccacggtttgcacctctgcaggcctggacaatgatgaccttgggtttgtccttcagactgaggcagttgcggttgttgaatatctggaagatggtgtcataaagcagcacatctggttttttctcatcatgcacagttccgcagattccctccaggatgccatgagacatgagtaccaagaatgtgctgtcagaggacttgtgctctggtctggtagcaaatgccctcagcgctgactccatatccctggctgtcagattctcttctacatctacactatagtccagaccctcaagtagctccttcatccctgtgatgtcaaagtcagctccattcctcggaggcagatggtcaaactctgtattgcatatgatgagagccaggcgtgtgcggttgtttctctcctttattggatagatctcttcagctctttctttacatagtctcaggaattcttcatgaggacaaagcttgagggcatctgtagattctcctgactcaggtggtccagcctccatattcggatgagcttttttattgggggatatttggtctatgttaaaaaaggtttgaagaagcatttgtcctgccatacgttgcttctcttgcatagagtctgccatgacccgaactttgtcttcagttttagcatcgtaatatttctttttttcctcttccttccagttcagtacattttgttccaccaagttatccaaaacaccagtgaggaaatctttgcccagggattccaacaccttaagtggcttttttctgtggttgccttctgccatagggaacagcctctgtccttttttacagcgttggaaagagcctcccccggccgtaatggccgaattcccgggcatatgtccggtaccgtcgactg

SEQ ID NO: 122064 - DNA, 648 bp, Homo Sapiens
tttttatcctccaaatatgtttattccatggctaatgctacaattgccataaaatccaaataattacaagaataaatacaggagcaatagaaataccaattttctttcaactcatgataaaatgatctgcatcatggattgagaaaggattggtatcattgtgaagtcacataatctttcccttagtaaaagcattattgaaaatggttactgtcatccccacccccaatcatttagtgctgtaagaaatggtgcactgaaggaaagcaatgatatctcttcttttttttctatttcatatagatagcatagcacctcttcagctctttctttacatagtctcaggaattcttcatgaggacaaagcttgagggcatctgtagattctcctgactcaggtggtccagcctccatattcggatgagcttttttattgggggatatttggtctatgttaaaaaaggtttgaagaagcatttgtcctgccatacgttgcttctcttgcatagagtctgccatgacccgaactttgtcgtcagttgtagcatcgagatatgtctttggttcctcttccttccagatcagtgcatgttggtgcaccaagttatgcaaaacacaagggaggaaatctttgccaagggattgcac

SEQ ID NO: 122065 - DNA, 1479 bp, Homo Sapiens
  misc_feature (160)..(195): n is a, c, g, or t
aaatgactattttatttacacaccctattcataaataattgaatcctctttttgactgcacaatgattccttgaagatagcctaatgattacactgagtgactacaagtagatcagtgggcttacccatctgtgtgtgaccaccttctcacatctgtacnnnnnnnnnnnnnnnnnnnnnnnnnnnnnnnnnnnncagcggggcgggaaccccggggcctccgggactctcaaagcaccagcatttggctcccagcatcagtaggggggctcctgtgggaaaactttgccctgtacagaggtgtgaatttgcaaatattttaattcacagaaactcaaggagagggtgggggtgggggctggggtggtgtgttgccgcccttctgtctttatccaggccttctccagcccccgtaagtggcaacagcattctagagacatgcagtggtgtgctagtaccatacacacaacacaaacgacacagccagcaacagtggctgggctggttggtggggggcctctggcacctccaagtctcaggctctgtcacagagcagggcaggtctggtccgctcacagggtcctcacagccacgggatagaggagggacaagtgctcagcccctttgatgggtagctttctggtggtgtagtagtggatgacttccgggacactgtcgaacggagggctgttctgacccagaacgtatttctctttgtttttggccagtttcattcgtgcataaaaccctggttgctcctcagggagagggagtagtcatgcttgctggtctggctgttccggacaaggtagctacactccttgcagagtcgcagcaggttctcggcgtctcctctgctgatggctccgtgataccatatttgcttctccagggggacggcaggatccaccctttctcctaggatcccgcagaactcagggctcccatgtttgataggcttacagccccctccaggggcacgaagctggcgccgccggtcccgcgaaggtgagggggatgactgccgcttctcgttgccattaaactgtgctgccagggctgggatggtgacccggttccactcccaaggctggtcgtactcatcggcgggcctgtcgtcatcctggggcagcttgctctcccgcagtcgggggctgactgtgctctccgagtccgagtcaacactttggccttcaggttcgtaaggggtgtcatataactggatacctttatgctgggaccggacactttcctgcctctgaaattctgtcatgatcctctgtgcctcatagggctccatgtagccagcactctccccctttcctgctttgctcttgagatcattcttggcatcaaagggatctgagtagtcatcggctatggtcaccttgtccttcttgccggccccgctctcctccgcggctgaggcggcgcacttgttgagcagtttcttgcctccgcaggccgtcgggctccagg

SEQ ID NO: 122066 - DNA, 1211 bp, Homo Sapiens
  misc_feature (171)..(234): n is a, c, g, or t
  misc_feature (496)..(511): n is a, c, g, or t
  misc_feature (679)..(713): n is a, c, g, or t
cttttttcttcttcggctcgcgccttcgtgccccctctcttcgtctctctcctttctgtctgccttcggtgtggttgcgtttctcgctttcgtctgtttccgctttgtgtgtttctctctcctttcttctgcttctctcctcctcgtcgtttttctgtgttttcctttggnnnnnnnnnnnnnnnnnnnnnnnnnnnnnnnnnnnnnnnnnnnnnnnnnnnnnnnnnnnnnnnntcggtgtgtctgtgttcgtgtgcgtttgtgtgttcgccctctgtctttgctgtctgcttttcttcctttgttttgtgctgtcttttgctggcgtgtttctaagcaggttaaaccttggctttttcggaatttatgcgacttcccattatgggtgtccccgcagatctaccccttgtaccagaaacctgggttcaggaaacatctatgaccattggcccattcattacctctttctccgcacccgatcatagatgcctcgagnnnnnnnnnnnnnnnnctatattaaatgactattttatttacacaccctattcataaataattgaatcctctttttgactgcacaatgattccttgaagatagcctaatgattacactgagtgactacaagtagatcagtgggcttacccatctgtgtgtgaccaccttctcacatctgtactnnnnnnnnnnnnnnnnnnnnnnnnnnnnnnnnnnncagcggggcgggaaccccggggcctccgggactctcaaagcaccagcatttggctcccagcatcagtaggggggctcctgtgggaaaactttgccctgtacagaggtgtgaatttgagacagctggagaacaaagagatgtcagccagggagctcccgccccaccctaccccgcccctcggagctggtctgcctttgttcatcctggaaggcatctctttggatttgcaaatattttaattcacagaaactcaaggagagggtgggggtgggggctggggtggtgtgttgccgcccttctgtctttatccaggccttctccagcccccgtaagtggcaacagcattctagagacatgcagatggtgtgctagtaccatacacacaacacaaacgacacagccagcaacagtggctgggctggttggtggggggcctctggcacctccaagtctcaggctctgtcacagagcagggcaggtctggtccgctcacagggt

SEQ ID NO: 122067 - DNA, 121 bp, Homo Sapiens
gaatttgcaaatattttaattcacagaaactcaaggagagggtgggggtgggggctggggtggtgtgttgccgcccttctgtcgtcttctcgcagccgtatagtagtagtaggcggccgct

SEQ ID NO: 122068 - DNA, 1218 bp, Homo Sapiens
tttttgacctcattaaagatatgtcgttcatttattctgaatcttatattgatagataataccagaagatttcagcatagcagataaaatacagcaaatcctaaccagcacaggttttagtgacaaacgggcccgttccatggacatagatgacttcatcaggtaattacatttttgttttcctaagtgtttacatttctttactgtgacaccttcagattggagattttaaaggcttttaagcggtataaggtgctacctgggagagttattgcatagcacttccatggcatggaatagtatttggtgtagaagatggaggctagttagctgcagcagaatgaacattttctttaagaacagtagtaaagaacagtccgagccagaagattgcctttgtgttaatgtggtgtgcaggttccaatgtggtgtgcaggttcctcccttcctgctccttccccaactctcattcatagtcttagtcttaatagcttatccctccaaaatagtccataaggtagaaaaatcataatacaatgtaactggatctgatttgttgaaaattgtccttactgggaatagctgttgttaaatcaatcttaagcatacaataatgccagttagaatcctacctggttatccatttaggaataatacagttttgtagcctgaagcaagttctacacttctcaagtaaaaagctgtcataattatctaggtaatttagaccaaattttgttttgcttgaattaagcaagtaagtcttatgaaaacagaataaggcttcaattaattacccaggtaattactaacctgtacttactgtttttaatcattaagatgttaactttcagaaggtcttgcctatttagccaattcacttttaaagcttccatgttctagaggctgaataaaaaatgagagtagattgttctaaaagtcattggtttgactttttctaagctggaaacacagttctatataactaagacaaatggagtttatattttattggctggctagcagtactactgagtcattttagatgttaatcctaggcattgaatactattcataaatatctactttgcttttttagaaatttatctggacctgtttctatgggccagcctaaaccggacgcgtgggtcgacgatatcccgggaattccggaccggtaccagcctgctttttgacacgctggttatagtacaagcg

SEQ ID NO: 122069 - DNA, 2890 bp, Homo Sapiens
tggaccggtccggaattcccgggatatcgtcgacccacgcgtccggtaagatatattctatttgtgtttatttcaaagggaagaggaaggatggacaactgttacaattgaccttgcaaaggatatttaaaaaaaaggtagtttttgagattaaccaactttcaaagggcaataaagacatgtgaatttgctcattttaaagcacaacagatgattagcttcaaatttattatttgcattggatgggtactgtctttggaaagtctccttatagacaaatatgctgccttacactatgatggcttcattctgatcaggtattttaaaaattagtaccagaaaagatactggaggtaatataatacagtccttcagctttacagatagtgaaaactgaaggccagaaaaggaactaaaactcagcagttcataggggtagagggaaataacctgagaaagccgagttaaatcttaaaatttttactataaggatagagatgatacaagtgaactctgcaaaatagttttgtgaaattaaacaaaaaaatctactcttaatgtatatttcatatttgtttaacaaaagcagcttgatgcctttgttctggattatacattaagaacaagcattattttaattatgtagtaacatttactatgactttgaagccagatttcaaaatctggctttgttaaattaattggaaacactcttctattaagttaggtattaaaaaaagccaaatatcaataaagatatttttattaattttttatagaaacaaaatagctactataactctattatagtatattaacagcacttagtattatattgacttaaacatagtagctaataaaactagtttatgacatctattgaaattctcagtctgacagttttaaaatagcttaaaactaagcaccaggtatatgaaaaaggaactggaaattttaattgtccagaaatcataggaatactgggaacctgtagttatgggaaatggctgtttttctgaagttgaaaccagtttcaattacaaaaccctctgaaattttgctaagcctatagttatctccctaagaaccataaaaaaagataattttattgttaatttcattccagtttagcttcctcattttacatgttgggagtcatgccctttaatatgcctggcactgcacggtggcagtagcagacttgggcttacccagaaccctaagtctctgacgctataggatagcgaaagaggtaggcaatcgtaacagacactgtataggataaatagggaagagaatgagagaaccaaaataaaaataatttaagaaacaattgttttactgtacatgtgaataacaagaaatggtacggggaatgtgaataacacgaaatggtatggggaatgtgtgactagtgaagcatattttaacttttttattactggaggaacagagctaaaggcctaaagaaggccttacagtatataacagtaaatagaagagtaacatctttatacaataaactgttagaaatgataagtgtaaagttgtgcgtctctgcggctcctgaacttgaagattattatgaatagattggaccagcattatatattaaaaactttgatacttagaactttccaactttaaaattcagaatcataaatggtgacaacagtagtagtattgaaccaaaaatagtcaagtaaataatgtctcagtaaagcaaaagcattatcttctcaaatacaaaaaatacaaaattcatttcttttcttgaccttgaaaatttctgttttccaaatacctaggaaaaatgaataccttctgcgttgaatccatgtagcaatctgatgaagtcatctatgtccatggaacgggcccgtttgtcactaaaacctgtgctggttaggatttgctgtattttatctgctatgctgaaatcttctggtattataatattatggactgaacagtgaattctgtagtttttttccaagagttgttgcactgcacttgatttaaatgcagcagagagtgtcttgtttttcctaacaaaggttatccttactagaccatcccattcctgaaaattgatggttggtggtggattcttaggttctatccttacaacactggattccaccttgggcggtggtctgaagttattctttcccactttcattagatggtccacacgtgccaacagctgtgtattaattgagagtctgcagtataacttatctccaggttttgcaaccagtcggagggcaaattctctttgaaacataagtatagcacacctgaaaaaaggtcgatgtagcaacagcttgaagacaaaaggcgaagagatctgataaggcaaatttgccacacaagtatcaaagaatggcaaatctgttttcagcacatcacccaccagtacttgaagtttgctggccacaggcgtgccctgaactcttttgtgaagttcagctactagccttgggtcaagttcacaagcaacaaccttttttgccttttctaacaactttacagtcatgttgccagttccaggtccaacttccagcactacatcagttggtcttaaggcagccttatcgataatgctgttaataatgagaggatttttcaaaatgtgctgccctatccccgtgttgaacatgagtcctccagcgctcttcagctcccggcgctgctcctgccgcccgcggcggcggccgatggcccccgacttgaccttcggcatctcggcagaaagcgggcccacaggcccgggacgtcaaggaggaccaaagagggctagcgtgagaaagccaccacgtggggatcccgccacccacgcgtccgcggacgcgtggtcgacgatatcccggtaatccggaccgtacca

SEQ ID NO: 122070 - DNA, 2234 bp, Homo Sapiens
  misc_feature (2114)..(2148): n is a, c, g, or t
  misc_feature (2152)..(2194): n is a, c, g, or t
tttttttccagaaaaaatatttatatgacatatggcctagtattctaaatcaaggcaggatcttccaacaagagcaggagagagaagaaaacatttacattctataacatgattataagaattgagatagatgaaatgaaaaacaacatctttgaacaattacagttgacagaacagctttcccttattctacttgctttaaataactcatatctgtaaacttgaacaccaactctggctgatttaacagtcttaatcccttgattttccatactgaacatcacccaatatatagtgaagatcaaaggcgacttcttccaccaagctctgtgtccagctgtgtttctgaggtcatacgtgtcccctcacggacaccagatcagatacttcggtagtcagagccgcgggctacaaaggcggcagcttcccattccacagtgaagaaagaaattgttccaaaaaacccaaatatcaccatgaccaggagttgccagtgaaggagaaggtagttgctgtagaaaaatgccacggctgcgcaaatagactgaacaaacttgaagatggcaaatgctggggcgctgtcttcagaatacagaaagcccaagatactaagcagctgggtattaaagcagctgtctccaaggcccaacagaaaactgcagagaatggcaacttctttgctggatttgatgtaagcactgctgtcagttcctttaacaggagcaatcggggcatctccaggcatgttgagaaatattagataaaaagctatgaagtgcaccaggatgcccaacagcacaactggatttctaccaaaacgattgttcttgctcagcaggccgaagaggcttccacctaaaatttctccaatgccgatgaaaatgccagaaagtccaataaggcttttctcttctgctccaaatttatttgtagcaccaatacaggttccatatacaccagagaagaaagttaattccagacctgtataagcagttgtaatactaagaaggagcatctccttggtgacacataacttaaaagactttttaaaagcatctactgcctttgtcagattgttctgggcagactcgttgacttccatgtcctggtcatcagaagactcatcttctcctaggacattttcagaatctggtttccgaatgagaaagaatagaactgtccccacaaggctaatcaccgttagggcaataaacactgttcttcggtcactctctgatatctgagttttcccttgccaggcaaaatatatgtagagatttccaaagaacaagctagactgcagaagtgcccagaaaatcccactgtttctcccaatgctgtgctcatccgaattgattgtcaggcagtttccttgtgctgtccaaagcacagcagcagcaattccaatgaaaacagaggctgtgtagaaggaccacgggaaaggctggatgaaaacggcaatgtacatgctgtaaaataaaccactggcaaacatagagagttgaggtcctacacatggcaaccactgaccggtgtaatcaaatttgaagcagagaacactccatagataatagccatgctggtatatccactgccgtgaaaatctgtcctatttaagctcctgatgacagtttgcgccacatttccacaagtttgaaaggcagtgaacataaacataaaggcaactcctaaaataatgatgttgaaaagctttttagattccggggacattttggctcagctctgccggaggcagcagcccagggcagtcagctctcctcggggcgaagccactgacaatcctggagaaagaaatgagatggtgagtggagaaggcagatgtaggagccaggcagccaagctgtcaacttccagttcctggatcggaaccccaggtttagggcgacagttctctcccaccgagcagattaggatactcctaagagagcgatccgagtacggtagagcacaacccccggagaagcgccaagaatttatccgctccaggttgaggggcccacgaaggggattaaagggccaagtgccagccgcagcagccggcccccggccgtaatggccgaattcccgggcatatgtccggtaccgtcgactgnnnnnnnnnnnnnnnnnnnnnnnnnnnnnnnnnnncggnnnnnnnnnnnnnnnnnnnnnnnnnnnnnnnnnnnnnnnnnnnataacgacctagcgccctatagtgatcgtatcattttttt

SEQ ID NO: 122071 - DNA, 1611 bp, Homo Sapiens
gcagataaataggattttattaaaatcaatgtctccaacaatacaaaaactaaatattaaggcatcttttactcccatcctggtatatgcaagagaaatgttttaagaaagggccagcatttcttactaaaatgctttctagtgtatttggcagatttgtttttatattctcctattccacataccactcaaagcactcatgatcaaacatcttgacccaaatcaagagaaaagtataaatagatattaatttattaaaaggaagcagttcatctttcaaaaattaaaagaaactacaaaaagtatcatgtataaagttcaaataccagcatttaaatttctctgaagtaatttacggttcagtaattaagcaaaagaagagatgaagacttaagagaagaagcctattaatatggattgcactatggagtaactgttcactgagtactccgctccactgggatgatagtttgaaaagggcttcatactcctttaagaaaatagcacatccaccaggataagatcatttaaattaacactgattcttattccccatgcctgtccatttataaagctcaaggggcttcataaagtatactaaacagtaacattttcaccttttattaaggcaagtttgtgaaaataatttaatacaacaagatctcttcatgaactttcaacttacaacctttttaatgtaagaaacatacaaaaaattgtgttttataaaaagtcgcctcaataccagaaaatagtaatgaaagattttgaacccagttttactctttaaagaatgctctttccttgtctcaaattccaagtgctactcatcatccttagagccagttttgcttaaatgcttcacaacatcaacccagttccagcctcgaggaagttctcctttgtgatctgttttgtctgccagcttacgcttctgggcttttgaaagttcgttcttttttgtcttttttcttacttgatggggctgtattaggagtttccaattgagatgatattgcttatcgatgttgcggaattgatgggattgtgattctccatgaactgctctttattgtctttggcatattcaaaccaatgtataggtcatagcgggttccaagattagcttctactgcttcctgtagcttggctaatatactctgctttacagctgatgatatggtgttgttaaaaaaagcgttcatagatagaattggaggtgtttggggatatgtttctgtccaggaaatctctattaagaaggctttgggatcaccattttcacctatcctatattgaaaagaaactggacttaattcccggaaactttcatctccttcataaatagagcgtaatgcttctagttccatctcctggtcctcgttggcactcatcgcgccggtcgcggggcgcctcctgagcggacggcgttcgcaacaacgaagagaaagcgaaggcagcggcccagaggccgggcgtccccctttcgcgcctcggctgtgggggcggcacagtcttggcactggcagacgccaactgcgcgcgccccgagcctcggcagcgcccagccgccggcagtgggctgtgggctacgagccggagccgcggctg

SEQ ID NO: 122072 - DNA, 999 bp, Homo Sapiens
cctaataactgatataatttttttaagtgaaatgaaatgttcctttatttacatatgaattaaatagaaaattcaaagtaattcttttaataaaaacccatatactaatatattttaaggttggatactaacagcattttcacaagatccaaagtgtggatgacgaactaggcaataaggacatgtgtgccacataactaagggtaactaaaggaagatgagtacctcacaaccaaaagcagttaactatgcctggcataccaccctgtcatgtgggcagatcactgttcccatgctgggtaagagtctccaagaagggaagcccttatgcagtaattctgtaactatattaaatttggtaatctaacattaaactttttcgtgagcagtgaatatacacatggtcatatgaaaactgccctggagaccgggttaattattaaataaactaaaaggggagaaatgctgatagataaaattatgtcaattccagggtgttcaatggaataaagaaacagcagcagctgcttcaaaagtagactatgatcagaaacctcagatggtaacctttaaaaattgtggaatccagagtctcaacctaaacctacataggagctacagccagggagttctttctaagttcctcaagtgattctgatgattggccaagctggaaacttctgaactgggggagaaagccaacctaggtaaatgtagagacttttagaattcaacatttgattatcatttactccacattttcccccagctgtctcaccttctctatttttctaacagtgaacaataaaagggcttggcaagtgaaggaaaaagtcagtagagtacctaaaatggatttgactatattcaagccactttcatatattaactagataaaaggataccatactgctatttgaaattcaatcacaaagcaaaaatgtcataattttaatgtattttaagggaagacggggttcttaacatgaatatgtaacc

SEQ ID NO: 122073 - DNA, 1046 bp, Homo Sapiens
  misc_feature (60)..(68): n is a, c, g, or t
  misc_feature (368)..(379): n is a, c, g, or t
  misc_feature (384)..(411): n is a, c, g, or t
aagacttcaaatcttttaatctcaaattattagtcacagatgttattttttaaaggactnnnnnnnnnctactgctccttcaaatgtcctaattatcggtttcatacattttttttaaaaaagggggttttctaataagactgtcaaaatattacatctagaatagttatgttcaataaacctgcatttacttgatatctgcatcttcctagtatcacaaattgttttagaaataaaaacacaggggtaggggacaggggacagtttattgtaaaatatgaagcagcaatgattgaagcaagtgaatttctcctttatattcccagccagagcacaaaatgactggatatcctcatgaacgccaagcnnnnnnnnnnnnaattnnnnnnnnnnnnnnnnnnnnnnnnnnnnttccacattcattaaaatctctttctcttgataatttctggtttccagctgactggatgagtttcttctgtggctgtgtcatcctctctgtatactttaatggttttatcagcttcagctgttagtaatcgactttcagactgatcaaaagcacaagcaaatattcctgattcactgtccaaagacccaggttgcacagctgcgtgaactctctgaaaattgtagccagttctccagtcccaaagatgcatggtgccattgtcagctccagatacaagcactccatcagaatttaccgtcaatgtgttaataatagcattatgaccggaaagattttgaatgaaacttccatcagggaatttccactgctttatgttatctggagaaccagatgcaaatgtgtaatgtcttggatgtaaaaccacagccctaactgattttttgtgatttgttaatgtcactcttgtttttccagccaccagatcccataatcgaattgtagtatcatggcttcctgtaataatttgtggttctgcagcctgacatctcactgtagcaactgcatttgtatgtccagataatgtgtgtaccactggctttagttctcacatcccaaatccgtgcagttgaatctc

SEQ ID NO: 122074 - DNA, 621 bp, Homo Sapiens
aaggaacgaaagctagtgttttttattaacgataaaatctatattgttcaggaattttccagtgtgttacagcaatttctgaaatgataaacgaacatattttattattttccttttaaatcagttacttaaaaatgaagactgtttaattattttctccttttctataagtaggattttctttatgtccaaataggacttggtaactaggataatttacccctgaagcaaaatgacttcactgaaattagcaaatcctattgatgatcttaaagtaaacttttctggaaatgagcttgctcaaatcgtaagtgaggattaatgtaaatgtaataaactgaatctgtaaattggtaatgttgaaaagaaaaaacaattgggtaagaacaaaactgaaaactagcagtgtagcagaaagcacactagtcttgggataaggaaatgctgagaaggctgaggggtacattcaataataacaaagagccttccagttctaagtatttgtgactaacaacaacaaaaaaatctgttgtttgctagagaattcttaactctaatgtgaagatatgttctgtgcatttcctttgaacttggccctatgatttcttttcttcctcgtgc

SEQ ID NO: 122075 - DNA, 944 bp, Homo Sapiens
gttgtcgcagctgttttaattcaatcccacgcccctgtccagcaggaaaccccttatagaaaacccaaatcctcatcttggagtttctccttcagccagggcagcacttgaaagaggttgatgtgaaagtctcgggcgtgagcaggtacctgcttttgccgcttctggtttttgcagacatccactactccccagctgattacaccaacttgaatgaaacgacttctcttgtgaactatcaaggggccgccagaatcacctctgcaagtattggggtcagcatagggactcactcctccagtacaaaggaaccgaggggtgaccacctctgagatgtccttgactttgtcatagcctggggcatattgagcatctctctcacagctgcctttcttatccccattcttgatgtagacctccttccgagtcagctttttctcctcctcagacacaaacagagctttgatatcctgtgcagggagcagctcttccttttgttgctggcaagtggtagttggaggaagcctcaaagctcgagttgttccctcggtgcaggggagacaaatgggcctgatagtctggccatatttcagcttattcttgagcttgatcagggcaacgtcatagtcataaaattcaggaattcctgcttcttttttcccattaatgttgtagttggggtgaaataggactacttctatctccaggtcccgcttctcccctcctacgctgaccttgattgagtgttccttgtcatccacagtgaaacaatgtgctgctgtcagcacaaagtactcagacaccacagcccccatacagctctcgtgtccctttgaagggcgaatgactgagatcttggcctgccatggttgcttgtggtaatcggtacccttccccggccgtaatggccgaattcccgggcatatgtccggtaccgtcgactg

SEQ ID NO: 122076 - DNA, 1903 bp, Homo Sapiens
ttttttttgagtattccagcattatttatttgatcagagtaaaatacacttcccatcactacaaactgagcacaactacagttgtctacacattcatatttttgacgtgccaacattttgcattctacatgaaacatttggtttaaacaaaatcttaagaattctctattttgtttcccatcttccctcctgttctctcccatcctccaaagatgttttatattaactgctatgagatttatttgccggtcacgtaatacggaggacagcagggaacaacacaagatttaccatgcctaggggatgaatggcaaacccaactttggctaatgtcattgagaacaacttggaagcgtgagcagagatatctcatgaagtggcagtgaacctacatttccatttatcagaagcaaacatggaaggttacatacatgatgaagtattggaagttaaagacttaagacacaaaatcactaatttaaaagaacatgcaacatgagtatcaacttgctatgtagtgtacatgtaaatgacccaaatattcacctctagcatcctgaatctcttcttactacagctgttatttgtacagccactgaatgtagattagtaaatactgacatcacaatgttgacacatgcagggagggggagataaagcaacagttcttccttccaccttttccaaagtctcaggattaggggaggtaataagttttggaaagaaactgaaatgcaacctggaggagagttggacaagccacattttccactcatgggaaagaagcggaccattctgctactttcccaaagacaaagggactccttaaagggtaactgaaaaatgagcgctatcctcccagactgttttcttctatcaagtactgcatcatcggtaagcactgaatcctacctttcttaattatactagccaatgacttccttgttctcgttctttattctaagatttcccaaaatttgtaatatcaaatccaggctttagtttatttggaaagtggtttcagcacctggaagatgagctggctctggggctctggaaaatcatattcctttatccttgtcccagagaaaagtaggtaggaggtagaaggtttgcttttgtggctctggatggtggagaaaggtaaaaggaaaatgagaataatgggagggaagaagacaggttaaatctgcaagggtagatcaaaggtaaaaataaggtggaaaaacccattggtacttccctttttctttctttacacagttagttagtttgtttttttatagaaaaattagggttctacatttacacatagcctgagaaaatgaattacaggatagtgttaggctcacatgggtaagtaaaaaatctacagaaaaatctagtttcaactgacatggctgaacactgaaaaactgccaagaagttacccccaaaagatacagagaatgtatagacagggacaagtcaaagctcttcctgttataccctctccctaccctgttacagggctgagcagagttggtggtagatgatcataattcaagcaactattgctttttcttctatggctttggctgaaatgtatatgctgattgattgattattatttgattagtacatatccagatatattcagattttgacatttaatacacagcagaggaggctgcatcagacacatgacactctgtgacatccatttcattcacaccccccacccccacagtcagactgaaaactcacaagaaggtgtctgtggtgaagaacattacaaaggttataaatcttaatagggccctgagagtttttccccctatgcttaggtgaaaaaggcaatgaacaagatgctctcgttctttaagtgctttgtgcaacaacgtccgtgtcgatgccgaatctt

SEQ ID NO: 122077 - DNA, 756 bp, Homo Sapiens
  misc_feature (218)..(250): n is a, c, g, or t
  misc_feature (733)..(733): n is a, c, g, or t
  misc_feature (741)..(741): n is a, c, g, or t
tttttttttccagcatttaggaaactttattgcacttatccatttacatgtcctaattttccagtaacataaaagcaagaagcaaatattaccattttagtaagaccaacagttagagaaggaaataaaagtagaaagaataactaaatgagtcaataaattccccagttgtttctctgcttgtctgctggtgcttggtttcacccaattaatagaannnnnnnnnnnnnnnnnnnnnnnnnnnnnnnnnttaaccttgcagaaggtcctcctaaaactttcctggacagacccagcccccaaaagttttctccaagtactgggccacagccagggtcagatgatcattaaagggtccagccacaacctggatgcctaaagggagtcctttggcattcagtcccagtgggcattgggtcacaggcaaacccagggcactgaagacacctgtgtaagcaaagttgaagggccgtgttagagggacatgatgcttaggtgccactgtgggatgtgagggatataagaacacaccatcatcacctagcatatccaccagctctttacgcaggctttcttccactgccttaaacttttggtatttctcattgctatatctgagcttttcttccaacaaagccagtccaatggaagggatggtgtacactgacagacccaggcaccatttgatcaactcccacagaggactgacatgtttcccatggtcaccaagcanatctacanatttcacaggttcct

SEQ ID NO: 122078 - DNA, 549 bp, Homo Sapiens
  misc_feature (215)..(247): n is a, c, g, or t
tttttttcagcatttaggaaactttattgcacttatccatttacatgtcctaattttccagtaacataaaagcaagaagcaaatattaccattttagtaagaccaacagttagagaaggaaataaaagtagaaagaataactaaatgagtcaataaattccccagttgtttctctgcttgtctgctggtgcttggtttcacccaattaatagaannnnnnnnnnnnnnnnnnnnnnnnnnnnnnnnnttaaccttgcagaaggtcctcctaaaactttcctggacagacccagcccccaaaagttttctccaagtactgggccacagccagggtcagatgatcattaaagggtccagccacaacctggatgcctaaagggagtcctttggcattcagtcccagtgggcattgggtcacaggcaaacccagggcactgaagacacctgaagaaaacaaacaaaataagtgagaaatcaagacctgttcctgaaaacgtattttttcaattattttaccaataataaataggtgaaaatatataattataa

SEQ ID NO: 122079 - DNA, 1034 bp, Homo Sapiens
tagtttagcaccatttattaagtgatctcagctgttgttgtagctgctgcgtgtcagcctgttcttaaaacataaaatgctcttccaattcctcttgtccaggacagaaggatcttccaggtagcacgccaacagaacaagagactccgatgacgccagcttcaatgatggtgccatccagagagggagagggtcatggcacattcaaccgcggcttccagaggttttgaaaaaggagcctttgggggcccagcctgcctggcattttgatgctgtcggtgtgagttttgtattccataatggtgttgggaggtaggttaagcactcgccgaagtgtgtcccggattcgggctgtggttgcttggtcactggcagtcttattccatattgaaataatgtcttcctgaaagcggacagacaccacagccccacagatctcctccccaaccatgaactgttcccccagcatggccaaaatgagattctcccagcaacgggaggccaagcccttccgcagccgaataatccacttgccaccatttttatttgcatcatcctcccacatgggtttaattccttctttgaagagatggaagtcactgtggcctgtcaggtccccaggacgtaccatgtggctataaaacctccagaactgctccacagaggcaaaggtgccaatctgtttgatattctgttcatagctctgtgagctcgtgggacggccgggggttctcctggagtaccaaaaagtgtagttgtactgcaggggatgctctgccggtccagggacaacagcctttctcttgctactgctctgattcttgtctcgttccgttttttccttctcaccatctttctgtgtgctgttttcttcattctgatcatggtccccactgtcatcatctttcaaagcgtcgaacttgttgttcatcctctcgccgccgctgtcgccactgcctcagggagtgacttcccctcgtgccgaattcgccacccaggcctcgctaccttagagaccgttagtagttactgcg

SEQ ID NO: 122080 - DNA, 1926 bp, Homo Sapiens
cggtccggaattcccgggatcgagaggatgaacacaagttcgacgctttgaaagatgatgacagtggggaccatgatcagaatgaagaaaacagcacacagaaagatggtgagaaggaaaaaacggaacgagacaagaatcagagcagtagcaagagaaaggctgttgtccctggaccggcagagcatcccctgcagtacaactacactttttggtactccaggagaacccccggccgtcccacgagctcacagagctatgaacagaatatcaaacagattggcacctttgcctctgtggagcagttctggaggttttatagccacatggtacgtcctggggacctgacaggccacagtgacttccatctcttcaaagaaggaattaaacccatgtgggaggatgatgcaaataaaaatggtggcaagtggattattcggctgcggaagggcttggcctcccgttgctgggagaatctcattttggccatgctgggggaacagttcatggttggggaggagatctgtggggctgtggtgtctgtccgctttcaggaagacattatttcaatatggaataagactgccagtgaccaagcaaccacagcccgaatccgggacacacttcggcgagtgcttaacctacctcccaacaccattatggaatacaaaactcacaccgacagcatcaaggacaattcaagctttcgaaatacaaaaatcacattgtgagagtacacaagctggcaataatccttttctgtatgtgtgtgtttgtccgaaatggatgggaggcctccagccagtccttccattgctcactgaagggacgtccctgagccgtgcgctctccttttgcactcattcctggaggacggattccgctagacaccctccagcatcgctgactttataaagcggaaaaacggaaaacgtgactttgtaatagacaaacattgttttttaatggggttccatgggggggcgttcagcctttctgtttgctgtgtgctgtccagatgcctcttgggcgtcctgttgttctcttcccgtgttgtacgaagggtaccgtggccacgtgtacatgccagagctgttgatgagagttaccagtattatgaatgtctgtgcatccaggaaaagtgttctgttggagagtcccaaaatagctgtaaatgctctcttctagctctgccattaaattattgggacatttgtttctttctctcccctcctccaagcccaccactttctgaagctgtgttactgatgtgatgactgtccaggatttgtatcatcccctgccttatgccctctggtctcctctcctgtgggactctccttcttaggcacagctgcacttagaatggtaatccagtggctctcactggtttcactgaggcagcttagagggaatgccttagtaaactgaactggagcagaatctagttgattaggagctagattataatctaggttccaagtacagaattggagctaaggactgtgactgaaatcattttcccatatgagcagaccctgtgtgtcaggcctgtttcccatatgagcagagcctgtgtgcaagtctgttctggatgtccctcatgaggaagggaagcaaagctggttatgcaggctatttaacacttcaataatgaaaattcttaatcatcctgagaagtggggatctggggaatgtgaccttgggggatggtaaaatggatggtcgggctggcggcaagggtgaagtctcatacacggtagtggttgcagcaatgggtgcggcgaggccacgcaaacccctgaaaactgtgcggctgtctaacgacagccactaaagggggaccgcccagaaggtaaaatcacgagcaggacaaaggggactacccagaacgcgatggggtaagagacaacgctctcaacgaag

SEQ ID NO: 122081 - DNA, 512 bp, Homo Sapiens
tctccaacagaacacttttcctggatgcacagacattcataataatggtaactctcatcaacagctctggcatgtacacgtggccacggtacccttcgtacaacacgggaagagaacaacaggacgcccaagaggcatctggacagcacacagcaaacagaaaggctgaacgcccccccatggaaccccattaaaaaacaatgtttggttctattacaaagtcacgttttccgtttttccgctttataaagtcagcgatgctggagggtgtctagcggaatccgtcctccaggaatgagtgcaaaaggagagcgcacggctcagggacgtcccttcagtgagcaatggaaggactggctggaggcctcccatccatttcggacaaacacacacatacagaaaaggattattgccagcttgtgtactctcacaatgtgatttttgtatttcgaaagcttgaattgtcccctgagtgtgagagacagagggggagcgtccgatcagcggccgca

SEQ ID NO: 122082 - DNA, 1547 bp, Homo Sapiens
  misc_feature (214)..(317): n is a, c, g, or t
  misc_feature (380)..(395): n is a, c, g, or t
  misc_feature (641)..(641): n is a, c, g, or t
  misc_feature (1431)..(1467): n is a, c, g, or t
aaacatcatttaaatttattagtgtataaattctaaagagtccaaattaaatatgttgatattgagaacatttcagttttcagttttgctaacagggtttaagcttaatcataacaattgcagaagtttgattatgtcaagaaatagccaactgaaggaataatttataaatggtcattacctttaaggggctagctgaatacaatgtaaatannnnnnnnnnnnnnnnnnnnnnnnnnnnnnnnnnnnnnnnnnnnnnnnnnnnnnnnnnnnnnnnnnnnnnnnnnnnnnnnnnnnnnnnnnnnnnnnnnnnnnnntgaaatctttatcatactatttttaatgcatgaaataaaaatggtttatatgtacatagaatnnnnnnnnnnnnnnnnccctaggtcaatttcttaggtctcagttgtggttaaattcacttttaaatacaaggttccaagtatccaagttgccaggccagttgcctgtacctggaacagcctttccaccgaataagaagagtccctacttaaacagcttaagctaatttccatcatactatttatcacagtctaattaccagtttatcagtctcccattaaagtgggggctccctgagagcaaggactgtcatcttcactttngccttgaaaagtagacataggtcccaattatctgctaaatgagtaatgaacgatatttctattcagaaggtgtgtgcttgcccataattaatacgcaaatattctaaactataatctgatttaaaatccccaaatttaaacaagaaaattataccaggctttgagatttagcttgtgctaaatcattttttaaaattgtagctctgaggcattttattataaaaacttagtactcatatacataaactaatacgaacttaaaattcatcatacatttacttcattttttagcttgaccttctagtaaatctttagcttcattgattttggctgctatataaggagatcctcctttgtcaggatgatttaaaagcataattcgtcgatgagcatctcttattttccctttattggcagtagggcttacacctagtattaatgctgcttcccgttttgtcattttgggttcaaacccacctctataatagccaccactgaaggcagattttggtaggctttgaaaaacttgttttacttgaggctccatatgcttcatggcttgcaaaacgtaacggcctgcaaatcctgcagcagcaatggtcagtccaactgctaccactgtactggccatggctccggctgggctcccttgcttccaccgggagcacggctcatcccagctcagaggccgcggccaacacctgcacgcctttaccagagagcgacgcaacccccaacccccggccgtaatggccgaattcccgggcatatgtccggtaccgtcgactgnnnnnnnnnnnnnnnnnnnnnnnnnnnnnnnnnnnnnggccgcttcctcgctcacatgactcgctgcgctcgtcgttcgatgatgagcggtagcgccctatagtgatctatacactt

SEQ ID NO: 122083 - DNA, 893 bp, Homo Sapiens
cgacagttttccggcctagtttgcggctgctcctgccgtgttgcgtagggcgcctgtgcttgaggttgggggttgcgtcgctctctggtaaaggcgtgcaggtgttggccgcggcctctgagctgggatgagccgtgctcccggtggaagcaagggagcccagccggagccatggccagtacagtggtagcagttggactgaccattgctgctgcaggatttgcaggccgttacgttttgcaagccatgaagcatatggagcctcaagtaaaacaagtttttcaaagcctaccaaaatctgccttcagtggtggctattatagaggtgggtttgaacccaaaatgacaaaacgggaagcagcattaatactaggtgtaagccctactgccaataaagggaaaataagagatgctcatcgacgaattatgcttttaaatcatcctgacaaaggaggatctccttatatagcagccaaaatcaatgaagctaaagatttactagaaggtcaagctaaaaaatgaagtaaatgtatgatgaatttttaagttcgtattagtttatgtatatgcagtactaagttttttataaataaaaatgcctcagaggctacaatttttaaaaaactgtaacacgccagacaatcgaacaccccaacttacctaaaacccacagcacaaccaccgtctacaattaaaccttggtcgggaccgcctcttcgggaccccttcgaagaaaaccttttcctaagaacaccattccctttttggcgggcggcggggcccccaggaagggtcacaaagtgaaacaatggggcccaaaaaagggggttttccccaacagaagaaaaccccctgggggaccctgagaactaaacggggcttgtgggatttct

SEQ ID NO: 122084 - DNA, 1394 bp, Homo Sapiens
  misc_feature (74)..(82): n is a, c, g, or t
  misc_feature (205)..(219): n is a, c, g, or t
  misc_feature (284)..(311): n is a, c, g, or t
  misc_feature (1233)..(1261): n is a, c, g, or t
acacccaatgaattcatctctttattgcatattgctatttttaaaaaaacatgtacagtctcataacacatacnnnnnnnnnctcagtactatctaacaacagtcttgcacctaaagactaagtggttccaactactaagctaataagatataagacatataattaagtttacaaattatgcattttctttttggcattaatttnnnnnnnnnnnnnnngtttaaaatacacacccaagagagaaaagtggctacttacaccagcaccaatctaaaaagtaggnnnnnnnnnnnnnnnnnnnnnnnnnnnncaacaatggcacatggaattacctgcacacagttttcagggaaagaaaccaaaaatggaaatggcaaaggaggcccaccaggatggccatatcaaaggaggatgattaaaaggggcaagagggacagctacacaaacttgctcctttatgtgactttccctccacctgtctattccttaaactgtaagacaaagccattttcaaaatacagttccaaaactgagccagaccaaatttatcctgctacaaatagaaaagaatatacatagaggcactttagttaaggaacagacaaaaccatcattatattccaatcttcctcatctccaagcctttttgagccaagtctctatctgcacctttaacatggtgttattgcagacctgggttaactcgggattgggggagtgcaacctctgctttgtatttatgactgttttatttgctagtcatttatttccatatagtgtgtagaaagtcactaaatttgcaatgaggaaaagatgtaaaaccacagctcttgacaactcttagagcactatttcacagctttcacatagcacagataactcgccatctgtgctaagcattatagtttatacaaattatttttaaatagtatgattcctgtacagtgcacacattggtattctattcatcccttaatatccccattagaatataagctctttgggggcagggactctgtcttgcttaccattgtagccctactatgcctggtacatagtaggaacttaataaatatttgttaattgactgaaaaactcaatttagtgagtaaataatgttctagtgcaacaggacaaactactctctccacaggaaacccaaccacaacaggatcaatagaaagaaaagagaaaacgttagcccccaactacaaataaataaagcaaagccnnnnnnnnnnnnnnnnnnnnnnnnnnnnngtaacagtcctctttatatatcacataatttaaggatattaagagttggtaggttaatggtaagcatctatattttattttctaatgttcattgattttattcatgtctccctgagagctttatttttttgga

SEQ ID NO: 122085 - DNA, 990 bp, Homo Sapiens
  misc_feature (84)..(92): n is a, c, g, or t
  misc_feature (215)..(229): n is a, c, g, or t
  misc_feature (294)..(321): n is a, c, g, or t
  misc_feature (675)..(675): n is a, c, g, or t
  misc_feature (690)..(690): n is a, c, g, or t
  misc_feature (713)..(713): n is a, c, g, or t
  misc_feature (780)..(780): n is a, c, g, or t
  misc_feature (836)..(836): n is a, c, g, or t
  misc_feature (839)..(839): n is a, c, g, or t
  misc_feature (862)..(862): n is a, c, g, or t
ttttttttgtacacccaatgaattcatctctttattgcatattgctatttttaaaaaaacatgtacagtctcataacacatacnnnnnnnnnctcagtactatctaacaacagtcttgcacctaaagactaagtggttccaactactaagctaataagatataagacatataattaagtttacaaattatgcattttctttttggcattaatttnnnnnnnnnnnnnnngtttaaaatacacacccaagagagaaaagtggctacttacaccagcaccaatctaaaaagtaggnnnnnnnnnnnnnnnnnnnnnnnnnnnncaacaatggcacatggaattacctgcacacagttttcagggaaagaaaccaaaaatggaaatggcaaaggaggcccaccaggatggccatatcaaaggaggatgattaaaaggggcaagagggacagctacacaaacttgctcctttatgtgactttccctgcacacagttttcagggaaagaaaccaaaaatggaaatggcaaaggaggcccaccaggatggccatatcaaaggaggatgattaaaaggggcaagagggacagctacacaaacttgctcctttatgtgactttccctccacctgtctattccttaaactgtaagacaaagccattttcaaaatacagttccanaactgagccagacanatttatcctgctacaaatagaanagatatacatagaggactttagttaaggaacagacaaaacatcattatattccaatctcctcatctnccagctttttgagccaatctctatctgcacctttacatggtgttattgcagactgngtnactcgggattgggggatctcgtngcgaattctggctcgaggggcaatcctatatgagtcgataattcgtatcagtcaagctgttcctgtgtgaatgtatcgctcacatcaacacaacagcggagataatgtaagcgggtgctatgatgacc

SEQ ID NO: 122086 - DNA, 1282 bp, Homo Sapiens
  misc_feature (194)..(203): n is a, c, g, or t
tttcaggaaagagtttccagtttaattacatcaaagctatatccaaaataaaaataacactcagaaacaaagattgcttataattccagaacattttaattctacagagctttaataaaaagcccgacagtttccaaatgttcatcaaaaacagaatgaatatcagtcccatcaataagggggaaaatcaaagnnnnnnnnnnggagagggtgagagatgtaagagatgaatgaaggttgacaactattctcctttaaaaagagaaacactgcttcctcaatgtcactgaaggatatgaacaggcaagaggaaagtaactgtccatatttgccttatatacagtattgggtaattaaatgccagttgggctgtttaggaatggcttgctaaaacattgaaaaaatgaaagacttcatccttgtcgtagactgccacttcagtggaacattcagtgcacatgactgggtgatagatttcttccacatctgtctctgccttctcggcagcatcttcccggttagacctcatcttcttatggacccgccttttcttcctgttctctgaggctttatatcttagaacctcctctttgttaatagaacaattcattacaaacattgctctatattgagttttgtatgattcatgcctttggcaatcaaggcaaagtgtggtcatgcaggcaggacaattcaagacagcatcactatttggaacaggctgttgttgacgtgatctctgtggtcccaaaccatggtaaccccttctctgtgcatcaacccaggcctgatctctgttatctttttcaggatcatacagtaattcgtcatttgttgggatcttgtgttgtttcttcttttttttcttggtcacctgtactgctctgtcttcatcctcggaatcagaatcaaaatatatatcatcgtagtaccttgtcggagctgttgcaacttttccatttcctgaggaagatccagttcccagagaggataacttgtcctccattgttttcatggtagaatttaattcagcttccatctccttttcaaattcatcttcactagatgattcactttctccggtaagacattctctgatgagttttcgtttttggtcaggagttccatgtaaaagcacatccacttcatcctcagagctgctcaaagccggctcctcgtcgctaggctcttcaaccgcgtaggggtcgtagtcatccggaagccggttcatggtggcctgcagcggcctacaccgtccacaagcaatttgcagcgtctcccc

SEQ ID NO: 122087 - DNA, 587 bp, Homo Sapiens
  misc_feature (527)..(547): n is a, c, g, or t
caccttttataacttaaaatcgtttattttaaaggaaactttaaataaccaatggaaatgaaaaaccagccccacttgccatgaacagccccaactgttcggatttcattcgggcaggcggggtccacaagaggctctcttggcttaaagggagcccagcttgggccagatcaggtgttaaggacacgtgagcaccaaattgagcctttctcagtgatgaggtcaaaaaatgaaagcgcgcaggaagggttctccccaggggattctggggtgtccccaagtcatccggggccccgcacgcttcgggccatgctgttctggtctccagccctcatggccgtggcaatggacagcgtccactcctcactcagtgtgttcgcatcctgaccttgaggtgggggtgagggggacattgagtctgttttagaattggaaacggctcacagagggtgggctgtgtccagggccacacagggggaggtccttcaggtctcacccctgaccatgactcccccaattcaatttcnnnnnnnnnnnnnnnnnnnnngagacggagtcttgctctgtcacccaggctggcctcgtgc

SEQ ID NO: 122088 - DNA, 873 bp, Homo Sapiens
atattgataaacatttttattctaatattatagtaataattcaagtacaattttctttgaaaagtcaactctgttaaaacaaaacttgttaaatatctttcatcaaacataagcatattcttttcaatcccccacagcagtcagagccatgtagcagagttaagattttttttaagcctactacattttgttattgctaaaaaatctgaattagttgtcaaggtttcagaggcagtcattaattaacttttgaaagctctatcagatactctgacataaaatcatgaatccaggtatcggtgtctggcaacgatgtgtccactaagtagaccactactttccggtcccaagggttagcattttcaatgactgtctgcaccagtgccaccagaggtttcttctccacatgatttcgaaacaccatagaagcctcctcagaccactggttgcacttcactcctgcaagttgagctgtgactgcttggaagggcagctttcggaacatgtccactaggggctgtacttttcttatgttgactaattcgtgtttgccataatccagctcatacacagataccagtccattggtcaggattccttttaaaagcaccctgtgccacttattttccacttttgcagcatacacttggtctttctccactgctatgtggcgctcttcagacacgctgtaatatagaatcatctcttccatcagaacttccaacttatgtatctcctgccaaggctggatgacgaagtagcctgggtgacaggccacaggcacatacacatccatgtgttcccctggctttgataagtggacaggaggtggcagttcctctgtggagaaagcgctcgtatggtccaccatcc

SEQ ID NO: 122089 - DNA, 2146 bp, Homo Sapiens
  misc_feature (55)..(55): n is a, c, g, or t
  misc_feature (270)..(270): n is a, c, g, or t
  misc_feature (272)..(272): n is a, c, g, or t
  misc_feature (357)..(357): n is a, c, g, or t
  misc_feature (632)..(632): n is a, c, g, or t
  misc_feature (651)..(673): n is a, c, g, or t
  misc_feature (1908)..(1931): n is a, c, g, or t
aaatttattgtgattttactccccgccaaaggggggccccgcaccacaagaaggnggttgtgcgtcggggaatatggcccccgcgcctcgggcggccgggaagtcttccacaagagtgtttttcacaattccacaattaccccccgggtttttatgtgtggggatgtggggctttttttccccacattgtttcgcggggcccaagagaaaaatttggccctctatacaaagtggagaaatttttgtcccacaccccaaggttttttctcntncccgaaattgtaagagttggcccacagggcgcccgcgggggcgcggttataatatttggattaattcgggaagccttccggcctntggggaactctctcctggtttggaataggaagttcccaaggtaaaattggaccctctcaaggaagctttcccatctttgggattttgttttcaagaaccggctccgggttggcccgcccggggcggttttttttattgggtgaggaatttcaaagcacttagttcatgggccagggatcttcctagggaaaacaggctatgacccatgtttcacttacctaactgggccccgcggcgccaaaacgaatgggtttagagaagcttcttcgagggcncgaggcggcccgacaaggnnnnnnnnnnnnnnnnnnnnnnngttgttcactgttataataactttaatttatcttgcattttacagaagtctatgaacgattttaaaaaagcacctccttaccccatatcacgtttctctgacaggtgttaaagtaggcaatgagtatgtcaacagcttgagcatcagcgtcttgcaaggacttcagaccaaccactcgccaaaaatcttggcagcttttttatcttgtttttaatacaacggtatatccactctgatggcaaacctgtccagccacatctccacaacaagctttgcaaaatcagtgattagcaaattagttagctttggcacggagctgtgctcgcttgcccgtgacagcctggaagccggttttgatactggcaacagaacatctagaatgacaagtttcgcactgtaggaaatagagtcgtgtgtccttctgcaggattgtgtccggtgatcggcatgtgtgacaagtgacatattccttgatatatcttctcaagacattttctatctgtttctgttggaatcttcctttgattacaagttggttattaccatctatagaaccacttgtacccaattcagccaacaaaaatgcaaggagatgtttgggctgacgatgtaatagtttacagatatctgtaaagttgacaaaagaagttttcttggttcctactcggacgacttgtggaggtttcatgacaaatttccttttctccccagcaaccatatctggattcttttccctcatgatgttgaacactcgattcagcagctcctcgtatgtgtagtctctttctgagcctgcccaagcagggcctgtctgattactgaatgagataccatcatcttttttgttgtcttcatcttctagagcttcatctttctctagtatttcatcctcatctgggaacttaacattcttctttttcttctttttattgccaagcataatgtcaaggtcatcctctggttcagttggttcttgaacatcactttcaatcttaagatcctttacaccttcttcagcttcatcaatatcaaatatctttttagtttttttcttctttttcttttgattaaagaagttcaagtcatctagatcatcagaagcatcttttttcctagtgtcctcttcatcagcttccaaatccttgtcctcagttggctctggctccacttcttttgtttctgaaggctgggtttcctctgtttgggtatccccttcctcatctaacataaaaggnnnnnnnnnnnnnnnnnnnnnnnngctcatagtaggatcaaaaatcatctcgtccccagacatggctgcggctcgagtgggctcggcacggacgggaagtcagacgggtcagccccaggccccggcggcagcgctgcccctgccgatacctctcccaccaccgcactaggctcttgcatcagcgaaaggaaacgacacccctcgtgccgattccaccacccagcctcgctacctagcca

SEQ ID NO: 122090 - DNA, 916 bp, Homo Sapiens
  misc_feature (41)..(56): n is a, c, g, or t
  misc_feature (64)..(218): n is a, c, g, or t
  misc_feature (766)..(783): n is a, c, g, or t
gggccccgccccccaacaaaaggttttaaaaattttttttnnnnnnnnnnnnnnnncccaaaannnnnnnnnnnnnnnnnnnnnnnnnnnnnnnnnnnnnnnnnnnnnnnnnnnnnnnnnnnnnnnnnnnnnnnnnnnnnnnnnnnnnnnnnnnnnnnnnnnnnnnnnnnnnnnnnnnnnnnnnnnnnnnnnnnnnnnnnnnnnnnnnnnnnnnnnnnctaacaaaaaccacttttatttttaaatcaatttactatcaaatacacaacagaactcggtgtggaggcagtgtttgatttcaactggttatctgttaaaaggcttgtgtcccagtgcaacactacctttgtgcagaaaatgttcactgaaaataaatatcctaagaatggataatcttcactgtagcatcttgtcagtggcactacttttaaaaaaatgattccctttagaaaagctagtatatttgtattcagagattacaagtgagggaacacactgtgaatattaggtttaccatatgtgaaatttgtttttgacttacaaaaatgcccatgtcacatggttcaccttttatctactaaagtttaaaacaaatgtcatttgtgttgaactttgttttttaaaaatgcagtgattaggaccattattagaacttcttttactcactatagacaaaattctttttgataaaatctttaaaaagttacttactacaaactgtaaaaacaatgctgtttttctatatggcatttcagtttttaggttnnnnnnnnnnnnnnnnnnccctatttatactcaaaacttggataaaagctacaattccaagtctcatttttccttaaccccagccacccaaacactactcatttcataaatgaatactatttagtactgtacaggatgttggagcggccgc

SEQ ID NO: 122091 - DNA, 586 bp, Homo Sapiens
  misc_feature (306)..(364): n is a, c, g, or t
  misc_feature (384)..(541): n is a, c, g, or t
aagcaataatttgttgtagcattttattagtaaaaaggcatttccaatgtttaaattaggatttatctacaaaacaatcaattctcactgaggctgtggagatggacacaggcatttaaaatcagaatttgtaggtgaaatcttaattggtctcaacatctactttatttctgcattgggtaagcccttgattcacagagaagcagtggcaaagagtagctaattttttcagggctcccttcacaatttaattgggctcttcagttaaatcagttaaatgaaaatggcagaagaatcctaaattannnnnnnnnnnnnnnnnnnnnnnnnnnnnnnnnnnnnnnnnnnnnnnnnnnnnnnnnnnggagacagagtctctgtcannnnnnnnnnnnnnnnnnnnnnnnnnnnnnnnnnnnnnnnnnnnnnnnnnnnnnnnnnnnnnnnnnnnnnnnnnnnnnnnnnnnnnnnnnnnnnnnnnnnnnnnnnnnnnnnnnnnnnnnnnnnnnnnnnnnnnnnnnnnnnnnnnnnnnnnnnnnnnaccatgttgaccaggctgctcttgaacacctggtctcaagtgatc

SEQ ID NO: 122092 - DNA, 1515 bp, Homo Sapiens
  misc_feature (204)..(257): n is a, c, g, or t
  misc_feature (1210)..(1210): n is a, c, g, or t
  misc_feature (1351)..(1351): n is a, c, g, or t
  misc_feature (1411)..(1411): n is a, c, g, or t
  misc_feature (1424)..(1424): n is a, c, g, or t
  misc_feature (1429)..(1429): n is a, c, g, or t
  misc_feature (1437)..(1437): n is a, c, g, or t
  misc_feature (1448)..(1448): n is a, c, g, or t
  misc_feature (1485)..(1486): n is a, c, g, or t
ttcggactcaagggtgtggtttattgggggagaatagaggggggagtgttgtgaagcgaccgagtcttcctatggaacgcggggtgcgacgcatgttcatgtgaccatggggggttcccggggcgccgaggaagaagatgctaaaaaaagtgttttgttatgtccagagggcggggaaaacaagacgatacattttatataaannnnnnnnnnnnnnnnnnnnnnnnnnnnnnnnnnnnnnnnnnnnnnnnnnnnnngggtagttctcacagtttaatagaaagaatgcatttttttggtatgcagttccttttagaaataacaaaatagaaaatgaggtttcaaccattgcttttatagaaaacaggggaaatgtccttcaattgagcatttcttttcctcacattaataaaggttctgcacacacctcctatttaacagggaaataggaatttcagataacaaatgtgaaaagttgaaataatcctgacaaatttttcaaatcaattgttgaaaatatttatttagaaaaaaatatttagttggaaaacagaagaaaccaaagaaaaacacacttcatgtaaacaacagaacactatgctaagtttagttctacaataaaagccacacaaatctgtgtgtggctaaggatgaggatacagagaaaagaaaaagaaaattgagagagaggtagaatataactctttgcttactgcaggtcttgtctggaggagaacctctggaaaataataagttaggatggccctagtctaccagcatgccagaggcagaaccaatataatctcctaaaatatgagatttgtgtcaattcttagggttactcactaaggtggtttggttccaccaatgaataaattttctaattctatactaagctcatcctttggaacatcaatctcatctccagattcttctccaagcttcttccaccagggtgcttgtatgtgcttcagggttgtgagatgggcctgcttggccttggctgccacaggcctggatctacttaggaagagctcaggttctttcccttctgcctccttcagacttggtgccttcattagctgttcaacgttggtgctgatctgtgctatcagagcttctctgtgctgctgggctcgctcttctagggccctgcccataaagtagtgttgcagtcgttcttgagcttgggcatggagctccctactgnacacatctgacattggagagccaaatgtcttctgacatagtcatccactcgtttcttcagttcactcggcgtgcatcagtgagttctggggtcctcgccaggagcaatagttccttttcctacggcactcgctaggatttnagcgctgctctttgaagtgtgacagctgctttatactctatgagagactgcctctgtggntgaaatttttccnttccnctgtaccntctcaatgttnctggatatcaatgctgattctcctccatttcccgatnntgttctccactgaccgggataactattcc

SEQ ID NO: 122093 - DNA, 636 bp, Homo Sapiens
aatcaatataaataattatattctgcttcagaatgaaaacatttccagaacattgtgggagcctcgcttgttcatcaacattacctgtttttatcaaatactgtcatttgtgcaacaaatgtcttttccccatcctcacgatttcattttcttctggctggaagctcttcactgacatcaatattttcatggtttctccattaatcattccattaaactctcttcttcttggacgagtcactctaaatagcaacgagtaagacttcaccatgtggctgttactaggttcaaattcattactggaaactgcaagggacgggaaatttccaggttttgtttgattgaggtcaggattcaaaggcacctgctttttacctgtgggaacttgccttattggacaacatacatcctttctttttttgtggcaaactttcacaagcaggacttccagggtaacagaattttgttcattttctgagtttggtgatggcttatcatttttgtggaagaaaccaaaaatgtaagctgcaaatgagctgacaagctattgagattcttgctctcctttcactttctctacttttgataacatacaacaactttaaatggtttccttttgatggttgtctggggttt

SEQ ID NO: 122094 - DNA, 1320 bp, Homo Sapiens
  misc_feature (118)..(177): n is a, c, g, or t
  misc_feature (1006)..(1061): n is a, c, g, or t
  misc_feature (1179)..(1253): n is a, c, g, or t
ttctggatggagagaatgatgtgtctggcaatagggatctgtacatttcctatttcagagcacacaaagtactgacatctgtaatccgagaggctcaggcaggagaactgcttaaacnnnnnnnnnnnnnnnnnnnnnnnnnnnnnnnnnnnnnnnnnnnnnnnnnnnnnnnnnnnnagagtgaaactctgttttttatcgaaatactgtcatttgtgcaacaaattgtctttttccccagtcctcacgattttcatgtttcttctggctggaagctcttcactgacatcaatattgttcatgcgtttctccattaatcattccagttaaactctcttcttcttggacgagtcactctaaatagccacgagtaagacttcaccatgtggctgttactaggttcaaattcattactggaaactgcaagggacgggaaatttccaggttttgtttgattgaggtcaggattcaaaggcacctgctttttacctgtgggaacttgccttattggacaacatacatcctttctttttttgtggcaaactttcacaagcaggacttccagggtaacagaattttgttcattttctgagtttggtgatggcttatcatttttgtggaagaaaccaaaaatgtaagctgcaaatgagctgacaagctatgagattcttgctctcctttcattttctctacttttgataacatatcatcaactttaaatgttttccttttgatgtttgttctggagtttcgatgagacatgtaagtaagagttctgtgcaaaaatattggtgctatgagattccgagttcaaagaaatctatagatctgtgttggcttctcaaaggcctggaggaaaagctcgtggtcagcctggacgtgctccattttcgacttcttcaccggtaacgccgcggaggaggaggaggccgagtaactgccaccgcctccacagcccccgccgccggatttgccgctcgaagccgtcgccgccgaacccccgaannnnnnnnnnnnnnnnnnnnnnnnnnnnnnnnnnnnnnnnnnnnnnnnnnnnnnnngcttctgaggcgccatcgcggttcctgcctccttccccggccagctactcgccgggcggccccggagagtaagcgcctgcaataccaaccgctcgccccagcaggctccggctgaccnnnnnnnnnnnnnnnnnnnnnnnnnnnnnnnnnnnnnnnnnnnnnnnnnnnnnnnnnnnnnnnnnnnnnnnnnnnaaagtgtctcctcagagccccgctccgcttcggaggccgatcccgggaatccggaccggtccagcct

SEQ ID NO: 122095 - DNA, 352 bp, Homo Sapiens
tttgtccttgcaatgtttgctttctggatggagagaatgatgtgtctggcaatagggatctgtacatttcctatttcaagagcacacaaagtactgacatctgaaatgaaaacacaaaaggaaaagctcaaacttgccacataggaagttcttcatgcttgaatagtgtcttcataaccataatgggattttttaggattataatagttctttttaaatgctttatttacttaacaaatagtaatcaaatcattgcaaattcttatatggaagatttaggcgctggcagcaatagttacataaattataatgtcaactatgacaaaccttctatgtgtctagagctagaata

SEQ ID NO: 122096 - DNA, 1087 bp, Homo Sapiens
  misc_feature (855)..(864): n is a, c, g, or t
ttgaatcaaaggctttatctttaagaaagcagatttagagaatcagaattttcttccattttggttctattaagaaaagtataccaaattaaaaattaagaactattttttaatagataatacatgtacatggtacaaaattcaaaaggtacaaaaggtgtacattgaaaagtcattcccacccctcttcccagaggcaattcaggctgccgggctgctagatatcctcccagagacatcctaggcatatgcaggtggacatatgatatacacgtgtatacgtctgtgtgaaaacatatgcacacacatacatctacacactttctccattccaaacattaggataccatgggcttttttcctcacttaatcatgcatcttggggcccattctatggtagtacacacacacaggatccattgttttaaatttctacaaactattccattgtttaagctggccataatgtatttaaccattcccctgtattggtggcactctccaactttttgctattacaatgtttcaacaaaaactcttgtacacaagtaccttgtacacaggtacaattcttaggagtagcattgctagttcaaagagcttacgcatttgcacttttgatagacaccgtccagctgtcccccatggagtgcctacatgtcacactcctgccaccaccatatctagtgctgccacccacagccttgcactgtggtcccacttcttggttcacatggctgagacatttctgcccatcaagttacctttaggttcatgacacattttgagccaaaacataccttatctctaacattagtgtagttcttccctctctttttcccttcttagggaatnnnnnnnnnntctgtaaaaggcaattcctttgaaagattcaaaacctctgacaccttgtttcatctcaaacttcaaggttacagtataacatactctgagagagaccctctaaagttgtgaaaactgttctcaaactaagcatcaagtagaggaaaggttcaatctaaattttcctaatagagatgcaaagttgcaatgtggaaaagccattttatccaaccggaatttcccc

SEQ ID NO: 122097 - DNA, 1530 bp, Homo Sapiens
tttatcaattcacaatagatttattttacataaaagaaaaagcttgctgttaatgaaaaatccagtagaaaacagttctgctttaagttgaggctcaaaagtagaagctgcttattagtgaaacctcaataaaaagagaattttgtaagaaaacattcttggcatgaaagctctaacataaattctgtaatgaaatatttaccatgcaactttattggcagaaaggccagtttctgatggctggtattttcagtctcttaacacattaacatggaagatacttaacctgctttatttagagttaattgtatataaatacaaagtcatgatgggcaacctttccatagtccacctacttaattgagcagttctaagtaggtaattggcaccttgcccttctggtttcccctttcccccattagccagtctgaatccattccaacaacactgaacacagtgatcacctcatctgccagaagtgataattcagtactgtttgctgcatcataatcatagagaaccctggcctttctgctgccactacactccttaaggtcactgaggttggaaggagaggtgattactaggccacttgttgaagccatggcagaagaaccaatcgcatttggtaaaactgatggtacaggtgtcacagaagtctgattgttgttactaagataattggatggaaaacttcccagttgtttctggaggtccaacatatactggtaacactgtgcatagtaagtcatctgggcttctacaaagtcattcagacagcgaaggtgatgggcatgtgtactgctgattccctctagcagaagtctggtaatctctgcttgacgatcaaattcactttgagttattcttaattcctgttcagatgaatttctagtttctgcagcttttgccttttttagtctcgtttttgcagcatccaaatccagtctcttattttgcaatagtttcctttctttagcaattgttttgtaatctccttctataaagtttcttaaaggagtaagaaaatttaaggctgacgtttgaatcagttctctgtctgctgttccaattcttttttgggtttctccacatttaataagggcattaccataagctgttcctgggccaaactcagtccctgcatcaatcatatattgtcccaaaagttctgggttgtttatacgacttggagcttttctatccagtttctcataaacaaattcttctatcctggcatttggatttggctgcaataacacttcagtttgtttcattattttttctgtccatattttggtacattcagctttgctaaggaggttctctaagtgagcatccaattctgtcttctcagcctggccaagcttttcttctgtgaactgcacggcgcgactgaggaaggtgcctgcgtcggccgccagcttcttcacgttgaagtccatgatattcatcctaggcggcagccgggcggagccggccgacctagcggcggcgaggcggaggtgccgcggccgggctggggcgcag

SEQ ID NO: 122098 - DNA, 866 bp, Homo Sapiens
agatggtccttcccagcatacttaaaatgtgtggtataaaaatactcacttttcttggttttattgttgacttcctcatacgtttcgtttgaaaatatctccaaactgtacagaaatttcagaccatgcattcacaaataatacgctatttcttacaattatacagtgtaaaagagtaaaacatttttattaattatatttttttcttcgagaaaaacagatgtgtgatagaggctgtgacaaagtcttgaagggatcaaaactgggcaagggtttttcaagccagcatgctccagttttgtagaacagctagagaacagtagccaccactgaagattgcattaatacccacaagacagattgcagccgccatcacacacctgggacatagtattcagcagaactgacgggacttccagccctgagaagtagcctcggagggagggagccagcgcatcaaacaggaaaccaggccaggctggcactatcaggagacggagcgctcaaggggtggcttctcctcacagtctgaccttcacagagctgggcatgcagtgaagcgggataggtgaaagcaggaggaggtagagcaggcgctaactccgctgggtacagagggtacggggcccacacttcagggctactggggtaaagtgcaggcactgtgagctcatatggctctctggcaatgaactgaggtacagtgttgggcagaggagtactggggtttggagtccctacgagtttgttcttggccatcttcgtgtttgccttagcaaactctagtcgtagtgtttgcggaatttcaggatcgaagcggatgccattcaaagcattctttgcagcctctgcttctgagcgactgt

SEQ ID NO: 122099 - DNA, 1296 bp, Homo Sapiens
  misc_feature (1048)..(1108): n is a, c, g, or t
  misc_feature (1196)..(1243): n is a, c, g, or t
catttttgctctgattaaaatttttattgaaatctctcaaaggtcgtcaagaaatagtttttgtgaaaggggggaaaatagctaacaaacaaattcaacatgggagctccctctgctggtctgcagtaggttggtatgttacaaacacattcccagagacaaatctaatttgctggagaagtggacaaaagacaggtgtgttgggctttgcctcaggagagaaacactgggcatgcagtgaagcgggataggtgaaagcaggaggaggtagagcaggcgctaactccgctgggtacagagggtacggggcccacacttcagggctactggggtaaagtgcaggcactgtgagctcatatggctctctggcaatgaactgaggtacagtgttgggcagaggagtactggggtttggagtccctacgagtttgttcttggccatcttcgtgtttgccttagcaaactctagtcgtagtgtttgcggaatttcaggatcgaagcggatgccattcaaagcattctttgcagcctctgcttctgagcgactgtcaaaactgacaaaacctacaggctgtttagatgtgagctttataagagaaccctcatagcccttaaatggtctgaaaagcagatagagctcccgaggtttgatatccagaggaaggccactgacaaatagggtccggacctcctcctcctgaaggttggcctcgctcggggtgttctccttctcggctttgccgccgttgttcatcttcccggtccttcctcgccgggccgggcagggctggggcgcggggctgggcgagggcgcgctagcccactggagccttccccgggcgccggggctccctcgggcgggcgccgcgggctgtggggctggagctggagccggggcagtggctgtcgggctcgggttgggctggggctcccgcggcgagtctgcgacggcggcggcgggcgactcaggaagtgcaagggagagacggggcagggcgcgggccgggagcggggcaccgagacaatcgggccccgggagggcgacctnnnnnnnnnnnnnnnnnnnnnnnnnnnnnnnnnnnnnnnnnnnnnnnnnnnnnnnnnnnnntggggcgaggacgcgcgtcccaggagtaagcgcggagagttggggctgggggctgcagccgctggaaggaggggacgggggtgcctannnnnnnnnnnnnnnnnnnnnnnnnnnnnnnnnnnnnnnnnnnnnnnncgcgggccgcggctgggacgctgggacccgagagccgctgagtacgcgctcca

SEQ ID NO: 122100 - DNA, 1289 bp, Homo Sapiens
  misc_feature (290)..(304): n is a, c, g, or t
tttttttcaggcttttaaaataacctttattttttaaaagttagtatgtgcattataggaaattgaaaaacacaagcaaagaacaaagtcattcacaatcacaagcagtttatagtttgacatattcttctagatcctgtgtgtaggcacaacatccaattttatgggactgagactgtacagtatgtatcatgatttttcacacatcatgaatatttaccaattcaaaatcccaaagctatatgagtattctgataaccaagaatacactacaccaactcaaactgctnnnnnnnnnnnnnnngatgtaatcctgcctttcttgggacagaaatttcatataagacaaaaatggcaacacgcctctagataaaagcattggcagagttctgatttaaatgctgcattcccttaatgctcaatttaaaatgaaacacacagcaacagaatacagtatgtttttaagagaattcattagcagatctataccattaaaatattagcaaagtgtatttccattgaattaatgtgttcttatagtacagccaagagatgcatacatcaatggctatcaaaatgtaaatatggacatatatggacacatctgcatacatctctacctgtataattccttctgcccctctgctgccaacctaatgaacaagtcctgacatacactgctcagaggtggcttaacaattccatgtccaagatgtatcctatcaattataacaaaggtatttacaaataggctaattcactagctctagtttttatcataagttgtcaccccattcgtaaagcttagatgttgcaaaataataactttgtccacaatgaacacaggcactttactaaaaacgctcttgtagacctgtggttatcatctaaaaccatcgtctagatatggagatactagcaaagagcccttcccttcacccttcctcttctccctcttccaccatccccgtgactaagtacaggatgtctagctccaaggggtggactaataaaggtcactcccagaggacaggccttcctaaaaactaacaaaaggacattcacaaagggactgatttactacatctatttttaacatactttgagcattaagacttatcctttaatacacaatattaactaaaatgcacatatagaacaatggttagaccatctgaactaatctcaggagcacagaacccctctccctgcctggacgcgtgggtcgacgatatcccgggattccgaccgtaccagctgctttttgtaccactgttatagtacatgcg

SEQ ID NO: 122101 - DNA, 828 bp, Homo Sapiens
  misc_feature (48)..(57): n is a, c, g, or t
  misc_feature (98)..(153): n is a, c, g, or t
  misc_feature (159)..(309): n is a, c, g, or t
ggggaaagaagttaaaaccttctttttctttcttccttggcgcgccgnnnnnnnnnnacaaaccttttattaaaatttttcttgggggcgggcggcgnnnnnnnnnnnnnnnnnnnnnnnnnnnnnnnnnnnnnnnnnnnnnnnnnnnnnnnnttctcnnnnnnnnnnnnnnnnnnnnnnnnnnnnnnnnnnnnnnnnnnnnnnnnnnnnnnnnnnnnnnnnnnnnnnnnnnnnnnnnnnnnnnnnnnnnnnnnnnnnnnnnnnnnnnnnnnnnnnnnnnnnnnnnnnnnnnnnnnnnnnnnnnnnnnnattgttgttgctgtttatttttaaaatcacacattgaatacacacaacaatcagatttcttcaccaaacccccaattttttagcaactggctctattcagcaccaaaaactccagtctgtgggaagtgcacagacacagacttcacttctgtgtcttggtcgagcaatccatcaggtcattggttaggttcaggacttgccctcttttccttccctcttcatggctctccagacccaaggttctcaaggcttcagatttatggcccacagcccctattaccacctaaatccagcagccatttgggaagaattcaaaataatttgagatgaatgaaatgacaggacctgtattacagatgggtattctccattccaagtaaactgtttcttaatgagttctgagactctggtcttggatgccatgatcatactgggtaattatttctagtctgagactttgtgactttgtcagatgcctcagagaaaaaaagtgatcagtattctggaaaccctcgtgcc

SEQ ID NO: 122102 - DNA, 1355 bp, Homo Sapiens
  misc_feature (69)..(69): n is a, c, g, or t
  misc_feature (767)..(783): n is a, c, g, or t
gattaacacagttattttaaaaataaaagactggggagaaaggcacacaccaagctgtcctcatgcgancggaaatcaagtagtatgagttggttgcaactctctggttgctgaccatgagaatgttaggaaaagccacccatttaggtgcaaacaatgttttacaaagcataacaacaataaatgcatgcatgaaaggtgggttggaaccattagtttctaaaattaaactagtccttgttaacattcagcatggcacactccggtacttgtaagcacaaacatggtttccacttgaggaatggtatgcctaattccatagataactgaagttccagggctgcttttgattctgtcttccacaatgttcaattatgtaatttacctcacattccttaaccccaacttactttacagaacaggtgcacttttatcataaaactcaattttattcaataaaataataccacaaaagataaaatgttattcttttatttatgttaaataaaaacatgagaaaatccttttttaaaaagggtcagaatattccttatgtctccaaaccaagtccatggatgcaaagaaatgctgagttcttgatacactttcatgtcataataaccaaaggagacagcacgggctcgagtctttcagctgccgcttaggaaagtcacatgcagtatttgggaaagcaaggaacagaacacaggcatgagtattttctggaaatacctcctgccctggcaatgaacctcagtaccaaatannnnnnnnnnnnnnnnngtggtcctgataaatttttaagccacacatcctactgaacttcaatgatacaatttctcacaattccagaattctattggcagtacagtttacttggccaacgtggataatcttataaattttaaaattacatacaatagaacactattgcaaattttgccagtagaaacatgaccccaaggaactgccatttccaaaacataactgggcacacatttacaatgcacctgctaggttttgaattcatttgtcatttctgatctacccttaagactatgcttgaatctctgaaaacaaatgctagattcatgatttctatacccacatactccataaatccatcacaaaccctacagtctgatttagcctacggcaaatgattcatccaataggccatggtatgttcacaattcttcaatcttattcaggttgtaaagacgtttttctacgactggagtcactaagaatttctctgttagagaaagcatcattttcacctttggcacactgccaagatgatactttactacagaatttatgaaactacaatttagtaacttgcaggctttatt

SEQ ID NO: 122103 - DNA, 1511 bp, Homo Sapiens
  misc_feature (140)..(148): n is a, c, g, or t
  misc_feature (230)..(242): n is a, c, g, or t
  misc_feature (371)..(379): n is a, c, g, or t
  misc_feature (511)..(628): n is a, c, g, or t
cgcgccccgggcggggcgcgactaattatttttatgccgccacaacacgggggccccacaacatggtttttagggtggcccccgctggggggagagtgtaaaagggggtgcttattatacacgcccccgtgttggaggannnnnnnnntctcccacgtgtggcggcggaaaaatagggtataaaaggagggtggcgccccccgttctctccgggcaaaaatgtggtccannnnnnnnnnnnncggatattttgtatttcccggcctcccccctggcgcccctcgtgtttgtaggccccgggaatgggtcccggaaaccccccttcggggtttttttaaaaactctggtggtgcgcccgggggctttttttnnnnnnnnnagaaccagcccccttgtgttggccggggtttttgggggaacccttaaagccatgttctgttcccttttggggcccggccccccaaaaaaagggttttaaaagttttttgagggccggggggcccgccaaaannnnnnnnnnnnnnnnnnnnnnnnnnnnnnnnnnnnnnnnnnnnnnnnnnnnnnnnnnnnnnnnnnnnnnnnnnnnnnnnnnnnnnnnnnnnnnnnnnnnnnnnnnnnnnnnnnnnnnaacagtggtaaacagtttttattcaggcaatgaaacatggaaaaaatatattagtaatcattataataatttgtgagtataacttttacaaatagttacttgacatataaaaagggaaattactgtgcatataaaatttatgtagatgaatattccacacaacacaatcctgatagcagtagtcaacgcagcactcatccctccagatgaggggctcctcacacacttcatggcacccgtgggaacacagtggaagcagatgtgcaatgaacatttacttggcacattagtataatgggtatctattggcaaacacacacttgctaacagcaatactgaaaagtttactgctacctctgagatttaaaagaaatgcctggatcctatcccgacggctgagaaggaccgaggctgaggctctggtgtggtcacctacacgctgccctgtatctggactggggatggtttgagttcaaatttgtacatgtccatctgaaaattctttataaatacagaattagcagttaatgatgtgaccaggaaattactgttttgagtatatgtcagataccactaaaaggcagagggggagaaagtgacatcttgacagttctaaattaaaggatcgatacagggaaggttcaggccacatctcagctctgagcctggcctcctccatacaagttaaagcattacacagaccaccacaggccagcattgcacacaacatctccatattagaactataaccagaatatatatttatataatagctgtaaccatattatagttaataaagtcattccttaggaatcttgtttgtccaaatctaactgcatgctaagaggcacagaaatgggattgcatttggacaaaaaactac

SEQ ID NO: 122104 - DNA, 626 bp, Homo Sapiens
ttttttagcatttcttaactgaaaatatattttcacagaaacaacaaagcaaaggggataaaaacaatagcgaccagaaaagctaacttaggtgaatggtgccactcaaaggtctttccgagggaagctcagtcctggcttgcgagagtcagccttggctcacctcataacggggctccaagctaaggcgtcaaggaagcagtcccactgcttctcgctgtcagcaagaccacaaggcagatgcccactgctgtcctctttccttgtctactttctcatctaagtgtcgtaagacagccctgcactggtccctgagtaacagagcagctgtcatgagcacaggctcattttatccgagagcattcttatctttgagagaaatgagaatatgacaaggagaactaaacagcagcaggcctagcctcagcagcctttctgagtgatgtctagtcctgacgactttgtgatttccaaagtcgtgaacacctccccacatgtggggtgaattccaatggtgtcatcaagtagctgttttgtgagcccacatttcattgcagctgcaaatccttgggtaacctcaccggcgtttggtccaagaatatgaaatcctatcacccgcctcgtgc

SEQ ID NO: 122105 - DNA, 1743 bp, Homo Sapiens
tttttcacaatcagtgacaaacttttattcagaaaataaaagtattatttcattttattattcccaaagaatcaagcccatcatgagtagcccacatggttgctgttcaaaggtactgaaaagggaggcatttggtcaccattacccatcaaggaactctttacaaggataggttccaagtccttcgtgctgctcttggtcattcagtgactgcagttttggcccagaagccatccaagatgagcaagtgctgagccatccttaactcatacctagatgaaacaacttgcgcagaaacgctggtcctccccagtaaccccttagcatcatattccaatacaggaaaggcatcaggtcagctttcatgagatacatggaaaggcgctctttgctttgatcaaaggggaaggtttctagcggctctgctttgtagtcaaactcagcaagaatcacacggttgtagccggtcaccagtggacatgatgtgtagccatcatacttctttgttggtgtttgattcttcataattacagaaattgtcctatcaagtattcctgactgggcagctactgcagcagcggtctttgacgtaggaaggttggtgcagtccccaatcccaaacacatttgggtacctcctgtgttgcagagtttctttatccacatccacccaaccagcagcatcagccacaggactggtcttgaggacatctggtgggctcattggaggtgtgacatgaagcatttcatatgaaatcacttgggtctctcctggtttgtccaggttctcaaatacagcctcttgtttatcggctcggacttcaatgaggtttttcttgtagttaacagtgaggttccgctcctggatgatctcctgcagggcatctgcatacttcttaaccccgaaaatggctccaagagaagtgttgaaaatgatattggccttggatcgcttccctgtcttcctgaagtaggcttctgataagtacatgatcttctgaggggctccagcacacttcactggagtatttgggaaggtgaagatggcattgccctctttgaagtcctgcagagctttccatgtcttctctacagtcttaactgaataattcgaccctattttgggatgagcgaaaccttcaggtaggcctttaatcttctcatagtccagctggattccgagagcaataataagatatcggtaggagatcttctcgtcgtcatctgtgtgaatgcagttcttgtctgggttcaactcagtcactctagctttgatccattctacaccagatggaatcacacttgccgtgggacgaccagatgaggacaattgtttggcaccagcacccaccagtgtccagattggctggtagaaatgtctctcactgggctcaacaatggccacattctctgcacccactttcctcttcatgcgggcagccatggtgattccgccactgcccccacccagcaccagcacctcataatggttcctggccgcatggctggccccggtgtgcagctgaagggggccgacctgctgagtgcccagcctgagcaggcaggcaaagagctgggcacggggccctgataccacagccaccagtggcaccatcttcaggcaggatcaggccgggcgtgagcggagccttcggtcactgcgttggcgcagcaaaaaccttcgctcccttctccccggccgtaatggccgaattcccgggcatatgtccggtaccgtcgactg

SEQ ID NO: 122106 - DNA, 992 bp, Homo Sapiens
gggtctctcctggttgctccagttctcaatacagcctctggttatcggctcgacttcaatgaggttttcttgtagtaacagtggaggttccgctcctggatgatctcctgcagggcatctgcatactttcttaaccccgaaaatggctccaagagaagtgttgaaaatgatattggccttggatgggtttgcggtgtcttcgtgaagtaggcttctgatgagtgcatgatcttctgaggggctccagcacacttcactggattatttgggaaggtgaagatggcattgccctctttgaagtcctgcagagctttccatgtcttctctacagtcttaactgaataattcgaccctattttgggatgagcgaaaccttcaggtaggcctttaatcttctcatagtccagctggattccgagagcaataataagatatcggtaggagatcttctcgtcgtcatctgtgtgaatgcagttcttgtctgggttcaactcagtcactctagctttgatccattctacaccagatggaatcacacttgccgtgggacgaccagatgaggacaattgtttggcaccagcacccaccagtgtccagattggctggtagaaatgtctctcactgggctcaacaatggccacattctctgcacccactttcctcttcatgcgggcagccatggtgattccgccactgcccccacccagcaccagcacctcataatggttcctggccgcatggctggccccggtgtgcagctgaagggggccgacctgctgagtgcccagcctgagcaggcaggcaaagagctgggcacggggccctgataccacagccaccagtggcaccatcttcaggcaggatcaggccgggcgtgagcggagccttcggtcaccggacgcgtgggtcgacgatatcccgggaattccggaccgtaccagctgcttttttgaacaactgttctatattcactatttgttgtttgttggtgt

SEQ ID NO: 122107 - DNA, 685 bp, Homo Sapiens
aactgaaagagttgacaattttattttcacatttcccaatacaaaggaaaactgcatcttttttgtcccacttctcccctccaaaactattctctttcataggacaggggagcaagtcttccttatgctgtttagaaaactcagtatcacagcagcatgatctcctggtgaagcagaacaggtaatataaaaccgatacaataaggcctcccctctatccttatctgtctggtcgagtcattccgggccgagtgggcaccatcatgggacgggcaggaggtctcatcattgggggcccaggcatcattggcatatggcctcccatgggcggcctcattccaggagcaggtcccactggcatcatcccaggaggaggagggcccatcattggcatcatggcatcataccagggcgaggaggacccggaaggctggggggaggtggtatcatcgcccctgcaggaggaggagcagagaatggagtaggaggtatctttccttgttgaaatgcagccgttgttttgtcaatcaggctctgagcctgctcttccatccatttctgataatagtctttcacattctctttgtgtttccttccactgcagtgtgtctttctcacagatggagagtcatgggtgaggtatgtatcgcagtagtcacaataaaacttgggcatgttgctctgc

SEQ ID NO: 122108 - DNA, 1151 bp, Homo Sapiens
  misc_feature (925)..(926): n is a, c, g, or t
  misc_feature (978)..(978): n is a, c, g, or t
  misc_feature (980)..(980): n is a, c, g, or t
  misc_feature (983)..(983): n is a, c, g, or t
  misc_feature (995)..(995): n is a, c, g, or t
  misc_feature (1016)..(1016): n is a, c, g, or t
  misc_feature (1033)..(1033): n is a, c, g, or t
  misc_feature (1037)..(1037): n is a, c, g, or t
  misc_feature (1042)..(1042): n is a, c, g, or t
  misc_feature (1046)..(1046): n is a, c, g, or t
  misc_feature (1056)..(1056): n is a, c, g, or t
  misc_feature (1067)..(1067): n is a, c, g, or t
  misc_feature (1078)..(1078): n is a, c, g, or t
  misc_feature (1085)..(1087): n is a, c, g, or t
  misc_feature (1129)..(1129): n is a, c, g, or t
aaagatataggtgggtgtgtggtcgaggggtgttggcggaaaaaaagatggtttgagaatagtgagggtgtggtattagggcggggtgtgtttgggggaagagttgttcgctttaactgaaagagttgacaattttattttcacatttcccaatacaaaggaaaactgcatcttttttgtcccacttctcccctccaaaactattctctttcataggacaggggagcaagtcttccttatgctgtttagaaaactcagtatcacagcagcatgatctcctggtgaagcagaacaggtaatataaaaccgatacaataaggcctcccctctatccttatctgtctggtcgagtcattccgggccgagtgggcaccatcatgggacgggcaggaggtctcatcattgggggcccaggcatcattggcatatggcctcccatgggcggcctcattccaggagcaggtcccactggcatcatcccaggaggaggagggcccatcattggcatcatgggagggccccccatatggggtgctggcatcataccagggcgaggaggacccggaaggctggggggaggtggtatcatcgcccctgcaggaggaggagcagagaatggagtaggaggtatctttccttgttgaaatgcagccgttgttttgtcaatcaggctctgagcctgctcttccatccatttctgataatagtctttcacattctctttgtgtttccttccactgcagtgtgtctttctcacagatggagagtcatgggtgaggtatgtatcgcagtagtcacaataaaacttgggcatgttgctctgcaggccgttggccactccgttacgtgacgcccggaaatgacgcgcacagccagcgacgacaccgcggaacccacgagacagcatgaagacttccgaagcctnncgctccagcagcgagcgaggggcggggctttcctttttctcctttcatctananganggcgggaagganggatactacggccgctacgangttcatccagctcattnatcntgttngtcngtgctccggnagagcgtattnatcctttccanaatattnnnatgatctctgctacgcgcctccgtgcggattcttgggctccnagggcaatttccctataatgag

SEQ ID NO: 122109 - DNA, 1307 bp, Homo Sapiens
  misc_feature (172)..(181): n is a, c, g, or t
  misc_feature (214)..(228): n is a, c, g, or t
  misc_feature (373)..(398): n is a, c, g, or t
  misc_feature (534)..(583): n is a, c, g, or t
  misc_feature (641)..(649): n is a, c, g, or t
ctccctcacagggggggaggccacaaaaggggtggcgagtgaatagaccccccccgtggccggaaattttcagaggcgttttttattcacagtgccccgtctttgtggtgataatggggtttttcccccatttgtgggggcccagaaaagggcctttaaaaaggaaagtttnnnnnnnnnnggttttctttcggaatgagaagtgcgccacaannnnnnnnnnnnnnnttaaattttgggtatatttgggagcccttcgccttgggggcattctccggttgggaaaaaggaccccacggtaaagggggcccttccgggggacttcccctttggggggttggttttccggaaacggtccgggtttccccccccnnnnnnnnnnnnnnnnnnnnnnnnnnattcccaaccccttgttccaggacccggtttttccttgggaacccggtttgggcccaggttcccttccttgggggcccgggcgcccaaagaaatgttttggaaactttttcaggggccggggcggcccgacaaggnnnnnnnnnnnnnnnnnnnnnnnnnnnnnnnnnnnnnnnnnnnnnnnnnnacatggaaatattccatgggatttatttttaacaaacatttacataaacaataaatgnnnnnnnnncaggtttaaagtgagcagattcatatttacagtgtgatttttaaggactgtctatatccaaattttattttcgtgaacgcttacattctaagagcagtacaattagcctattacgtagggccctaatcttgttagtatagtgttgttgaaatactttcttcagcttttgccttaacaaatccaaagatggaagatgatgacaatctggaatattcaacataacatgaaaaaattcattccacatatccaaatgaggaagccttctaaaaagaccttcaggcttacactctcctccttcatttttcactttcatgtaagtgccaaagagcatgcaatatactgttgcagcaaccccaaagtaatcgatctggtagttccatggtttgttgctgagcatctcaacacactgaaaaccagatgtttcacactttgctgtgaatatagttccttttggaaaaagtttcatatctatactctgacccaggtcaatcagtgccaagccagcagataaatcatcttcatcatcctgttccaaaaatccgtttccaagtatgaaattgtctggtttaatgtctccatgaatgatttcacagtcatgcacttgctcaatcatgtaaagcattctcatagcaaaagagatgacaagaccttgaggcat

SEQ ID NO: 122110 - DNA, 617 bp, Homo Sapiens
ctcttgagctctctcctgggcagtccaacctgtctacttggtcctggtgcatatgcagttaggcttgacagaagcatttgtccagattatccaattctagcagtattgtatgtatggctagccagaagcagatagtttgggtttttatttaaagggagagagagaaaattttttgacttgcagtattgctaaaagattacttatcttattttttggaacaagatgtataagacttttaattgggtctttaatctctctcatgtataatagatatagtgtttccatacttgctgcattgtattgtgtttaggtgagagttgttatactaaactgtccaagcctgtggaagtcagatgcaggggtggggttatcctgcatattgaaggctacattttagccattatttatgctttgtctttttcaggcttcctcatttggatatgtggaatgaattttttcatgttatgttgaatattccagattgtcatcatcttccatctttggatttgttaaggcaaaagctgaagaaagtatttcaacaacactatactaacaagattagggccctacgtaataggcttattgtactgctcttagaatgtaagcgttcacgaaaa

SEQ ID NO: 122111 - DNA, 590 bp, Homo Sapiens
  misc_feature (566)..(566): n is a, c, g, or t
cttgtccaacatgagtttagtggtcaaaggcagagtagaaattacttagatgaggctcatagtaacactatacccatgataacagccatattattcaggataaagtccaggcagctaaaacagagagactctaaaagacagtgactcacagaaagtccttatcatataacagtcccaaagtcgggacagtgagagggctcatgacgtcactcaaggacccaggccctttccaccttgttgctctgccagactgcagagtactgttttcgccccatggtcaaagctgggtgggagcacatgcacattccagcttgtgagaagaggaaagagcaccgctgcaggaccagggctcatcttccatgcccagggctcattttccatgctggggacgacctagaagttgcaccatcatcactgcacacgttctgtgcttggccacaaggccgcactagcaccaaagcagacaagaagtgtagtctctccctgggcccaatggcaattctgttcctgtggaagaaggggagaccagattttagtgtccaactattaattgcaacctgccacantaacaaccatagtttacctcgtgc

SEQ ID NO: 122112 - DNA, 1018 bp, Homo Sapiens
cttgaattattcgtgggagtcgttcgcccgcctcgcagaatttcgctttttcacattactgggtttgttttgtgaatttgaagcctaaatgcctggcaccctgaatgaggccctggcggtgaaatgaaaagctattcagatgcaaagaatggcatggcatggcatgcccccgttcatcaggtccaccaactggtgctgtgaacccccactccctcctcttccaggcctcctttcttcacatcatctgtgaatccaacatcgataagatctgtctctaccccaggaaggagcttctgccatgaccacagagtcaggttcatagggtacgttgtaattctttgcaatttcaatcaggtatctctccaccaggattttgggtggggcttccacactcagcttgtgcattagcctgtcattcacagttccaatctggttggtcctacatagcttgccatattccttgctatacttggcacagagctgatcagcaactattttcaactcagccacttctgactggagtcgaggagcagcccagatcaatgtagacacagattcagccagaccagaatctagttccttcatagactggataaggccaaaccgagccagcagcaggtcacagtacagctccaggatctccatggcctccacgaggtagtcttcccggataatgtgctccacacggatccgagctcgttcatctttcccagcagccagatagtcagcaatctccttccttgctttctgggccagttccgttttctttttctccaatagtttaaggcgatttatgactaatctcaaattcactcttaagcgctcagctttaaatccagagcccagcatgctgtgctgttcctcctagaaacagaagaagcacaatgactaaccgaatcctgccgtgaacgcagcagacaccgacttcagggttcaccatccaaatggcgactccctcggcctcagcacaaccctcgtgccgattcgcacacccaggccttcgtacctagccgtaaac

SEQ ID NO: 122113 - DNA, 2416 bp, Homo Sapiens
  misc_feature (879)..(879): n is a, c, g, or t
gaaagcaggacacagatctttaactttattagcagctactgagctacagaatacaaaccaactgaaaacattaaagaaaggctgcctgaaacaagtatgtacaggtatactacacagaagcaaaagctgtatcatccaatcccaaagccacccctgtggggaaggatgaccttagctatgggccaaaggagtaacagaagttatgacataagagtcccatccatccaggaaagcagtgaacaactacagctgcatgggcaccaaaaatttttctgagattagttttaaaggttccatgaatcaaagttttcaaatgaaaacaggtacccctcttttcctgtaggctttccagctcactacccaaaagacttgagtacttctattaaggcagctggaagcccaccctaggacttgaatggcaccttgtcctttctctgccagtaatgcaatccaacacaatatgctacagggaaaacagaatttccacggtgccgccctctggtacaagggaaacagcacgcaaagcaaaaggccacagagggctccctgagaatccagtacaactaagcgaggccttcaactgtcaagacaaactttgcaactggatcccggtgggacagtgccctgcagcgaggagtactgtatatgccaatgagagggcccagcttccaggaaccgttacaatggcgtcccgagtcattttccctctcccacttgcattcgagagtgagaaaacacacaaggtggccttgattctcactcaccacaatccccctgtacagaggggtctgtttctaagtctggaacctcaacacgaggctgggatgcttcacaacggtgctctctcccactgtccagccatctttggtggtcttcccnacagtgcttcccccatcctctcacactcctgtggagggaccatgggacgggccaggaggaaacctgggatcactctgacaggaaacggacaagcacagctgccaggagccagttgctctggcctcagtctccaattgttagtctcaggatcaacagagaactggaaagcagcagaatctggaggagcaggaagagagcccagagggagtgttgtgctgagtgacggttaacagatgaaacagaatttcatggagattctttgttacaaggagaaattgctcagtctcaactcccaaaacgtgaaagttgcctggtttaagagacctatgttttctttttcaagctcttcaaacctccgggaaagatcatcaaaagtcactgtcttcagatgctgaaggtgctggcacccagcagatgcagttggtagtgtgtctggcacagatggcaactctggtaggacaaagttgtcatagttatctgcaggtctggaaggaagctttgcagaggcttctggcttgggtccaggaccaacaatctgtgcagaagagatattcttatcagcattaatgtcatctacagattcatacgatgggggagttgctggtatctgaggtggatgaatattgggaaaggcctgataagtccccattggcagtccattgaaatctggatgttccctttggcagtggatatgagaaaggcgtatttgcagatggcatagcatgggcatgggcatgggcattggcaccgttccatcaggtcccaccaactggtgctgtgaagccaccactccctcctcttccagggcctcctttcttcacatcatctgtgaatccaacatcaataagatctgtctctaccccaggaggagcttctgccatgaccacagagtcaggttcatagggtacgttgtaattctttgcaatttcaatcaggtatctctccaccaggattttgggtggggcttccacactcagcttgtgcattagcctgtcattcacagttccaatctggttggtcctacatagcttgccatattccttgctatacttggcacagagctgatcagcaactattttcaactcagccacttctgactggagtcgaggagcagcccagatcaatgtagacacagattcagccagaccagaatctagttccttcatagactggataaggccaaaccgagccagcagcaggtcacagtacagctccaggatctccatggcctccacgaggtagtcttcccggataatgtgctccacacggatccgagctcgttcatctttcccagcagccagatagtcagcaatctccttccttgctttctgggccagttccgttttctttttctccaatagtttaaggcgatttatgactaatctcaaattcactcttaagcgctcagctttaaatccagagcccagcatgctgtgctgttcctcctaaccgaatcctgccgtgaacgcagcagacaccgacttcagggttcacctcgtgccgattcaccaccccaggcctcgtacctagcctaatt

SEQ ID NO: 122114 - DNA, 2085 bp, Homo Sapiens
tttctgctgttttgtaatcaggaaatatatttgtcatttgactcacaaaacaaaatgtgctttcaaaatcttttgaaacaatttttctgaaatttatttctaaaagtcagagacaaaactttagaagtgacacatttatactaagcatacatgcgtgagcaaaaaaaataagcacagaatacaaaaatgaaatagtaaaattttaatacagtattctgaatacaagtagaataccactagataagaattgtatttacctaagaaatctatgatagtgtgggtggagataaaccagtttaggatagccacttcactattcacattttaatcagtgctgaccagaagctaaagcaatttcttttaggctaagattggcaaaaaatcatagacccaattttccttgttatgaatcaaatgaacatgttttaaggtgatttgccctcatttaacggtagctggagtaagtcaaaccacagagagcccttacaaagactaagcaccaaatgatgaactgtttgtggcttttgttttgggccatcttaagttttgtgttttccattaacattcatgtgcaaattcttacaggcaaaagttttaacgtgtaagtttcagcttggagatcttgccaactgtacttacaacagttttaaagcaattgatactttcagaacaatctcaagcttaattggttaccattataagatgcagaactttttaatgttttctggtccctgaaaattcaatagggccaaatgcattaactggaaatagcatttttttaaagtcttaatcaaagatgataatggataaaacaactatataggctctcatacacaatctttcttaattttcaccttgtaagaaatgattacaatgtccttcaggcttgttatacacccccacagaatcaagaagaaatccaacaaagaattgaacatttcaacaagctaggaaatatttactgtaagcatattgtgaaattctggaagacatactatcaatactttgagaaaacactattaacatgtgttgaagaaggcagtttataaatgaaacattccaaatcttatgtttatgcatacaacttataaaatagaaaaaagctgctatttttccaatagtatagcatcacactaacactatatagttaagattgaaaacttctgtacacacgttcactacacctccaaagcagcatatgcctcttagacatcctcatttgttatctaacatatgccaatcatggtttcagggatttgtatcagttcgagcaggctaaaacaatcattctgctgtatttatttaactttagacacagttaactagcttcagggaacaaaagttccataatcaatgaagaaacattaataccaaatccccacaacaggatggaaaacatttctaaggagaggatataatcctaacagaatggactatgcccctagttacagtgaatgtgggaattaattaggagtctgaaaaaatacattaagatatataaaatttaagtgattatcaaatcagtagtaactactaaaacttaaatatgaattattgatgtttttctaatgcaacatcatccagtttactgcttaggaccactctcaaagctgatctgccattacattttgctattagtgcaaattaatacccaaataatagggaacagtttgaatcacatggaatttcaaaaaacagaatgattgtgtatctttttgtattctgaaaatagtgctataaaactcaattattcctagcttctaaaatctaccatcttagatagttcaaattaaacatggttgcctgcaaattcttttctagaggaagtaaacgcaaaacacatatggttatgttttgctgctggtctcctcatacatgtgcttcatcaacgagagcactactctaggcatgcatttatcatactactttaacataactgaacatgaggaaaacagttcacattttgataagtgatttattttggcggcaggcttattttttaatgaaaacaaatctctgaagtcaaatggccagtttgacaacctgaattagaaacttaagtctgtcaaaaaatcttaagacatg

SEQ ID NO: 122115 - DNA, 1210 bp, Homo Sapiens
  misc_feature (253)..(275): n is a, c, g, or t
  misc_feature (1135)..(1169): n is a, c, g, or t
tttgtgggatatttgtttattgagcattaatgttaacacttttaaattaagtattcacttacgaattttgtcactgtcctatcaacggacataatagaaaatattgcacagaactcaaacatgaaaataataaacaaaataactaagcaacaagtatatgctttacattttaaaaattaatccaaacaaaataatttgaagcacttctctgatttggaagtcttaaaatgttatctcatgttttatttgagannnnnnnnnnnnnnnnnnnnnnnacaaattgacactgtacaaagagcttaaatggccagtaaaactactgccttaaaattgttggctttaagtaacagaggtaaaatttgaattcacatcagagctttctaaaatggcaatagtacaagcaaatgactttctctagtatccaaaacctgcgctggctctcccttggctagaaacaagacagccttctaaagctgccataatgtcctaaaatgctctgaaagaagttggtatacttcattccccagcttaccttggtaacactggactaaacagaaaatgaagaaaattcagtcaatagtaacttaaacagtactaagttagctctggacttagaaggtttggtaaagttgatgacattcagaataaggttctcagaagaaaagcagttttccaaaaataggctaaaaagcctatattaaagaaaaaatgccaagagtgaattgaatacttaagtttatctgttcctagaagactatgaacaccacaatgggagctgaaacactatatataatttagaatgcattctcccagagcaagtttataaggtttatagaatagtaatggcctttctaaattttcacttgatatttaaaattttataagtgatttattatgtcatcaaattaagccaattccattaactatatccaagtaggaataacttcagaaatgctttgaaaaaggacaatgacagacctatagacatgaaaagcaaacagcctttgcaaagctcatctccaaatctatcaattctcaattcttcttaaaataaaagactaaccacatgttcagccattccatccccggccgtaatggccgaattcccgggcatatgtccggtaccgtcgactgnnnnnnnnnnnnnnnnnnnnnnnnnnnnnnnnnnncggccgcttcctcgctcacatggcttcgctgcgctcgtcgt

SEQ ID NO: 122116 - DNA, 1727 bp, Homo Sapiens
gcggccgccggcctcggaggagtggcggaggggccagggctagccttcagcgaggatgtgctgagcgtgttcggcgcgaatctgagcctgtcggcggcgcagctccagcacttgctggagcagatgggagccgcctcccgcgtgggcgtcccggagcctggccagctgcacttcaaccagtgtttaactgctgaagagatcttttcccttcatggcttttcaaatgctacccaaataaccagctccaaattctctgtcatctgtccagcagtcttacagcaattgaactttcacccatgtgaggatcggcccaagcacaaaacaagaccaagtcattcagaagtttggggatatggattcctgtcagtgacgattattaatctggcatctctcctcggattgattttgactccactgataaagaaatcttatttcccaaagattttgaccttttttgtggggctggctattgggactcttttttcaaatgcaattttccaacttattccagaggcatttggatttgatcccaaagtcgacagttatgttgagaaggcagttgctgtgttggtggattttacctacttttcttttttgaaagaatgctaaagatgttattaaagacatatggtcagaatggtcatacccactttggaaatgataactttggtcctcaagaaaaaactcatcaacctaaagcattacctgccatcaatggtgtgacatgctatgcaaatcctgctgtcacagaagctaatggacatatccattttgataatgtcagtgtggtatctctacaggatggaaaaaaagagccaagttcatgtacctgtttgaaggggcccaaactgtcagaaatagggacgattgcctggatgataacgctctgcgatgccctccacaatttcatcgatggcctggcgattggggcttcctgcaccttgtctctccttcagggactcagtacttccatagcaatcctatgtgaggagtttccccacgagttaggagactttgtgatcctactcaatgcagggatgagcactcgacaagccttgctattcaacttcctttctgcatgttccttcgctatgttgcggctagctttctggcatttctggtgggcaacaatttcgctccaaatattatatttgcatcttgctggaggcatgttcctcgtatatttctctggcagatatgtttcacagagatgaatgatatgctgagagaaaaggtacacctggaagaaaaaccgatttcaccttgttcatgattcagaatgctggaatgttaactggattcacagccattctactcattaccttgtatgcaggagaaatcgaatttgagtaatagaaaatggaagatggtgttgttaataaaggcatttaatagataaaaacatctccaaaaaggattttgaagctgatcctatttagttaaaaagataattttgctttcaactgtaggtccagaaaactaattattggcatcagtctgtgaaatagtccattatttgttgttaaaaatgcttcaaaaggttttcagtgtcagtctgagatgcctggtatataggagcctttgggaaatacctatttttcagtattccatgcatattatatatcaccatgaagcaagagacatgcattctataatcatgtagacactcagactcaggggaaaatacatgttatatcctgaaagcctttaaaactctatggtaggat

SEQ ID NO: 122117 - DNA, 1433 bp, Homo Sapiens
ttttttggtttcaaaagggtgtttactatttggccaaacaatattttttaattgtcagtcataaagtgaaatacatactaaaatatatattaaatattcaccaaatctgcattgctgctacatgaaaacattttttggtctgttggaaaatgtaattcctgagatcattgttgggctttgtcaatcattttcctcaccatcaaatcaccttaagtgacttgggagtgtgaatctaggatgttcaattttagaccaattttctctatcttctaaatgagtaaacaggctctgtcttttataaaaggtagaaaaataaccatggtgtgctaatttttttcaaggtataccatatggaaaagtataggctgaacacaaaggaagtcttttctgaatggctctcaatcacacataaggaacatatgttttccagttaatctgtccttgatgtacagcagtccagctgttgttttgcatttattaaaatattctctgctaaatagttatgtttgtctttaaaagtaaattgcataaaattacatccaatttctttctctaaaccaacatattcttcaccttcacaaagcaaacacatggtgcactgaaaccgaggtgttaccagctttacatactgttctgccatttgtgaggggtgcaaccacaacataagtcagaaaaaaagctatccagcttttcgtggaatctggtgaagtttatacttagcgataagcctctaagcctgaacttagcagggctagcaaaactttatttatttcctaactcctattattttagaatggttttcaaaataatactgcaagttcctaattgaaatacaaaacagaacaaaaagctgtgagaaatcttttttttctttggctccttaaagacttggaataatttatattagtgttgcatacattttaccttctacattttgatgtacttgctcttgaaagcactagaacaaattaattgaaataaaacctctctgaaaccatttgaatctttgatcctaccatagagttttaaaggctttcaggatataacttgtattttcccctgagtctgagtgtctacatgattatagaatgcatgtctcttgcttcatggtgatatccaatatgcatggaatactgaaaaataggtatttcccaaaggctcctatataccaggcatctcagactgacactgaaaaccttttgaagcatttttaacaacaaataatggactatttcacagactgatgccaataattagttttctggacctacggttgaaagcaaaattatctttttaactaaataggatcagcttcaaaatcctttttggagatgtttttatctattaaatgcctttattaacaacaccatcttccattttctacccggccgtaatggccgaattcccgggcatatgtccggtaccgtcgactg

SEQ ID NO: 122118 - DNA, 583 bp, Homo Sapiens
ataatagtgtggagacggttggtcttctccaaagtacaagtggcaaacaaggtcagataagtagtaattatgatgatgccatgcagttttcaaagaaaagaagatatttaccaactgccagcagcaacagtgccttttctataaacgtaggacacatggtctcccaacagtctgtcattcagtctgcaggtgtcagtgttttggacaatgaggcaccattgtcacttattgactcctcagctctaaatgctgaaattaaatcttgtcatgacaagtctggaattcctgatgaggttttacaaagtattttggatcaatactccaacaaatcagaaagccagaaagaggatcctttcaatattgcagaaccacgagtggatttacacacctcaggagaacactcagaattggttcaagaagaaaatttgagcccaggcacccaaacaccttcaaatgataaagcaagtatgttgcaagaatactccaaatacctccaacaggcttttgaaaaatccactaatgcaagttttactcttggacacggtttccaatttgtcagtttgtcttcacctctccacaacca

SEQ ID NO: 122119 - DNA, 611 bp, Homo Sapiens
gcgtttaaaacatttgggctattccctgacgatctatacatgtaaatttgattgctaaacattgtcactttgaatgtcaaactatttttaatctattgattttgattaaaaatcataatacaaacagagctaaaatcacgctaacaaaataaactaaatatgaaaagttgcattgaaagggcatcacattattcttaataggatcgtgtagaaacattccaatggcagtgttctcaaaataaaacaaaattacattagaagacctccagcctggccacttttgggaccttacctgtaactctggctggtgggtgtctttactcttgtactacatggctcacttacatcagacatcatatttgtataccctgagaaatccactaatgcaaattttactcttggacacggtttccaatttgtcagtttgtcttcacctctccacaaccacactttgtttccagaaaaacaaatatacactacgtctcctttggagtgtggtttcggccaatctgttacctcagtgttgccatcttcattgccaaagcctccttttgggatgttgtttggatctcagccaggtctttatttgtctgctttggatgctacacatc

SEQ ID NO: 122120 - DNA, 1028 bp, Homo Sapiens
  misc_feature (395)..(405): n is a, c, g, or t
  misc_feature (830)..(843): n is a, c, g, or t
gtgtgagccaccgcgcccagccttgaggtggcatgttttcaaagaacatggtgcctcagttttggacacacaggaactcaaatacaatcattttcctgctgctaagtaatgcttggtggctgctctggttgcagatatgtgaagttaggtagcctttcctgttaacccatggttccaagcactctctcttaacaatcattcctactgtgaattttctacccggaaaagccaggggtgggcaataacaattaagatcatttggtttctaaaagttcttcctctctgggaaagcagaactatacagtggggtggcatcctgcagattctagtctacatttgggaaaggtgtacgcctcttgcactttcagaggaacaagtcaaaaagtaattgcttnnnnnnnnnnngtgctagcaattcacagcctattcctgcccgctgaacagaaattgtgatgccttgatttaccccctagcagctacatattcttgagcaagtcataaccctattgtgcctcagtttctggatctgcaaggagtgttgcctgcataaatgtttgtttaggaacttagtaaaatgacatactcctctctctgctctaagaaggccatgagccagctgcagctcatctcactcagcctgggcctgaccagagtcctttcctcttccaagagaaagcaaggaaaagcagcaagcaagcagacataccaggtcaacaggagtgatctatcattggcaacgaggcctcaaacaaactgcaaatgctctggcttcagcaccttatccccaaatgccacaaaccagacatggaagccatgcaagagtgactatnnnnnnnnnnnnnnggcacagacagagtaccaccaagcaaaaagggggctaatactgcagagatggccccaaagtgcagcttgaggaacacagcaagtcatcccaagaccctcacttagctgccaaagaaacagcaaacactatcagctttgctcggacgcgtgggtcgacgatatcccgggaattccggaccggtacc

SEQ ID NO: 122121 - DNA, 979 bp, Homo Sapiens
  misc_feature (219)..(232): n is a, c, g, or t
  misc_feature (657)..(667): n is a, c, g, or t
ggtccaaggtagcgaggcctgggtggcgatttcggcacgagggtcttccttattaatattttcatttcagaagactgaagcaaagctgatagtgtttgctgtttctttggcagctaagtgagggtcttgggatgacttgctgtgttcctcaagctgcactttggggccatctctgcagtattagccccctttttgcttggtggtactctgtctgtgccnnnnnnnnnnnnnnatagtcactcttgcatggcttccatgtctggtttgtggcatttggggataaggtgctgaagccagagcatttgcagtttgtttgaggcctcgttgccaatgatagatcactcctgttgacctggtatgtctgcttgcttgctgcttttccttgctttctcttggaagaggaaaggactctggtcaggcccaggctgagtgagatgagctgcagctggctcatggccttcttagagcagagagaggagtatgtcattttactaagttcctaaacaaacatttatgcaggcaacactccttgcagatccagaaactgaggcacaatagggttatgacttgctcaagaatatgtaggtgctagggggtaaatcaaggcatcacaatttctgttcagcgggcaggaataggctgtgaattgctagcacnnnnnnnnnnnaagcaattactttttgacttgttcctctgaaagtgcaagaggcgtacacctttccccaatgtagactagaatctgcaggatgccacccactgtatagttctgctttcccagagaggaaaaaacttttagaaacccaatgatcctaatttgttattggcccacccctggctttttccgggtagaaaattcccagcagggaatgactgtttaacaaagagtggcttggaacccttgggtttaccggggaaaggctaccttaatttcacataatctgccaaccagaggcagccacccagcctttaccttagccat

SEQ ID NO: 122122 - DNA, 727 bp, Homo Sapiens
ttcccaattaggacttaaggaatgtgctgggacaaagttggcttcagtgatcaggttgtttcaagtcttagaattcaaacttcaattctaaaaaaattttatcaacaaaacactgtgaccaaaaaatcactttaaatcttaaatattgaaacgcaatagcatataaagatggtataacctaagatgcttttatttcattatattttcaatatctttacgcattataacaacagaaatgtaacctactcacattgccatttgttccattatgcaatttgaagaaacatgttttccttttatttttatgaacagatatttagacatttcacattttgtaaaaccacgtctacaatctccaattccattcttctgagaggcaaaattttacaattaatatagaaggcagagttttttaaacaccttaagtttacttattaattagtatagtagcatatttcagattcttagaatatggagctagagggtgctctttcatactagaaaaccaactatgttggtttttgtactattgtacagtgtgttcaaatatagatactgaagacctctgcaaaattttaatcaaaatctcctttcagtttgttaaataatttcttgggaggaccactgaaagagataagtgtcctcatggtgaaatcgtgaatctcttccaaattaattcttataaaggcagttctgattatgttgatccaagtaatgcagtggtgga

SEQ ID NO: 122123 - DNA, 757 bp, Homo Sapiens
  misc_feature (656)..(656): n is a, c, g, or t
aactcaaaacagtgttaagttcctatgctgttagtactgtatcttgtccacacctcaaacaacagtgagatctctgagcacatggtctgtacctcaaccacttttctatcaccagggtctagaatagttgggcatttaaataaaatttgctaaatgaatgaaaaatccaaaataaatcatgaagccatttataaatcacaccaatcttgcttgggttaaacaatagaaagtaacacttttgaaagagaaggcaaacaggtgttagaggggcaagaatgtgagctcgaggaaaagacagctacgaactgtgtttttaacaactcattatttggctactatatttcccaatctattctaacactaacaagaatctgtctaattaattgtgacaacatctgcaaaaccatagttacctattttttcttccaactcttttactgaagacagaggatcattttttacagaaggtgattttgctaaggaatcctttaatagtatcaactctgctctcctatctcgtaattctttttgttctagtagtggctttaggttttcatgttcctttataaaacatttttctttttcattatggatttcacttttgctacatgtttgagatacttcttcaacttgaattaaaagattctgattttcangccttgttttttcattagcattcttcatttctagaagatcagactgcagggcctccttttctgactgtatttctttctactctttccttaagagactttct

SEQ ID NO: 122124 - DNA, 1674 bp, Homo Sapiens
  misc_feature (1649)..(1649): n is a, c, g, or t
tttgagcttccaaaataacttttattactatataaaagaagtcaagaaaaaatagatgcatatttttcctacaaaattataaaatattcaggatagttaatattttttccataaatgcgctaagataaaaagatagaaatctttttcacttaaggttttcgagtaccttgtaggaattaaagaacaataatgttctttcttctacattttcctaaagacatagcagttacagtttcctgctggagttatctaaaaaaggacataccaagataaattttctatcatattgaaataaaattagcataaagctttacttctgtctttgtgcttttagattggcaactgtggtcaatcagtgctgcactggaatttccaactcagcaggggaaagaatctaattaaaaatgacacacactctgtattttgtcctttagaaaacagaaactgcttgtcgatatcccttaaaaagtgcaattgccttctttgtcatttctttgtaaagtctgagatgttgtttctaaacagcacagcttacatgaaaccacgcaagtaaaggaaagaaagtgctttagagggcaggttccatttgacacaagcagcacaggaagccgtacacttttgatgacagtaattcaaaaagtatattcatttgagtttctcaataaacgctttgagagaaaaggctttaatgttgattcagatgagtgttaaaataaagctttcttttctgaaattagattatggggtaaaccaagccagattatctctggagatgacagaagccataattattttgggaaatttcaatcactgttttggaattgatacctaaggctttcttctcccctattatttatgggctttttaatgagatatttttctcgggagatgcttaggtaggaaatatcagcttttgaaagataaaggtacaattatcattagaatcaaaagcccattaaataagagtctcaaacaaaggttttctagatatattttatatacgttgttttcataaagatagaaaagaaattcctataatatctgtaagattatcctcacattagcccacatgaaagataaaataaagggctgagatggggggtgcttaaatactttgcaacagtgctattctagtgccaaagccataattaacttttcactgataacctgtttcttagcctatacaaaaaggaatggccacctcaattctggcggcttagtcactatctaatcccttcctccaaaaaccctggaattttgtgttcctctatgtaatggaacatccaacttatcaaatgatgtgtgactatgcaactactccttctatggcaccaagactgtaccatgctccacccatactgaatttaattgtgctaccactttgtgccaggcagagggctgggtactggggatccttctggctctattaccaattttggaaatagaatttagtagagaagaagagaacagtgttgcagcaaggggatcttgaatggtttttcatgaagtttaagggatatgatggagtgtggcttgtattcagtctttggaagtaagtaccagttacctaaaaagaaatccactaagcaccaaaatgtttagtgtatttggtgtagagtttctacccatattaaaatgcttcagtttanaattgaagggaaggcaaaaaatcaa

SEQ ID NO: 122125 - DNA, 2006 bp, Homo Sapiens
  misc_feature (403)..(481): n is a, c, g, or t
gggggcgccccacagggttttgttatttcccgcccttggcagatttcacgggttctatcacagccccttttggggaagggctttccacgttcggggcggaaagtgtttaatggaattcccaccaccttcttccaataaatggcaggggcgggggggtgaatttgaatttgaagctcccctgggccccccgttgttgaacccagtaaaggcccccggaatcccctttggattttttcaaaaccttgggttccccccggggtttttttatgggggggattccaagcccttattcatgccccgggtttcctttggaaccagtttgggccctggttcctttccttttggggccccgcggccaaaggatggttttggaaactttttgggggccggggcgggccgccannnnnnnnnnnnnnnnnnnnnnnnnnnnnnnnnnnnnnnnnnnnnnnnnnnnnnnnnnnnnnnnnnnnnnnnnnnnnnncaaaaggtaaactcgtttactggttcagcacacaattctcatgatcattaatactctgacttgggcctagacttcgtcctaggctgaaaggttgattcaggtacaattaaattttctggttaaaaattgtcattgggttcaaatgatctatcatccctctagaaggcagcaccagcagagaagctataaatacactcacttcaaaactgagctttaggggtggttgtaccttaaccacacaccctacagccaagagaaattagcagttgagcaaagatacagaccaaatgcctctgggagatggactgaagcagctccaaagaaagctgtaaaaaagtgacaagaatttgttcttccactttgagactgttcgattcaaacatgagtccaaggcacgtatccttaagaggagatgctctgctgctgtctcatttgccagattatccttcagttccaggctttcaacaggatatgactggttcatgctccatgataggaaaggaattaaagtttgaagccagaatgaatggccacaatgcctgatgttagactttcgtaagtcaccttgtgaaagcctgcatcttctatcatgtccttgaactcttcctgagacggaaaccttcggatactctctacaaggtactgataggacttccagtctccagcgatgacctctcccaggacagggatgacctggaagctatatagatcataaagcctggatatgaggggattgttcacttggctaaattccagacagagaaaccgtcctcctggtttcagcacccgatgagcttcctggagtgcctgatcaatgtgtgtgacattccggatcccaaaggcaatggtgtaaatatcaaacttgtcatcatcaaagggcagttcttcagcatctcctaatacccatgcaagtccagctctgtatccttgagccaaggctttctgctttccaacctttagcatctccttgttgatgtcacacaccacgacacgagacccgcccaaggaatcttcttcattctggtactctttggcaatttcttcccaggataaattttgttgggcccttaactgcctcttctgttttctctgatgctgggactgaacataattaaggaaccggaatgcaatgtcacctgtgcctccagcaacatcaagcagctgggtcccaggaagcgggtgcatcttccagagcagcaaatccttccaaacacgatggataccaagactcatcatatcattcatcacatcatacttcttagccacactttcaaacacctgatagactttgccccccttctcctcttccgacacagtctcaaacccaaagtgcgtttccgctgcccgcttctcttgggacaagagccgagcacttagtaggtccccgggccaagagctacgaagcccgaggagctggcagccccgcatcgcccgcgaccacccacggccgcaatagctccatagggcacagctcccgggggccgcctcgtgccgattcaaacccagcctcgtacctagccgtaag

SEQ ID NO: 122126 - DNA, 1070 bp, Homo Sapiens
  misc_feature (454)..(454): n is a, c, g, or t
  misc_feature (503)..(503): n is a, c, g, or t
  misc_feature (510)..(510): n is a, c, g, or t
ttaattatccaacaaccatcccaagtacgggcgcggttccgtaaccaacgcaggtttcgcctctcccgccagtggcgcccccgaggagttgtccacagtggccctccggtgaactgcgagccccggaacccatttctccgcctcactttccgaccggaccctcggaacctttccaggcgtaatggacttccttctccagcgatgcctctcccaagaccggactgacctggaagcctatataaatcataaagctgaatatgagggggattgttcacttggccttaatttccagaccagagaaaccgtcctcctgtttcagcacccgatgagcttcctgagtgcctgatcaatgtgtgtgacattccggatcccaaaggcaatggtgtaaatatcaaacttgtcatcatcaaagggcagttcttcagcatctcctaatacccatgcaagtccagcntctgtatccttgagccaaggctttctgctttccaacctttagcatctcncttgttngatgtcacacaccacgacacgagacccgcccaaggaatcttcttcattctggtactctttggcaatttcttcccaggataaattttgttgggcccttaactgcctcttctgttttctctgatgctgggactgaacataattaaggaaccggaatgcaatgtcacctgtgcctccagcaacatcaagcagctgggtcccaggaagcgggtgcatcttccagagcagcaaatccttccaaacacgatggataccaagactcatcatatcattcatcacatcatacttcttagccacactttcaaacacctgatagactttgccccccttctcctcttccgacacagtctcaaacccaaagtgcgtttccgctgcccgcttctcttgggacaagagccgagcacttagtaggtccccgggccaagagctacgaagcccgaggagctggcagccccgcatcgcccgcgaccacccacggccgcaatagctccatagagcacagctcccggggccgccaatccctcgtgccgaattcgacacccagcctcgtacctagcctaagt

SEQ ID NO: 122127 - DNA, 740 bp, Homo Sapiens
  misc_feature (56)..(116): n is a, c, g, or t
  misc_feature (202)..(492): n is a, c, g, or t
  misc_feature (672)..(684): n is a, c, g, or t
ctcatctttctcctgggttcctaggatcttggagattacctagtccaatccttttnnnnnnnnnnnnnnnnnnnnnnnnnnnnnnnnnnnnnnnnnnnnnnnnnnnnnnnnnnnnnggaaactgtgggagttggatccctgagtcccagtccttaaactggttgctacatgacattctagaacctctccccaccaactcccnnnnnnnnnnnnnnnnnnnnnnnnnnnnnnnnnnnnnnnnnnnnnnnnnnnnnnnnnnnnnnnnnnnnnnnnnnnnnnnnnnnnnnnnnnnnnnnnnnnnnnnnnnnnnnnnnnnnnnnnnnnnnnnnnnnnnnnnnnnnnnnnnnnnnnnnnnnnnnnnnnnnnnnnnnnnnnnnnnnnnnnnnnnnnnnnnnnnnnnnnnnnnnnnnnnnnnnnnnnnnnnnnnnnnnnnnnnnnnnnnnnnnnnnnnnnnnnnnnnnnnnnnnnnnnnnnnnnnnnnnnnnnnnnnnngacttcccttcccccgcccacacccccccaacccggcctagatccacaggcactgtaatcacagctgacacactcgactcggaatcagcatagagagcactctgaaaattgtcaaatagggtccctgaaacttgtataccatacttctcctgaagatcttgaagcatctttgtgtttgcnnnnnnnnnnnnnaacttaaaatatggcattcaggttttatccctctccccgacgccatattttaagtt

SEQ ID NO: 122128 - DNA, 685 bp, Homo Sapiens
  misc_feature (88)..(112): n is a, c, g, or t
  misc_feature (540)..(600): n is a, c, g, or t
tttttgaccacaccaagtttgtattaaaaaagtactgttgtgttactttttaccaacctccaatcattatacaaaatgttaaaaaatnnnnnnnnnnnnnnnnnnnnnnnnngccatagaggttatcgcaaaagatcaacccagaatctttcagaatatgacagatgcactgagaaggcagataaattgattcaatatacaaaaggcctctttcctatggaatttcattagattaaataaggtgttccctcctcacagcctcatccttatgagcaatcatataaataatctatttaaagtccttgaactataacttgtataatttttagttttccccctttgaaggggcctaagagaaaggtttgagaaaccagctcttgaggggggcaggggtgaggggtaagaggtcctgtgcctttcattcatcctgggagcttctcaggattgcagcatttccacctgagtgttcattcttgtacattttctcatctttctcctgggttcctaggatcttggagattacctagtccaatccttttnnnnnnnnnnnnnnnnnnnnnnnnnnnnnnnnnnnnnnnnnnnnnnnnnnnnnnnnnnnnnggaaactgtgggagttggatccctgagtcccagtccttaaactggttgctacatgacattctagaacctctccccaccaactccc

SEQ ID NO: 122129 - DNA, 1786 bp, Homo Sapiens
  misc_feature (73)..(91): n is a, c, g, or t
  misc_feature (673)..(681): n is a, c, g, or t
ggtaacgacggccagtgccaatcttcgattaaccctcactaaagggaataaacttgcggccgcctgctcaggnnnnnnnnnnnnnnnnnnnagaatataagttttttaatttttataaataacttatctgttacaaagatagtttacccagctaaatcacaaaaccatcaactcaagatatccaaattacgttttattaataaaacaagtaaaaactgatttatcaatcttcacatagaactgcagatgaagctgaaaaacaaggcctattttaaaaataaattgcatcaaacgtaagggctttgggtctatggtttaattacctaggattgtcatatttcttcccatatacaaaatgcaaagcctgaaagttagggctctgacattcatagagatcaactgtaataatcccatttaaaacacagccacttgcaaacatttacagtgggtggtagtctatattatcttccatcctttgctctatttcagcacttcccttagccccattctaagcactcatataatttcataattctgtctttttaaatgcatactgttctttttcttgatttcagttatatacattcctgatcatctgaatattttccttacaaaaatatatcatcaaaataaagagatgcttgaggttgcttcagtgttcaagtttgcttgnnnnnnnnnccagcttttcttcagttgtcctaaatatggctagccttgttttataaatacacatgatactgtcaccaagtcaggattagaaatggactgccccaacagtaaagcatttaaacttctctccaaaaaaagggctgtaggtactgctgctgttgctggttttgagactgtactttcccaataacaactgcttgtgcaagttctgtgggacaccaagcagatgaagcttaaccttgttgttctgtcagtgggttaaaaatatcttttgttttaagcttccctgtggaagacaaacactgtgttgtgtcacccactgctcaagtcagtatttaatgtgacctacagacatcacttctgtaatatcatctgcaattcactgtgcagcatctgcctgtcttcacacaacattggaactcatgagggcaaagtacagaataagtagaggaaagttattctgtgcatactttcatctcattaatgcttttttattttaaggcattgttcctctcaggtaaggcttaaaaagggacatgatcgtgcttaattactaaaaggaaaaaagaaaattagttaacaaaaggctattacactatacatatagaaatataagaaaataatcaagaagaaaagaaatcacttaaagcagactcgagagatctgtacagtaggaaaagctttggggtatttcgctgcacatttgtacagacaatgcatgctgctttcctttgcatctttagcccctagatgctggcttcacagagtggagacacgttcagggaagacaaagacaaggccaagagtaccacagatttctgaagttcttccctatccaatggcactatgcggcccggccgtaatggttcttgaattgttgggcctatgttcgttttcttcgactgtatgtagtgtttcactgaaagctttacaaataaaacaagctatcattctattccttcctcctgtcaaaattcagtagtgacatgaggggaaaaaggtattgggaacacctaggtgttaacatattgagaattatccataatgggacactggtaacactgtacacagttaggcagtgggcaaccaagtctttcagcagattacttttcat

SEQ ID NO: 122130 - DNA, 1033 bp, Homo Sapiens
  misc_feature (838)..(838): n is a, c, g, or t
  misc_feature (859)..(859): n is a, c, g, or t
  misc_feature (873)..(873): n is a, c, g, or t
  misc_feature (879)..(879): n is a, c, g, or t
  misc_feature (929)..(929): n is a, c, g, or t
  misc_feature (937)..(937): n is a, c, g, or t
  misc_feature (959)..(959): n is a, c, g, or t
tttgaagagtaaaacacattaaaaactttattgtaagtatcaacatctaaatttgcatcaatttgatacatcgttgctcattttgcagaacataacagttgcacattgcaagagtcaacttgcttcgggtcttttcatgctcatggcggtccacccctgccttccctctccctgacctgcatcctgtcctccacagtctgccctgcctcctgtcgccacaggttgaagacccaagccctgaggagaacctgctgccagggggctggctggctgcgagccaggagggccaggcagttagccctgccacagggaggggcaggcaagggatcgtttctcctcttcctgggctgagcccgtgccaggccagccacagagtgccctagtcagcccatgtggctccaggaagcctgctgttgttctactccatcccatttcacccgcagcctagtggctaactccggatactctgagcaaaattaacccaagtttcatggagaactccagaaccttgaaccagtgcatggttatcaccattctttgttactagatgtaggagaaggtactgcagagtcctctggcctggaacagcttgggggaggattcagctccctgtttctccctcactcccaggagattcgaaaacaagtttgagagaaaaaacagtaactaaaaaagtccatgaagaaggatctgacatgtcctttgtgaagtaacattaccctctccccatcacgacgcaggagatgacatgttacagtaagagggttacagcaattccccatctggagtgcattcaaactgctgcagaatctccattttatgcattttaacacatcanacgaggctgatctccacctanggaaatgcccatanaatatnatagaatacatgctatgtatgcaactatctcaactaaacgcacatctgcngtgaggangggtgcgtgactcctctccaanacatcacacaaagtcgtccggctgttgatgtgggcacacgtatcgtgcgtcgtccattgctgcctgcgcctgca

SEQ ID NO: 122131 - DNA, 1052 bp, Homo Sapiens
  misc_feature (91)..(108): n is a, c, g, or t
  misc_feature (111)..(111): n is a, c, g, or t
  misc_feature (117)..(134): n is a, c, g, or t
  misc_feature (137)..(137): n is a, c, g, or t
  misc_feature (139)..(141): n is a, c, g, or t
  misc_feature (148)..(277): n is a, c, g, or t
aagaaaaaaaggatggggggaagggttttgaagtgtatttagggggatggggctgggttttaggaaagatgtgtttgagaaaagttttttnnnnnnnnnnnnnnnnnntgngggtgnnnnnnnnnnnnnnnnnngtntnnntgtgttnnnnnnnnnnnnnnnnnnnnnnnnnnnnnnnnnnnnnnnnnnnnnnnnnnnnnnnnnnnnnnnnnnnnnnnnnnnnnnnnnnnnnnnnnnnnnnnnnnnnnnnnnnnnnnnnnnnnnnnnnnnnnnnnnnaattttaagtttgaatgtatattttgaaataaaaatggaaaataacaaatttgtacaaaattgtcacatagaaacacactttaagataccattacatgctatgtgtatttacaaaagttacaggtctagtaagaaaaaagaaactgtcattgacaaatgcgagctcattttttgagcaacaagaaatctcccgtgaaatgtcatactgacagccagtgagacttggtgcagtgacggctccgcacctgctgaggcctggagcctgcctcccgggctgagtgctcagctctggcctccggctggatgccgtctagagtcctatgtgctcataggtctttttctttcagtaaacagtataaaacattactattttcctttgattgtaaacttcaacagaaaataacatacttaagaattttgctacaaagagtactatgatttttattgcctcaccacctttagaacatttccacttcacaagtttctgatttgcttcactttcttacttggcgatggcgccctggcagcatcatccacacataccagtgcgtatggagaaatgggctgtaggcccttcctgcgtggtccatggctctgccttcatggaacaggctgagtcatgtctctgctcaggctcaaaccatctactctcaagttacaggcagctcagcccattcatttattgctttccttatattccactgtttattatttaagttgtattttcatatgttcctatagaatttatcacattacctggctaatatcaacagtt

SEQ ID NO: 122132 - DNA, 884 bp, Homo Sapiens
tcattttaaaaacgaagttcttgaatttatttaaattactgtcttgcagtgagttggccaagaggaccgcatttccttgttaatatatatgtagacccatgagataaatgggaaaagtgtgattacaatggcaatagccaattgaattcttccaccaactggattctttgaggaactgtggcacaggataatccatgctgtaataatcaccagaccagacagctccctgccttcttcctcatgtaagatgttctgttgtgtacgatgcaagaggtaggacgccaagccaacagcccacaccgtacaaaagagtatgtgtattgcagagatacttttccaaataacattacctgtgacttcagggttaagtccaacaagcagggtcagtactgcagggattgtgtacaccaccacccacacctctgcatctgggtcatttacctgcaccaaggccgccagcgcgaagaaggcggccatgagtccgttgcaggcccgccacagcgctggcgccatggctcggagaacgcggcgcggggcggtgagtcctgccacgtgcggggcggtgagtcctgccacgtacggtccgcctccctccttgcgcggagggaccgagacccccgcctcggtttcggtgccttggggacactgccgtggccgtcgctccgtgccgggggcggggagcgaagggcgtgggtgtagcccctactcagcgacccattcagcccgccccgaacgccgcggggtgtaggcggcgccgtcctggtttcgcggatgggaaagcgagtccctcagggagcgcaggtctcggtggtggacggaagtcgaatttgaacccgtataggttcaactccaaaccctgttttcactaaagctaccttcctcac

SEQ ID NO: 122133 - DNA, 852 bp, Homo Sapiens
atatggtgtttattgtattactcatttttttcttatgttcgaccattttaaaaatacattttcaaaaagttgttcccactgagctttagattcacttatcagtgtttgctagatagttccaggtaatgcgtaagtaccttaaactcaacatgccccagttaagctatcatttcctcctcgtcttcctttatgtcctttctcatagggttgttttctcctctaccttccatctgacgtcaccactctgaggaggccttttccttacaaacaatgtaagcaatccctctgtcatgtatgccattgtggtaaaacaactgtttacattttcaagtccctcacttgttactgagctccttcattgttgatctcttctgtccagtattcttaaactgagctgttgaaatgtattttcctttattcaccacagtatttcatcttacttgtgagcgttggctttttcaaaatgagagacactggttcttttgatccaggccttgaatgtgaggcccagaagtcattccagagcactaatcagtgggaagaagagcgctatcctgaaggcatcaagtggaaattcctagaacataaaggtccagtatttgccccaccatatgagcctcttccagagaatgtcaagttttattatgatggtaaagtcatgaagctgagccccaaagcagaggaagtagctacgttctttgcaaaaatgctcgaccatgaatatactaccaaggaaatatttaggaaaaatttctttaaagactggagaaaggtactgtagcccatgtgttaatatcctagtaccttgcaaaacaatcaagtactaagtaataaattatcattttgcaaaac

SEQ ID NO: 122134 - DNA, 682 bp, Homo Sapiens
ctccgatacaaaatatttgggtcatgtattcataatttggcttgacatttccagcaaagcgaagatggcaataacaaaaggaacttcttacaagagaagagaaagacccacggagctccagagtttctgttggaacaagactcttctgttttgcttatatacagttaagttcgtttagtgtctgatccagtgtctgatgtaagcccacgttctcttctttggcctgggcaagtttctcttccaggtcatcaattgtcttttccagttttgcaaccgttctctctgcaaattcagcacgggtctcagcctctttcagtttgtcagacagaagtttaatttcttcttcatatttgtcctccttttcagaatacttttcagatgcagcctccagagatttcagattgttagtaacattcttgagttcttcttccaggtcaccacattttagttcagacactcaggccaggcgaccgccgtgctcagcctcctcatcatgctgggcacgctctggctgggctacaccctctaccaattcaagaagagcccctacctgcacccctgcgtgcgagagatcctgtccgactgcgccctgcccatcgcggtgctcgccttctccctcatcagctcccatggcttccgggaaatcgagatgagcaagttccgctacaaccccagccctcgt

SEQ ID NO: 122135 - DNA, 2049 bp, Homo Sapiens
  misc_feature (1081)..(1089): n is a, c, g, or t
  misc_feature (1615)..(1750): n is a, c, g, or t
cccctccaagggaccggtcataggtcctaaggtagcgaggcctgggtggcgattcccgcacgagggggcgcggctgtgcttttctcgccggagccgagcccagccgagcgtccgccgctgcccgtgcgcctctgcgcctccgcgccatggccggcctcaactccctggaggcggtgaaacgcaagatccaggccctgcagcagcaggcggacgaggcggaagaccgcgcgcagggcctgcagcgggagctggacggcgagcgcgagcggcgcgagaaagctgaaggtgatgtggccgccctcaaccgacgcatccagctcgttgaggaggagttggacagggctcaggaacgactggccacggccctgcagaagctggaggaggcagaaaaagctgcagatgagagtgagagaggaatgaaggtgatagaaaaccgggccatgaaggatgaggagaagatggagattcaggagatgcagctcaaagaggccaagcacattgcggaagaggctgaccgcaaatacgaggaggtagctcgtaagctggtcatcctggagggtgagctggagagggcagaggagcgtgcggaggtgtctgaactaaaatgtggtgacctggaagaagaactcaagaatgttactaacaatctgaaatctctggaggctgcatctgaaaagtattctgaaaaggaggacaaatatgaagaagaaattaaacttctgtctgacaaactgaaagaggctgagacccgtgctgaatttgcagagagaacggttgcaaaactggaaaagacaattgatgacctggaagagaaacttgcccaggccaaagaagagaacgtgggcttacatcagacactggatcagacactaaacgaacttaactgtatataagcaaaacagaagagtcttgttccaacagaaactctggagctccgtgggtctttctcttctcttgtaagaagttccttttgttattgccatcttcgctttgctggaaatgtcaagcaaattatgaatacatgaccaaatattttgtatcggagaagctttgagcaccagttaaatctcattccttcccnnnnnnnnncaaatggcaccagctttttcagctctcttattttttccttaagtagcatttattcctaaggtaggcagggtatttcctagtaagcatactttcttaagacggaggccatttggttcctgggagaataggcagccccacactttgaagaatacagaccccagtatctagtcgtggatataattaaaacgctgaagaccataaccttttgggtcaactgttggtcaaactataggagagaccagggaccatcacatgggtagggattttccatccagagccaataaaaggactggtgggggccgggggtggctattgtgggaagtcataacccacagatagatcaacctaagaatcctggcccttctccactctccaccatgcaggacaaacatcttctcaagcagtcaacgtagaatgcttgggaaatagtcataattacccacatatagtaattaatagatggtaattaattgatccttgatgtgatgttcttttgcatatttccttcattctaaagttgttcccnnnnnnnnnnnnnnnnnnnnnnnnnnnnnnnnnnnnnnnnnnnnnnnnnnnnnnnnnnnnnnnnnnnnnnnnnnnnnnnnnnnnnnnnnnnnnnnnnnnnnnnnnnnnnnnnnnnnnnnnnnnnnnnnnnnnnnnnatgggtgacgccctgccctgtaagtccccagccttactcgggggaggtcttgaagggcaggggagggattcgccttttggaaacccccagggaaaagtggggaagaacattggcccaggtgggaagcccccggaaataaatactcggcaaaccccaacccaaggggcgcgctttcccacaaggccctctggtggttcccgaaaacaggagaagggggaaaggaaatttccccattcctttccggggggaaaaaaataatttaaaaccaatttctaaagggttttgggttccctcctcgg

SEQ ID NO: 122136 - DNA, 518 bp, Homo Sapiens
  misc_feature (491)..(491): n is a, c, g, or t
  misc_feature (508)..(508): n is a, c, g, or t
ccatgaaggatgaggagaagatggagattcaggagatgcagctcaaagaggccaagcacattgcggaagaggctgaccgcaaatacgtggaggtagctcgtaagctggtcatcctggagggtgagctggagagggcagaggagcgtgcggaggtgtctgaactgtgagtggcagaacaggactgagcgaggctggctcgattcctggggcggagtgggaaggagctggctgtgttgggaattggctctgaccggggtctctgctcaagtggacgggcgtcaggggctcatggctcatcttttctcttggcttctgtgacaaagaggtggtgacttgttcttactgccatgggaagcactgcccacgtgttgaccctttctgcaaagatatgaggaaataggagtgagacaggaggcagcagggaagcccagaagtcccattttcccatagaggatatctcagggggctgtgccatcttaacagaacactgnacctgctcagaaggcangctcccccgg

SEQ ID NO: 122137 - DNA, 496 bp, Homo Sapiens
  misc_feature (25)..(25): n is a, c, g, or t
  misc_feature (40)..(40): n is a, c, g, or t
  misc_feature (58)..(58): n is a, c, g, or t
  misc_feature (95)..(95): n is a, c, g, or t
  misc_feature (111)..(111): n is a, c, g, or t
  misc_feature (166)..(166): n is a, c, g, or t
  misc_feature (226)..(226): n is a, c, g, or t
  misc_feature (441)..(441): n is a, c, g, or t
gtctttgcttaaacttctttcaaangtccaaggtggcaantggcctttgcccaggttnccaaaaaggaagcttgacttagcaagtgagggaaccnttgtttctgccaagtngtgcgatcaggggtatcttaaaatagtaaggtaatgccttaggcctatcagcttncccccagccgaacctgtgaagatgtagaaaagaaaaaacgttccctgcctccctccctantcccttgctatggtggaggcaggccacacacaagctagggaggcaactggacttggaatcaactgccctctgaaggcacttgtgcttctggcttcatacaggaggcttgtcttacagttttatgggggtggaccactgatttactctgaatacaaatgaccttggggagaatccaaagtattttctgccgaaaagttgaagtgtttatccccaantaagttacactctatacaagatccaaatgattctatgaaagtgttagattgttag

SEQ ID NO: 122138 - DNA, 1806 bp, Homo Sapiens
  misc_feature (27)..(27): n is a, c, g, or t
  misc_feature (198)..(198): n is a, c, g, or t
  misc_feature (480)..(754): n is a, c, g, or t
  misc_feature (893)..(935): n is a, c, g, or t
  misc_feature (943)..(956): n is a, c, g, or t
  misc_feature (1229)..(1238): n is a, c, g, or t
agcggcgatgagggctcttggtattangctagggggtatctcgcttcagtccataggtgaatacggtgtcaatatacggcgcaaggatgggggtgcaatcgaggaggcgggtgggcgggtggtgtaataaaggggggcgcggttgggaggctatactctgcgggtgcatgatgggcttaataaaggggtaaatgatgnatgcgcgcggggatttatgcggcgtggcggggcggcggcttaatcacgaaggcgacgataaggagtggagtttgggttcacggagtgggatataggacgcgcggcgcgggagacgctcagtggtatttcccgcgcggtataacaacgaggggacgcgcgataagaaggaaaggcgcgggcgagcgggcgtaagatcgggcgagaaaagagaaatagggggggaaaggtgatcgcgggtataagaggggcggggtgcatgagagactatatcagctgtagtannnnnnnnnnnnnnnnnnnnnnnnnnnnnnnnnnnnnnnnnnnnnnnnnnnnnnnnnnnnnnnnnnnnnnnnnnnnnnnnnnnnnnnnnnnnnnnnnnnnnnnnnnnnnnnnnnnnnnnnnnnnnnnnnnnnnnnnnnnnnnnnnnnnnnnnnnnnnnnnnnnnnnnnnnnnnnnnnnnnnnnnnnnnnnnnnnnnnnnnnnnnnnnnnnnnnnnnnnnnnnnnnnnnnnnnnnnnnnnnnnnnnnnnnnnnnnnnnnnnnnnnnnnnnnnnnnnaaagacggggagggcaaatgggttgggcggggggatatggttttatagcgctcttatatcgggggggattgcggcgggaagaggtgtccaggagtaaggggagagtgggggtttgtaaaagaagaaatttttttgtgtnnnnnnnnnnnnnnnnnnnnnnnnnnnnnnnnnnnnnnnnnnncgagaggnnnnnnnnnnnnnncggggtgttgtggtgtaactaaagcctttattctatacaactgtgaaatacagatttttacccttttggcattgcagactgtcgaattttctggaaactgtattacggtttgactggaggggaaagaaatacaatcatgctgggggtcagatctatgacaggaggggaatgcagccacccaaggcttagcacacagggcaaaatgacccagcaaaacccatttctttgctcaaaggcccctcgggcaaacacaactgagggctggtaaataannnnnnnnnnctttgccattaattcacaactattgctaaaaaatgtgcaccaaaagcacactgttgtatccaacagatagaaaggacttttaaaaaaaagaagctggttgctctctgaggaagggagaaagaccatttcaacttattagaaatgtggccacgtctttgctcacttcttcaaagtgcaggtggcaatggcctgtccagtttccaaaagaagctgactagcagtgagggaaccctgtctctgcagttgtgcgatcagagtatcttaaatagtaaggtatggccttaggcctatcagctgcccccagccgaacctgtgaagatgtagaaaagaaaaaacgttccctgcctccctccctagtccctgctatggtggaggcaggccacacacaagctagggaggcaactggactggaatcaactgccctctgaaggcacttgtgcttctggcttcatacaggaggcttgtcttacagttttatggggataaacacttcaacttttggcagaaaatactttggattctccccaaggtcatttgtattcagagtaaatcagtggtcccctcgtgc

SEQ ID NO: 122139 - DNA, 1037 bp, Homo Sapiens
  misc_feature (744)..(744): n is a, c, g, or t
  misc_feature (786)..(786): n is a, c, g, or t
  misc_feature (915)..(915): n is a, c, g, or t
  misc_feature (931)..(931): n is a, c, g, or t
  misc_feature (953)..(954): n is a, c, g, or t
  misc_feature (997)..(997): n is a, c, g, or t
catgtttacaaagcagaggctcttttagtaatgtgctagaaatccagagacacaatgggttttctaggaaacaaaccaccagtgtacaaaaccgtacagcattgctcccgtgatccgtacaaaatgattgtccgcatggtggagtaaggctggggctgtgggaggggaagcgaggagctgaggaggggcacagttctattgccaccaccaccaggctgtgcccctggccgccagtgggtgccacttgggtgcactcaactatgacatcaaggatgagagggcatctgagctagatcacatcccagggcccacagagctcacagcctgtggggggaccccaactccctgctgggtggggccaggcataacctggggatagctgtccctaacctcaatgacaagggcacccaccctggctggactcccgtctgttgacactgctgccattgggtatttgtcaggtcctggccaaaaccaggtcctttctcaggacagggttgggcagatggacacattaactcgctctggacagggccgagatcccactcctcctggaataggcccccccacctcggggccttgactcccctgggcagaccccggggtgctgctggcccctccacgtttccacccctgggggaggaagaagggcccaggcgaggcccagatgctcaggtcagagactcacacctttagaagctgtcccctgacccttgcttccaaaacgcccatttcaacacacanaagctaaaaggcacccaattgtgcaataagttcctctctgtnaaggggaaggggggtctggcctggggctcgatgtggagctcctgctgatggccatggccttcagagagggaagagacaagcagtctgactccggggggatccagtgatctcaatatgtgtgcttcccanaggctgtgcttaaaancactgcactgtcactcctactnnggaggggaaggggaaccatcctgctgtaggaccacttgctggngggtgctctgccatcttgcccaggcatcctaaagaccata

SEQ ID NO: 122140 - DNA, 1036 bp, Homo Sapiens
ccatctttcgtcttgccggtgcttgctctgcgtgtgcggctcctcctgtgtgccctctccgggcgtttcccgccgcctcgtgtttggccctcgctttcacccctggtggtggtggtgcccgctgggcccagtgctcatgtcgtgttccccctttagatgctgtcccctgccctgcttcctgccgccgtttcgactctcgtagcttgcgatgcaccgcattggtgcagtgagggttccctcctcgttgaaatgggacgtggcgttcttgcctggggcctcgactgtggagctcctgctggtggcccatggccctccagagaggcacgaggtacaaagccattctgactcccgtggttatcacagtgagtctcaataatgtgttgctttcccaaagggctgtgctttaaaaacaaacacctgctacttgtccaactcccctgacctgggaaggggggaaggggagaaccatgccgtgctggctatgggacccagcttggccttggaggtggggaggaggggttgggggaccaggtactgctcccctggggtcgggtgccaccctgcccgttctgtggctgggaagaggacaaggccagagggaggctctgtccacctgccttctgaagtcacaggaagcaggcaccagagggccggggctggccaggaatgcccagcagtgcactccttgcccttcgcaccctccatcctgccactgcggctcctgctgcagaacctatgctgtgttccgttctgtggcccagggaagcggaaccaaagcgacctctgcactgaccctgcctctgtggcagggtcactgcagctggcaaccctcctacctccaccacgctcagatgtcatacagggctcctacagggtaccatggtgggaggaggggtggcgacgttaactgaggttcatctgaacctacttctgcaccaaccgctcctgctatggaaatctctggtgtgagcagagccacctcgtgccgaattcgacacccaggcctcgctacctagccagtatggtttacgcgggg

SEQ ID NO: 122141 - DNA, 519 bp, Homo Sapiens
gcacagccctttgggaaagcaacacattattgagactcactgtgattcccccgggagtcagactggctttgtcctcttcctctctggagggccatgggccatcagcaggagctccacatcgagccccaggccagaaccccctccctttcacagagagggaactttattgcacaattgggtgccttttagcttttgtgtgttgaaatgggcgttttggaagcaagggtcaggggacagcttctaaaggtgtgagtctctgacctgagcatctgggcctcgcctgggcccttcttcctccccaggggtggaaacgtggagcggccagcagcaccccggggtctgcccaggggagtcaaggccccgaggtgggggggcctattccaggaggagtgggatctcggccctgtccagagcgagttaatgtgtccatctgcccaaccctgtcctgagaaaggacctggttttggccaggacctgacaaatacccaatggcagcagtgtcaacagacgggagtccag

SEQ ID NO: 122142 - DNA, 1297 bp, Homo Sapiens
gtctttggtctccatatacatttattttgtgtagacaacaatgacttttcaccatttcctttcctgtggttccatggttctcaaaatggtaatttcatttatacatagcaaaaagttcacaaaacctttcagcactgttcacattttcacatttgtttaggaaacaatttgtttaggaatacagctagctgattttcttctgatttcttccacttttggaatcccacataataataatgttaaagtataccaagaagaacaggaagttcaagccagatacaaaacacaccaatacagaaaacaagtccggtagtttctgaggaggatccagtgtgacagtcatcaacgtcagaagcaccatagtgatgactgagataagaaacaaatattgtataattctggaaagaaatgtaaaacatggaagatatttcctcacagaaatggaaaaggatttcaactgcagttcttcttcagaagtcttttcaaatattgaaaaggaagttacacaagctataaaaaatgccattgttgtcacaacagagggcattaggagttcatccttcaatagaagaggtagcatactaaatgttgacacaagtaaaaaccaagtagacataaaaggaatttcacttaaaactaagcagactggtagtgacaccaagagaatggatttttcatgtacttggaaagaaaataaaaagaatgatagcgcacagctaaccagtgtaaatttgaatcctttggaagagggctgaagtattaattttatgcatgcaggaagcaggctcaaaaacgtagaacaaaagctcattattaattggatgtgacgtggcaaaatatccttaatcttcagaaagacattgaagctgcaccaaatattggctactttatccttaaaagagatttgttagctttacattctggtataattgaaagaaatattaaaacccatgaagtacagcccataatctctaataaactttttgagatgtgaaacttttagtcacaattataactaaatagattaaatcctccaggaataaacatatacgcatacactgtctcaagcatttttcatttttgtgcagggcagttgatcaaaagcattggcccaccataatccagacattcccaaatacttaatagttttcaaagagcagtgcactatccctgaatactaaagtccttcatctttggaaatttttctaagaaatgttttttctacaatttatagaatacatattacatttgacccatttttatcacacaactgaatttacttagagtaacagagtaa

SEQ ID NO: 122143 - DNA, 990 bp, Homo Sapiens
  misc_feature (831)..(839): n is a, c, g, or t
cgaggatgggttcatagacatgaagtagaaaggaccaagtcaagaagaatgacaaataatcaacagaaaacccgtattcttcagggtgctctggaacagggctcaaattctcagctgatggctgttcaatacacagaaaccactagtagtatcagcaggaactcagggagtgagctacaagtgtattatgcttcacccagaagttatcaagacttttttgaagccatccgcagaaggggagacacattttatgttgtgtcatttcgaagggatcacctgctgttaccagctaccacccataacaagaccacaagaccaaaaatgtcaattgtgttaccagcaataaacataaatgagaatgtgatcaatgggcaggactacgaagtgatgatgcagattgactgtcaggtgatggacaccaggatcctccatatcaaaagttcgtcggttcctccttacctccgagatcagcagaggaatcaaaccaacaccttctttggctcccctcccgcagccacagaggcaacccacgttgtcagcaccatccctgagtcattacaatagcaccctgcagctatgctggaaaactgagcgtgggaccctgccagactgaagagcaggtgagcaaaatgctgctttctgccttggtggcaggcagagaactgtctcgtactagaattcaaggagaaaagaagaagaaataaaagaagctgctccatttttcatcatctacccatctatttggaaagcactggaattcagatgcaagagaacaatgtttcttcagtggcaaatgtagccctgcatcctccagtgttacctggtgtagannnnnnnnnctgtacctttctaaacctctcttccctctgtgatggttttgtgtttaaacagtcatcttcttttaaataatatccacctctcctttttgccatttcacttattgattcataaagtgaattttatttaaagctatgccacacatgcatgtaa

SEQ ID NO: 122144 - DNA, 705 bp, Homo Sapiens
  misc_feature (638)..(638): n is a, c, g, or t
tttcagattttgcagcacttttaatacacaaagcaaaaggtaataggctggatgggtgaccaaccttcattcacatacagagcccaagtatagatacagactaattgggaaataagttagagtttgcagggccttagggctgagagccagaaacactgtccttttggcagccatggaagcgaggatttccttttctggtttcagtgcatgtacgccttcggctgctccatagcctggtgtgcctgcagcacggccactgcctcgtctatcttggcatggagggattctggagactccagcatgagcaacagctctgagttgtcaatctccagcagcatgcccgtgatcttgccagccagctgggtgtggacatcatggataagggggtagagacgctccccaatcatctgcttttgctcatgcaggggcgccgcagccagcatggacgcggtcaggggctcctgtcctgggatgtgcacagccggctcctggacccgataggtgctatgtgctgctgaggaacatttgcacggcaggagcggccggcctggtgtacagcatcctaccccactgggtcctgtggtctgagtaccaatgttggctactctctgggtatgaggcaccgtgcgtggacctgngtggaggcctgcctgacactgctgatgtgggcgggggggcgccgaggcacaactggtggccggacat

SEQ ID NO: 122145 - DNA, 759 bp, Homo Sapiens
  misc_feature (687)..(687): n is a, c, g, or t
atatctgaatagaaaactgtatctgtctcttttttatgtcaaatgtaaaatactttaatagagaaaattccatttttctgcatctatttagatgatattacaataaaaggcagtgtggattggagaacatagctagtgagaatattaggtaatgtaaatttaagaagaaattagcttttccatatgaaataaaatcaatgatcacataaattcaacatgattatgaggactaaagtaaaaatacacagtacaatatagctttcggtttcttgttcggcacatatattaatatattttcaaacatcaaacaatataacaccaatatctactaaaatctactagcacagtaagggttactaaagcttagctaattattaacatcttaaaagcctagttcccatatgaattctgtaaccaagaatattctctgtgctatgcaagctggttgaagcaccgtctttttcaggattctccagaattcatacgtatttcaaagttaactcatgtcgaaccccacaattccttattgaatgtggttgatcttctaaacagaccttcatttatgagaacataagcatatactcatcacaattttgaaaagaatggaagtccttcatacatatcagtttttaattttatccaatcattaattttctgcagagttgttttttcttgacttaatatttntgcaacttttttcattttttgttcatttctttctatgtatttcaacccttccaactgcagctgatccagctt

SEQ ID NO: 122146 - DNA, 1019 bp, Homo Sapiens
aattttacacaatattttaattaatttgtcctacgatttaattctttaaaactttttaaattttattataaaataacacttccaggatacggacttgctgtgggaggaatatgtaatcaggccactcaaaaatgcctgcacttgaggctgagcatttaaaaatgaatgttcatatgtaacaaaaattaaatgatgtattttttgtattaaaattaaagaaatatgttggataatcattataataaagaatatgctctaagaatggggataaaagctgttgggcgccccttggtaccaccatttcatagaagatcatagttgtaaacaagcagaaggatgatgcaatctctgacataattaaaaccgggtaaaccacaataagtgtgttccagcaatttgtcaagttatttgtccaggtctatcatagctactgagcaaatgggttggcatgaatagttatgtccttaatgtgtacatcattaagaggtcggtatgtcttctcatttactggcaacttctccaactcatctagagtttccagaccatctattacctttccaaatacggtgtatttcatgtccaaatgtggctgtttgccataggtgatgaagaactgagatccattggtgttcgggccattattagccatagatacaacacctctaacattgtgcttaagatattcactgtattcatcctcaaacttcttgccccaaatactgttgcctcctcttccagttcctgttggatctcctgtttgaaccatgaaacccttgatattcctatgaaatatacagccattgtagtaattactggcacaaagagccaagaaattctcacatgttttgggtgtcctctcacagaagacttcaattttaatatcacctacatctgtatgcagtgtcacagattgggcttcaccacttcgtctagcacagccgttgttaaaacaggaaaaatgcaatcgcagatgccagcagaggtctgttggttcaaaattatagtttctttgggccccc

SEQ ID NO: 122147 - DNA, 690 bp, Homo Sapiens
  misc_feature (319)..(415): n is a, c, g, or t
aactttgcaagaaataaatttttatttttcttcattatcatacagcatttaagaataataaatctgtcttgaggtttcaaatctgagatatctatggcaagtttataaaaagtacattgatcaaggtacaatttttaacattaatatacacattccataatctcatctatttaacattaacacaggcctttgttgttgttatttttttctccctacaatatttcctgactctgtaggacagtggtcctcagttgggggttgactctgtcccctaggggcatctggcaacatccggcataactgtgggtgtcacatgagnnnnnnnnnnnnnnnnnnnnnnnnnnnnnnnnnnnnnnnnnnnnnnnnnnnnnnnnnnnnnnnnnnnnnnnnnnnnnnnnnnnnnnnnnnnnnnnnntaccgagtgggactcaattcccattttatgaacacctctgtgctcactgtaattctgaaaacacagactttgctaactggtaaatactatttacaagaagattcaacctaatcaatatcacttatcaaaagcagtggctgactgtaagtatcaacatgtttccagaatgaataaaccacacaatcaactcagaatgatacaaattagggtccatatcatttaatttcccttgaacctgctctgctagtttaatctgctaatatgaaagttaatta

SEQ ID NO: 122148 - DNA, 647 bp, Homo Sapiens
  misc_feature (319)..(415): n is a, c, g, or t
aactttgcaagaaataaatttttatttttcttcattatcatacagcatttaagaataataaatctgtcttgaggtttcaaatctgagatatctatggcaagtttataaaaagtacattgatcaaggtacaatttttaacattaatatacacattccataatctcatctatttaacattaacacaggcctttgttgttgttatttttttctccctacaatatttcctgactctgtaggacagtggtcctcagttgggggttgactctgtcccctaggggcatctggcaacatccggcataactgtgggtgtcacatgagnnnnnnnnnnnnnnnnnnnnnnnnnnnnnnnnnnnnnnnnnnnnnnnnnnnnnnnnnnnnnnnnnnnnnnnnnnnnnnnnnnnnnnnnnnnnnnnnntaccgagtgggactcaattcccattttatgaacacctctgtgctcactgtaattctgaaaacacagactttgctaactggtaaatactatttacaagaagattcaacctaatcaatatcacttatcaaaagcagtggctgactgtaagtatcaacatgtttccagaatgaataaaccacacaatcaactcagaatgatacaaattagggtccatatcatttaatttcccttg

SEQ ID NO: 122149 - DNA, 1017 bp, Homo Sapiens
attttccaggggtgtgtgatccaaaattattaggttagttttttccaacccaagttttaaaagtatcaggtgtatataatacatttaatgatagtaccaaatgatagaactaattttagtgataatttaatgatagaactaaatttaaaaggaaaaaagtcattctaagtttgttaagcagataaatttttctgtaatcatttacctacatattcacattctgtatattttctcatggtcaccaaactgattcaaatgatttaagttatccccccatttaaagagaaaagtcgctgcaataattttaaacccatggcgttatcttaatttcacccactggctgcttttttcagaagttcttttagttcttcctttgacacataacaatagcttttaatctcattgggatctggattcaaagttacattcttcctcaccaacaaaatgtaatcaatttcatgttcaccccagataccatcagactgagctttgtagtgaattcgtgttaaataattaatttcttctggaggaacctcttccaagggaattcctagctcagctttcagccgtctctgtgctgctcgcctcactccaagggcgtcactttcctcaagctcggctggattgcttaatggatgactacaacacgtattcgtaaaacaacctggaaaggtaatcttagcatctgatctttgctgtagcagaagcttattttcggtgttgaataagaagacactaaaagctcgatgcaataatcctttctcaatgttctcgttcaggtgacaattcttcttggtctcagctccaattttattgtcattttcatcaataaggatacacatctctgccaggagttgaacctgttgcttgtcgaggtggttagtgtttatttcaggcatcattacaaaatgtctgatctgttctagaacactgatcagcctccggccacagacaaccgccggtcccccccggccgtaatggccgaattcccgggcatatgtccggtaccgtcgactg

SEQ ID NO: 122150 - DNA, 1630 bp, Homo Sapiens
  misc_feature (1500)..(1534): n is a, c, g, or t
  misc_feature (1538)..(1579): n is a, c, g, or t
ttttaactttgcaagaaataaatttttatttttcttcattatcatacagcatttaagaataataaatctgtcttgaggtttcaaatctgagatatctatggcaagtttataaaaagtacattgatcaaggtacaatttttaacattaatatacacattccataatctcatctatttaacattaacacaggcctttgttgttgttatttttttctccctacaatatttcctgactctgtaggacagtggtcctcagttgggggttgactctgtcccctaggggcatctggcaacatccggcataactgtgggtgtcacatgagagggacgctgctcaccatcctgcaatgcacagcacagaccccaccacaggggttttatccagcccaaatgtcaacagtgtcaatttaagcaactcttaccgagtgggactcaattcccattttatgaacacctctgtgctcactgtaattctgaaaacacagactttgctaactggtaaatactatttacaagaagattcaacctaatcaatatcacttatcaaaagcagtggctgactgtaagtatcaacatgtttccagaatgaataaaccacacaatcaactcagaatgatacaaattagggtccatatcatttaatttcccttgtacctgctctgctagtttaatctgctaatatgaatagttaattaagactgttttgataggagcgtgacaatagtttcctttgcacatttttctgaactatgagaaaaatttaatgatacataaagcacctggcaatagcaagtcctctgcaaagtgctccggaaatgtttatcacagcctactgtaaacacagagtttcactcatttgttcgaatgttcccataagtatgtatctgcaaagattaaattaaggttttatttgctcgctctcattttacaataatgctctcacaaatgtcgcttagaaacagaacacatatccagggtgtgtgatacaaaattataagttagttttttccacacaagttttaaagtatcagtgtatataatacattaatgatagtaccaaatgatagaactaaatttaatgataaattaatgatagaactaaatttaaaaggaaaaagtcattctaagtttgttaagcagataaatttttctgtaatcatttacctacatattcacattctgtatattttctcatggtcaacaaactgattcaaatgatttaagttatcccaccatttaaagagaaaagtcgctgcaataattttaaaccatggcgttatcttaatttcaccactggctgcttttttcagaagttcttttagttcttcctttgacacataacatagcttttaatctcattgggatctggattcaaagttacattcttcctcaccaacaaatgtaatcaatttcatgttcaccccagataccatcagactgagctttgtagcccggccgtaatggccgaattcccgggcatatgtccggtaccgtcgactgnnnnnnnnnnnnnnnnnnnnnnnnnnnnnnnnnnncggnnnnnnnnnnnnnnnnnnnnnnnnnnnnnnnnnnnnnnnnnnattagacgagctagcgccctatagtattatcccaaaatttttcttcttttt

SEQ ID NO: 122151 - DNA, 1174 bp, Homo Sapiens
  misc_feature (130)..(141): n is a, c, g, or t
  misc_feature (339)..(353): n is a, c, g, or t
  misc_feature (1110)..(1111): n is a, c, g, or t
aaacaattcttggagttctgtggtccacagcatttccttctgtttcaatgttatgtatgttttgattactattgtgattttttaaatcttctgaagcaagctgagaggcaggcagaaagatttgatgccnnnnnnnnnnnntctttcttaccttgttcaccccaaactttctcaaatctggactaaatgctataccttaaaacaaacatgaggtgcatcttgaaggggagggaaatttatttctctgcttttctattatacaagttgtttacagaaactgcaaattaaaaaattacactggcatttgcagtccttaaaataaattaaaagttctcaacnnnnnnnnnnnnnnngctaaacatttttttaagtatgagtccttgtttaaaaagaaaagattaaaacagaaaatattttctataaataatacatgtattttggttttagtgctcccgccctaaggtttgaagtttacttttatccagtacctttttcctccatgatcacctttttttctctttcccctctcccactcgtgcacacgtgggggtttctgcgagaattggccttgctgcactgtgattggcgaagacgtgaaactttttaaaaaaatacttaaattgtttcttttgtttcattttgtgtatttgaagttttagttatcctcagactcctcttctgcttcccgcagccacgtgaagaatgccgtgacagatttcagagccacgcccttcccattctgctctgcagggtccttgctgctctcccatttgtagaaggcatcctcggagatcacctcctcgtcatatagacaatcaaaaaacatccgcagcaaattggcaggttgatcaagttttactatcgatgcttgtagtgcataaagtgcttgcagttccttctctgtatctgagtctaggtacttgagtaagatcggcactctctgcttgataacagcagtgtccactctgaaggtagaagagtcggctataatagctgctttacaaacagcagtcattaaagctctaaggaatgtaggtgaactcatctggatttcgtctagattagcctctacccagtcaaagatctgttcatcattcgctttgtcctcanntatgagtttctcgagtcgcttatacagctcttcggcagacagttctttctttgaaagtgcttc

SEQ ID NO: 122152 - DNA, 645 bp, Homo Sapiens
  misc_feature (43)..(56): n is a, c, g, or t
gctgggactcttgaaggcgtgtgcttcggcatctccagagtcnnnnnnnnnnnnnngccagcagcctccgtcctccccactctgtgaggtgtctgttccatctttctgctttcgagttttctgcaagtcagccatgaagtctatgctctgcttcaggctctgaattctttcctggctaagaattttcattcctgagtgcaacagcttctttgcagctttataataaatggtctctggtttattgtaaatcatggcattagtacacattagtttgaagttatcctttagttcttctatggactgatagtcattgttcttgatcttttctttcatggtactaaaatccattgggtgtttaatgatcatggagtagccaggagcaataaaatcagtcacaggaaatgaaaagaaagcacttggatcttttctctgcaattgtctcatcagttgattcaaagcttcttgaaggggtgtctgttctacttcttcttgtttggctaaagagcttgtgagaggcttctcaggaggcaagtctaatctcacaggggcgtgacactggagatctttttctgcctcattctccacccggtctcgatctcgcttctttttatcctccttaactcttctccgttttctccccttttc

SEQ ID NO: 122153 - DNA, 1013 bp, Homo Sapiens
  misc_feature (187)..(187): n is a, c, g, or t
  misc_feature (486)..(486): n is a, c, g, or t
  misc_feature (644)..(644): n is a, c, g, or t
  misc_feature (756)..(756): n is a, c, g, or t
  misc_feature (780)..(780): n is a, c, g, or t
  misc_feature (807)..(807): n is a, c, g, or t
  misc_feature (843)..(843): n is a, c, g, or t
  misc_feature (865)..(865): n is a, c, g, or t
  misc_feature (893)..(893): n is a, c, g, or t
  misc_feature (898)..(898): n is a, c, g, or t
  misc_feature (921)..(921): n is a, c, g, or t
  misc_feature (943)..(943): n is a, c, g, or t
  misc_feature (959)..(959): n is a, c, g, or t
  misc_feature (981)..(981): n is a, c, g, or t
cattctgttttatgcagcaaataattcgttggcatcttctctgtgatgggcagcttgctaagattagactcaggccccttagcttcatttccaactaagcccacgctatcaaccaagccaaacagaggaaatcagtttgggttgaattctttgctggagacaaagaatctacattcctgtgtagatnatgctgtgtttgctctgtgcagacacagatggaagggaagagggagacagtgtggggacggagacaacaggaagagcaggagccgccaagggccatgtcctcaacaagagtggcgcgccagggcccactaggtctgggggctctggagatgcaaggatctgacccacagcctgtcccgcaggagctggagcggcagcatgcccacattggtgtcatggtggagttcagcatcgccctgatgagtaagctggacggcatcaacaggcactccttcaactccttccgcctccgcgtcggtnagcccgggtgatggagcggggtggggagcccctgcctctaggccagtccacccagtctgtgtggcacagctgcacctcgccatcaggcagcctcaacttccaccaggtccacactcagcaacatccgtctttttaggttcttcagtgtcttctgtcanatccacaaagttgttttccatgacgggggaaggaatggaaatcccattgcttttcgaactccatacgtgcttacgatatcacctggagttacttgctgtgcaagttctttangattattggtcacttgttcagcangatgcatttctctgtatgagggaccangagacagatcatgttcggagggggtctggtgctcanacgttcattctgggcttcctgnagttcctgagcatctggtggctcatcangtttnctctggatattcagcttctcagnagtcaaacttcactggacgcanatttgtactgcttcancgcttgagctgtcttgatactnagtcaaacgcctggtggtcactctgtatctca

SEQ ID NO: 122154 - DNA, 1036 bp, Homo Sapiens
  misc_feature (79)..(91): n is a, c, g, or t
  misc_feature (176)..(187): n is a, c, g, or t
  misc_feature (317)..(330): n is a, c, g, or t
  misc_feature (528)..(555): n is a, c, g, or t
  misc_feature (937)..(937): n is a, c, g, or t
cttttaaacttgcaatgtttgtctttattttgttctttatattttcaaagtgaaaagaaatagtactgagtcaatttcnnnnnnnnnnnnnaaatatttgttctatgtatttacaagccttaaagttgctctaaagatttcaagagtattaagagtacttttctcagggtagcacnnnnnnnnnnnnaaacaattcttggagttctgtggtccacagcatttccttctgtttcaatgttatgtatgttttgattactattgtgattttttaaattttctgaagcaagctgagaggcaggcagaaagatttgatgccnnnnnnnnnnnnnntctttcttaccttgttcaccccaaactttctcaaatctggactaaatgctataccttaaaacaaacatgaggtgcatcttgaaggggagggaaatttatttctctgcttttctattatacaagttgtttacagaaactgcaaattaaaaaattacactggcatttgcagtccttaaaataaattaaaagttctcaacnnnnnnnnnnnnnnnnnnnnnnnnnnnnaagtatgagtccttgtttaaaaagaaaagattaaaacagaaaatattttctataaataatacatgtattttggttttagtgctcccgccctaaggtttgaagtttacttttatccagtacctttttcctccatgatcacctttttttctctttcccctcctccactcgtgcacacgtgggggtttctgcgagaatttggcttgctgcactgtgattggcgaagacgtgaaacttttaaaaacatactaaatgtttcttttgttaattttgtgtattgagtttcctcgtgcgaattctggctcgagggcaatccctataggagtcgataaatcgtatcagtcaagtgttctgtgtgaatgtatcgccacattcaacacaacancggagataatgtaactgggggctatgatgagcatcaatatggtgggcacgcgctcatcggactgttgcatgatatgacgcagccggaagcgttggatgg

SEQ ID NO: 122155 - DNA, 1542 bp, Homo Sapiens
  misc_feature (1314)..(1327): n is a, c, g, or t
tggactcacgagtccccaggtccagctttattacctaatacaagtccaacctctgggaacatccaaattcgctgttccaaagtttaattaaaaacacaatttacaaatatttaatatcttctgaaaagcatttctaagttaagaatgaaaaagtatgtacataatatataatcaaataccaggcagcctcaacttccaccaggtccacactcagcaacatccgtctttttaggttcttcagtgtcttctgtcaaatccacaaagttgttttccatgacgggggaaggaatggaaatccccattgcttttcgaactccatacgtgcttacgatatcacctggagttacttgctgtgcaagttctttaagattattggtcacttgttcagcaagatgcatttctctgtatgagggacccaagagacagatcatgttcggagggggtctggtgctcaaacgttcattctgggcttcctggagttccctgagcaatctggtggtctcatcaagtttcttctggaatatttcagcttcttcagagtcaaaaacttcaactggaacgccaaaatttgttactgctttcagcgctatgagcctgtcttgagtactggagtccaaacgccctggtggctctacttctgtaatctccatttcttttgctgtgtcaagtgtcctagtatggccttcatcttcaggcaatgacatctccatctcttgtagggtcctggaatgccctccttttgttaaaacatccagtaaactatctgccatgacatacggataatcttggcacgtggccaaaaactcatggatgctgaaatcacttggaagatcagagtcttccccataggttgaatagattaaatcagaatcatccttgctgatatttgcaaatgtggagtcataatgcggtgcataagaactgtagggcccataattcaaatataacactggagtgactttgttccttttatcctctttgaacccctgcaaagtattcactccagactgaagtcttccagttgtcattcccagtctcacagggcagtagcctggctctcctacaatgggatccacaggatggagaagtcccaacgtcgttgttccatctggttttcttctttcaaattcgcactgactgttcacaagccgcctggtcagctttcctccagattccttcacgatgcggtcaagctgctcctgctctctctctaaattattgcttttaaacttatcttcaagcatatctttgtctttctttttattttctttgctgggactcttgaaggcgtgtgcttcagcatctccagagtcnnnnnnnnnnnnnnggcagcagcctccgtcctccccactctgtgaggtgtctgttccatctttctgctttcgagttttctgcaagtcagccatgaagtctatgctctgcttcaggctctgaattctttcctggctaagaattttcattcctgagtgcaacagcttctttgcacctcgtgccgaattcgccacccaggcctcgctacctagagaccgtagtagtactgca

SEQ ID NO: 122156 - DNA, 832 bp, Homo Sapiens
cgttctctccatgagcgtcttggtccgcttaagcccgggtcactttctgcaaggacattcatggttttcttgccgatgaattccaacgcatcaaggcctccagttaagacacttttacctgtgttttgaaccacattggtgatggcagacagcataccccgagaggctgatgaaggggaagtgggtgggctttctgcagggccctgatctgtggctgcatctgttatttcagggactccgttttcagtatttggttgggctccttcagaagatccagaatttacaccatgaatccgtagagtggctcctgctttttccttgactgccgtcaatccatgacctactgtggcagatgctgacgacagcagagatttgccccaggatccccagcctgcccatcctcctccacttggaggggaatccacagccagataattctgttcctgcaggggtatttcggatctgggttctgcctcaaggctgacggaatcaatacattcagcaagtgtatcctcagtcacgtctccattgagagggggctccagggcgttggcatcctgaggctgcacagggggcccaatggcggcagcccctgcaccctgcacagctgcattttcatgcccctcccctctggggtcagctggtgttggctcatgtgaaactgcagctgaatcacaatgcacttctgcatcctcaggtaaagaatcactattaggcatctcagtaacttctgctttgtctccagtggctaaggtgtcaccagcatcatcagacattttagtatcgctcaggcggccgagtacgcgcgggagtgcccagcggtcccgccccg

SEQ ID NO: 122157 - DNA, 550 bp, Homo Sapiens
  misc_feature (499)..(499): n is a, c, g, or t
  misc_feature (534)..(534): n is a, c, g, or t
tttgatgttgctgacatgaaaacctttctttttaatttggttgatacacatttgacaaaatattttagaataaaataatccatgaacaggtacaaggtatttacagtaacataattgaaaaacataaaatcgatatatttctttaacagaaatgtctataaaattttctactgtgaatctggaagactttcagttcctacttatcaacctggtcttaagccccaacaggcgacatgtaaggcccaggagtaggatatacaaactctaacacatttggcaattaagaatcatctattagtgtgagctggcaggcggtgggtggggggtggggatggggagggaagaaccagatcttagggtaagatacagaatggaagactccactgaaaacaactatggacaagaaagatctaaaatcacacttatctttcacttggtctcctgtgggagaaggctgccaactatttttaaagaccttagtccatttttcccattagcngaaatcagcaaccctgagactccaacatttcatgncctaaaggctaataac

SEQ ID NO: 122158 - DNA, 857 bp, Homo Sapiens
  misc_feature (717)..(717): n is a, c, g, or t
tttttttgagaggaaaaaaaagcccactggaattgtctaaactgcaatgcaatctcttgctcatttaaaagatctcattttctaatcatgtgctttgagacatttaatactatttcaattatgcagaggaaataatataattcctttatttgaaaaatgatactgaacctcagagatcagttaaatctactgctggaatggggattctttctaaaccgtgttgttccctctcttcaaacagctggagctgtacacagatggaaaaacatttggtcagaaagcagcaaattagtgtttttcaggaccgaattcggctcccgcagctcctgcatctccattcgtctagattttatttcttctttgcattgacatttttgcagacccagttcatgccatcctgaacgccctctcctgtgagagctgagcaagactggatctgccagactcggtcgcggatggtatgcaggttcagtccttctgcaatttcagaggcaggggctgctgtgagcaaatcctgcttattagcaaagatgagcactggcacacaacttagtttttcttcctccagtaattccgctagttcctgacccgtctcttcaaatctttttctgtctgcactgtcgattacatatataagaatatcggtattttcaaaataattcttccagtatggtctgattttcctctgtccaccaatgtcccatacattcagtttanaaccttgtgattgtacacttttgatgttgaaacctgtgtaggtgtgatgtggctgatgtcttcagatgcaagctgcttcagaagagtggtcttgccagcattatccaagcccaggagaagtatctcacctcctggtctgg

SEQ ID NO: 122159 - DNA, 816 bp, Homo Sapiens
caggaggaaaataatataatttccctttaattgaaaaaatgattctggaccttcagaggtccagttaaatctcctggtggaatgggggatctttctaaacccgtgttgttccctctcttcaaaccagctggagctgtacacagatggaaaaacatttggtcagaaagcagcaaattagtgtttttcaggaccgaattcggctcccgcagctcctgcatctccattcgtctagattttatttcttctttgcattgacatttttgcagacccagttcatgccatcctgaacgccctctcctgtgagagctgagcaagactggatctgccagactcggtcgcggatggtatgcaggttcagtccttctgcaatttcagaggcaggggctgctgtgagcaaatcctgcttattagcaaagatgagcactggcacacaacttagtttttcttcctccagtaattccgctagttcctgacccgtctcttcaaatctttttctgtctgcactgtcgattacatatataagaatatcggtattttcaaaataattcttccagtatggtctgattttcctctgtccaccaatgtcccatacattcagtttaaaaccttgtgattgtacacttttgatgttgaaaccctgtgtaggtgtgatgtggctgatgtcttcagatgcaagctgcttcagaagagtggtcttgccagcattatccaagcccaggagaagtattctcacctcctggtctggtgcacttttcaacttgcgcaaaattgagagcaagcccatcctcccgccgagtccctcctcctcctcctccc

SEQ ID NO: 122160 - DNA, 1325 bp, Homo Sapiens
  misc_feature (987)..(987): n is a, c, g, or t
  misc_feature (1031)..(1031): n is a, c, g, or t
  misc_feature (1053)..(1053): n is a, c, g, or t
  misc_feature (1149)..(1149): n is a, c, g, or t
tttaaattattatagagattatattttaatgttttaaatgtatttgatacattacaaaattattttagttacaagcatatcattaaagctattctttattattacaaaatgcttttacaatgctattcttgacaacaggaaaatacttaccctcactgaagtatgtggagtaccattttttggaaaccatgtcaagcataatggcaatattcaggttcaatcttcctatagatctgctcaatatttatctaaaccttagcttctattcttttcacatgttattagttatattttcacttaaaaaattggaggctgaaggggtaagcaaacaaacttttgaagtagacaaagctcatctttaatcaacagaatttagagtccagtctttccaaatctgtttttaacgacagaaacttctccctcccctgccccattttgtcctccccattaaatggtactgtgtcaataaaattcccaagcgacctctttaaatcagcgttctttccgatgctggctaccacagtcatggaaaagggagatgtgttggacaggcctgtcattacaggtagtagttggtggtacatccagtctgtatttcttacacaaaattacatctaaatatttgacatgaggccatttgctatcataagccatcactaggaacttctagtctgtctcactcgattgaggctacaatgttgttaggtgctatgaccacaatgaatacaacagacagcctctcagctgtgctgcaaagtattcataaccaaaagaccatatttcaaattaaatcatagtagcgaatgacataccatttacatattacaatctgagcctctgaaacagggggaacatataatggtatccagaacatctttacatcaaaataacctatcatactacaaagttttcacttcccaaaagtgtaacagagtttaaggcactggtaactttgttcactgttagagattaaaacttccaaagcanatgaaagaaccaatgttcacctttaacgtggggaaagttggcanaaagaacccaggaggaacccanacttctctgtgtcctctgtggaacctggcttttttctcttgtcctcagagaaagaacaaatgcgatatctctgtttaaatatgaagtaccctcgtngcgaattctggctcgagggcaattcctataggagcgtataaatcgtatcagtcaagtgttcctgtgtgaattgtatcgctacattccaacacatacagcggagcaaagtgtagctgggtgctatgatgagtatcacatatgcgtggccatgcgcttcatcggaactgctgcactga

SEQ ID NO: 122161 - DNA, 1023 bp, Homo Sapiens
  misc_feature (480)..(480): n is a, c, g, or t
  misc_feature (488)..(488): n is a, c, g, or t
actttttcatatattttgctacctaagtatttcagtgaaactttaagcccatacctgtgtctgattgtttattattggctttccacaattcttacatcagactacattatattagagaccattattgctagaatagcatgggatttaaaattttctaatactgggggtattatttagttaattataaatttttcttttcacattttactgtgttttaactggaaataaaattatggctgctacaatatattttttgaaatcaacttctgtagttctaaaatacaactttatcatacaatcaaaccaggtagttcatataaaacagtgtaatacaagttttctataaagtcattactgttgcttaaacatatttcatgcctattaagatatattttctactggtgatttcaacattatttctcatactgacttttattactggaaatgttcctgtacatgttggcagcagataaagatttntgaatgtntgaatgccctctgccttgatttggttggaatttttgctaaattggtaatgttgcttgaactttatgactacattttcttttaacttttttcatggacttccttatatgtacataataattaaatgttgaaatttatgaaatacttttatgaatttagataatttttaaatattgttaaaatttattgaactaaaaagtaatgtaaataaaataattcatgttaaagatggaacaaaataattaactttacatgtttggtgatacagatgcaaatgtttttgatatatggagatgttgagttttttgactttactaaaggtgctgaatagcattaaattcactattttccttttctgttttacttgtgaaaataaaaatgcactaaggttgggtagaagttctgtttgcactcactaattgtgacagacagaggtttttgtaagtatttattgtacaattgatgcatgtttatttttagcgttgttattgcctctggtgttaataaatgaacaaatggctatctggaggaacagct

SEQ ID NO: 122162 - DNA, 1083 bp, Homo Sapiens
  misc_feature (994)..(1034): n is a, c, g, or t
cactcatcatttatttacaaatacacattataacttttatatacattgcacatttacatggtagaaaagtacaaaactatatatttaaatgaatttatattttaacttgccatgtttgaaaatataaaattgcatcagaaaaaagtattatgaaaagcaagaaacttgaactgataaagctttgatataacttttagtgatatactggttgaaaaagaactaatttaaaaggtacagctgagtagcttaaaggaaacacctaacaaaaggttgaatgtgtagccttcaacatcctttagtctcctgacacccacatcatttctttgtatctgtaacatcttaaaagtacattactagaattctaatcatctcctctctcacaaatgtcttcatcataacaaaagaactgaagtaggagtttcctcaaagatgcttatcttctgtaccttgtatttgagtcagagttataatgccttttggtcagtcaaggttccttgtaaacaaaacccgagggatcatgtatgtacagatcaggcagcagagaatccaataaataaacatgacagaaactgacatgcaagtttgttgaaagtggaaaagagtctaacagtgaaatgaagggagacagatgagtgagtgaatagtaaggaatggacttaaatggtttacaaggaaaaaaagcttttactttacaagcaagagacctcacaataaataacaactgctcttcctttcacgaataaatttcttcaaaaacaaggtatacagtcaaccagacattttatgtataaattataaaacatgacacagtataaataaatgtctacaagtctcaactatgggcctcatccagtagacctcacaatgaatgcctctccgtgtccaatgagtaacaaggtggcctgggagagagctttaggacaaaggtcctttaatgtatagttttccccccaaataaataagcatacacttatttacagtatggacaatatannnnnnnnnnnnnnnnnnnnnnnnnnnnnnnnnnnnnnnnngcacaaaggctatgtcaacactgaacacttatagagagcggacgcggag

SEQ ID NO: 122163 - DNA, 963 bp, Homo Sapiens
ttttgttggaccatgcccctcccaaaggttggtggttttttcaagggaccctttcccccagttggccaagtttccattcgaggagggaaaataggtgccgctccttccattgcggttaattttccaatggagcactttccctggatggggtttaataaaattcctgaggggctaatcccagtgcagggggctcccaaactctttgggcccctggcaaaatttatcttttattgatttcccccacccaatgttcccgggaagcaccagcccactttgcagccccatgataactcgccaatccgactcctcccagaccaaagacgggcacaaacagagccaggctccaacttggcagtgttcacagcagcaccataaccggttgaaatgccacaacctagaaggcagactttatccaaaggtgctaaaggatctattttagcaacagagatatcagccacaactgtgtattcagaaaatgtgctggttcccatgtaatgcaaaattgtctttcctttgcaagtaaatctgctggtaccatctggcattaatcctttcccttgagtgactcttatcttctggcaaaggttagttttaggatttagacaaaatttgcattctccacactgtgggatgtaaagtgggatgacagtgtcacccgccttcagcttagtaactccctcaccaacactttccacaattccagcaccttcatgtcccaagatcactggaaaacaaccctcaggatcagctccactcagggtataggcatcggtgtggcaaaccgcagtggcaatgatcttgattcgaacttcatgagcctttgggggtgccacctctatctcctctatggagagaggctttccagcctcccaagcaactgcagccttgcacttgataacctcgttcgccacggacgcgtgggtcgacgatatcccgggaattccggaccggtaccagcctggt

SEQ ID NO: 122164 - DNA, 1483 bp, Homo Sapiens
tttttttccacacaaatgtagaaattacttttattatgttaaaatattccttaataaactagcaattatttatgtggaggagcatccagaaaacaggttcatgactgaattatccttgtccttgattatagagattcatgaatgacacacataaccctattttctggagtagctgtgaagctctacgaggctgtgaggttggaggcgcttctccctgcctgttaagctgctcctatcacatcacgacaggatggacattatttttctcttttgaattaaatctttacaacagttcgaatgctctttccagaatgcatcagttcaaaggctttgttgatttcatcaaaagacagattgtgagtcacaaattcatcaacttttatctttttggacatatattcagacaccaactttgggacactttctacactcttccatcctccaaaggcagtgcctttccatgtgcgacctgttaccagctggaatggacgagtggcaatttcttcacctgaagcagctactccaaccacgacgctgacgccccagcccttgtgacatgcctcaagtgctgctctcatgaccttcacattaccaatacattcaaaggaatagtccactcctccatcggtcatctcaatgagcacttcctggatgggtttactaaaatcctgagggttaatacattcagtggctccaactctttggcccttgcaaatttatctttattgatgtccacaccaatgatccgggaagcaccagccactttacagcccatgataactgccaatccgactcctcccagaccaaagacggcacaaacagagccaggctccaacttggcagtgttcacagcagcaccataaccggttgaaatgccacaacctagaaggcagactttatccaaaggtgctaaaggatctattttagcaacagagatatcagccacaactgtgtattcagaaaatgtgctggttcccatgtaatgcaaaattgtctttcctttgcaagtaaatctgctggtaccatctggcattaatcctttcccttgagtgactcttatcttctggcaaaggttagttttaggatttagacaaaatttgcattctccacactgtgggatgtaaagtgggatgacagtgtcacccgccttcagcttagtaactccctcaccaacactttccacaattccagcaccttcatgtcccaagatcactggaaaacaaccctcaggatcagctccactcagggtataggcatcggtgtggcaaaccgcagtggcaatgatcttgattcgaacttcatgagcctttgggggtgccacctctatctcctctatggagagaggctttccagcctcccaagcaactgcagccttgcacttgataacctcgttcgccatgttcaccggacgcgtgggtcgacgatatcccgggattccggccggtaccagcctgcttttttgtaccactggttctatattaca

SEQ ID NO: 122165 - DNA, 1001 bp, Homo Sapiens
tatggcgtcgtgccatttctgtccctggggcagttcgtccgcgcccttggcgtcgtccccgtccccttgtgacctggcctcaaggtgctgcttttcgtgcgcgttcacagtgccagtagcatttcaaagggactagtccactcccgccatccggtcattctccatggagcactttccctggatggggtttactgaaaatccctgaggggtatatacatttcagtggctcccaaactctttggccccttgcaaatttatctttattgatgtccacaccaatgatccgggaagcaccagccactttacagcccatgataactgccaatccgactcctcccagaccaaagacggcacaaacagagccaggctccaacttggcagtgttcacagcagcaccataaccggttgaaatgccacaacctagaaggcagactttatccaaaggtgctaaaggatctattttagcaacagagatatcagccacaactgtgtattcagaaaatgtgctggttcccatgtaatgcaaaattgtctttcctttgcaagtaaatctgctggtaccatctggcattaatcctttcccttgagtgactcttatcttctggcaaaggttagttttaggatttagacaaaatttgcattctccacactgtgggatgtaaagtgggatgacagtgtcacccgccttcagcttagtaactccctcaccaacactttccacaattccagcaccttcatgtcccaagatcactggaaaacaaccctcaggatcagctccactcagggtataggcatcggtgtggcaaaccgcagtggcaatgatcttgattcgaacttcatgagcctttgggggtgccacctctatctcctctatggagagaggctttccagcctcccaagcaactgcagccttgcacttgataacctcgttcgccatgttcacggattctggtcggcgcggggggctgacatccggggtgggccgcgcagcgacggagccc

SEQ ID NO: 122166 - DNA, 2021 bp, Homo Sapiens
  misc_feature (126)..(126): n is a, c, g, or t
  misc_feature (166)..(166): n is a, c, g, or t
  misc_feature (192)..(192): n is a, c, g, or t
  misc_feature (263)..(263): n is a, c, g, or t
  misc_feature (448)..(448): n is a, c, g, or t
  misc_feature (455)..(455): n is a, c, g, or t
  misc_feature (570)..(585): n is a, c, g, or t
  misc_feature (762)..(762): n is a, c, g, or t
  misc_feature (1899)..(1933): n is a, c, g, or t
  misc_feature (1937)..(1978): n is a, c, g, or t
tagggcttaataacgcgcacggtgtgcgggataggtgggagcggggtgttcagcaacacaccgcaccgattggtggggagggagagtactgtcttgcgcagtaagtggggcacgagggagaatatngtgcttatggacgagaatgtatccccccgacgccatattntcgttcgtacggatataggatcggcngccgcgtcgggtggcgggggacataaatgttttaggaagtatcgtggaggacggcgtccgcgctccggagngggcgccccccggcgcggggctgtaggagaaagctgcgccaccgagagaagagggccccacccgcaggcaggggagacccgcccttgtgtctggaggggtggtttggtttcgaaggaaaaaacgggcctctgtggttggtatgcgcccccacccggcgcgggggtggtgttttgtgttgttgttngtgggtncgggaggatatgtccacagcgcgccttgtgttttcgtgtgacggtcccccggtgtgttcttttcttgggagggagacgaatagaggtgggcgcgggtggtcaccggtgacggaannnnnnnnnnnnnnnnccgcaagaaaagagaagtggttgagagaggatctttttgaggggggaggagggccgcagcaaagagaggttttgtggtggtttgtgggttgggggaggaggaatggggcggatgttttgtgcgtttggcgaggtgggggtagggtgtttgttgtgttgggtttggggggaggttgtnggataatcaaaatcccaaattttatgcttatttttgttttagtgctatcaattttctgacatattaacataggcaggaaaacattctcagtaaattgagcatttgagtctacaaatgtcttgaagcactctggcaagttacatgtatcccatgttgcttttggtttcccatctcttctttgcttcaaacccccatgcaagtttcttcttttttcgggcagcctgtgaattttcaacctcctttttggcttttacaaagttgtggcaggcaactgctttggcaatttttacaccaagctctcgagtagctagctggttgctgagttcctcagccttctcaatattccactcctccacagcctggtctatcctcttttcaaggcctgacttctcaacttttttccttttaacaggcgggtcaaatctatcattgactccaaaatactgagtaagctctttccactgggtttcatttgaggacggttcactatgtaattctttttcattcttcaatttatcttttctggagcgttttcttcttttccctctgaatcttgaggttgtgcttttctgttcagaatgttttttatgcaattcttgaaatttattccacatatctatgggaattccagaaggacactcttcataggcatttacatttgactctgtttcagtttttggttcatctgttgagaaatctatgatttctgtttttctgatgctctcatcctctttatcttcctgtaagttaagtccagagttctccaacgtagcttcatcttccgagtttgactcagcgtcactttcatttaggccaggaggtagcagcccactccacatcttttcttagggtccaagattgcaagaggatgggtctagaaaggtacaccgttcctgcttggctgcacaacccggaattctgcaggctttctggcggcaatgccacactccaatcccaaaagagagagaagcccctcccgggcacagaactaagcgctgcacattccggcgaaggatgtctagcctgctggcagtcccattaactggagctgtcaggaagtggtcgcccagcagccatcttaggacccccggccgtaatggccgaattcccgggcatatgtccggtaccgtcgactgnnnnnnnnnnnnnnnnnnnnnnnnnnnnnnnnnnncggnnnnnnnnnnnnnnnnnnnnnnnnnnnnnnnnnnnnnnnnnnatataaacgcgctagcgccctatagtgagtcgatcagttttcc

SEQ ID NO: 122167 - DNA, 1564 bp, Homo Sapiens
  misc_feature (1078)..(1092): n is a, c, g, or t
  misc_feature (1172)..(1200): n is a, c, g, or t
cagtgctattaatttcatgtttatttcatacagggtttttgtcaagtttatcagttttaaaatgattaagtcataatcaccattcaaagacaaattttcctctcaaaataataatttccattctgctacctacagtttggcttatcctttggtctgatagccatacttcatctcacaggactatacaagtatgtactatgtacaaaacattttcaagtttgctttcaaatgatacctacaaagagtagatcaagttttcaagtttacagaataccatactacaacaatttaccactataaatatgtcttaacacctgtttattccattctatttagattgcaacactaacaagattcttaatgcatatgtccccaccacctgtactttccctacactatcattttgacacttaacatagaaacaactcaattcagcaaccaagttttacaaccactgttgctaccaatcaaatggtgatgcatcagatcccaattctcatgagtattaacatattaagagagtacattatttacctaagactgaatgactgtgccttactttataaaaaaacaaagatagccacatcaatttaattccatatatatgatactacctattcaatttattaaaaattgtaataaacataataatcaaactagtgctccaaacttatgctgttcacatggaagacaccacaaaagaagacataatatagagactgccttgcaataagaagtacaaattccttctataaagatggagaaataaaaggacaaatctagttgtctaaaagacaattcactgtacacattttatttacagttttgtacactgtcttaatatgaatgggactgcttttctacttgagccatttttaaccaaagcaaaataacctaagtaatacaaagtgttaaaatacagcataaagatacaaaaacagacatactaattctagttaggaatgtaattatgatgttacattttttataatccacaattatgtttaggaaatcacacaaacatagatcactgatttgaatgaaatgcataaatttgtagcaaagctttgtagttacnnnnnnnnnnnnnnnttaccaaagaatgcacaaaattaatgtttattccacctttgtgtcatattcctggatccttcaccaatgttacatgaggnnnnnnnnnnnnnnnnnnnnnnnnnnnnnctgaaatcagaatcactaatattatcaagtagggaaacaaataaattaaaatctagcagccatcagcaagagtacagcaaagacaatgctgtaaaaagaaacaaagaaaattgctagaaaactgtatgcatcataatctttcaaaccagcaaaatatgcttctgcataaaatggaacaacagaattttttttcctgtaaagtatagaaatgccaagttgttttctgactattgtggataggtaaaatctgtatgtaattaatggtaattctactgaactattacagagtgggccaggaacacatttatggattctggggatgtgtactgtaattctttgattgggatagtggaaactctagcca

SEQ ID NO: 122168 - DNA, 373 bp, Homo Sapiens
  misc_feature (47)..(81): n is a, c, g, or t
  misc_feature (217)..(217): n is a, c, g, or t
attttaatttatttgtttccctacttgataatattagtgattctgannnnnnnnnnnnnnnnnnnnnnnnnnnnnnnnnnncctcatgtaacattggtgaaggatccaggaatatgacacaaaggtggaataaacattaattttgtgcattctttggtaatctttgttggtttttgtaactacaaagctgtgctacacatttatgcatctcattcanatcagtgatctatgtttgcgtgatctcctacacataattgtcgagtatagaaaacgtcccatcatgatctcatgtctaactagactgagactgccatgttgtgtatcgttatgctcgattctaacactctgtattacttacttattgtgctgtggt

SEQ ID NO: 122169 - DNA, 465 bp, Homo Sapiens
  misc_feature (68)..(103): n is a, c, g, or t
tgcacaaaattaatgtttattccacctttgtgtcatattcctggatccttcaccaatgttacatgagnnnnnnnnnnnnnnnnnnnnnnnnnnnnnnnnnnnntcagaatcactaatattatcaaatagggaaacaaataaattaaaatctagcagccatcagcaagagtacagcaaagacaatgctgtaaaaagaaacaaagaaaattgctagaaaactgtatgcatcataatctttcaaaccagcaaaatatgcttctgcataaaatggaacaacagaattttttttcctgtaaagtatagaaatgccaagttgttttctgactattgtggataggtaaaatctgtatgtaattaatggtaattctactgaactattacagagtgggccaggaacacatttatggattctggggatgtgtactgtaattctttgattgggatagtggaaactctagccaaaaa

SEQ ID NO: 122170 - DNA, 975 bp, Homo Sapiens
  misc_feature (386)..(402): n is a, c, g, or t
  misc_feature (430)..(454): n is a, c, g, or t
  misc_feature (679)..(742): n is a, c, g, or t
  misc_feature (926)..(926): n is a, c, g, or t
tttacatcaaagaaaaaacattttaaataatctcaggaaacaataacaagatcctctccccgaaaataaatataacaaacatattagtaaccatagctaaacaaacactgtaatataagaactccattagacataagaaatagacattgaagccaggttttgacacttattctccacatccagccagttgtcaccagtctagtaagtgctacagggttaactgcctctggactgactgaaatatggttgtacttaacacaaaagaacactggttcagatccagcaatgacttatgaacttgcccataggtagaaaaaaatagcttactggatttatatctgcttcataagagacttttatctgccagcctgacccctcttaaaacnnnnnnnnnnnnnnnnnggtttgatatactcaataggcactggcnnnnnnnnnnnnnnnnnnnnnnnnngtgatgtggctttccacactattgtagaagtccagaatcccatttaataagatgcatgagctattagtcaatgaactttagggctggatggatcaacgaagtgtttttcactgccccagcttccttatgaaccagattactgaccagcggtgaactacaataaattcgaagacacaactaacaaaaacttaggaaggcctggaagagaggtgccaaactgcactnnnnnnnnnnnnnnnnnnnnnnnnnnnnnnnnnnnnnnnnnnnnnnnnnnnnnnnnnnnnnnnngaataggccattttataatgctagttaaaactttgaagagctgttaaatctgtaggtccatcaatatcctggcttcaaatcaatatgtagaaatatttttaattaaatttcaataaatacaccagagggatttaaatatgataaaaacagtaatttcaatctctgtttttaccaacaatatgtntaattagttcgtgatgggcttgaactaatcaataaactacagtctacaa

SEQ ID NO: 122171 - DNA, 2191 bp, Homo Sapiens
  misc_feature (1819)..(1852): n is a, c, g, or t
  misc_feature (1855)..(1855): n is a, c, g, or t
  misc_feature (1871)..(1871): n is a, c, g, or t
  misc_feature (1883)..(1970): n is a, c, g, or t
  misc_feature (1978)..(2068): n is a, c, g, or t
  misc_feature (2123)..(2123): n is a, c, g, or t
tcttcacgaatttattatataaaacgccctcagagtatttaatttctcctcactttaattacacattaagaagcacagtggatgagaagcctttaagatgactacagttgcacgaaggtccctttcatcaaggtagcgtatgtaccctaacagtgttctaaaggctggcccagaaaaaccccatgttaccttatcacaatatggaaagcattgtcttctttttccactaaattaaattatggtgaaaagtgccacagttttatttagcattatggtacataacaaacagttctgtctcaattatgaaaaaaattaattaaaataatcctgaaagacatcctttttctccccccaatgatttgaaagctgcatttttcctgccaatttcaaacaaacaaatcatcagggttgatctacagtaatcagttaaaacaatcagtcaatcaatcaatcaatcaccaaggcacaagctcagcacattagctatagcttgtagcaaaaggatatatcaatgtctcaccttagttaaaaatacataatccttttattttataatgcaataaaagaaattaacaacatcacatacacagaagactaggaaaggggaaactacttacttctggaaatcagtaatgtaaacctacttgtacttttccatagtacatgaaagtaacgtttaacatgttttgaattaattaattaaatttaatctgtggggctatacaatgtaattcttaggagtaatagtttcattcatttccaggtcagcttactgtatgattaagtaacacaaggcacagtagccatctttttcattatgttgcaacactgatcacgtgcctcgataaaatggctgattcaacaagatgatggcaacacgaaggggagactttggattgtctatttaaaatctaggtaataagtaagtaattaataaaaactctatcttaagtgcactttcacatgctttttgtttataataaacaaacaacaaacttcctaactttgttgcaataggcttgactaccatttcatttggccaaatgcactttccccagtaaacttaaaacaacaacgagaacaacaagaacaaaaatccctgtcctttcatatactaagaaagaggattggctactgaaacagttcattgcaagacacatgaagacgacatactgtggcatgagttgtttttgtttttaatttgttgtgctgttactaaagttctgagggctgcagttaaaacattccaatttctcccttccttccatctttctttattgattgattctcaagattttgcacagaaaactctttgggggctagaacagcagtaattgcatcacactgttttcaagacttcaagtttcaaaagcaaatcattaaaaaaaatacagttcctgatttgagttagatacagggacaaaaaagtagcacatacttgaaggttacgtggtctacaaatggtggcaatattttccttgggagagtagttctgttggtatatattttttaaatactcaaaaggctcaacctcaagcagtaataaacacaagcaaaagtgatttaacccttaaaataaatattcagaaaaacctctctgtacatacaagtgaaagaatatgtaacactttcacgcaaaaaaataattataataataataaaggatttgttcatatatgtagctgaaatctgctgttccagcccacatgtccccaataaagaagggaggcacagacataggtgactactgtggttgactatcttacagcctttttgtactgggacactatcaccaccaaaaatttatccctcgttatannnnnnnnnnnnnnnnnnnnnnnnnnnnnnnnnnccntcgtgcgaatcttggnctcgaggggcannnnnnnnnnnnnnnnnnnnnnnnnnnnnnnnnnnnnnnnnnnnnnnnnnnnnnnnnnnnnnnnnnnnnnnnnnnnnnnnnnnnnnnngagccggnnnnnnnnnnnnnnnnnnnnnnnnnnnnnnnnnnnnnnnnnnnnnnnnnnnnnnnnnnnnnnnnnnnnnnnnnnnnnnnnnnnnnnnnnnnagctgcataatgaatcggcacgcgcgggaaaagcgtttgcgtatggcgctctccngctctcgctcatgatcgctggctggtcgtcgggtgcgggagcgtacactcatcaaggcggtataggta

SEQ ID NO: 122172 - DNA, 1494 bp, Homo Sapiens
  misc_feature (49)..(69): n is a, c, g, or t
  misc_feature (101)..(101): n is a, c, g, or t
  misc_feature (606)..(645): n is a, c, g, or t
  misc_feature (821)..(867): n is a, c, g, or t
  misc_feature (1226)..(1243): n is a, c, g, or t
  misc_feature (1360)..(1379): n is a, c, g, or t
  misc_feature (1384)..(1407): n is a, c, g, or t
cgagtgaagagcatcgtggatttttctactcaattccagccaatgttgnnnnnnnnnnnnnnnnnnnnnctctctaatcagttgtacacacattgaaactnatagccatggccagattttatgctaaaaatggtagtttgtcaaagacaaaattctcttagaatctaatccaacttgccagccctgagaaaatcccttttaaggccaaggaaagctgaatgctagcagccaggcctgtggtacttccatgagaaaccatagcagacaatgccctcccaagtactgaaatcacactggaatcccccttgttgggttcatttgattgtttaacacaggatgtgttgtgtcattctgaagtttttatttggggcagaagtctttatggagatgtaaatgacagcgtttctgggttatgcataacttctcactggtcagagacaccggtgtgtcaagcatggatattgcattgcaagacttgaatctataaaaattagaatcacacagtcagtactacaagcaaaacagagaacctgaaagaaggtgcacagactgtaagaaaaaacccaagtttgtgatatttcagtgattccaaagaacattctaggnnnnnnnnnnnnnnnnnnnnnnnnnnnnnnnnnnnnnnnnactgcagaaaattggtggtattttcacattcatagtgtttctatccaatttcagtacccacatttaatgaggaaaaaatgttttaccaatgaaggaggaattcttaaattagctgtaatgttaggttggagaaaatttggtatttagggtattttcaaggtaccatcaaatcagannnnnnnnnnnnnnnnnnnnnnnnnnnnnnnnnnnnnnnnnnnnnnnacaagtaatatactttgaaactcttgaactaatagtctcaaaaactctagaggacagtctgagaacacgtatttctattgttctaaataaatacatgtttttgaatagttcaatcatgaattattgactatgtcttcatcaaaagtgttaatccctctcagggtctctggtgaagaccttcaagagtttggttttttctcccaggaaattggaaggtagaattgtaaattcatagaacttcttttataatggtgtacctcagcagctgcctttcaatttatgccaagtccttacagagtttatacttgaatagtaaatatgtcttctgagttttacagtgtcttaaactcaatgcacannnnnnnnnnnnnnnnnnccaccccttcttgtttgtagttcattatacctgtcctattacagaactgatttccttcctggctgtacatgttggggtgctggatttttttccgtgtctttagtcttccataaatcnnnnnnnnnnnnnnnnnnnnaaaannnnnnnnnnnnnnnnnnnnnnnngtaggatacatgttctcttctttagcttgtggtgaatacagtaatttgcattgaagaataaaacatctgttgccttttttgactaag

SEQ ID NO: 122173 - DNA, 1052 bp, Homo Sapiens
gtgggaccagggggaaaaccaaattgggaagggagagcccaggtacattaaacccactgccgtgggggaaaatgcatggtttatggggcaaggtttatcagggggcatcattctgatgacatttctcatccactgaaggtcagaacctttgcacacctgtctcagcacctagctcaagaacagcccacattgtagcagtgactgccagtggtaatatgtagatgggatcggataccgtgagatcctggaaccaccagaggccacctgtctgcaggctgggcacaggaaggttggccatctctctcaaagcaatgaagaaggagatgaagattggggcctgagtcacagggagaatgagaggtttatagagtttaataccatgttttttctggtaaagtgccatctccgaggaagccttgtaatactcaatatggtctcctgctaacttggcctctctgattcgactggaaaacttctggatctctggcaagtgattgtggatcctggctgcctctcgctggcccgtcacgatgagaggaaaaatcaggcagcgggcaaagactgtacatgcagcaatggccccccaccaaggtaggcccagatcaacatgcataaattccagtaaattctggatcagtcccactggggtgtatgaccccagccccagttcagcgaagctctgctctgcagcagtttggactacatctgcagtctctccagaagccacctcaggtactgctgtgggtgagggagttgcagcaacaacaggaggggcctgaacctggacttctgcaaaagagatagcagaggtactgaggctgcgggggccggaagccgcaaggaagaggtagtgtgggcgacagcagcacggggctactgggaataggagccgtgtggtcagcggtttcccaagccattgcgagggccctgcgacgctgtggacccgacgcccggactgtagcaagcgcagaagctcccggcgtccgcacattagtcccatcgcccggacgcgtgggtcgacgatatcccgggaattccggaccggtaccagc

SEQ ID NO: 122174 - DNA, 882 bp, Homo Sapiens
tttgttagggcaagtggacctggcccaggtggtttaaatatggttagaatgggggatccgggattcccccgtgagattccctgggaacccacccagagggcccaccttcttgcagctggggccacaggaaaggttggccatctctctcaaagcaatgaagaaggagatgaagattggggcttgagtcacagggagaatgagaggtttatagagtttaataccatgttttttctggtaaagtgccatctccgaggaagccttgtaatactcaatatggtctcctgctaacttggcctctctgattcgactggaaaacttctggatctctggcaagtgattgtggatcctggctgcctctcgctggcccgtcacgatgagaggaaaaatcaggcagcgggcaaagactgtacatgcagcaatggccccccaccaaggtaggcccagatcaacatgcataaattccagtaaattctggatcagtcccactggggtgtatgaccccagccccagttcagcgaagctctgctctgcagcagtttggactacatctgcagtctctccagaagccacctcaggtactgctgtgggtgagggagttgcagcaacaacaggaggggcctgaacctggacttctgcaaaagagatagcagaggtactgaggctgcgggggccggaagccgcaaggaagaggtagtgtgggcgacagcagcacggggctactgggaataggagccgtgtggtcagcggtttcccaagccattgcgagggccctgcgacgctgtggacccgacgcccggactgtagcaagcgcagaagctcccggcgtcacgcacattagtccctcgtgcggaattcgtcacccaggcctcgctacctagacgg

SEQ ID NO: 122175 - DNA, 1507 bp, Homo Sapiens
tattcttcagttttctgaagtgcacactcatttccctgttcaataagtatcaggaagcagcatgtagtacagaggtttactaactctgtgaatgggaagatcacttggctacccagtgctctcttataaacataagtacaagagtgtttcatgaaatccgtttttaaaatgaacatctctgtgtgccacagttcctaggactggggcaaggacacagtgtcaagtcttgttttgaggatgagtctctgaagagacagaattcctgccagaatgcgcacagaacataagtcagccaagtgtgtcgtgccagggatactttgactttggtttgctgctgctgctagggatattgggagggttatcctttccaggttgtaggagagggttgtgggtaaaggtctgtcgtaaaggacccctggctgctagctccaactgattccgcatgcgttgttcacgctctcgcagctgacgcgtcatttcagcatttttccagccttttttgaagctctctaggaagccttcccgtggaggtaatttgtccaggtcatgtacaacacgctgggggattttaagtacagtgcgtactgctggaatccggagacaggatacttggaccagggaaaacaaattggaggagagccagtacataaacactgccgtggggaaatgcatggttatgggcaaggttatcaggggcatcattctgatgacatttctcatccactgaaggtcagaactttgcacacctgtctcagcacctagctcaagaacagcccacattgtagcagtgactgccagtggtaatatgtagatgggatcggataccgtgagatcctggaaccaccagaggccacctgtctgcaggctgggcacaggaaggttggccatctctctcaaagcaatgaagaaggagatgaagattggggcctgagtcacagggagaatgagaggtttatagagtttaataccatgttttttctggtaaagtgccatctccgggaaagccttgtaatatgcagcactggctgttttttagggtacctgggccagatgcaacactgagagtaaatttcagtgggttctggatgagtcaaggactggggtgtttttgctcagccccagttcagcgaagctctgctctgcagcagtttggactacatctgcagtctctccagaagccacctcaggtactgctgtgggtgagggagttgcagcaacaacaggaggggcctgaacctggacttctgcaaaagagatagcagaggtactgaggctgcgggggccggaagccgcaaggaagaggtagtgtgggcgacagcagcacggggctactgggaataggagccgtgtggtcagcggtttcccaagccattgcgagggccctgcgacgctgtggacccgacgcccggactgtagcaagcgcagaagctcccggcgtccgcacattagtcccatcgcccctcgtgccgattcacaacacccaggcctcgctacctagccgtaagtt

SEQ ID NO: 122176 - DNA, 962 bp, Homo Sapiens
ccttttccgcgcatccttttgaaaactttctcacccctgaggctaaggactggccaccgtgttcgcaagcactgagtctccaggacggcccacattggtagcggggcctcccagtggtaatatgaaagatgggatcgggatacccgtgagatccctgggaccacccagagcccacctgtctgcagcctgggcacaggaaggttgcccattctctctcaaagcaatgaagaaggagatgaagatttggggcctgagtcacagggagaatgagaggtttatagagtttaataccatgttttttctggtaaagtgccatctccgaggaagccttgtaatactcaatatggtctcctgctaacttggcctctctgattcgactggaaaacttctggatctctggcaagtgattgtggatcctggctgcctctcgctggcccgtcacgatgagaggaaaaatcaggcagcgggcaaagactgtacatgcagcaatggccccccaccaaggtaggcccagatctacatgcataaattccagtaaattctggatcagtcccactggggtgtatgaccccagccccagttcagcgaagctctgctctgcagcagtttggactacatctgcagtctctccagaagccacctcaggtactgctgtgggtgagggagttgcagcaacaacaggaggggcctgaacctggacttctgcaaaagagatagcagaggtactgaggctgcgggggccggaagccgcaaggaagaggtagtgtgggcgacagcagcacggggctactgggaataggagccgtgtggtcagcggtttcccaagccattgcgagggccctgcgacgctgtggacccgacgcccggactgtagcaagcgcagaagctcccggcgtccgcacattagtccaatcgccatttgcccctcgtgccgattaacacgaggcctctactgccgatgg

SEQ ID NO: 122177 - DNA, 612 bp, Homo Sapiens
  misc_feature (238)..(259): n is a, c, g, or t
tttgcgatatagaatcttagctttttatttgtaggaaaaaataaacagatttccctccccaacaaggcgtcacaagaaatgaggcaataaagggaaaaatgcaaatcctaaagtcatctagtgcctttctcataattctaaacaaagaaaaagtgctctcaggttttgaaatcttcacatacactacagatgggcaaaaaagctacagacatctcagtttacaagtttcaagttcttnnnnnnnnnnnnnnnnnnnnnncctttcctccagggaaagcccatgagatcaattatcgaattgaattatacaattccacttcaactagtctaacattgatgtgctttgccaaaaaccttgaaaaatagaattaactggtttttacagaaccatagcagccaattatttagaaacaccacctgtcctttatattagagtacctgccccagttgtctttgtaatagtctgaagcaacacactgttcatggtaaacactctattttagtagataaatatatgaggactaatcgaaaagtctcttcaagaagaaaatatcttagtcctttgtatatcaaatcagaatctaataggtaaaataatatacattattttca

SEQ ID NO: 122178 - DNA, 1014 bp, Homo Sapiens
  misc_feature (756)..(756): n is a, c, g, or t
  misc_feature (768)..(768): n is a, c, g, or t
  misc_feature (795)..(803): n is a, c, g, or t
  misc_feature (906)..(906): n is a, c, g, or t
  misc_feature (924)..(924): n is a, c, g, or t
ttaaattttactattttatttgtgaaaaaactacaagcagaattcataaatagacatttctatttaaagcaggaaaatgataaagtggcttctaataacatagtcgtgcacatgccagtaacaggaatatattaacatcttttatttgctagacaaagagcagtgtccaatataaatttcccccaaaacatttaagacctgtgaatttttgaccagttcacaaaaccaccaactgacactttagcatgaagaaaaaaacaaacctaacagactgtcagctctaaagacattacagagcagaaacttccaaaagcgttatacaagctgtctttctgggcaaatgaaaaatatagctcgtataatacattaacaaaaattcacaagataagattgttttgacatacttaacaagcattctctatttgtctccaacaaacaaagctaaggaaataatgtaaccatctttacacagtaaattaaggttacaagtcatacacaagaacagaactgcttgcgcattaaaaactgttcagctccattgtcatactctaaatgttggctcttaaaccattttcggttacatacaagcaaaggttattatatattcagcaattaataaattttcaataatttaagatacggtagcttaaaaaagtagactgagaatggtcttgataaggcaggtgaaacatcttagtggaactaaactcacagaggcttctgccaatgtttttaaatatccagattgaaactganaggttttgattnagatattgtgtgggtgtcaggatgtcnnnnnnnnngtaactgcatgactcaagcagagcaagtcagggtagctctgtgtgcgcgccacgcacgagtgttgaagattgcgtggtattaaacaaatggaaactgcagcgnacactgtgcttttgtttnttacctgcttctgtgcactgatacagtattctgggctcttttactcgtgcgaatctgggctcgaggcaattctataggatcgattaatcg

SEQ ID NO: 122179 - DNA, 777 bp, Homo Sapiens
cggctggatatagtaacggatgctggatggctgggacagatccatatgctgaatgggtggaacaggtagatcaatgaatttatgatgtgttttggatggctaagattggtggataagagaaaggaaggagggttgttggtgtagtgttgaccactggatggtagatgggtagacagattccttaatcaatcaatcatcaatcaatatttacttagtgtctgctctgagtagttgctgttctaggtcctgcgtatatcacaaggaataaaacagagtctctgtcctcacgcagcttacattgtagggagaagatacagaaaataaacacgataaataagtcaaatatgtaatgtgctcagtgtgctaaaaagaaacctgaagaggctcaggggaacagagagtgctgtgggaggtgcaagtctagcttggtggccaggctcaggggaacagagagtgctgtaggaggtgcaagtctagctcggtggccagggaagaccttgtggggtgggaggtatttgaggaaagatcggaagaatgtgacagactcggccatgtgttcatctgcagggaggcatgtcctgggagcatagagctgtctgtgcagggcccggtgcttctgaggactaggtgcagagtaggggcagcagatcacagagagagaaggggaggacatacggtcagaggaaaccatccaggagcacggtgcaggctctgtgggtgctttttagtcatttagagccggaaagatgaacgtgatatgacatatgtgaacgaggc

SEQ ID NO: 122180 - DNA, 1868 bp, Homo Sapiens
tttcgctttaagaaaactcagctgtatttataaaaatatacaagtaaaaaattcaaatattcatatacatagttaagcagtttaaattttattgacctcccagtttttaaaaaaagttaaatttaaggtcacacctctaagtttgatgtactatatacagatcgtgcagaatatgagttaaacagatacaaattagtccatgcccaaaaagatatactagggtacagaatcatcttcataaatacatataaaattcttgtgtagaagcgaactgtccaggttttctgagacacttctaagtgaatcaaggcacaaaatgtacatacaccattgtgaatacacacattctagactttgtgcctctgacatagcccaaggatttagcttcatgactcttataaaactaaatgtactgaatgagattctgcttcttgggtgaaaaaccacaggaactataaacatcatgtagataattactccaaaatatggagaatacaaatacgagcactttattttaaaaagcaaacacaaaagactggtgtaaatccaagtgtttaaatgcctccgttttggataatttaattaagaaccgatacaagtttgttcccagaagctaatgcatcactagtctctactgaggaaaatgagttctaaaaattaacatggttttcagtaattcagatttcactatttatataaaaacctagagagaccaataatatccagtagcttcaaaagataagctaaagattctttgatgttatcaactttaccaatgtttgtatgggtgtgtttaatatatacacaaggaaaatacactcactctataatttcttataaaatagcaagtaaggagtagaagtaggagatgtagaaggggaaagagaattcagaaagtccttctcttcagtaactttgacttcagaatcatcaaaaagcaaccacttcccctcatactcctttaagctttgcactacgtatgaaattttgttctcaaatccactaatattaatgcctgtttggtcactggattccttgtttctatcagattcatgggtcccagtagtatcactagtctcagaatttctattttcagcaaacgctgtactagcaaccttatcaggattagaggctttgttgtatagctcataatctgctttgctcttttgtcctccaagaagtccaatagcttctacattttttttgttcaaaaattttacttggctgtgtatttccgccaactctaattgacacttcttcatcattataattctcaaccacaccccttgcttcgtcctcattcaatggttctggcttacctatttcacacatttggtcaaccacaaaatttcctttatctagttctaaactgttaaggtcagtgactttaacagaagcagtgtaatgcccactactaattgtaatgccactatgcatcacaaccgcaaataatccatagctgtcgttagttggctttgtgctccattcttctagtgacaatttaagaggtgtcaataaaggagtgttgatcttggaaagtccaccaccataacaatcaaactccaaaccactagcagcaaagcacttcaaatgaatagttataacttcaggcattttgtcaaacaaaagacttcgttcagcttcagtataatgatggcagttttcacagaaatatttatcttctcctacaatcctttctactgaagcaaattgtgaaattgcccatctcagggtcttcatttctgtttttggctctggagaaatttcagaactctcctctactttggaaagctcatcttcttgtactggcacactgatcccggccgtaatggccgaattcccgggcatatgtccggtaccgtcgactg

SEQ ID NO: 122181 - DNA, 635 bp, Homo Sapiens
  misc_feature (528)..(551): n is a, c, g, or t
ccccctttagtctcctggctttttcctttcccttcccttctccactggccagcttgggcctcatcctcatgtcatccttctaggaaggcgcctgccccatcttgtctgccggcagcatgcatccaaggccagagctcaggcctgcagactgggctggtgcctcctccgcttcagggtatgggagttggtgaaggggctttcaaaaaataataaggaaaaaaaggtaaagtctttggtagcttctatccactcagatcctggaaggcagcaaggttttgtggatctagattcattaggaatgtcttcttgtcagccaggccaggacccgggcttgccaagagcagaggccctcccagcaaccaggataccaccactttgggggctttgtgtacagaggtccgggtctgagacctcataggctgcagaaatctggggcagccaccatcaagaagcccctctcaggggccagaactcctttgccagcgtggatttctcaagtcgggactgcataattaaagcagttgcagnnnnnnnnnnnnnnnnnnnnnnnncccaaaaatgatttgtagttgtgtgtgcagcacttcgccctgatatgtgtgctctacaataaaaaccaaatctaatatattttg

SEQ ID NO: 122182 - DNA, 2713 bp, Homo Sapiens
  misc_feature (838)..(895): n is a, c, g, or t
  misc_feature (1666)..(1730): n is a, c, g, or t
  misc_feature (2225)..(2248): n is a, c, g, or t
  misc_feature (2340)..(2341): n is a, c, g, or t
  misc_feature (2344)..(2353): n is a, c, g, or t
  misc_feature (2355)..(2364): n is a, c, g, or t
gtggtaccggtccggaattcccgggatatcgtcgacccacgcgtccgggccaggagcgcctctacccgccgggcgacgtggacgagatccccgagtgggtgcaccagctggtgatccaaaagctggtggagcatcgcgtcatccccgagggcttcgtcaacagcgccgtcatcaacgactaccagcccggcggctgcatcgtgtctcacgtggaccccatccacatcttcgagcgccccatcgtgtccgtgtccttctttagcgactctgcgctgtgcttcggctgcaagttccagttcaagcctattcgggtgtcggaaccagtgctttccctgccggtgcgcaggggaagcgtgactgtgctcagtggatatgctgctgatgaaatcactcactgcatacggcctcaggacatcaaggagcgccgagcagtcatcatcctcaggaagacaagattagatgcaccccggttggaaacaaagtccctgagcagctccgtgttaccacccagctatgcttcagatcgcctgtcaggaaacaacagggaccctgctctgaaacccaagcggtcccaccgcaaggcagaccctgatgctgcccacaggccacggatcctggagatggacaaggaagagaaccggcgctcggtgctgctgcccacacaccggcggaggggtagcttcagctctgagaactactggcgcaagtcatacgagtcctcagaggactgctctgaggcagcaggcagccctgcccgaaaggtgaagatgcggcggcactgagtctacccgccgccctcctgggaactctggctcatccttacgtagttgcccctccnnnnnnnnnnnnnnnnnnnnnnnnnnnnnnnnnnnnnnnnnnnnnnnnnnnnnnnnnngattctatatatttttccttggttttgttgcctgttaaggctgaagaatagaattggccaggacctaggttctcatattcttggtattcctcctggatggaaaggctgttggcatcaataggggacagaggctgatgctggagtggccagtagaggtggtggagcagagcagccatcttttaagtggggctgtatcaggctgggtttatttaaaagcaacaaaatgttttggttaagaaaattattttgctttcagtgtaaatcttcgcagtgttctaaacaaagttcagtcttctgctcgcccctttccctcactgatgtctgcacttggttgaggtctcctggagcctcacaggctctgctgttctccacttctcacctgccatccacgccctgcaagctcatgcaaacaccctttcttcctcctgcggcagagttgttcaggttgcctgggcaggggcttaaacagtgccagcccctgccatcccaaagctattgttaagccccccaggcgtcctccacccacgcccactagcctgccatgtccacagttccttgggctgctgaggggctagtgcagtggtcctgacctctcttatcaacgagcacacttctttgctggttgctccttttgagcatatgcgtgtgattatttggaacagttagacttgccacgttgggtcagttttagaaattgtttctagctagagggactggtgtccttccaagtctagcattggggtatggaaaattgtgtggtgcgtggtaggnnnnnnnnnnnnnnnnnnnnnnnnnnnnnnnnnnnnnnnnnnnnnnnnnnnnnnnnnnnnnnnnnttctccactggccagcttgggcctcatcctcatgtcatccttctaggaaggcgcctgccccatcttgtctgccggcagcatgcatccacggccagagctcaggcctgcaagactgggctggtgcctcctccgcttcagggtatgggagttgttgaagggggctttcaaaaaacatcctacggcacaaaaggtaaagtctttggtagcttctatccactcagatcctggaaggcagcaaggttttgtggatctagattcattaggaatgtcttcttgtcagccaggccaggacccgggcttgccaagagcagaggccctcccagcaaccaggataccaccactttgggggctttgtgtacagaggtccgggtctgagacctcataggctgcagaaatctggggcagccaccatcaagaagcccctctcaggggccagaactcctttgccagcgtggatttctcaagtcgggactgcataattaaagcagttgcagnnnnnnnnnnnnnnnnnnnnnnnncccaaaaatgatttgtagttgtgtgtgcagcacttcgccctgatatgtgtgctctacaataaaaaccaaatctaatatattttgaaaaaaannaannnnnnnnnnannnnnnnnnnaatggccttatcgcggccgctcgctaccttaggaccgttatagttaggtccctttagtgagggtaaattaatattgaaaagggaggagtatgagtattccacattttcggtgtcgccctttatccctttttttggcgcatttttgccttcctgttttgcccccacccaaaacgctggtgaaagttaaaaaaagctgaaaataatttgggtgccccaaggggttaaattcaaactggttttcaaccccggtaaaaatcttggaaaattttccccccaaaaaaatttttccaagaaagaaccctttaaaatttccctatgggggcgggattaatccccattaaccccgggg

SEQ ID NO: 122183 - DNA, 1258 bp, Homo Sapiens
  misc_feature (79)..(102): n is a, c, g, or t
  misc_feature (408)..(428): n is a, c, g, or t
  misc_feature (587)..(657): n is a, c, g, or t
atattagatttggtttttattgtagagcacacatatcagggcgaagtgctgcacacacaactacaaatcatttttgggnnnnnnnnnnnnnnnnnnnnnnnnctgcaactgctttaattatgcagtcccgacttgagaaatccacgctggcaaaggagttctggcccctgagaggggcttcttgatggtggctgccccagatttctgcagcctatgaggtctcagacccggacctctgtacacaaagcccccaaagtggtggtatcctggttgctgggagggcctctgctcttggcaagcccgggtcctggcctggctgacaagaagacattcctaatgaatctagatccacaaaaccttgctgccttccaggatctgagtggatagaagctaccaaagactttaccnnnnnnnnnnnnnnnnnnnnngaaagccccttcaccaactcccataccctgaagcggaggaggcaccagcccagtctgcaggcctgagctctggccttggatgcatgctgccggcagacaagatggggcaggcgccttcctagaaggatgacatgaggatgaggcccaagctggccagtnnnnnnnnnnnnnnnnnnnnnnnnnnnnnnnnnnnnnnnnnnnnnnnnnnnnnnnnnnnnnnnnnnnnnnnccctaccacacaccacagcaattttccataccccaaatgctagacttggaaaggacccccagtccctctagctaggaaacaatttctaaaactgacccaacgtggcaagtttaactgttccaaataatcacacgcatatgctcaaaaggagcaaccagcaaagaagtgtgctcttgataagagaggtcaggaccactgcactagcccctcagcagcccaaggaactgtggacatggcaggctagtgggcgtgggtggaggacgcctggggggcttaacaatagctttgggatggcaggggctggcactgtttaagcccctgcccaggcaacctgaacaactctgccgcaggaggaagaaagggtgtttgcatgagcttgcagggcgtggatggcaggtgagaagtggagaacagcagagcctgtgaggctccaggagaccctcaaccaagtgcgtacatcagtgagggaaaggggtgagcagaagactgaactttgtttaggacactgcgaagatttacactgaaagcaaaataatttcttaaccaaaacattttgttgcttttaaataaacccagcctgatacagccccacttaaaagcc

SEQ ID NO: 122184 - DNA, 710 bp, Homo Sapiens
  misc_feature (564)..(582): n is a, c, g, or t
  misc_feature (689)..(689): n is a, c, g, or t
tttggctggctatctccagtagtatcctttttaaaaatgactttttaagtttgctgctgatacaggggtatataattacttttgtatattgattttgtatctagtaacctggttaaataattgaggctcacttgaaaaatgacagtttgatttcttctgttgcaatacttatactgtaggctgaaaatattatagtcaaaaatgtatttaataaactaacctggcaaacatcatagcttagcttagcctactttaaatatattcagaagacttacattagcttatagttggggaaaattatccaagacaaagcctattttatcatcaggtattcaccagctcatgtaatttattgaatactgtactgaaactgacaaacggcatggttgtatgggtactcaaagtacagtttctttgcatcatcctaaagttgcaccatcgtaagtcaagagctatctgtactttatttctttttgtcttctctgctagctaagatttgcagtacagtgttaattaaagtagcaatagtaggtattcttgtcttgttcctggttttctgggaannnnnnnnnnnnnnnnnnnaccaccactgggtctgatgattaatgtatgtttctgataaaaccttttaccacattaaagaatttccctctattcctaagatgtttccctctattcctagtttgttnagagggtttttgtttgtttgt

SEQ ID NO: 122185 - DNA, 864 bp, Homo Sapiens
aaactttttgtttggaggcacaaacacaatttatttcaatgtaaaggtactaccaaatgaaacagtttaaatgcttgtaacaaacgtgttatccaaaacagcacaatatgatgatgctaagacttacaaaattaacctaatttacagtattgtcaaacatgatttcatacaaacttgaataaacaccacatctaactaggtcaaacaactaccgagttcaaataattgatatggaagtattttggtaaagtgcccatagtgagagtttaaaaagcagcccctgttttctatagaaaaagttgtgacagtgaataactcatcacattctctgcaatactactcagcactcatatacactcaggggagcaataccctggacacatagcttatttcacattagtgaacaaactcaagatttttataaagttctgactttgggccagaagataaaatgtcccatatatacatatatacaaaccctaattcctaccctcttaaatcctctagttctaagaatggctttttgacttgtctttaagtttagaaaggaaaaagtgtgcaatgcgcttgcatctgtacttgctgaattatgaaacaaatgtgttaaatgagaaaaaaaccttgggatggtactaatacacttcgattatatacatgatctttgggtattcatgacaatcagtttaaccatctgttgccttatgaaaaacttaatttcctaagttacccaggaaatgtatttaaccatttacaaaaacaaaaattctaatatgcactttagaaaatcgtggtcttatatacctgcatatttcttccataagacaggtacacattaaaaaatattgctcaatgacataaaaatcc

SEQ ID NO: 122186 - DNA, 1869 bp, Homo Sapiens
  misc_feature (350)..(360): n is a, c, g, or t
gaaagaaggaatcctggttaataattaaccattatggcccatatttcctatcttaaagttttttcaatatatttccaggaatggtaaaaaacaaaacctatgtaattttttctaaagatgtataaatgacttacttttaataataaatatttcttgatttataatgtaaatacaattaaacaaatatgggttactcgaattaaaaaaatggcacatgtaaatgagcattttagtacaaataattaaaatgtatttatattatatagaaatctacacaatggaagatactactaaaatgttgctctacagcacatcaccctagacaaaatagaattctagaattctctttnnnnnnnnnnntcactgagaattagatgatgactgtgaaataggttctcccattacaatactacttctgtcattcaaagttctgaccacggttgtagctggcgactgaagcacttttcgagaaagcctcattcttccatcggctgggtcacgtccaaagtatttcacctgaatttcttggccaacttctaatcctagggcagtaggatgtttaatctttcgttgatcaagttgtgtgttatgaagcagtaccgcagtcatatttggatataattttaccattacaccagtatctctgatttcagttattgtggcggtatatactgctccaaattctaattgctgctcctgatcatccttgcagatttcagtaatgaagtctcttgcctcatgcatagcactgggtgttggtgcaaatacagaaaacgtttcttcatccacctgactaatagttacacctgtttcagcctgaagtttttttaagttatagccaccaggtccaacaaattttgctcgttttgataatggaacctgaacagtttctacaacaggtccattttcttttctagatgctcgaggttttgaaatagttttgttcatgatctgtaatatctccttttttgccactgaagcttgttgaatagcctccatcacaatttttattggtattccacggtaatttaatatcagcctgtaatgcagttattcctttattagtgccagctattttgaagtccatgtcaccattgtaatcttcaattcccaaaatatctgtcagcaaacgataatcttctatttcacccttctcaggatcggttttggtgaccaatcctattgctacgcctgcaacagcagatgaaattggaacccctgaatccattaatgctaaacttccgccacatgcagatgccatagaagatgacccatttgactctaggacttcagatgtaactcttatggtgaaaggaaaatctcggggaataacaggatacaaagctttctcagcaagagcaccatgcccaagttctcttctatttaaaccagtgactttgccaatttcattagttgcataaggaggaaactcgtagtgcagcatgaaatttttatcttttatcccatttatagctgttataacttgatctgacttaataccagattctaatgaatcaaatgtaacggtacaaagcacctgtgtttgtcctctttgaaataatgctgatccatgaagggttttaaacatatctacctcacaacttacattcctaagtgaagtcaaatcccgaccatcgcaccttttgtattcattcaaaacaatacttctaaaaacttactttgcaacaacattgaaggattctattatttcatatggatcggcttctggaaatttttcttttagttgttcctccgtatctaatcttattttgttaacagcttcatctctggaaactttgtcatgctcgtaatctgtaaaaactgcatagagtctctccatagcaagtttatgagtatacggacgcgtgg

SEQ ID NO: 122187 - DNA, 1610 bp, Homo Sapiens
  misc_feature (60)..(60): n is a, c, g, or t
  misc_feature (99)..(99): n is a, c, g, or t
  misc_feature (248)..(248): n is a, c, g, or t
  misc_feature (269)..(269): n is a, c, g, or t
  misc_feature (300)..(382): n is a, c, g, or t
  misc_feature (385)..(385): n is a, c, g, or t
  misc_feature (390)..(390): n is a, c, g, or t
  misc_feature (392)..(392): n is a, c, g, or t
  misc_feature (396)..(396): n is a, c, g, or t
  misc_feature (403)..(405): n is a, c, g, or t
  misc_feature (410)..(414): n is a, c, g, or t
  misc_feature (416)..(417): n is a, c, g, or t
  misc_feature (420)..(421): n is a, c, g, or t
  misc_feature (425)..(443): n is a, c, g, or t
  misc_feature (445)..(448): n is a, c, g, or t
  misc_feature (453)..(464): n is a, c, g, or t
  misc_feature (469)..(471): n is a, c, g, or t
  misc_feature (473)..(474): n is a, c, g, or t
  misc_feature (476)..(587): n is a, c, g, or t
ctcgcgcgccgggctgcctctcccgggccgttgcgggtggcggcgggcggccgcctgtcncggccccgccgcctgttccccgcgcggggttcgtccgtncgtccggcgcttttggcgcccgccgcgcgcgcgtttcgtgcggtgggtgcgtgcgtggcgcgctctgcggtgcgcgggctgcgtctctggcggccttcgtctcgcggcggcgttcgcgcgccgtgtgctgcgtcggtctttctgcgtgnggcgccggccgtcgggggggnggcggttgtgtttggttgtcttgctggtgtnnnnnnnnnnnnnnnnnnnnnnnnnnnnnnnnnnnnnnnnnnnnnnnnnnnnnnnnnnnnnnnnnnnnnnnnnnnnnnnnnnnttnttttntngggntgtggtnnnttttnnnnntnnttnngggnnnnnnnnnnnnnnnnnnntnnnnttttnnnnnnnnnnnnttttnnntnntnnnnnnnnnnnnnnnnnnnnnnnnnnnnnnnnnnnnnnnnnnnnnnnnnnnnnnnnnnnnnnnnnnnnnnnnnnnnnnnnnnnnnnnnnnnnnnnnnnnnnnnnnnnnnnnngactcgcacacaaggacggtttattggctagagagcaaacgcaggcagaagtaaaaacaccagataaaaagtgagtgtggagaggtgaagactgcggccgctggacttggcttgagctgtgaggggtgggaggggaggatagcaccggaagatgctgctccgggcccaacaccagccctggccaggctctcccctcccaggggcagcgcccagtccccaggggctgccagagccctgtgtgccttgccgcattcccctgatgcagcttttggcaactgaaaggcagggctctcgctgagtgcacctggggcttcctgagcccatctgcggcggccccaccctggcctaggtgctgagtgcagctgctgcagacagcccctccctccttagtggagcctggagggtggggtgctcggggatgcaggcaggggcaggggctccagagccacaggtcagaagcagggctgggggaggggtggagccattcagcctcaggcaccctcacagctaggtgactaggggcagggacagaatggggtgaattctccccactctgaacaactgtgtcaccaacaaacaagttaagtggcagggctgcgcccatcctctcctgcctaggccagaatgcgggggggatgggggcacctgcctagctgagcagttccaagtaggtgacagggaccttgcccttcttgttgcctctctcgccaatgagccagtcagggtccatgccaggcaggctgtagacagtgatgagctcatcagccagcagggccagctcactgctgtcggctgcctcgtagtcatagagcacccgagctttgcgggtcccactggcaggggggggccacctcttccaggcagagcgaggcctcccctggaggggccaggctggccacagagggcaccacaggcatagtggccgcagcagtggtgggtaggtgctgctcaggggtggggagcgggctctgggtgcccacgaagtgccgggaatatggcaccctggagctgccagctgcttct

SEQ ID NO: 122188 - DNA, 791 bp, Homo Sapiens
gaattttgagtttcatatctccatttttttattgtgacccagtttctcgtcaaccagtaaaacatccagtaacacagccaatggaaataaatgaatgggtctctgtttatagtgaagattctttcgttctccagctccaggcttcatacggtaaaactctctgggaaggaaaggaactcagagtcccatgcagaaaattgttcagctggaggggtatcagaaagatggatttccaaagccaactgtttcctgtagtgtgtggatctctgcaagcagagcctcatctttcaatttcagcttgatcatgtacttgtaggcctgctcagcttctaattgccgtccaactttcaggcagaccagagccagatatgcccatacttcagcattgtagttgttcaatgcattggcttcagaaagagcatcctcagcctctgtgagctcctccagccgatagcaggcgattcccagtcctagccaggtaaggcatgaaggtgatctcttacaggcttgcatataggttttctttgccttttcatactctttctcttccagatagatgagccccagtctcaggaagatgaagtgcatctcagaagcatccactacaaagctaatggttcgttcatagcatgccttggcctcagaatgatttccactcagaaaatagagattgcccttcaggccccagacattggggttcaggtagtccatctgggctgcttgttgaaggtattcctctgccttggcaaagttcttcttaagaatgtgtgtttgggccagcaccaagtaat

SEQ ID NO: 122189 - DNA, 1149 bp, Homo Sapiens
  misc_feature (72)..(89): n is a, c, g, or t
  misc_feature (780)..(788): n is a, c, g, or t
acattttttctcctttgacacctattttattggtgtttaaagtaaaggttaacatctgtagcttttccaggnnnnnnnnnnnnnnnnnngatatgaaattgtctttctccattgcagaaataagctagggaaacactaacccaaaaactttctgtagagctgttcctttggaggcagcatcacttattggcagtaaagactcagtataaaagcaccagcatccctacttgggtgatggggattaattttatagcattccattttcctagtgccacatgtgaaattggattttgatgatcttaatctatattctacccttataataaaagatcaaaagatatatctcctatgaacagattggagataggagatgaaaagttgggaggatgtctttattctaatgtgagggtagggaaaatgtggataacattactggggtgagggaggcattgttctttagttggagttctcatttttattctccagtactgacttgtggggaaagcatactttttcactgccaggtactgaatgcagaggctcagtgaagtatatatgtgggaagtgcatgcatttcgtttattagcaaacatagctggattaagacaaagttgttggtttggaaaggggttaaagccttaagtgaacaaatctagctaacagtgaatgaactaggtaatataacttgcatatttttaatttcctttggttaaaggtcccccatacttctctgttcggagacatgagaagtatgattacttcagtgttagttttgttaannnnnnnnnccccctatttgtcccttgtcactttgttgcaagctagaaatctgtgggttatacatagggcagctctttgtgaaagtggtttattccactggagaaaggggattgaaaatcagttagaaccaatgtatttcttgccccacggaacactattcctataagatagctgaaagaagctgctgtgaggagctcagctccaaacacaggatcagcaccttgtataggaattcccatgaattatgacttctcattctgttttatcagagtgcatatatgtcctacttcaggaaaagtaaaacagtcatttacgaaagaaagtcaatctgtatcctaagcattttaataaaaagttaaacctcgtgcc

SEQ ID NO: 122190 - DNA, 1446 bp, Homo Sapiens
  misc_feature (1336)..(1370): n is a, c, g, or t
aaactaagtcatacctactttcttcttcagaattatcataaaacatcatcttttacaacatggagaagcgaggtaggccataattgttcaaatttcatctttctcaaattttaaaattgttttaatcccaaaggtgcctattgaattcttcaaaaataaactgcctatcaggtatcatacctgcaaatgcttctaatatctcttgattatcacttgaacaagttcagcgatggcaaaggaaaaaaaattatatagccatgtaaagtaacattttctaattttccccctttaggactccaactatggcttaaaaacccaatgaacaagtgaagtttccctctgtacatggcttttattatttacataatacaatatagcatcaatgctgaatagcatgattatgtgcaatacataaatatgaactatctgtacacatctgcaggtctaactcagaactaaggtacataaaattgaaagcaaaactgaatgctttaagaataaaagtaaaaactaggactgaacattgcaataaatcagaagtagtgcctcgtgtacatacttaactatttacagatgaaaacaggcattaccacaacactaactatactcatttatatataaaaaacacaagtttcatacatcacaaaaaaccttccattataacacagaagtgattattaccagacaagcatcagtgaagtatactgccttttctagttgttattgtacaatgctgtagataatgcagcccatgcaatacacccaagaacactagagtcctacacccaagtacaatatgataaagcagccctctgcaagtggtgctggataccactaagaagtctactgcagccatgttggttatgattttccatgcagaagggtacagttacattaagaactgaagtcttttaaaaagctttaaacattctttcttgaaccaaaacattcgacaaaagatgcacatgaaaaattattcagatacctttgcaacttaaaattcagatgcatgttattcaatagagctgctgtatgtgaaaaccaaacgtagagtttaaatttcttcttgtaaacaaattaatcctagtgcagttctgtgctacacatttttagcaatgagtaatgcagacatcttctggtgcaggccagtacaataagcttcaaaggttatctcaagaccctgttgttggcttgatggttttacttataaccagtttcgatgtttacctttcacagaatgtcttatttgacagctttagatgaccaatttaaccaggcttatatacccggccgtaatggccgaattcccgggcatatgtccggtaccgtcgactgnnnnnnnnnnnnnnnnnnnnnnnnnnnnnnnnnnncgtccgcttcctcgctcaatacttcgctgcgctcggtcgttcgcttaaccggtggcgcctatatagttataatttt

SEQ ID NO: 122191 - DNA, 1950 bp, Homo Sapiens
  misc_feature (229)..(229): n is a, c, g, or t
  misc_feature (1474)..(1484): n is a, c, g, or t
tagtatactcgattggtaaaataacagctgtcttcaggaacctgaaattttgcgttcttcaaaactaatctgttctttatcacaaaaaccctttgtgcacaccttggcaaagtctgaaaattagtgagataatatctgtaaaaatttgactagaatttttatctaaaattataactttttaattaatgagattataaatagttgagtaggaagctactaggagacacanaagagaatttcaagtattttatttattgtaaatgttgtatttgtatatgtatatatacacaaaccaaaaacacttttaaaaaactaatgaaattcagttaataaacctattattaaactttattatgaaaggttatgaaaaaatttttagtgcttaaaattttacgatccataccatatctgccatagtaaaaattcatttttaacacagctaagatgataactcatagataccacagtaacttttttgtaggtatttaagaaaaccatttcttccttctttctccagcctaatttctatgaaaatattagtgtctaatattttacatgacccagcacaccttagtaaatgtaaacattctaaatgatttaatagcaagctttgaaagttcagattttaaagtgctcatgaaattctcaagtggttttgtaaaagttcaattgattgaagattttataattgctcctgctttattatagccatgaatcaacatatttgattagatctattaaatacttcgtaccttaaagcttataatttatttaaaatagtgctattgtgaacgaatgtcatgctttcacatgattcataatagaaattctaatattaaattaatttctctaagagttattacctatagttgaaaggtcataaaaatggaagcgagtaactgcgtgaatacacacacactcttttagtatattttgtactttcaaaataatatgacatcttaattgtggttcttgtgcattcttttgaagacaatatttgcttattcatgtagtgagtgacagacaagattctagagtatgatgattattaattcgtgcatgatgaaaaatattagatattattggcagctgattagtcagttttcacaggtattagattatcacatgttcaatgaggaactacattaatgataactaaggtagaaaattcagaataacacttaaacacttaatgaccaaaatcttacaccaatacagttaatttgagaatcactgcaataacatgttcaaaaaatccatgattagtgcattaacctcaccgatgactgaataagacttattcaatgatggaaacggaaatgttattgtaaattccctggctttactgcatttccttgtatttcacaactctcacactcagtttctgtttttctgtgttagtgaagtctgttttgtggtgttttgttttcattcatagttgcaacagaaaggcttttcaagaaaacatcaaggnnnnnnnnnnngtattagctcagttccctgaagacatttgcaaaaagaaggttaaaaaaatcaagtgagggaactatataaaggaggtgcaggagcaggacgggcaggaattaagtttccctgagatgatactttcggttgtggtggaggtggccttgatgggaactgctgaggttgcttggctgcataggttggtactgcaaatctgtttgcatatataggaacttctctgggaggtgtcactggagaaacatgtcgaggaacactccccggctgtctagaagggtttgcttgatttttgccatctgactcatatgtttgtgatctcttctttctgaagtagcttctccacagttgatccctcttgatgaagataaaaatagcacagacaataaggggaacaattaggaagaagaagaccagaagtccgtccggacgcgtgggtcgacgatatcccgggaattccggaccggtcca

SEQ ID NO: 122192 - DNA, 545 bp, Homo Sapiens
  misc_feature (267)..(267): n is a, c, g, or t
tccttctacttttggaatggcagggtatatcatgtttaaggctgttttcttcaatttgcagtgtatgattgaaggatccatctaactcctgcactgtcactttaagtggtcccacgtatttctgagttccaggagatgtatagtcctgttttatttccagttccaagacatttcgttttctattaaatgcaaaacttccataaaattttaccactccactctgatctacccactgctttattaacggctgaatatctttgccagagnacatttgaaatggatttcaaaaacccagatgtggaaaccaacatctgactccacatatgtgactggaacttctgagatgaagcagtactagccagacttagcagtttattgaaaacttgtagcataaattccatactgatcctattttcaatcaatctcatcacaaggtgggctttacactgaaacatagtgtagtattcccaggacagtgtatgtggatgctttattgaaaagtgtagatgggaagccggattatccttctctttccctcccccaaa

SEQ ID NO: 122193 - DNA, 713 bp, Homo Sapiens
cttaggtttcacaatacatttatttagaaaagcaacatacagtaataggtatttcagagaattcagcaaagtataaagacaaatacaaaagatgcttgggatacaaccgctagcttctgccttccacacacagtggattttactgtaactgactagagttactctggtgccactaagttccgagccaagtctacggccaccactggaagctgtggctatttctgtggactgacgttacactgggcttcattgttctttcatttaacaaatgtgacagggaccgggctggggacacacggggaacgacagtgggtctctgcccatgggaactcacaatctaacagcgagacgaggcacaaacggctagcacaggatagcataacaagtgccacccaaggtacaggctcagggtgctacggggacctgcaagaaggccacctgagcttcgggtagctgggaaggcttcctggaggaggtgaggcccaaggtgggggtgagcctgggccaggcaaaaggcaggcctctcggcgcccatctgtggttcctcaacaccctgtgtgtgcaggcccctcagctgacctgtcttctgtgaaattcttgatcccgctctgttctattcacactgtgctgctttgccttggtggttagcatggttagctttcacaagcacaagctcacactcgaaaactaggctgctgtctcctgggagtttc

SEQ ID NO: 122194 - DNA, 769 bp, Homo Sapiens
  misc_feature (463)..(463): n is a, c, g, or t
  misc_feature (678)..(678): n is a, c, g, or t
caaagttttgtgcattttatttaataaatttaggccataaaacattgtaacttaaatcgcttctatacactatatattcatataaccttgttggcctgaagtagatgcttactaggaagtttttccatggcttctttttaaaatcctcagttatcttctcctttttaaataaggattgtatctaaaaagatcatcagcaagagactcttcttttgcatgttgattttgtacctccatttcctgccttagccactcttctagttctgtattctttcgagcatgatgagctattagatctgatcctccaatgatgtgtggaagttttcctgctccaggatatgtgacctttttgaatttcttgaaattttttagttgaccataatcatcatttatgccagatggatttctggaagtagagtttttaatcaccagtgatctaaattcagtcaataacagctttttntggaagcatctcactatcatcctgaagtttgtcattgttagatatttctttagctgaccatagtgagtcttccttgagttcacgtttcttcccaatttcaattttcttgagatattttgctactttcctggtactgcttcatcactgaaagtgtcatttgtttctatatccatccttgggctttttctaacattgacatcttcctcctgtttttngactttcacatcaatttctaactctggttttgtgtcctttgataactgttccaatacttcatctttctatggcacatcatccctcgtgccg

SEQ ID NO: 122195 - DNA, 2578 bp, Homo Sapiens
  misc_feature (262)..(270): n is a, c, g, or t
  misc_feature (430)..(438): n is a, c, g, or t
  misc_feature (619)..(638): n is a, c, g, or t
  misc_feature (752)..(761): n is a, c, g, or t
  misc_feature (884)..(892): n is a, c, g, or t
  misc_feature (906)..(1040): n is a, c, g, or t
cgaaaggatgtttttgtctgagcgacccacttggtttacgaagccacatagctgtttattgcggcacaaaaaagaaaatggcggagtgtattctatacgggagtgagtaaaaacatctactggggcccccatcttttttgcagccatcacaaaaggggtggtttttatagtgaggagaggacaaagtaagtctctctttttcgctgcgccccccacaagataacaaatcacactccccgcgggggggaagagagtttttcgnnnnnnnnnaggttatcttaaatgatttatcaagggccggaggtgggcccggacgatgagagggggtgctccgagctgttgtgtgtggtgggggccccgcgccggggctgtgtatccgcccgccccccgggtgggcgtcacgagttttttttcttcgtgttcgcgcccnnnnnnnnncggacaacaaaaaggtgttctcctgaaaattatcccctctcggggggtggggttttttccggggtggtttagccccccaccctgcgagtggttgggagggcgcggttcgtcgccgatagttggggcccaggaaggcctttagagatagttttagcacgccggttttcgtcgcgagaaagtnnnnnnnnnnnnnnnnnnnnccaattataattatgagggcgcgccatgggctaccctcgtgagaaaagcccaaaaaatatctccaaaaattccctttgtggattttttgaaaagcgttggtggccccccggggnnnnnnnnnngggggggacacccacccggggtgcctgggcccggggttcgtttggaaaaagggtagggcaggggtcgttgcccggtggggcccgcgcccccacgaagatgttttaaaaatttttggagggccnnnnnnnnncgccccaggttggnnnnnnnnnnnnnnnnnnnnnnnnnnnnnnnnnnnnnnnnnnnnnnnnnnnnnnnnnnnnnnnnnnnnnnnnnnnnnnnnnnnnnnnnnnnnnnnnnnnnnnnnnnnnnnnnnnnnnnnnnnnnnnnnnnnnnnnacaccagtgtttaaacttttatttcacaccatgcaaggtcaattataacacattaaaaagtgacaacagctataagctgcaattttacatttgtaaatcggaaacgtccattttcaaaagctgaacataactatcaaattgtaatagctaagcttcaatccaactgcttatacagatgaaattttctatgaacaacaatgattttatatctgtccacattctgtgatagttattcttcgacaaacagaccctttgggagaaccaaatgattcaatctttttcacagtatccatgccatccttaacaaacccaaatactacatgcttaaagtccaaatgttctgctttcttcagtgttataacaaattgagaattattggtattctggccttgattggccatggatagtaaaccaggaccagtatgtttcacatcaaaattttcatcttcaaatttgtctccataaatggactgtccgcctgttccatcatgtttggtgatatctcctccttggcaaacaaaatctggaattactctgtgaaaaatggaattcttgaaaccaaagcctttctctccagtgcatagtgctctgaagttctcagcagtccgaggaacaatgtttgaaaataattccatagttatccgccctagaggttcaccgtccgcacaaacatcaaaaaacaccacaggattggtctcctttgataattctgctgccagtgatacatgtcctttctggagtttcattaaattctgctgacattcttcaaatgttttcttgaaacaatcagctacttctttagttttaaatctcactgcaagctgttctacttttgcttctccatcagcataatctgaggcagtccaaactaaagcattatttgaaacatttaagggctttaattccattgttttagtaataacgtggtttgcacacactttaaaaacctggtctcttctcattaggatccggtaataattcttcattgtatgccaaagaatctttatatctccaacaccgcgctccttccactgactgacatcccgatcccatctataaagtttggctctctctttaaacaaatttcttcatcttcttctccagattttacttctacctctggtagtgacactattggttcaaaatggatatcttcattatgaactacttcttcatcactaccatcttcatcttcaccaactttaccggctgactgggttccgactgactgtgttccaaacacagctgctccagtatttgcccattggaaatttttatctttagaaccaaagcaaatctccagaattactggaagccaagtctgcaaatgagagccctgtgctacttccaatccaatgaaactatcttgctttccccttggcttgtagaatctgtatcatttcctttctagttgacaatctacaggtttgtccatagtttcagaggaaacagatggtgaactaatggatttggtaatagaatcaggtccccggccgtaatggccgaattcccgggcatatgtccggtaccgtcgactg

SEQ ID NO: 122196 - DNA, 1332 bp, Homo Sapiens
  misc_feature (265)..(326): n is a, c, g, or t
atgtgggggggaagaaaaacacacaggccgcggttatttatccgggtggccaccgggtatctttcctctgtggaaggggccacaacggtttcgagccccccgtatcccggccttgtcccctatcgggggggcgcccccgcggccgcccaaaaaagaaaaagggggttttaaaaagatttctttctggggggccgcaagggggggccaccccacagtatcttcttatcacatgtgcgccggtcggcggcgcaggttgtgtggccannnnnnnnnnnnnnnnnnnnnnnnnnnnnnnnnnnnnnnnnnnnnnnnnnnnnnnnnnnnnntggaatagtatagggggggatagttttggcacttttacttggattttttaaagaaagtgaatacaaatatctttgtacacaaattctcattctggagaaacaggatgtagaattcaaaggtgccaacatctcccttcttaaaaataacattgaaacgggtaactgtacctgttaaatctcctggttggcaacttttaaaatctggcttccacctaactccacaaatttgacaaagttatttttgtttgtgtaagtgatactggttatccacttccagtacatgtaccatttggccagaggtccataaataatattaacattttcaatgtagaaatcttgaagttctaaagggaaatattgctcagtagataaattctcctggaatttcttgtagcaaaggttcctcaaatttaaatcgtttggaaatggccttttgctccattttctctttttcagactgtctgcattgtcctagagtatatgaagtaactacaattaactcttcggttacaatggattcctcggtttctgatttgtcggtatccgaattaatttcaggcacagaatgaccttcttggagggcatttgcttcttctagtgccttttccatcctgaaagaaggctcttgaatactgctctgtgtcaaccaggggtgctttagacattcttcagcagtggctcgatcttcaggtttcttaactaaaagtgttaatattatttatggacctctggccaaatggtacatgtactggaagtggataaccagtatcacttacacaaacaaaaataactttgtcaaatttgtggagttaggtggaagccagattttaaaagttgccaaccaggatatttaacaggtacagttacccgtttcaatgttatttttaagaagggagatgttggcacctttgaattctacatcctgtttctccagaatgagaatttgtgtacaaagatatttgtattcactttctttaaaaaatccaagtaaaagtgccaaaactac

SEQ ID NO: 122197 - DNA, 1095 bp, Homo Sapiens
atactgctctgtgtcaaccaggggtgctttagacattcttcagcagtggctcgatcttcaggtttcttaactaaaagtgtcctgatgaaatcaacagccgactcagacaaaacatcaaattcttcctcagaataacttaaattcatctgtgagatgtttaagaatgtttcttgtttatcattgcctaagaaaggtgatattcctgtaagcatgacatatgttaacactccaatgctccacatatctgttgccatgcttataggatcataactaagaatttcaggagccacatattcaggggtacccataatttctcggagctcttcactgttcttcaatattcttgaaaggccaaaatcaacaatcttaatgtcacccaatggagattcacttgtcaacagaatattctgaggcttcaaatcaagatgaactacatcacgagtgtgtaaaaagtgaacaccttctaaaatctgtcgcataagtctttgaacatctttttctttaaaggcttcttctctgtctgcaacacactggtcaaagatttcacccccagcagcatattccagaactaagatcatttctgatgcagtctcataaacttcatgtaaattaatgacccaaggattgtcttgtgctagttcaagtacagcaatctcatgaattatttccatccgacaatcttggccttttcttctttttctcatgaactttgcagcaaattctttcccagaatctttctttatacattttctcaccactgcaaatttccccctgcccagctcccggcccgggcacaggctgtagccgttctggaagggctcggtgcgcaccacggggtgtatctttgtcagcagcctgcgggcttggggcggcggcggcggccggcacggcccgctcagaccccggcctgcccggcccgagcctgaggtggcgcctggggaggagccgccgctgcctggcttctccaaagggatcatggtgttcaggcccgcttctttcctggccgcttgttcgctccgagcagccggagggtcacggacccgcccccggctcctagtgccggtccgcggagccttcaaacacccgctctcccca

SEQ ID NO: 122198 - DNA, 1168 bp, Homo Sapiens
  misc_feature (1117)..(1117): n is a, c, g, or t
tttttactttcattagtgctcatttattatttatgtagaaaagtttaaaatgctcccaatgagttcatcagttatcaagctcacatgagttaggcccactctcctttggtttttcatctcataataagtcagcaaaagttgacatttatcttactagacatttcccattagccctaactgaaacagatatcaaacaccctagattctcttcagtgcaaagtatctggagtcacagcaattttagagacaagctagtgcaatctagtaattttcatagtcgcagaaactgaggcctagaagtgatttgtacatgtgagcagctagaaccaggacaagaactccagaacctgggaccacgtgagagtaaaaagaaagggcaccgagtacaggaacaacaactgacacatttcaggtggaaaaaacaagtcacataactgaaaaccaaaatcacagttacataactattttatattagcttcctacatataaagtataaaaactcagctatacatgttatgaaattgtacaaacttacacttgtttatggcctaaaatttgtataaggacacacttatacagatttcataaacaatggccatttttagaaaaagttatatttgtccctgaacataatattcataatttgctttcaaaacaaactcgaagtaaggattggactttaagcttccaagctgatccgcttgtagcaggtctttcacctccggtaagtactcactgagctgaatgccatcttttaaaagtttctgtaagatcttcacaaatatactgtctttagatacttcaattggatcatctttgccatcagaactggaccagttatctctctgaagagctttgcaaaggatttccagttttagatcatttatatttatatcttcttcctcatcaatatattccaacaagtccaaagctttcttgaaatcatattcattagctcttctattttcttcacagatatatagaccaatgagttgtggtgcagtcaatactggcatcgcactgagatttagctgtttctccgccagcagctgttcaggtagggtctcctgatgcagtagaaagcgctcctgctcagccatttcttcaattttttccntgtagcatatcctctgaaaagtctgaagctaatgcagcaatttactcaagc

SEQ ID NO: 122199 - DNA, 820 bp, Homo Sapiens
  misc_feature (266)..(275): n is a, c, g, or t
tcttctttttatttagaaatgtaaacatttatttaaaagtaggtagcaagttaaaaatgaatacttgcctgaaatcataaaacataatcaagttctttttaaaacagttaatttttttcctataatttactttcatcgaaagtatattatctttgtttaacatgctagatagaagcaatttagcaacataaaatatattagctatagtatgttcaaaagaatgagaaatataaattcagagatgagaccatcattttttgcagttnnnnnnnnnntgctgattctggtgcaacatacactgattatccaggttttacattttagggctgaaaccctgaggaacctgctggtgactgtttagcactgagcagagttcagtgtgcatgcgcttccagagttaaaagctaaagcagactgagaaacaaaaaaaccaacatctttgcatttctgagtttttacttgtaatcataggttttcccaaattattagaatgtctataccttagctgttttactagaagaatgatttatgctagtatagtcacttgtttagaagtcggaaaaagatcattttttctttttagaaattactaagctctgttggtactacagctgatccttcttcagttccggaggcttcttctggtgtctgtagctcttgacagtggtacttcactttaagaggtttgccagggtaccagaccaagtgaatgcgacagggaattatttcctgtgttgataattcatgaagtagaacagtataatcaaaatcaattgtatcatcattagttttccactgcctcacactagtgagcggccgc

SEQ ID NO: 122200 - DNA, 1493 bp, Homo Sapiens
  misc_feature (64)..(129): n is a, c, g, or t
  misc_feature (572)..(687): n is a, c, g, or t
  misc_feature (949)..(959): n is a, c, g, or t
  misc_feature (1320)..(1320): n is a, c, g, or t
gtaaagatagggtctttctatgttgcccaggctcgtcttgagctcctggcctcaatcgatcttnnnnnnnnnnnnnnnnnnnnnnnnnnnnnnnnnnnnnnnnnnnnnnnnnnnnnnnnnnnnnnnnnntgtgttaattacacatagtcttcatatgccagaatataagagcaagtgttatctactttttagatgggaattgcagaagctgcatcaaaagtatgctttgaggtatatatagtgaaacagagcctttctgaagagaattatatcaaactaattacaaccaagaaataatagtatgaagcggatgctgtttggaggacaggaaaatttttcaggaaaattacataatccctctgattccactatccagagatagccattattattaatatttggtatgtacatccttatattatttttttcttatgcatgattttgtatatatggttatttttctttccataaaaatggtattaaactgtatatactgttttgtagcctacatatttcatatagaagtatattgttaacattttccatgtcaataaatattcttctatggcttnnnnnnnnnnnnnnnnnnnnnnnnnnnnnnnnnnnnnnnnnnnnnnnnnnnnnnnnnnnnnnnnnnnnnnnnnnnnnnnnnnnnnnnnnnnnnnnnnnnnnnnnnnnnnnnnnnnntaaccgggcggccaccatcgccccccaaaaaaagtcccaaaacctctccctttcggggcgcggcgcccccaaaaccgacgagagaacttctccttaccttcccctcctaaccggccgcccccggcacacacatctcacgtcgggttctctccttccacaaaaacaaaacccgcctcggcgggcccccccgacttcccctttccatccaactacctcaaatcggagcgtccccacggttatccctcactgcggggctctgttnnnnnnnnnnnggcgatgcctcagggcggcggcgatcgcaaatgcaaaaatttctccccaccgcccccccgtttgtaactcccttgttgcaaaaaacgcggggggggtgcgaagcaaatcgcggtaaaaaatagctgattgtcgcgggggtaactggtgcacaccaccccatggtccccgccgggagggcatccatgcaagaagccacccccccgactttgtccgccccggcgcacgcgactgtcaggagagcggaccttcccgcccctctgcttgacgagagagatatacatcttcttgccgcccgcgtgagaccaacaacaaccgcgcgagccccaaacaacaacgagtgccgtttcccttcgtattggntgcatccgccgctatttagaatctatcacgacctagcgggcgcgacgatcccccctcgccaaattaggtgcgcgtcgcgtacgatattaccaaccatagacccttattgtctccccgattatagcccgcctcctctttatcgcggataacaagagtgcgcacattgcgccctc

SEQ ID NO: 122201 - DNA, 785 bp, Homo Sapiens
  misc_feature (97)..(105): n is a, c, g, or t
  misc_feature (119)..(189): n is a, c, g, or t
  misc_feature (236)..(252): n is a, c, g, or t
aaaatttttgtcttgattaggagatttttcagttctccatataataattttctacaatcagatctatgctgtggcatattttgctttatttaaaaannnnnnnnnagagatgagttctnnnnnnnnnnnnnnnnnnnnnnnnnnnnnnnnnnnnnnnnnnnnnnnnnnnnnnnnnnnnnnnnnnnnnnnaagtagctgggattacagacaggcatgtgctattacacctggctaannnnnnnnnnnnnnnnngtaaagatagggtctttctatgttgcccaggctcgtcttgagctcctggcctcaatcgatcttcctgccaaggttttggaattacaggtgtgagccaccatgcctggcctgctttgacatattttatagtgtgttaattacaaatagtcttcatatgccagaatataagagcaagtgttatctactttttagatgggaattgcagaagctgcatcacaagtatgctttgaggtatatatagtgaaacagagcctttctgaagagaattatatcacactaattacacccaagaaataatagtatgaagcggatgctgtttggcggacaggaaaatttacaggaaattacattatcctctgattcactatccagagatagcattattataatatttggacgtacaccttacatacttttttcttagcactcgtgcgaaatcttggctcgaggccaatttccatagggagtcgattaatcgtatcagtcaaactgttctgggggattgtatcggccaattcacacacatagaccgg

SEQ ID NO: 122202 - DNA, 1079 bp, Homo Sapiens
tttagagaaagtaaggaagtaacccattacatgtatgtttgtaaattttacttaggccatcattttttattttcacctttgaatttcaaagtaaattagagatatgtaaataacagaattatcaacattaaaatcttattcacaatggctaacaagaacaggatgacagtcaagtcagtagctttttaataaaatgagcagaatcccatcgtaacagttctttgttacatgaattcaaatacacagcagaccaatcatgttccctgaaatttaacaatcaatcatacttaataaaggcctgttagtgctgtccctcaagactctaattctaaagggcttcctttgaattccctttataaagctttgtgcaaagaagagcttaagcaccagtaagaaagactgtcgctagcatttttatttcatcatcaacaacaaacatgcagtttctttctctgatgtgcatggcactgtaaaatgggtgctacactctctcttgtggtacaaagtttataaatacagtatactgatacaaagttgaagccattaaaaagagcttaataacaactatgaggagataattaaatctggagtgttgatggaatctatgaagagatttagaaacaagacataaacactacggtaaaagttttacttgggaaggggccagaggggaactttttatgtgctactgaaagattttttaagttgctccagatttactttctttctgctattatctttaaatactgcaaagcattgtgagctgcatcactttgtgcattgccacaggagataccggagccatgacagactgtgatgggggctggtggacagttcagcaagagcattgattattgtcccattggcgctcagttcatctattatccaaatatgttatattcaaaaccttgtccccttgggcaattacactaaagcggcttggatgttatctggttctggactactaggaggctctcttccagtagagttggtcttctccccggaagcattcctcccggatgccagtacatcctaagaagtctaccaccattgttaagaacgtgttccggaaacactca

SEQ ID NO: 122203 - DNA, 2602 bp, Homo Sapiens
  misc_feature (609)..(639): n is a, c, g, or t
  misc_feature (1424)..(1451): n is a, c, g, or t
  misc_feature (2126)..(2141): n is a, c, g, or t
catacctggaccttcttgtggaggggaaggtagagtgaaagaaagagggcccactttctaacagggtggagcaaatgagaccaagaaatcattggtaagatgatggttagtctgaccagtttcatgttagtaaattcacttgttcttgggaagcagattaagtagcagaaagtccaggaaagaaagaccagaaggagtaatgagacaagtgatggtggggaagctgaatgttgagggaggtggaggaaggaggagatgagcagtgtcagtaaatactgtgcagttcagtagaagttgaagaatcattgttagaagcatttccaaacgaaacactaagccaaatgggaattaggcttattttgaatgcatctttaacttacgaaagatgtactaattgtgggggtgcctgagtcaggcggagctgacccaggggtgggaacgatggcagctgcccaggacccatgtgcttggcccaggctatgtcctcgtgagaggtactggggtccacggatatgtgttgtggggcagacagtcactgtgggatgtcttcaaagtcagcagttacagaattagtttactttgaattttgttgtctaaatagctcctgcnnnnnnnnnnnnnnnnnnnnnnnnnnnnnnnctatcacaggctggcctaactaatacaaaataggtgatgaacctctggttttaccataatgcaatgtgccacggaaagtttgggggaggtttttaatgtaattgcactctggttaattggctcgtaccaagccctgccttatgacttgtggaaagcttcaaggagttccactgatgcaaaagggtcttttcctagcttcctggtctgatcagtgctatgagatggacagataagtgtgaatgttttatacagaaaatggaaatgatacatttctcttgttaggtgttttcataaaatgtagcattttttttcttatggaaataagagtttcaggtgtctccccacctagggcaaattcatgcacattgtcatgttataccaccattctggaaatgatttctgtggatttgaaattgcacttttaattttatatatgacagcatttaaatgcaaacactaccatgaatttaatgtataaaatgttgtcaaaccaagggaaaaaaccacagttcaccatgtggagtttactttttttatatgaatgtttgttgtactgtgtctaagcataacttccctaatgtcattacttttacataccagatttgactgaccactaatgtagtactggggataacttaatatcctatgttgtgtcaagactctttgaagactttcttgaattgctttcgtaaaggtctgaacactgttaaggagaaagctgagtatcaacttgcctttctgatagaaatgtttcttgtgccagttttattgttgagatatactannnnnnnnnnnnnnnnnnnnnnnnnnnnaaaaaaacaaatgtattgtggcttccagttaccaggttgtctaggtaatgacagtaaactgactgtagaatgataattgtggtatagtgaccaatagatgccaaacagcttgtggcctcactaaaggtggggtcgcttagtccccgggagtaaaatgagtgacctcagaaacaagaattcctggaaaggcacatgccgaagaggaatatggtataattttaaattttaatgccaaattttaatttgtctttattttttatcatttgaactgataagcactttttgtgtcaatataaaatatactaaaactgatgaaatgctaagacatgtcttgtgaaggaaggtttcttggagaccacttttatttactcatgagaagtggaagctcctagtatcagaagaagctgatacatagtgtcatgtgctcagtggttgccaaagtctaccaactttggggagctgcagggttctttttgggaggtgggaggaagggagatgagttttgttattttggggttttcaagcattggaaccaaaggccaaataataaacagcctttagtttttaaagtaaaattcattttatttgcagagtacacttgtatggtagactgttaaagacaattttatgactatttatgcacattataatggttacatctgctttttgtctttnnnnnnnnnnnnnnnntcagagaaaagcccacctttgaatacgtggctgaagataacagccaagaattggtctttcctaaaaatgcaacagataatgctgctagattgttattttgtttgcacttttttttgattggcattttaaaatcggtatttaaactgaagacattgtcatgttttattaatttaacaaagttgaaagtgactgctctgtacatcatgaccttaacaatgttaatgctgtaagtgaaagttcactgtcgtctgtatactaaatttattggtgtttctaacttaaaagtaagactgcagattatcccccaccagccttagtccaggggtgtggctctgtccgggtgcagtatgcagtcatgtggaaccttgctttctagtcctgggaaaaaaagatgtctctaattactggcttcaataaacacgaatccagactgcttaaaaaaacctcgtgccgaattcttg

SEQ ID NO: 122204 - DNA, 1978 bp, Homo Sapiens
  misc_feature (50)..(317): n is a, c, g, or t
acctgtgatcccagctactcaggaggctcaggcacatgatcgcttgaacnnnnnnnnnnnnnnnnnnnnnnnnnnnnnnnnnnnnnnnnnnnnnnnnnnnnnnnnnnnnnnnnnnnnnnnnnnnnnnnnnnnnnnnnnnnnnnnnnnnnnnnnnnnnnnnnnnnnnnnnnnnnnnnnnnnnnnnnnnnnnnnnnnnnnnnnnnnnnnnnnnnnnnnnnnnnnnnnnnnnnnnnnnnnnnnnnnnnnnnnnnnnnnnnnnnnnnnnnnnnnnnnnnnnnnnnnnnnnnnnnnnnnnnnnnnnnnnnnnnnnnnnnnnnatccttaaaattgcctgagttcttagaacacagaaaaaacaaatttgaatgcatttctaacagcttaataatttatatgtcccattatgattttagcggaatgttttaaagcaaagcataattcactgcaaagataaacctgaaaaagcaaacaaacttacaaatggtatgttatgacctagacaaaactgattatcaactagtaatactcataattagcacatgcaacagattgagaaattaaatcctgtgctatatactcttaagtattttgtcagatatatctttaaatgttctatcaattgcattcctttccacacatattttaaacaagaaaacaattgtctttcctccagattctcatgtttatcagtgcaaaacgttgcaatctcagtaaaaatggtttattacaatgttattttagaaaggcttagtcctcaaactgttgaaaatgtacttaaaagatgtccaaatcatgagaatgatcaacttcaatggcttcctctgcctccaacttggcttctgcatgtccttcctgtgactcatcaagagaggccaaggcctcattcgtgtcacttgcaaaagtttctcgtgatgtatcatcatcttcttgaaaatttagacttttaatagcttgtttcatctttttccccaacacttgtgttctcctcttcctagcagcttttttattttcatattccttttggttttcaatgtagaaaatgtccttaatttgttcctcgctgatactaggagtgtttttcaagagattcagaaaaactccacctggtgttcttcttcgactaccattcattataaagagaccaccattttgttcaacttcagcggtttccatcagaagttcaattgcctttttgttaccaataatcctcactactcgggctatcaggtctttctttggttcctgtaacctgaatgaaatttcatcagccactttctcttgagaatcttccgctgtgatctcgtatcgacctttatagttcatttctggtctgttccctagcctgtctttgacaggtcgtttccttttgagatgaccttgcccattttcctcttcctttgatcccatttttttgccaccatgcatatattcatctagttccttgtctagatcttttgtatgctcttgagattccttcctaagtttcttggcaagcaaataattgtaggtctcggattgtctgcttctgtcaatagtgccctccattcccaagataccaagttcagtggccactgcatcttgattctgttcctgcagcacagcaccccatatgttgttaatcttctttcctccagcaacaggtggtttctgactgctctggccaaactgaaaaggctctggtttgggaggagggttaaaacatttctgtcgtttgcgtttccaaagacagctatcatcatctgaatcagaaaaactttcttcacttgaatccacactttcaacagctcgataatgtgatactggtgcacatgcagttgccgtgttctggaaggccctcatagcactgtcgccacctagcacttttggcaattgcagcggcctgtcgctgggtgcgaccgtcatgtcggaatccgagtcggaaagctgcccatcttccatatcgccgacctccaacgccatcttcccgcggtgcgctccc

SEQ ID NO: 122205 - DNA, 1203 bp, Homo Sapiens
ttatccattatgatttattctctacaatacttcgttaaagtgttcaatgatttgcactcagaagttatatagccaagaggcaaccaagtgtaatacaaagaattggtctgaagtctttgcactgaaggccatatagtctcttgcttcagggaagtaagaacgaaatgaacaaaaagaacacatagctccctaggctccagaatctcaatagaaaataacgtcaacagttagtgaaattgtagatgtcaacacatcatggaaaacagatcttgtgcaaaatattaacacccaggacttcttttgtatagatgatttttattataaacaataaaatatatgtaatgtctcaactacaaacctttcatgttgaaagggtctctaacatgagttgttttattattatgaagcaaaaaagttttaagaatctcacagtggaaataatccaacaccgacagactctagtgatcaaagacattctcttttaatgtaaaacaaggacaattcataattacagagagaatgtcctagctgtgggtattatgagacaagccaactttccagaccaaaaggcactcacagctagggatgaaacgaactccgaaccaagccagagaaattgggctggtccttgaaaacagtggttacctactgtccagctcgagcagcccaaggacaaaggaaacactcagcagaaaacattcccttttctttaaacctaccacgcacaccgcaggtactggccgccctcatcactgctttggtcaagcgtgcagagaaggcagttcagttccagttcggagctatcctctccctatgcaaagctgccacatggatgatccagacttggtatttttcctgagagccacctgctacacactttcatgaggcgaccgtgaccgtacacttctagaccgcttcctgactaggccccgttcaggacggatactgacaatgcccattcctcacggggccaaatggtttcccttggtcgactcctgagtcccctgacaaagcaagaggaacccaagcatttccattgctggacttgtgtgggagcatgagggaatgtgcagggagtaaggcttcttcactccaaaaaccactgagcccacttcagtgtggtgctgggcctaaccagcccaattcttgtgcactgattttttttcccccatttctcgggttttaaaattttctattcatttt

SEQ ID NO: 122206 - DNA, 1134 bp, Homo Sapiens
  misc_feature (1021)..(1055): n is a, c, g, or t
  misc_feature (1080)..(1080): n is a, c, g, or t
  misc_feature (1099)..(1099): n is a, c, g, or t
aaaattctaataaaataaatattttattaacgaaagtctggaaaatgtgtgcactaaaaagtgactataaatgttaaattaaaaaaccttcaaagaacacatatcacacattcaatttttaaaactttatataaaagctctattataaatacaaagctaaactatctgagtactaacaacacagttcatacaaagaaacttaacagtagtaaaatacagatatataagatgcttatttttggtcctttaggataaaagaactaagttggtttttttcacatggctccaggcacaaaaatagaatataagatggtaactgcaacattcttagtgtttatccttgtaattctttaaatgtcaccagtcataatagcaatgaactcctcttggtttatttctccatcaccatctttgtcaaattcttctatcatagctcgaagttcttcatcactcatgttttcacccaattctctagcaacacgtcgcaaattcctcaagcttattttacctgaatcatcatcatcaaatagtttaaatgccttgagtatttcttcatggggatctctttccaatatccagtctgtcacaacttcattaaaatcttcaaaggtgattttccctgtggcttctctgtcataatctttaagaatcttcagtacatcagctttttttacatcaaaccccaaggctctcattgccacctttaattcatgataatctattgcttcatctttgtctgtatcaaatagttcaaaagcatctttaatttcttgtttctgttcctcagacagttctcttctttttttcctctttgttttgtccactacaagctcacttctcagagctaaactcattatctcttcgcacagagacgttcctctcaagaacgattttaaccccctacccaaggcagcaagacgcccacagccgttcaacagacacgaacgacctcagcggcctcagggacctccccggccgtaatggccgaattcccgggcatatgtccggtaccgtcgactgnnnnnnnnnnnnnnnnnnnnnnnnnnnnnnnnnnncggccgcttcctcgctcactactcngctgcgctcgtcgttcgtncggacagtagcgccctatagtgagtctatacactt

SEQ ID NO: 122207 - DNA, 850 bp, Homo Sapiens
  misc_feature (273)..(273): n is a, c, g, or t
  misc_feature (298)..(298): n is a, c, g, or t
agctccggctttggggactccccccggtggagtaagaatccccgcgttaaatgggccctccaagaaacccccccctcctggaatttggttccaagaaccgcctccgggtttccccgcccgggccggtttttttatttggtgaggaattcccaaagcctttaggtcctggcccagggttctccctaggaaaacagcttatggcccatgttccatttcccttactggggcccgcggcgccaaaacgaaaggtcttagaaaagccttctcgagggnccgaaggcggcccgacatgttttgngtgtgggtggttttggggtgttttttagggatggagcaatcctttatttttacacactttgacaaggaggtttgtcgtaaacaacctttccagtggagaacagagaacaggaaaatcagcctccagacatcagcagctgctctgttcagggccgaggctcccccttgccaatgtggtgaggtggaggggtgtactttccttcctttatcagcttatcccgctgcttcctgatggtacctgcacgtctcatcgttttctgccgaagcaaacactctacgaaatcatcatattctatcttgcactctttctctgcccgagtataaccgattccatgtgcacattctatccattctttttcaaaagcatggcatcgaccagccatcttgtagggctgttcaccactctggattgtcaaccatcgatctatgttaaggccgaaccttttctggatgtccaagaaaggcatggccgatgctcgtgcccttgactcttctctggccgccgcttcagaacgactagctagcgacgcggacgcctgccgtaaaggatccc

SEQ ID NO: 122208 - DNA, 1211 bp, Homo Sapiens
  misc_feature (87)..(151): n is a, c, g, or t
  misc_feature (536)..(555): n is a, c, g, or t
  misc_feature (1099)..(1123): n is a, c, g, or t
gaatttccatgtgcatttatttgtttattgactcttttcccaggaggtcagctccaccaggataggtctttgttggttctttcaccnnnnnnnnnnnnnnnnnnnnnnnnnnnnnnnnnnnnnnnnnnnnnnnnnnnnnnnnnnnnnnnnngtcacaaatagggatcagccatcattactttatcatcatgatcaacaggaaagaccactgtcctcacccaatcccctccaaaaggctttggagcagatgtcaacattaattcactgtctcaggtgacagctctcatcctgaggccagggttggggggagctgggaatggggcgaggagtggggcctcacgtcccaggctccttgataaccccccaccccacccagccaggaaacaccacgaggcagccaaggttaagtagactcttgctgctttgttataaatatattatgtacatccaaaacatgacattaaaatattactccgtgttacagaaaagatattaaggctttctattatttacattaaacaagcaagcacctttannnnnnnnnnnnnnnnnnnngccctactcttccttctctgacatactctggccagaggggataccgtgtcctcttccaaatgaccaagatgctctgcaggggctgtgccctgtgaagacatcttggtattggaaacatcagctctggcagggtgggggcagcagagaagtaggggtctagacttgagcaggaggttccagcctcttctggccggctaccctcagacccctgctgagcttcaccatccttgggggacaggctaggctgaaggtggtggctggggctgtccacctgcccagcctcccggggtcagtatgcagggctgtggcagaacaatgctccacgacgcttaggtgtgcctgggggctccccagaccactggggccagacaaggagggaaagaggcaactcactggccccaacgccagccacactgaagggctgcccagcggggcagggacggcaggcgtgcagggagtgggtaaacctcctctctaccaggggaggctggcagagtcaggcttgcagatagagcaactcaggtggctgaggaggggccgaggnnnnnnnnnnnnnnnnnnnnnnnnntcagtggctcaagtattctgtgtcatgaggggtgggctggggtacctgggcccagcccaggagatgtcctctccatctggaggggcca

SEQ ID NO: 122209 - DNA, 1621 bp, Homo Sapiens
  misc_feature (530)..(543): n is a, c, g, or t
ggccagaggggatacccggtcctcttccaaatggcccagatgctctcaaggggctgtgccctgtgaagacatcttggtattggaaacatcagctctggcagggtgggggcaacagagaaataggggtctagacttgagcaggaggttccagcctcttctggccggctaccctcaagacccctgctgagcttcacccattccttgggggacaggctaggctgaaggtggtggctggggctgttccacctgcccagcctttccgggggtcagtatgcagggctgtggcagaacaatgctccacgacgcttaggtgtgcctgggggctccccagaccacctggggccagacaaggagggaaagaggcaactcactggccccaacgccagccacactgaaagggctgcccaagcggggcagggacggcaggcgtgcagggaagtgggtaaacctcctctctaccacaggggaggctggcaagagtcaaggcttgcagatagagccactcaaggtggctgaggaggggccgaggnnnnnnnnnnnnnngaagaaatgaaaaatcagtggctcaagtattctgtgtcatgaggggtgggctggggtacctgggcccagcccaggagatgtcctctccatctggaggggccagctcaaagaggctggaatttggcagatggcttcggtttgggggctagggaaggttggcaaccaggtagcaggctcggagaagttatttgatcttctgggcccatttcatgtcatctgcccgaggcttctcgcccgtcaggccttggatgaggtcctccaggcgttcgccagaagccttatcttctccagagggtagttgagccagcctgtggtgatgcagaagtagtcttcgtggggtgagacgtggtggatgcgatggtgtttacgtggcaggatgacatgccagtcctgcaggagggtgacccagcgtggcagcccaaagtacgtgtgcgaccacttgtggatctggttggtgaaggtgccgaagatgatcaggcagaagacgaagcactcccaggggtatagctgctccagggcttcagggctgtgggtgcggaacttgtaggccatgtttagcagcggcagcagtgtcaccaggcagttgtccccgttggtctcgatgaagtcgtgccgtgtgatagctgtcgggtcaatgtggtgctcccggaagggtcggatgaaagccttccccacaatgggcagctccacagagccccatgtgtcagcaccccagtgtaccaggccagacaagaagtcagcaatgagagcccctgcaacaacaccgagtatgacgaggggtgtgtcctcccagcgggccagcagcaggagatggaccaggttgtgggcgatgaggctgaagcacaggatcacagagcaccactcctggaggcgcttgcctggcgagtagagcgcagccagctcgcgggccccggcgtgctgcgcgccccagcggcaacaagacgcctcgtcctcgtccagctccagctgctggcccggccagtcctcggcgcccgccatggccactcgcccgatcgccccggtgcgctctgctggcggcggcggcggcagggccgcggaaccgcggcgagatcacgcc

SEQ ID NO: 122210 - DNA, 1514 bp, Homo Sapiens
tggatattaatcccatggtgcaaggatttcctgcaaagtacctttaatgtgtttaaatcagcagcaagcattaggacatgctattttggccccataagttaggtgtgtagcactacacattagacaccaagtcatcccaaccaatatttatccatatgaacagataaactgaacaaaaacatagttctgataaaacctgcattcacaacctaatgtagtttaaagtaaattttttcacaattgagggctgctatttaggactgttttgttaataataaaaacaggaattatatagaagataaaacaccattttttactgctatataatgtcttgctatataaaacataccctcaacaagtcaaaatatttaaaaccagtgtttcaaataccaaaaatcacagctatgttactgttcagtaactccactcaaataaatgttagtactgcattcttgaaggaaaaaaactgcagccaaggcaagaactctgaagtttgcactcagagtttaaaagacagacccctactctgcaaactgaagactgccactctgcttcaataactccagcctgccacattttacttcaattggtaaagcactctgctgagaatataaaaagttataaaaaggcaatcataaaagattaaatattggtaggcatgtaagcttccttttaataaaaacaaaaatagtcaatgtcatctatttaaataagtatcctttgttatagagtgttccagttattgaaaaagggcccttaaaaaacccaactgtctacatctttaaaccctaccccttttaccccatagtacacatttgagggaagagtcatttaatgtgcaaattggcaaaacaaatgtggaggagaggggacttcttgaaatgatgtgcccaatcaattcttggtttattcttttccaaaaagtaaaataaccaaagtcttaaaagtacacaaaacagaccttcatctttgcattcctttccaaataaacccaaaaagtatgtacagcatgtttaatagtatgcaatatgcaaaagctttgtgttgctgttagcaacatctatacccacccaccctctttattcacaagtgtacctctgctaaccataattacatcactaagcctgttagtttgagagggtcttaaatttgttaaaactggaaaatctttgtataggggctccattcatttgactcaaggttatagacttccaccgtattcagaaattcattgccatcgaatcctcccactgcataaatggtgttccctacagttgcaatcccagcattgctccttggtgaagtcatatttcccatcatcttccattcatttctagttggatcatacatttccacacaactgatggcatgagaaccatcaaagccaccacatacaaacagttttccattaagaacagccactccagctcctcgcctagccacattcatgggtgcaattaaagtcccggccgtaatggccgaattcccgggcatatgtccggtaccgtcgactg

SEQ ID NO: 122211 - DNA, 1008 bp, Homo Sapiens
  misc_feature (129)..(129): n is a, c, g, or t
  misc_feature (139)..(139): n is a, c, g, or t
  misc_feature (150)..(150): n is a, c, g, or t
  misc_feature (932)..(966): n is a, c, g, or t
gggggggaaattccaaaatttcaagggttcaaacattcaatttcttggacctttgaaggtacccccattttctaaacttttccggaagggggtgcttcttaacgccttttttagatttttagggaggtngatgaaaggnccaacaattanacagaaggccccaagacccagcaggggaacttatccataaaggattgtttctcccatttaaccccatcctttctttcaaataactgtaactgtttgattgaagactgcatcttggaatacattgccggttcaaattctttgtagttcagattgatgaccaaaccaaatggtcgtccgcccatgggctctgcaggaatgaaagagtactcaaaagttgcctgtctctggggtggcactacagtgttcagaggaagagctgtgaaattctggatataaaactggtagtcctgaggataacggaatgaggcatctaaggattcaacaataaaatcttctgtacccttgttggtaaagcctaccaggaacttcacaatgttatttgctggaaaatcttctccttttacaaacagtatagttgtatctgcactcggtgaagcttcaggttcaccagacacatcttcttcctctttatcttctaccaaatctgtgggttcatcttcttctacctcggcttcatcatcttcatcctcaattatggaatcttctactgtttcttcatcctctgtaagatcttgtgccactgctaacaagcctctggggccgcctcggaacaagacagtggcagggaacacgagtaagagaagcagcagcaagcgggggaggagtctcatggcgctgccggtccagtgtccagtttccgtcggctaaggctctcggcggctccggcggtccccggccgtaatggccgaattcccgggcatatgtccggtaccgtcgactgnnnnnnnnnnnnnnnnnnnnnnnnnnnnnnnnnnncgccgcttcctcgctcaatgactcgctgcgctcgtcgttcgg

SEQ ID NO: 122212 - DNA, 1739 bp, Homo Sapiens
  misc_feature (513)..(521): n is a, c, g, or t
  misc_feature (1223)..(1223): n is a, c, g, or t
cacaaatgtactagtttctttttgttaaaaaagggggtaggattaggtttcatatattaaagtcagcagaaatttcatgtttcacaatttgttgccagagagatccccaaattccttgaagccactgggaagttttctgaagatgcgcattaaacagcagcaaaatactgaaacaattctattgctaaaaagcagctacttctgcttctgcctttagaatactaattgtaatacagtaacaacaacaaaatgctgatttgtgccatcaattgaaatttgagctattccaaaaattgttttctttaaaactgttcaaggcaggacatcaataatcatagtgggtaaatattaactgagttttgggggaaaaaaatcagaaaatgtcaaaaaggaagagacaacagcattatatttagtattctaaagacttgtttcaggtagttcaacaatgattctggtaagaccaactgctcacatacatacacacgcacacacatagattttaatggtttnnnnnnnnnccaaatttgttactttagaaaaatgaatgcagtgcattttcagcaatattatcgccacagactctgattgctcagtccacacacaagtaggagttgccttctatggtgacatggcttctctgcactaattcccatcaggccgaaaaatattagggcaggttaagtaaagaccgaattgttgcacaaaggaacatttactcatcagatcccactgatctcttctgtgcccgtttcctgggcaaccttcttggtgaagctttattgatttgattcaatgtttcctgaggaatccaactcatgtcaacatcattctgacttgatgtacccatttctactttctgtatgggtctcttacgctttctagattctaggagttgatgaaggccaacaataaccagaagcccaagaccagcaaggaacatatacataaagattgtttctccatctaacccatcctctctttcaataactgtaactgtttgattgaagactgcatcttggaatacattgccgttcaaatctttgtagttcagattgatgaccaaaccaaatggtcgtccgcccatgggctctgcaggaatgaaagagtactcaaaagttgcctgtctctggggtggcactacagtgttccagaggaagagctgtgaaattctggataataaaactggtagtcctgaggataacggaatgaggcatctaagngattcagacacatgatagaatcttgctggtacgccttcgttggtaaagacctaccaggcaactgtcacaatcgttatttgcctggaaaatactttctgcctttgacaaaacacgtatgagtgtgtatactcgcagctcggtgaagcttcacggttcaccgagacacatcttgcttcctcttttatcttgtacccaaatctgtgggttcatcttcttctacctcggcttcatcatcgtcatcctcaattatggaatcttctactgtttcttcatcctctgtaagatcttgtagccactgctaacgagcctctggggccgcctcggaacaagacagtggcagggaacacgagtaagagaagcatgcacgcaatgcgggggaggagtctcatggcgctgccggtccagtgtccagtttccgtcggctaaggctctcggcggctccgcggtaatggcgttactcttcatcccccgccgtaatggccgaattcccgggcatatgtccggtaccgtcgactg

SEQ ID NO: 122213 - DNA, 661 bp, Homo Sapiens
  misc_feature (516)..(516): n is a, c, g, or t
  misc_feature (526)..(526): n is a, c, g, or t
  misc_feature (561)..(561): n is a, c, g, or t
  misc_feature (568)..(568): n is a, c, g, or t
aaaaagataaggcataattttattacttttaactttttttcaccacaatgaaagtaactaaacacacagctttacaaaaataaatttttattaaaagcagtagagtctgagccggaagacagtccaaagaatgtaaacaatgtaaacatcactacattcagctcagcctgattgaatgctgaaagacaactctaaatgctctacgtgcccttactagcaagatacattaattctattttacacagacaacaaacacactctaattttgattaggcaaaagtattttatcgaagtcgatcccagcgccaaatactggcatcatcacaaacagctataagaatgctgctatccctgctaaaactggtttgtcgaatagcagcaccacatttatgatgagtcagtgttgtacatctagggaaaaaacatgacaacaggttaaagaccacacataacgttgtcagtgtctaccctaaaacagcggattagaaaataagcagatgttccaagtcatacganaagcacttanaaccagaatatacttcactaagagctcagtctcanattttantaaatttagatatattttaagttcaacaggcactacataatttgtataaaaacaagaaatgacttgtcaccaaggtacttaggaaaaacaaaa

SEQ ID NO: 122214 - DNA, 1450 bp, Homo Sapiens
  misc_feature (42)..(42): n is a, c, g, or t
  misc_feature (156)..(156): n is a, c, g, or t
  misc_feature (581)..(591): n is a, c, g, or t
cctgcgggcagcgcgaaaaggatgattttgttatacgtccgncaaccacatgccgtccgacaccacgcaaggggagtgctcgtgaagaaaataataccgcccgccgtgcgtgccgcgagtattttcccagcggttgtgtctcatattcctattatnccacccgcgttcttgctgaggggagacggggctcttcttcccacaacatgttgtcggcggcgcgacagagtaaaaatgcgtgtgatctagagaatggacagatttttccccacctcccacgcagttgttttgttagtgccgcgaaagtgagcatgttgcccgccccacggtgcagcgcgcggggtagccccgtaacacaattgtcgagaaatatgatccgggggcagctctctcgcgctctctatgcgtacgactcatccccgcggttgtcgggacaaagcgataattccccacagcgctacataatggggtgccccctctctcagagagaagacgtcctcaccgactctggcgggggagagtatattgtgtgtatctcacagagagaacacgccgcttcggcagtgtgtggtcgctcgcccccnnnnnnnnnnntttgtttttattatctcgggggtgagaagaatatccgcaagggcccgcttatagtccatcggcacccacgggggttttccctttagggagaaaccaaggcttatggggacccaggggttcccctgttgccctatcggagggcccccgccgcgcgcccaaaaccgaaatgttctttagaaaagttttttttgaggggccgagaggccgaccccacagggtttatgcatttgtgcgcgcgggccattgcgtcttgttccaggcgcgcagctttttcggcgggcgtcggggcgggggcagcaaaaataaatttttattaaaagcagtagagtctgagcaggaagacagtacaaagaatgtaaacaatgtaaacatcactacattcagctcagcctgattgaatgctgaaagacaactctaaatgctctacgtgcccttactagcaagatacattaattctattttacacagacaacaaacacactctaattttgattaggcaaaagtattttatcgaagtcgatcccagcgccaaatactggcatcatcacaaacagctataagaatgctgctatccctgctaaaactggtttgtcgaatagcagcaccacatttatgatgagtcagtgttgtacatttggctttatgaggatcttctacttctaaatcccaaacataaagtttgccaacttgattgcccaatgcaagcatcttttgccagaaatccatagaaaacctcatgtaccaaatgtcacactggctgtaatcaaatcgcccaagaatagtcacattagattcactgggtttaattttatctatatcatcttccatcttgccaggtttccagcacacaatggcattt

SEQ ID NO: 122215 - DNA, 1210 bp, Homo Sapiens
  misc_feature (775)..(809): n is a, c, g, or t
  misc_feature (998)..(1006): n is a, c, g, or t
  misc_feature (1077)..(1098): n is a, c, g, or t
ttttgataaataaaaccaaacgtttatttacaccaaagaattccaacactggatctttcacatatgaaggacaaagtattatatatatacacacagcaaggggtggcggggctgtaacaagagagtttatagttttcccacaattacaggtctaccatttcagcttcaatggagatagtggctctgctcctacctctcaagatacatttacaagactgaggagcaggtcttctcactggatggcatgtgagggaaggggacggtcggaggaaaagaaggtagaaagcttaaaatggaagtcagtgtggccacatctcccattagctctagcatgaaacctgtacagacaatgtttgtttcttttgtaaaaagcagtaagttatgcccagtaactaaatgaattcaaaatggccaagacaaagaaaactaagaaagattttgccttccctctcctaccagctatggagcacagcatgttgggagatgaacagggaaaagaccaaggtaaggagcctgggagggaaggtatcaacattttaaactgaactaaaaataaaagtataaatgagttggatttagggttagatcagtaagacatgattcttactgaacagaagtttttagtatctgtctgcattttgggtagattttcaacatctcgatgtaactaagacacacttccacaagagccactaggataaccccactgaagcgcttatggagtaaagtgatgtaagcgaccagcaagcagtccactgctcctatagattgggtnnnnnnnnnnnnnnnnnnnnnnnnnnnnnnnnnnngcctcccctgagaagctacatttttgtaatctctggagaagagcacgagataccaaccccctaaagtgtgggacggtggaggaacaatggtgggaatgggaagaagtctccacctaaatgcagcagccgggattgaggctggtttatctttgttcttttgtgatgaggaactaaatttgggaggggagnnnnnnnnntttgtccatgaaatattccacctgcaggtaatttttcagggaatcccctgagttatgaaaagttcgagttnnnnnnnnnnnnnnnnnnnnnntcagcctattataattttttttatgactgaactactataaatccacaagcaacggttcagaccccggccgtaatggccgaattcccgggcatatgtccggtaccgtcgactg

SEQ ID NO: 122216 - DNA, 445 bp, Homo Sapiens
taactcgaacttttcataactcaggggattccctgaaaaattacctgcaggtggaatatttcatggacaaatttttggttctcccctcccaaatttagttcctcatcacaaaagaacaaagataaaccagcctcaatcccggctgctgcatttaggtggagacttcttcccattcccaccattgttcctccaccgtcccacactttagggggttggtatctcgtgctcttctccagagattacaaaaatgtagcttctcatgggatgcaggaagaaagggaggaaggaaagaaggaagggaggacccaatctataggagcagtggactgcttgctggtcgcttacatcactttactccataatcgctttcatggggttattctactggtctcttgtggaagtgtgtcttagttacattaagatgttgaaaatctacccaaaatgc

SEQ ID NO: 122217 - DNA, 549 bp, Homo Sapiens
tgctgcctctctccctggacccatgcatcgtctacctggggggatctgcatgggtcccaaatgaagggggcagagagagtcgggtcagctctcttgcccagtctaggggccgtgcctgagcgaggccctgcagggtagaggatgaggcagcttccctctccttttcagatgaagacttccggggcaggcgtcaggaggcacccaaggtggaggaaggcctgcgagaaggacagtaagagatgccagcagctcttccttgccagagatgatctgacccggtgggggcagctggaaagcaacactggcccccagctgaagggcccagctgcagccagacagatggtgcttgagaaccgaggcccggtgatcctccagccacagtccagcccaaccactgccactttccatgggacttagaacttcggagttgctgccttgcaattggaggaaggacctggggcccctataggcagcagccaattacagccccttttgtagccaggcgttcctatggtcaaagagtggaaatgcaggaaccaacctcccttt

SEQ ID NO: 122218 - DNA, 1356 bp, Homo Sapiens
  misc_feature (61)..(78): n is a, c, g, or t
  misc_feature (522)..(522): n is a, c, g, or t
  misc_feature (564)..(564): n is a, c, g, or t
gtgccaagctaaaattaaccctcaactaaagggaataagcttgcggccgcatacgcggtcnnnnnnnnnnnnnnnnnnacagggaggttggttcctgcatttccactctttgaccataggaacgcctggctacaaaaggggctgtaattggctgctgcctatggggccccaggtccttcctccaattgcaaggcagcaactccgaagttctaagtcccatggaaagtggcagtggttgggctggactgtggctggaggatcaccgggcctcggttctcaagcaccatctgtctggctgcagctgggcccttcagctgggggccagtgttgctttccagctgcccccaccgggtcagatcatctctggcaaggaagagctgctggcatctcttactgtccttctcgcaggccttcctccaccttgggtgcctcctgacgcctgccccggaagtcttcatcacacgcgtggccctccacatcatccatgaggttggctgttgacggcggcagccccccagcganctgatgcttcaacaagtgtttcctctttgacttccctcattnttggtcttctctgagaaaggctcgggcaagttcaaccagtttcctccggggtggactttcccatgtgtttcagcttgtccctgaataaggcatcttcagacacagcggggttggcgtcgccagttcctgggacaggagaggaaaagccaaagtcgtttctgacagccacgctgctggattttagatttctgggattcgtatttcagtcgatctctctccagagcgaggaggaagtcgcggttccgttgcagttccttcatgaactcctcgttctgcaggaaaagcgcgatcctctcgtcctccaggtactgcttccagcggctctcctggtctccgggccctggcccagccatggcaggtggacatccctctccactcccaggcttggggcccccagcgttaccctgtatgctgtccagctgctggggcaggatgcggagaaagtcatccggaaggttgcccagcagtggtgggttccagttccgatagtgtctctggcttgtaggggctccagagcccagcgcgtcgatacggggaggcggagtcgggggagccagagggtagggccggtcgaacacgtgcatgtggtaggctggcggggagtacacaggtgggggctcttcatccgagctatcaggttccaaagtcctttccaagatctccggggggatgctgtcctccgagtcggagctgtcctcatagacgccgccgctgctgccaccgccctccaggttcatctgcagcagctggtcgatggtggcgtccacagcgccgctgttggcgcgcagcacg

SEQ ID NO: 122219 - DNA, 2172 bp, Homo Sapiens
ctaaatataattttatgtttccggggggcgtagtaatatgtgtggggcggttcttacagattgcaagagatggctcgcccgatatttagagcggaggctcatcattcggtgtagttacccagttacggaatggcccggtttgtcgcaatgtcagaccccttgccttcgtattctggaccgcaacctgtgcttaaaattgggggttctcccccgcccctatgtcgcaaccgcctgcaatattgcccagaagttggagttaaaaccttcatcagtaggaaaccggatagtgtattcgcaataatccgaacttcattcttctaaccacagcttacaaatagatatacaaacaaatgtgggtataaattccatatactgaatatttgagagatacttaacagttgtatttcccagatgcttcaaataagaaatgtgcttcaatttcaatggctttgcttatttaaatataggacatttctgaaatcaaatttcttcatgtgaagcaagtcatgtttgaatctctctctttttggaaacaatacagaaatttcattcataaaaaattcaagttttttttaaacaaatgtatgtaaatgtattcattacatacattttaacaaatgtacgtaaatgtattcatttacatacattcatggcataaaatatactataatgtatataattaaaaaatgtacacttcaaccaatcctaagacacaaaaattttattgacagaaatcaacgtatttatggaaagagaatataaaaggtatctgattcgaataatggtgcccatttagcactcattacaattattttattcaagacctgattctgtctcccaaactataaagtgaatcattattaatttgcagtataaagaaaaacacacaaaaacctggactattattaaatcattaaactgagagagaaactgaagttgacagagaagctcagactggaattaactgataccatactactcactattttacatttccttcctatattatttccgaagcaaaatatactcatcatattcaaataaaaatgccatagtgtatttgattgtatatggctattttcttaattttattcatgtaattaccaaagctctgtattctactaaggtacacatcttatcttgtatccatggacgctccttgatacattatggtatcatccagcaagtaaaaactaagcaggacaggcaagaaagcaacactatgacagtaaaaacaatatggtattcacttttgtttcctttaaagggaaagtgttcttaataattactgttggctcacagaactaaagaaagtatattagaacctcagtattcttaacaatgatctctattggttgttatttgtctaagaagtgataagccatataatttacagaaagcaagtcactgaatccttcagaaaacacaacctggcaatgtatcttcaatgcaaaataatgaggtggcaggagcgtgatgaaaaaaacagtcttcgaaaacatcatgtaagggaatccagctgtgcttgtatagtctctagcttgttatagaaatcaaacaactccttgtgactgaattccacaagaactttctccaggctctttgaatcttcattgttcactccgagttgtaacacagcttgaggagattttagttttgcttgagcagagtgagccatctgaaggttaagctgccatccaacagtctctagcttacagggagccagaattctctgccggaacttttcaactgtttcttgacccatagaagaccaagtattgacaaatgcttcagctttgtcttgtctaagatgaatgttctctaattgctgctgcaaagctgctggcttcacattgtgatacactgcctgttctaaaataaatgatattgtttcaagaactaggtgaagatcttgtttctctagagaaaatgccgcttgaagtttttcttcctcttcttcactgaaactgctctcagccttcaggtgaagtttttgaagaatccgagtgagcaaccgtggaaatcttcctgtatctattgcatttatcagtgacactgctttcttcatgctggggctctcccgtaggatcagcgccgcggggaccgccatcttcggctttctcgcactgccgccgtctgttagctgcgccgaacccagccaatggcggccgc

SEQ ID NO: 122220 - DNA, 701 bp, Homo Sapiens
atctttatgtttataaatttatttaatttccaagacttatgtgttcatctcaatccttgacatactcatctgccagacacaaaaaatagtggtctatttaagaggccttaatgaatgacaacatttttgaaatatgctatatgagtacaaatatttccagagcaaagagggaaaactgttgattgggtagacaatcaaattccaagcatttatctgatttacagaagtacatctactttttgtttttcactaaatgaatacaaccacttttaatatatatgtgggtgtggctgtgtgcgtatttcaaaacacacacgcacacacaataaagaaacatttcatagtggcaaaattttagtgcactgccaaagtgctacaataactgtcatccacagacatccacatgcaaacactactggactagtacactagagcaaataagagagtatttagcaaaactctctggcaaaaacttttaaaacggaagtaatgaaacagaaatccacttctaatttgaaggctttagaaaataatcttcattttaatcacatatacacatagtattatctaagctcagaaaataacttcttcctgtatgcacagaacttcaatgtacactcagtaaatgttagcatttgaagaaaatgtgccatgaggagaatgtctgagggataatggcaggaaaaagatatatccattat

SEQ ID NO: 122221 - DNA, 1384 bp, Homo Sapiens
  misc_feature (70)..(81): n is a, c, g, or t
aatatacaagtttttgcttcaaagtgcttactttatttataaaagagaagatcaagagggttgcaggaannnnnnnnnnnnaacaacaaatcaatggtatgtgtcccaatctccttcttcctcttcctttagtgcaacatggcgcagcagcctcatggataaggtctgatttcaaaagacattcctgaaacctcacctacagcagcactctaggggtcccattaggggtggctctctttttcttctgcagccgattctgaacctttcgagattttactactttcattctcacctcaaaaacttcatgaatggccttccggaagcaatgaaaattatagtcaattagcccttttctttcaaagctttcctctctgacaaagcaaacgagagccaggaactttgtcacctcttttaaataaagcacggttgtattattaagctttatgatggctgtggattccttgtcatagggggttcctgctccatcttctttgagaccataaatacaagagatgtcaataaccacatctatcatatcacagcagagctcataggtttgcatatccaccggagtactatcagttgcaatataaattttactgaccacatcaaatagaaatgccttttcaattccagaatttgagataaagatgttcagcaaattctccagagttgggagttgtggaatcagtttctgaacaactttgctaaaagcttcaaatattgaatgatcatatatgcttgtcagataaaagctgaggtgaattttttctaatccagcatctgcaaggtcatcgtttgccctctggtgaatatctctttgggtttcaattttgtggtcatctgacagaccatccactttatgaataaacacctcgaagttgatgtcagtattcactttgtaggccctggtcaccgtgaggtggagcctggccagggcttccatgtaatcatcctgtgagtcaatgacaaatatcagtgctcctgttccccggaagatcatctcatagtcaaatgtagggtcaaaaaagtcaatctgtcctgggaagtcccaaatctgaaaattgacaaaggagctgttggaaacatcttcccggcatatcttattagtgctctccaagaacagagtttcgttgggagacattttgtgaaagacaactttctgaatagacgacttgccgcttctcctcaggcccatgagcaggattctcggcttcacttcagtgctgaaggggtcactgaagtccagaactccctcctctgtgccgctgtccggatcggcgtcggaggagtcgggcccgtctccgtagtccgctagccccaccagctcatcctcctcctcctcctcgtgccgattcaaccacccggccccgctacctaccct

SEQ ID NO: 122222 - DNA, 692 bp, Homo Sapiens
gggccatctcaattgccaacagactagtttatttgtttctcttgtaatacgaacatgctattctcttagtttttatcttcaataacatatgaaagatccaaaatcaaattggctgtctctacagccacctgtaggccactaagctttgcagtcaaacagtccaaggtcaggttgctggctgagcccacagcttcatgtggaaggcagctttgtggcacaaatggacgacgtgtgcttcttaagaaagaccagttgagttcttcctggctattgtataatccacagccacactgtgaaagcaaatctggccagttagcaacacagggagaatctgcctgaactgaccaaaggtgtccatacttcatgtcagtgagaatttcacctccatcatgttctaaagagccaacaacagattctagggcactgcaaaatgcttcagcaattaattgaagttctgtttgagtacattcatcatctttgagaatgctttctgggtcgttgtgagtcttgtgtctgatatatgcagccaaatgagtttcagtacagccacctcccaacaaagcccatggttccttgagtgttaactgacaggacatgcagtgccgtctgacacgtgagcttcagctcatcccaggcagtgtcatttctgttgcagagaagcaagctgcagattgttgcttcattaggataag

SEQ ID NO: 122223 - DNA, 2286 bp, Homo Sapiens
tcattccaacgtatacactttattttaaaatatgccactggcacttgggaaaaatgtaatttatttgcactgcttccattcttctactgtagtgttaggacttaacataagcatcactcttctatttcctatttacattcttttggaatattactacaaatacaatatacaatttaaaaaaacttatggggaaacacagcttatgtttttttctcctctttacaggcttctcagtatcattcgacttcaatggaaatttatatggacattttctgtacatatcttaaaaggcagagattacactgataaagcctaaagaatcctgcacaaatacaatacagaaaacagaaagtacagacgatgttatttggggtacaaatataaacaatacagtaccatttgagtaactgagcaacataatacccatactttatagaaataaaactgcaaacctggagaatgctctgacaaatattaaacattatatacacaatgaggtaaatgtaccttggtctcttgagaggtaatttaagtttaaagcaattgacattttgaagcatctccttaacatatgaagaaatatcaaacaccctattccgttggcacaacgtgaaaaaggggtatcaaaacatggttcatgatattcagttcacaaatcttgttaaaaaataaaaacaaattcactgaagttccttttaagttgtaataaacaggttgaatgttattaaccatatttttagaagtttacatttacaaacaagattgcataatgggattgaaaagtttaatgtactgacaatcatcttaatgtcctagaagtccagcactcttgagagggcccatgggtattccagtaatccaaaacagagacaagaagctgcagtacatgtccaaagataatccttagtatctcaaaatatctgagctggcattttctgccaaagtgttaacagaaccattatttggaatcactaccatttggagccagaacactgccatggtcaagaaacagttgacttacgattcttccagtgcaagaataaaaataagcttttgatgatgtgtctaatgggatagtgattttgttgtgcactctaacgatctctttgccatcttgttttaatctgacagttctcagacatagagaaaaaaggtaactcatgcatgtactacaaaatcgccaagtgaccacttacattttgtaataaaacctgaaatctgggattcttgatggccatggcactgtacaccaactcaaggcacttcttgagcactatcattattacagcagaattacaggctcagctcttcagaccttaccctgtcttataggcgatacaactggccactgtttctggcacaactccactgccacaggagccaccttgctgccatcccactcctcatccatggctgaagtcaaagcaggggcatcccaagcctcatctgctcaatctccaaacttggagacccctcccttccacctctaatgactgaaggaaatggaagtgggtcccacaacttccatcagccgttttactctaggtctccagagcagccttcagtcaaacggctgtgggggaggcaacggtctctgcgtcagggaccagcaagcaggagagcaggttccaagaaacagctggagacagaaaggatggaccagggatgtctatgcctcactaagtcgtatttcccccatccccatttctcctggctactgacaaaatgaatatggacgcacaatttaccagaagatgttttagccacgttgaatcttggaaggtgagcatcctaggatgggcagtataaacaactgtgtttttaaatgacaaaattattactctaatcaaatttatctgcagttatcgacagtaatcatgatccatcccaccttttaagtttctttcattttcaatatcagccaattgtggtttatcaaaccatccctagccaaaaaaggaattaactgcagtaatacgtaaagtcaatttagaactaaactccaactttaaaaaaattccctgattcatcaaaagtacattttatccacttaggtaagaaaagtataattgtaactcaatctttgattcaataaaaaatatcttcagcaaaagtggataaccttacatgaaagtgagaaatcatgtattacaactttaaatcagacaacttttggtatattcttaaaattatataaaaatagttttagtgataaaatgcattggtcccctggatttcataaagcagatctggtaggcttagaaatggcccaaaaacaacaacaaa

SEQ ID NO: 122224 - DNA, 981 bp, Homo Sapiens
  misc_feature (908)..(908): n is a, c, g, or t
  misc_feature (938)..(938): n is a, c, g, or t
cgaattaaaaacaatataattttaatttaattaaaggtgcataaatacataaataaaacaggtatgtgtgacataaatatagatgcgtatctaaaaagactggtgagatcacaagtaacttactttcttcattttatttatctgtcttcctaaattatctacctttgtattaaaaattgcctttttaaaaatgtttttcagttatcaaactgtaaacttacaattttaagacataatctacttttatttcaaaagttatacaaaaatgagacacaatatcaatttaaaaatagattactacaattctctagtggtccatctttatttcttcttactttgagtctaaacattataatttccctaaggttgtttacactgcaattgtatagcaaaaggaaagaagtctagagaaactgagcaagggaacagcaaaaacccctggaactactactaactggcctttcatctctggtgtgaatatgattactccatgctgtaatcctctaagcaggcactgaattttgtaccttaaaatgagactatagtattgtccaaacgaggggctccacaggaaaaagaatatcaagaactcatgtttatttactgataaaagataaggatgggaaaaacaaagacttgctaactttcccatgttgatcttcactagtaaaactgctcagcatgtttgttcagtctgcagcttctttccatgtgacttaggtgttattttagcatgaatggaaccccctgagtaatgtgactgactcaggaagagccagttcatgcagctattagcctccagttctatcccagtaaagagaaattcttgttggatttgtggaaaggtctcagaggaaggaagagagaattagtgagaatttccctcagataaacatgttttaatttanagaaatctgctcaattatttgcccccacantttacatatgaataattaggatggaatttgaagcttgcttttt

SEQ ID NO: 122225 - DNA, 1314 bp, Homo Sapiens
  misc_feature (61)..(92): n is a, c, g, or t
gtgccaagctaaaattaaccctcactgaaagggaataagcttgcggccgcatacgcggtcnnnnnnnnnnnnnnnnnnnnnnnnnnnnnnnngacgtgtctatcggaacgactttatttcagtacactgggccccaccaggcaatgtggtttgtgcgaggctgtgcgagggacaggcttgggctaagagaagggaggtgagttggttaagcgcactgcagtccgcggggcgctacgttgctttcacacatacctgctgctgtggcccacacctggcaggggcctttggtcataggacggcgtgggggagaatactgtgtgaagtctgggattggggtgggtcttggtgtcacaggtgagggtgccggtgaagacaggctggccccagctttgcaccatctaggctgaaggcctttggaccactcctaggagtcaggcctggctccattagctcctggcactctggtctggcccactccctccttaaccaagcaggtccaaggtcaagaatggcacaagatcagcccagagggggccttcccacctctacaacctagtcccctggtcagctacagtggcaaaaggcaacttggtaaattgcagctttctccagtcttaagggcactggctctccaacacccctcccttgcttaggggcctctgccaaagaaaaattttacctcctgtttcagaaaatctaaccagcaaccagcctgttgattccagggcagtgagcaagaggaaaagggagaaagagcctggtgggagtgtctttgagtgtagcttccaatctcaaatggtcctggaacctgtggacactgtcagctcaccatcagctgggagaggtggggccctggaggctaagcttaggtgctgtaaacattagtgtagcaaggcaggaggcagcaagctccctctctccagcccctaactgaacaaacacttcaataaataaaacggtttgaagatggcattgcaacaagaacagatggaaagcgaggtcctggaaccagcaggtgccttaaactctcccaaggcccccgaaaggggactgggctgggaacattaactctgcagccattcagagggaggactgctcctgccctccttcagtggccggtgtggtcctgttccctggtgaacatgagggcctcctgctctctcctgactccagtctctgtaatagctcttggggtgcttttccagcctcccaaaccaaaatggcaacaaaaccagacagaactcaaccccagtcccagcctcgtgccgcctcggccgaattcggcgcgccgtcgacttcatactctttcaccac

SEQ ID NO: 122226 - DNA, 3091 bp, Homo Sapiens
ttttttgccagttggttccttttttaattacatttaaaaaagacaaaggcatggagctgtatggatgacacaccttgaccactgacgaggaagatttcactcagccacgtctcagtggagtctcagaggggagggtttccacacagcacggtgccaagggccagtcttgacgctgtcatagacaatgacatgcaagccccagccctggctcgtggttcaggtggccctccaacactgagctgtcccgggacgcctgccgggctcgctgagggcagggccgggacttgctcaggttgctgggtgttcatgaaggaggatcgggtctgccagatcaaactccaccctgcagcaattagcaaggaccaggccctggtctgctgaggctccactgctggccctgggttctcggcttttcgttgtcgatgactcctacgctggcctctgaaatactccctgtgtcttagttcaggggtgaagacacggaatatctttattgtcgagaaaaaattaactttgcacaaaaggaggtgctcatcagagagcttttcaatgagacccccatgtgttccactagaggccctgctcagcccagcccgtgtcctcccagcgtggggcccaccctgctcattacgtacattgaccaagacccttcaacctcgtcccgaccccagcacgggtgttctttgccacactcttgttctagtgttttcggatcaagatgtcccagctgtctttccagcgaagggccttgagttcatgtggcgagagtgacttgtccccgtaggtgagtgggcgcagcgtgttggacacgtggcacgcggaggagtaccaggccaccaccagggcgctgaagatgctcctctggagctgggacctgcacaggtggtcgctgatgtgctgcaggaccacagggagcagaaggatttggaaggtgagtgcgggcaggtagtggtagaggaagagtgtcttctccatcaggaagaacgggaggtagttcactgcccagccaccggcacacagcgccccagccagcacccagcgcagccaggcatcctgagggaggtcatggacatttcttcgccgtcggagcaggtaccacaaggacagcagggcgtagatggccagagcgaggctgcccgaaacccagatcactatgtttccaagtaggtggatctgagcgctggtcctggggtgcagccagtaggcaatattggtgtccagggtgacccactccagtgggctggagctgtacttgtgttccgagtcatcacttctcagcgccagcatcctccactgcagctccgagaatctcgccatgaagctgaggttcctgctgacgtccacctgcgcaggtgagtgcagctcccgttcccgctccctctgctcctggctcgcgccgtatcggtgctcctccacgttccacaccgtgctcccgtggtagccccgggacagcttctccccgacgatctccagttgccgatacccccagtcagggaggtgagccccgctcagctttaagacagcggaagtgttcacgtgcacaaagcggacctctgagaggatggtcttccagacgtctgtgtcagatcctctgttcacaatttccagtctccagaggttctgggcgggcatggagatgttatagtcaatgtagcaggagacctcctgtgaatgggggctcaggggggctgcaacatcatgcgtgttcagggagcgggtggtcatgccgtggaccagctgcaccatgtccccgtgcctcacaggtctcggagggctgctcaccaccagctggtgcctcctgggatcctttacaatccaccagttattgacgtctttgaaggggtaacaggtcacctgttgctggtgggagctgcctcggccgttctcatatatcatggggtaggtgtcctggtgggaatgaagccagcagggcacaggtttcccaaagacgttcctcagagtgacctgggacccaaaggccacctccagtggctgaccctgggtgatccgagctagtcctccctctaagctggcctggaaggcactggacatgatttggtcgtggggcccagagcggaagactagaatcaagtggacgtagaagaacagtaagtacaggacgaccgggatgaccagcaaagccactgctcgggcgagcaagtgacagaacacacagacattggacaaagtctggtctccaagcaggtgccaggcatggacagctgcaacacccagcacgagcacgtacgtgaacacacccatgtacttgatgcccactgcacaggaacaagcgacccctgtcagtgttagccagaaccaccagctcagagaaaaagggctgtgcttttggcagttgaagaacttcaggtaggacaacacggccaatagattgaaaaatattaacagtgattccaaaagcattagccttggatgagtgatgagagcattctggataagcatcaacagagcagctcccatggcggcacaatgagaaaaagtggagctccaacactatctggtaggccatggggaccgacaaggcccccgcgagtgctggcagcaggcgcagggaccacacaggcacgttgctactgtattctgctccaattctgttccacaaaaaattgccatcgaatcctcctaaataacctcccaaggccagcaccatgtggccaaatggcggcccactgtcatccaagaagaagatttgtttcatgtaaaaagagatgtactgcccataatatagttcgtcaaaaaccacagcccgcgggtaggtgagtcgccacagccggctcagtaaccccatcccagtcagggccacaaggctcaagttgatgtcagccgtcaccactacagggcgcttcaaaaatccccacatcttgtagaaaagcgggctcaggcagacgccccgcgtttctccgagtccacacagagccgcgcccggctcccggcaacgcctcagaaccgtccgactgggccgacggttgggggtgaggccgctcggcactccgcaccacccacaaccgtgctcaacgttcgcctcgtgccgaattcggcgcgccgtcgacttcatactctcccgcaattgatc

SEQ ID NO: 122227 - DNA, 1108 bp, Homo Sapiens
  misc_feature (1046)..(1054): n is a, c, g, or t
cagtcgacggtaccggacatatgcccgggaattcggccattacggccgggtcctgaaaacctacacgtgtatatcagtaaccaaaatgctatgccttttttgcacctttgtacagcagccaaatcatgaactcaaaatgtatttgatcacagttctataatgtttttacctacctattatggaataatcagtttttacagagattattaatatggtagaaccctgttatgtaattccaaaacttaagaaccatatttacattgcttaacacagaattttacatctaagcaaggactggctttagaagcagtgtagttctacctctcattttacagatgagaaaaccgaagcccagaaaaactctcatttgctcaaagtcacagagaaaattagtggcaaagccaaaaagattcagatcttctgactcgaagttgagagttctttatactctattatgctgcctctccagtgtaatatttgcctttctgtaaatgggattaaatatgatttgtaaataaaggacatctgacctcctttttggtacattaaggcactttataaatggacttttattgtctcatttttcgtatataattatttccatcatattctttatggaagatgcaattaattttaacttttttactcttataaaaccagttcctgacattttaaaaaacaatatctgtaaaagtggatccttttatgagtgaatttttctgctaattgcccaaggctaaatccaatttaaggattgcttagtttctttattttgtttatggtctctgaactggtatttttttataaaccaggctaattcacaggtcataccatttcattcttgtcgtgttggcttccagtcactggaaaagcttttgcattttaaagatttttagagccatgcaaaactgggcattaaatgttgcataaagcaaatcttttaagtaaggtaaaatgttgaagtcttaaccagaattcctacaactaattactaaaactgctatttctaactcttcatgaaagcattacctttggaaagttaaacnnnnnnnnncctttcatcaccgtctttgaaacaaattattttccaattcataagaactttggt

SEQ ID NO: 122228 - DNA, 744 bp, Homo Sapiens
  misc_feature (153)..(162): n is a, c, g, or t
  misc_feature (717)..(717): n is a, c, g, or t
ttttaaaatgtgtaatataaatttattctgtgacattttcctcattgaagatattttaacatagattaaaatacatcaatatttcatgaaaaataaattctagaagaatttagataatatctgtaatgtacatgatttgaccctgaatatccnnnnnnnnnncacttcaaacatcattttttaaaaagtaacataaaatgataaggactgcaacattcttcatatatcttgtgtctcataaattttaattcaactgcccgttcttttctcaactatgtatgttaatggtatttgctcctgtttttgaataggaagagtatccattttctgtttcttcgtgatatttaggtcttctttctctgattcttcaagaaaatgcttcgtgctgagtttgaatagtaatcgagggtctggattagacagtggtggacaattacacatctctctaattttgagagcctgaggtataagtctatccaagtactcaactcgattgccatgagaagggtgtgtagataaccattctggcatcttgggttggccatgcaggctatcaacgaactccatttgctgccaaaacactgaactggctcttatgtctgcacaagcctttgcagcaagcagtagtccaattttgtcagcttcggcctccaattttctgctgtatggtctattaaacatatactcctgcaatttagactgtatccactggcacanaagtgccaagctatctcgaggacaaat

SEQ ID NO: 122229 - DNA, 987 bp, Homo Sapiens
tgtcgatccgccgatcaatggtagttaattgcggtgcgagatcgttcagttgagcataggtgagctgtggggagatgtgagatgaaggcatccagcaaattcagttatcctccacagatagagtgagcggggggtacagggcttctcgtcgttgtcgccccattagcaccgggcacagcttcacacaccagactgatggcctcctgggtgacttgagtccgcgtgttgaagtccagggcacgcattgactggaggacctccacacaacccatgtaccgaaccaagtaggaaaccccgggtcccatgactttgtcgttgggatgcagccagccccgcgtgggcttattgacagagctcccgtggcgggtccactcctcgcccccaagctggcccctttccacccgagtcctgcgcccgccgcctccattcagcttgttcatgtcctggaggaggggtagggggcctgagtctggcatggctgcccctacgatcccctccccatcatcagctgcccttcctggctcccccttagaccctgggcgccccccagccgggttggccagcctcaggttgctcatccgggggaagaaggagcacagggtagtgggactatcgtccccaggcagaggaggcaggatgggccccagggatgaagctgatggggaaggcagctcctccgggggggtggacccagaagccccttcctccagcgatgacagagactcattccggagtggattgtacttgggcttggggggcaggagatccatagttgaggtgaaagaggggctgctgcccagcctggcccccctgccagtttgggcaagggggccaggcagggggtatccccaggcccttagcctggttggacctctgtggcccaggagtcacagaagtcctggggagggagagggacaagtggcttccgctccccagctcagacccagacagtcctcgtgccgaattcggcgcgccgtgacttcatac

SEQ ID NO: 122230 - DNA, 2352 bp, Homo Sapiens
ggaagtgagtgtaataaagtttctccagtgaggcagggcccggggagaaagttggagcggtaacctaagctggcagtggcgtgatccggcaccaaatcggcccgcggtgcggtgcggagactccatgaggccctggacatgaacaagctgagtggaggcggcgggcgcaggactcgggtggaagggggccagcttgggggcgaggagtggacccgccacgggagctttgtcaataagcccacgcggggctggctgcatcccaacgacaaagtcatgggacccggggtttcctacttggttcggtacatgggttgtgtggaggtcctccagtcaatgcgtgccctggacttcaacacccggactcaggtcaccagggaggccatcagtctggtgtgtgaggctgtgccgggtgctaagggggcgacaaggaggagaaagccctgtagccgcccgctcagctctatcctggggaggagtaacctgaaatttgctggaatgccaatcactctcaccgtctccaccagcagcctcaacctcatggccgcagactgcaaacagatcatcgccaaccaccacatgcaatctatctcatttgcatccggcggggatccggacacagccgagtatgtcgcctatgttgccaaagaccctgtgaatcagagagcctgccacattctggagtgtcccgaagggcttgcccaggatgtcatcagcaccattggccaggccttcgagttgcgcttcaaacaatacctcaggaacccacccaaactggtcacccctcatgacaggatggctggctttgatggctcagcatgggatgaggaggaggaagagccacctgaccatcagtactataatgacttcccggggaaggaaccccccttggggggggtggtagacatgaggcttcgggaaggagccgctccaggggctgctcgacccactgcacccaatgcccagacccccagccacttgggagctacattgcctgtaggacagcctgttgggggagatccagaagtccgcaaacagatgccacctccaccaccctgtccagcaggcagagagctttttgatgatccctcctatgtcaacgtccagaacctagacaaggcccggcaagcagtgggtggtgctgggccccccaatcctgctatcaatggcagtgcaccccgggacctgtttgacatgaagcccttcgaagatgctcttcgcgtgcctccacctccccagtcggtgtccatggctgagcagctccgaggggagccctggttccatgggaagctgagccggcgggaggctgaggcactgctgcagctcaatggggacttcctggtacgggagagcacgaccacacctggccagtatgtgctcactggcttgcagagtgggcagcctaagcatttgctactggtggaccctgagggtgtggttcggactaaggatcaccgctttgaaagtgtcagtcaccttatcagctaccacatggacaatcacttgcccatcatctctgcgggcagcgaactgtgtctacagcaacctgtggagcggaaactgtgatctgccctagcgctctcttccagaagatgccctccaatcctttccaccctattccctaactctcgggacctcgtttgggagtgttctgtgggcttggccttgtgtcagagctgggagtagcatggactctgggtttcatatccagctgagtgagagggtttgagtcaaaagcctgggtgagaatcctgcctctccccaaacattaatcaccaaagtattaatgtacagagtggcccctcacctgggcctttcctgtgccaacctgatgccccttccccaagaaggtgagtgcttgtcatggaaaatgtcctgtggtgacaggcccagtggaacagtcacccttctgggcaagggggaacaaatcacacctctgggcttcagggtatcccagacccctctcaacacccgccccccccatgtttaaactttgtgcctttgaccatctcttaggtctaatgatattttatgcaaacagttcttggacccctgaattcaatgacagggatgccaacaccttctatggcttctggggacctgtgttcttgctgagcaccctctccggtttgggttgggataacagaggcaggagtggcagctgtcccctctccctggggatatgcaacccttagagattgcccagagccccactcccggcaggcgggagatggacccctcccttgctcagtgcctcctggccggggcccctcaccccaaggggtctgtatatacatttcataaggcctgcctcccatgttgcatgctatgtactctacgccaaagtgcagcctt

SEQ ID NO: 122231 - DNA, 371 bp, Homo Sapiens
ctttgttatctgtacccactcaaagtagatctcaatgggggttcctgcagaggaagatgatgggcccctgtctgtgcctcctcccagtgggctcagctcactgacagcctctgctgtgccctcagcctgcacattctggagtgtcccgaagggtttgcccaggatgtcatcagcaccattggccagggcttcgagttgcgcttcaaacaatacctcaggaacccacttcaaactggtcacccctcatgacaggtgagccaggtggggagagttgtggagcagctcttggattacggattaggacaggaggggttgttcttcctacccttgagttgagaggttcagggagggaataacctgtgtgcctctgt

SEQ ID NO: 122232 - DNA, 1001 bp, Homo Sapiens
  misc_feature (369)..(409): n is a, c, g, or t
  misc_feature (836)..(836): n is a, c, g, or t
gtggttatcaattttagtatttattgaatgatggaagacaaggaaaatatctctcaaactccaaaaacaaatgttgcacctttgctaaatgtaaaatgaattttgagatatttgttttacatgacaatgaacctgtccaaaaaataatgcaaatttacccaaacggtgctagtttattatttacaaaaatgctcttatctgccataagtatttgggaaaaaactgttttacactcaggaacactaatgaaataccttaacgacaacttaaaaaataaaatcttccctaccctcaatgaccaccactcgagaaaagttacagaatgcattaaaaatgaatatatgcggaaacaaacataattatttcccnnnnnnnnnnnnnnnnnnnnnnnnnnnnnnnnnnnnnnnnnaatacagtgttgtgcaaaatcaacttaatgtttatttaaggtcaacagccttggtgacaaggaagataatgaatatggcttcagtaaagtttgcaagtaaatatcacaaatgttaattcttttgctagctaaccagctatcctgagtatggaatacgtattatttagatagctaaaaggttataaacaaaatggaggggtagggagggggaagcactgtagcagattccactgaggtaccttagtttttatgtaaaggtctgtatactcatttaataatttacataacaattctttattctatatagtatatgaccatatagaaacgatgtcttatgtattttattgttctggtccaagaactggaaataaagcaaacgctgtatcagataagactggatgtctatgaacaatatatatgcatatanatagaaatttgcatgtacaagtatcacaagtccagatgtactgagagagtgaaatataccatagaaggacgtacatatgaggatacaggtgtctgaactgagcacgataactactcaaatgagctttaacatatttcaataaaatcgaaagcctgcatcggccag

SEQ ID NO: 122233 - DNA, 1765 bp, Homo Sapiens
  misc_feature (55)..(68): n is a, c, g, or t
  misc_feature (1380)..(1587): n is a, c, g, or t
  misc_feature (1679)..(1679): n is a, c, g, or t
  misc_feature (1727)..(1727): n is a, c, g, or t
cagatcatattcctttattacatatatgaaatataaaaacaaattaacaaagcannnnnnnnnnnnnnttgcaagtccacaggacttcagagaaaaaaaggttctgtatgtgaaattattcatatggcactgtgttcatgttttgtatattcaagtacaaaagaaactatgtatagtggttatgcgtgggtacagaagatgaataataatgaaaaactgtgattttttgactatcacatacattgtgttaaaaaacaggtaaatataatgactattactgttaagaaagacaaggaggagaactgtttcaatgttcaggtttaaatactaagcacaaaaatataacaaattctgtgtctacaataatttttgaagtgtatacaagtgcattgcaaatgagctctttaaaatttaaagtccatttcccctttagccaagcatatgtctacatttatgatttctttctcttattttaaagtctcttctggtttagttttttaaaaagtttcatcatggctgtcatcttggaatctagcctccagctcaaagctgagacttcacgcatacatattctcctttctggttgcatcttcacctagtttctccaagtattcagagttaaatagcacaacttcttttatatggtcacttttgtccacatgtagtggcagtgctgctgcttcagtaggctttctcacacacccttttccttctttcaacagcagtcaccaaacgttcacaacacaagtggtaggtagtaaagtgctttatacaaggaaatactatatacacatggagaggttccatttaacacctacagaccaaagttcatgcgtaacacacaagagaaggctctttaacaaacaccttttctgatagtagggttagggattccttaaaacgtcattcattactttaagtagcatcaaacgtaagtaacatagctgaagctggaaggcgtccttgttagaggtactgcccttaatggattactgctaaatgtcatgctgctattaaaatattcttaatagttaagaatttcagaatcagtcccatagaaaacagatatcagtgtaggggttttcatttctcttcatgaaataaaactgtatttaaacatgggtccagaagagataaattagataagacccatgcattcaaacatttctatatgttttggcactttaaaaaattccagtttcctgtctgaggtcttcttgctctaaagtttgtgttttgtacatagacaagtgccattatgtgctatccatcttaatgctacttgcactctctttttaaaatatccatgacttttcttccaagagaaggtttccagtgctggacaaagcttttcatattcaccctcgtgccgaattcttnnnnnnnnnnnnnnnnnnnnnnnnnnnnnnnnnnnnnnnnnnnnnnnnnnnnnnnnnnnnnnnnnnnnnnnnnnnnnnnnnnnnnnnnnnnnnnnnnnnnnnnnnnnnnnnnnnnnnnnnnnnnnnnnnnnnnnnnnnnnnnnnnnnnnnnnnnnnnnnnnnnnnnnnnnnnnnnnnnnnnnnnnnnnnnnnnnnnnnnnnnnnnnnnagctgcattatgatcggcacgcgcgggagagcggttgcgtatgggcgctctcgctcccgctcatgatcgctggctcgtcgttcgctgcggancgtacactcatcaaggcgtatcggtatcacagacagggatacgcaganacattggcaaagcacaaagcagacgtaaagccgtgcgg

SEQ ID NO: 122234 - DNA, 1031 bp, Homo Sapiens
  misc_feature (58)..(71): n is a, c, g, or t
  misc_feature (464)..(511): n is a, c, g, or t
  misc_feature (584)..(584): n is a, c, g, or t
  misc_feature (765)..(765): n is a, c, g, or t
  misc_feature (824)..(824): n is a, c, g, or t
  misc_feature (828)..(828): n is a, c, g, or t
  misc_feature (841)..(841): n is a, c, g, or t
  misc_feature (895)..(895): n is a, c, g, or t
  misc_feature (910)..(910): n is a, c, g, or t
  misc_feature (951)..(951): n is a, c, g, or t
  misc_feature (1006)..(1006): n is a, c, g, or t
  misc_feature (1014)..(1014): n is a, c, g, or t
tttcagatcatattcctttattacatatatgaaatataaaaacaaattaacaaagcannnnnnnnnnnnnnttgcaagtccacaggacttcagagaaaaaaaggttctgtatgtgaaattattcatatggcactgtgttcatgttttgtatattcaagtacaaaagaaactatgtatagtggttatgcgtgggtacagaagatgaataataatgaaaaactgtgattttttgactatcacatacattgtgttaaaaaacaggtaaatataatgactattactgttaagaaagacaaggaggaaaactgtttcaatgttcaggtttaaatactaagcacaaaaatataacaaattctgtgtctacaataatttttgaagtgtatacaagtgcattgcaaatgagctctttaaaatttaaagtccatttcccctttagccaagcatatgtctacatttatgatttnnnnnnnnnnnnnnnnnnnnnnnnnnnnnnnnnnnnnnnnnnnnnnnncatcatggctgtcatcttggaatctagcctccagctcaaagctgagacttcacgcatacatattctcctttcntggttgcatcttcacctagtttctccaagtattcagagttaaatagcacaacttcttttatatgttcacttttgtccacatgtagtggcagtgctgctgcttcagtaggctttctcacacacccttttccttctttcaacagcagtcaccaaacgttcacaacacaagtggtaggtagtanagtgctttatacaaggaaatactatatacacatggagaggttccattttacactacagnacanagttcatgcgtanacacaagagaaggctctttacaacacttttctgatataggttagggatccttanacgtcatcatacttnagtagcacaacgtaatacacgctaagctggagggtctgttnaagtacgccttatgatactgcaatgtcagcgcataaaatctatagtagattcaancatccaanaaacaaatatgagggtg

SEQ ID NO: 122235 - DNA, 734 bp, Homo Sapiens
ttttttttctgatggaaagccattttatttttctctaaattttaaaatagaagactttaatggaaaacatttagtaccatcatgtcaccctgaatgccagcaatacctcgacttttacacacgcaggaagcctagtaaaagccccgtcagtagtacacatttctctatggtccttcaacagttttgcatatacaaaattttctgctattttgctttagcaaacagcaataacttttgtgtttcctatatgacacctaatatccagtcctacagtaatatagttagaaaaataaaaggcttaaaaatttcatagtacgagttcatggtgctaataacagaatctctttaaacataagatcattttaagcctcttacataaccaccttctggtttcatttgaaatccttaagaattaaaatctagtaagattgttaaatcaacgtacgtcaatcattcattttcacttgccttgggagagttaattcccactgtccactgaatgaatgcctttcaaatattaataaatatattacagtatttacaagcattcttatacactccgacactgacagggagttaagccatggagagggaagcacaggtttcccaatagtgtgacttcatgacgtatgggacaaaaggaaccggtgctcaggcctggagggagctgagatgagagcagggatgatggttcagatacgcacacatggtctaagacacatcagactctagct

SEQ ID NO: 122236 - DNA, 325 bp, Homo Sapiens
acattttaaataacttttattagagtatattgttacaactctttcatcttattagttctgctgttaagtgccaaattcataaactttatcatagggatatgtatgcataggaaaacaaacagtatatataaggttcagtactatctgcggtttcaggcatccactggggatcttgcaaatgtatccaccacagataagggcgggggtgaggggtggctactgttaagtcacattgtgacattccaggtgtacatgaaatttggagggacactattcactatatcacacaagcaacataatgcctcttttgacacagtaagatttt

SEQ ID NO: 122237 - DNA, 895 bp, Homo Sapiens
gtgggaaagcctgccggggcgccaagggcccctggaaatggtggtattctgaacattgggtttgataggtttttcagttaattggcgtgtctggatactccattttcgtgcatttttctatggattttaataaaactcccttggcagtttgggcttcattcgaaacagttagtgaatcctgtacatctttatgactaaccaactgaacattgccatcttcataatagtgaacctgaatcttaagcacgccaaccacctgggctgtaggtggtgtgatggtgaacttccactctgatctccaacgaccattccagaagtttttaggctgaaactggtggctttcaatacatgcaataatagtctgttgcccatcgatagttttagcataaacagtacagaagccgttggaataatggtctttcacataggctcttaaagcactgtcacaggattctctccaagacttcagacctccatctgcttcttctggctgggggtcacttgcttctttccgtaagtggtcaaatttaaaggaaattttgtttcttggatctaaaaatctgctattacccaggtcaccgtgctctgtaattaagacctgatcttcatatccttctatcttcacaggcgtgaactgatccatgttatactgggcaaatgcatgtgctgccccttccctgaggagattgtcattattaagtagtagccgaacgtcattgaatacttcattaaattcccctgggggtgcatgagtgatgaatttagcagctatgcgtaccttctcctcatccgacacacgatcatcgaagtcggccatcttgggctgttctggcccagcccggctaccggcgcgacgcgttgggttcgacgatatcccggaaatccgaccgtacca

SEQ ID NO: 122238 - DNA, 2037 bp, Homo Sapiens
  misc_feature (729)..(762): n is a, c, g, or t
  misc_feature (1240)..(1258): n is a, c, g, or t
tttttttcagaacaaaacaggtatatttctattagactacctgatacagaagatagtgtggtatggatggatagtatgaaggacaaataatacaaatatattttattgaaataaacaaaaatgcatacacagctcaatgggtcacttggaacaaacttgcttgactatattactgagcagaaacaaaacggaagcacaaacacctttctttttttgacatgtatctggagataggtaggaagacactacttggttttttaaaaaactgaccttcccttaaggcctggtcatagaagtgtaaacaatgtaaatgaatccaccattaccagttgtcatatcatatctatgtcacctgtgtattctgagattacacacatacctgccaatatacctgggaaaggttattttatcacagttacacttgagttcttggcaggcaggactgaggaagagtaatttgaaagaagttttacatcctatttagaagaaatcactagtatttccttaaataacaggttacaatagaaagatactgcctggaagttatcctttcactttggttcatttttagtttttctttatgatttacatagctgtttaattcatttgcttatagtacaatcctgccataaagtattaaagcacaagatacctattattccttcaacatctgcatttttcaagttttatactctacatccacagtacgtcagcagttcttgaatgttnnnnnnnnnnnnnnnnnnnnnnnnnnnnnnnnnntgcagatgtttataactacaatggtactaagatgggaaggagacaatgagagaagggataaaagcaaacatgttcatgtgcagggaatgtggttcaagtctttggatttaaaaacaagttccccagagaagctggcacttcctttgccctccaaaaaggacctgaaaagtcccaatccaaactttagaaaattagttatgagatgcaataaatgatgatcaaagcagtcagagggagaaggatgaatgtgtcttccatttagctagagactgtagcatagcctctttaggtgttggtggatcagtaaaaacgactgaagtaccagaagtgcttggaaggataggggtacaaagtaatgaccataataccttgtctaaatcagtagcagggcttcatggctaggaaacttttttaaacagtaaaatgtcattaggatagatcactctctcaccaacattaaatgtggcagaattaaccnnnnnnnnnnnnnnnnnnngatttacacgtagatatagcagtaacagaaaattacaaggcagagaacaccaaagaatcaagacaacgctataggttcaacagtattccatgaggctagaaaaccggttaactttgaaagccctagcaaaatatcactcttgtttataaatcacttatttatcatatgaccacacgttgaatccttgtctttccacatactgaagaatcctacattcagcctttaagcattctgcatttctttgccaatcttgtagctgagtatcttgttccagtcgattttggtgcgggtaactggaagctgccggcgcaaggccttgaatgtggtatctgacattgtttgatagttttcactaattgctgtctgatactcattttctgcattctctatgattttaataaactccttggcagtttgggcttcattcgaaacagttagtgaatcctgtacatctttatgactaaccaactgaacattgccatcttcaaaatagtgaacctgaatcttaagcacgccaaccacctgggctgtaggtggtgtgatggtgaacttccactctgatctccaacgaccattccagaagtttttaggctgaaactggtggctttcaatacatgcaataatagtctgttgcccatcgatagttttagcataaacagtacagaagccgttggaataatggtctttcacataggctcttaaagcactgtcacaggattctctccaagacttcagacctccatctgcttcttctgctgggggtcacttggggttctctg

SEQ ID NO: 122239 - DNA, 734 bp, Homo Sapiens
agataaatcactattttattattttaaaaatttttacttatcagaatctgagggtcattgggggaagcagttcttcagaagtggcaaagacgacaagagataattctcccagtttctttcagcctaattatgcttatgttcagctcttttaaaaagattattgattaactctcttgttaaaggtaatgcctccacatggtctagaaccatctctgaaccaacagattcttcagccaggttccccgatggggtgggcaaaacatcatcatcaaagctgatgagatcgatgtccaccaagggcttgctctgcagaactggaactggggggttggctgggggtccttctcccagtgacttgtatgctttggcttgtgatgcccctgcgagtcggggaggaacagtgacaggtttcagtggagctgaagggtaggtggggttttctgaggaaacagatttcttcagcagcaaaggccgcggggcaggagttggcactttcttcccactatcagagctctcagccaggggccctcttcccggaatctcaggattaacacttcgtataaggccagggtttggtttctttggcaattcaggtttggttactgggatgcttcccgcttcttgcaggggagggtatggggtgagtccttccttggaggtcaccttgagtctgttctcagtcccagagtccactctccagaagctctgttagcagctggtttgggagctacaga

SEQ ID NO: 122240 - DNA, 977 bp, Homo Sapiens
  misc_feature (790)..(825): n is a, c, g, or t
gtgaatatagccaagtattccatttattaacaaaataagtcttaccaagggagagctctgttcgtcccaaacaggccccgcagcccccgcgctgccgcatcagaccagaaggagggaggagtggggagaagaccccagtcgctggggggtccactctgggggctctgccgggccaggcctaggagagggcgggggctgctgtgatccgagagctccctgacgccccaaccttccccgaacgcagctaacgagctcgtgacatccgctgacatcgccaccggtctgctttggagggatctagcgagagtcacctaccccacccctactgccaggggaggggtcgttgcccccacgagggagagaaaaacaaggactataatgcacttcgcaaaatgtaaggggccggcttcacgccagcggggccttctgggactttgaattcaaccaggtgagcgctccaggtgccccgacaggcgcactgtagccactgggtgttaggggcgggagtctggaaggtgacggtagacggccacttgggcccttctgggggcgagcctactggtggggtcagggctctccgtgctcagagcaaggtagaggagcaaggccctacttttggggggcagggtccagaccaaggaccctatgcgcggagggtggcgggggaggagtcccggagcagtgtaccaggtcaatagagctccagggcccctgccacccaggtggccccctccacccccaaaatgagttacaaaaaaaacctcctctctgttacttgtacaacaaaggnnnnnnnnnnnnnnnnnnnnnnnnnnnnnnnnnnnngaaccgcaaatggaaggaaacaagagggaatgaagggggaagagggaaaaagagaaggcggaaacgtagttttaagttaagactcatgcaagaaactccccaggaagggaaaacaaaacgtctagaagaacccaaagaccccaactctccct

SEQ ID NO: 122241 - DNA, 1409 bp, Homo Sapiens
  misc_feature (64)..(73): n is a, c, g, or t
  misc_feature (1064)..(1075): n is a, c, g, or t
ttttaacgttttaattaaatggatttatttaaaaagactataaaatctgacatcaagagagatnnnnnnnnnngacccataagatttaaattgacaaatataaaatgattggctacaatgtaaaaatacatttcccagcccccaaacaaaacacaagtatagtaattataaaatttttgtactgtgagttcatttctcttataattcttgagaaccattctaagcaatctatttgtataaaatataaaatttatcataactgttaatttaaaaattattttaaatttgagtttattgaatttgccatttttttgtacataacagtggtttctggtcccaagttccccttgaacttatttactacaatggtctttttactcctatttatttccttctacaatagaaaagaaaggctaaccattcatgggtcccataaaaaacaatgtgaaggaaggttctaagagtgaccaaatataccagtgaacatactatctttctgaaaaagaaagaattaagtgaccaactaagagatccacttttgcaccaatgaaacacatggaggtgaaacctcagaacaagcggagcttaagctcaatgacagtatgttttatatgacaggccagctgagaatgtatctgtcaatcctgactaagcccaatacatgggtggtgaccctgaggtagcccagatgatatgctctgaattttagataggtctaaatcacaatggtacagtctgatgtgaaactttagtctacctaccataaactcgttttctgaatcagtccttattcataattagacccaaaacccagctatttctcctctcttagatgacatgcccaataaaaacagcatccatgattggtttcattatctcccaattaagtagtggtgacaccaccactaacactggtatccaaactctgatacaaatcctaaaggtattgagtcagtaagacagagcagaagctatgttgggccatactgaccaatttctgagaaccacattagccacattcatgcaattaaaacccatctaagacacacaaatggcagatgagnnnnnnnnnnnnggatgaggtcattaaactttatcactggaaacatgattccactgtttcaaataggaaacctaccctgggagacttccaccaaagtgcagaaggacctgatgcacgggctcatcatcttaacactagagtcccaagtcaaaactttaggaggaggataagaaaggtctagtctgtgaatcacctggacagaaaggtcatatcccaagtgccctgcctatctgtgacagctgctagccaacagacaattctggttatgaagttatctcttgagaatggcttgattctcttatgccaccaacagtattagtctgggcagggttccctggatatttac

SEQ ID NO: 122242 - DNA, 1240 bp, Homo Sapiens
  misc_feature (336)..(361): n is a, c, g, or t
  misc_feature (400)..(488): n is a, c, g, or t
  misc_feature (1156)..(1156): n is a, c, g, or t
tcgcaaaaaatatttgtcagaggacataccttcctgttgagcccaaatcttttcccagaaccggcagactattatccgcccgtcgtgggttgagcaccacacccggagaagcgcctccaagatgttgaagatgttttccccctcctcgagccttaaaaaatctctccgtggagggatgtggtcgcgcccaagaatggtgcccccgcccccgcgcaatatagggttcccctcccccgccaagagatgctccccgcgacggggcacgggttgttcccaccatcacaacaggccgggttgtttaaaacggcccgcccccggctccccgcctttttaatnnnnnnnnnnnnnnnnnnnnnnnnnntgtgaccaaaaaaacccgggaactccctaaatctggggnnnnnnnnnnnnnnnnnnnnnnnnnnnnnnnnnnnnnnnnnnnnnnnnnnnnnnnnnnnnnnnnnnnnnnnnnnnnnnnnnnnnnnnnnagaaaatcaaatattttattttcattagaaaaaaaacccttgaataataggaatcattttacacattaatggttgctctttaaaagttagaatctcaagagataccaaaagcacttaagagttaccaccacattttgcccaagttctaaggaaagttctgaaacttagtggtggtgtgtttgtactcagcaagctccagacagtctgagttgctcattccatgaacagaagcttgaaaatgcccttacagttgagatataaacgagggaagaggtgaagctttcaggaagccagagagcccctgccggtcaggtttcctgaggaaggcaggggtgctctatgctcatcagtcattcaagcttctcaggaaatgtgcccatcatgggaacagcagctatcttccaagcttaaaaattatgaatcccaggaagttaaagcccaaccagccaaccaccttcacatccttctcatactagtagagtcattcaaaacagcaagtggtgcttctgaggcagcctcaggaaggtctttgggtggctattctagaggtgaacatactggaaaggtttttacctaaagcattttcagttgaaatgaaaaaagaaggaaagctccaaaagtcagtttcaaattctttcagtgctgctcccagagaagtccgtgtgcanaggtgtgatgttctggtcataagcggcatactcagaggtgccggtactggccagcttgagctgctgggcagcatgggtcagctg

SEQ ID NO: 122243 - DNA, 1399 bp, Homo Sapiens
ttttttttaagtgctcttcaaatgctattacacaacgcaagtttcccctcccctccattatctcctaatcattctccctgacaccctccttccacccctaccaaaaggtgctagatgcaaggggggcatgcagaattcaagcactgtttctccccatggaaaaaaatcaggtttcaaggtagtcagtcacatctaatagtgtacttaaacatacccctctactttttgtcgtttatttctatttataacaaactcttgtgttgagggctcttgatggacggcagcaagggagctgctctgctgcatatgaaaccccgacccagagcccctctactcatgcgatgtgtagttgacagccacttcacaaacattttcagctacagaaaatatattcaaggaagaatgttaaaaagtttccttataacctacaaggggttctctctagatgtaaacaaatctggatgaaatattttaatccaagtataccatttcccacgtcgtaaatcttctgggctggtgggagccaatccagttacacactggaaggggagtgagggtcccagggcttccccacacctcacaaggcccaccctctctttgacctgaaacccccaattgcctccacaggcaaaacaaaactcaaatctctctagactcaaagacttaagactatgccaacctatttgtttgtaattacactgctcaaggctcctgtttcctctccttcagccattctccagagcgctcctcaagagattttaagtctctcacagccagactgtatttcccttggtcaagaagcaaccacggaatattctacaagattcttagcctcatccgccagatgacgggcctctgcgtccaggtctccaggagcaagctccgcctccttcaccagacaacgggttataacctcctccccgcaaaggctttctgtccgatttccgtttcaggacagatgaagtggaaggcccaggactgtcttcctcctggggcttctttgcatttcctttgtaactttttccttcttgcatgctgtcccacatttcaatcttctgtctccttttttcttcttcaagttgtttcagtttttccttatgcttttcaacttgcgcatttagttcttcttgcattttcagtcgagcagctgctaaagcttcttgtcgtttaacaacaacatcaggttccacagcagccgcagctcggtccagctgcctctgcctcaaggctcttagccgggcggaaagcttctgaaagaccacgtagagaaggatgcagctgaagacgatgtaccagccataggtggccagcagggagcccaccgtggtgtgcaggaagcgcagcccctcggtctccagggccggccgcgcggacagagactcctcttggcgttccatga

SEQ ID NO: 122244 - DNA, 1156 bp, Homo Sapiens
tttggaggttgtaataaaaagctatttaatgtttgatagacaaattgaagtccataaatctccttgaataaagatgctaaaaatgttattcttgttttttaaatagtttcgtttttacaaagttctgtacataaaaataaatatacagaaacaaaccccatcaactgtccacatcagtaatcctcactggtgggctcaccattgataaggaagacatcattcaacgcaacctgtcacagagactgtcctagcagcaaggatttctaacctcaaaagaacattactaggcctcttttatcaagattgctaatcatctagaggcctttacctaccaactagcaattaaccatgaaatcaatgaatgcaatcactgtctccaagtagaatgtgaccaatgacctcatgcctagaggcaacatctataccttttgctgactggagccctgacatatgcaggtgtagttaggaacagaaatcaaccccacctccccttggctagtcactgtgaaaagcgtgcgtaaggcaattgaatcgagggttaagggttcatcttgctaatgtcaaaagtgacactaacaagattcttagcctcatccgccagatgacgggcctctgcgtccaggtctccaggagcaagctccgcctccttcaccagacaacgggttataacctcctccccgcaaaggctttctgtccgatttccgtttcaggacagatgaagtggaaggcccaggactgtcttcctcctggggcttctttgcatttcctttgtaactttttccttcttgcatgctgtcccacatttcaatcttctgtctccttttttcttcttcaagttgtttcagtttttccttatgcttttcaacttgcgcatttagttcttcttgcattttcagtcgagcagctgctaaagcttcttgtcgtttaactacaacatcaggttccacagcagccgcagctcggtccagctgcctctgcctcaaggctcttagccgggcggaaagcttctgaaagaccacgtagagaaggatgcagctgaagacgatgtaccagccataggtggccagcagggagcccaccgtggtgtgcaggaagcgcagcccctcggtctccagggccggccgcgcggacagagactcctcttggcgttccatga

SEQ ID NO: 122245 - DNA, 754 bp, Homo Sapiens
  misc_feature (65)..(65): n is a, c, g, or t
  misc_feature (70)..(88): n is a, c, g, or t
gggtgttcggttgcgtgcatgtgcgttttagcaacacatctcccaaccctgtgcatgactgatgntgggnnnnnnnnnnnnnnnnnnncttcccaactcactttgtgttatgtggaggaaatgtgtattaccaaatggggttgttagcttttaaatcaaaatactgattacagatgtacaatttagcttaatcagaaagcctctccagagaagtttggtttctttgctgcaagaggaatgaggctctgtaaccttatctagaacttggaagccgtcagccaagtcgccacatttctctgacaaaatgtcatagcttatatacatgtacagtattcaattgtaatgcatgccttcggttgtaagtagccagatccctctccagtgacattggaacatgctactttttaattggccctgtacagtttgcttatttataaattcattaaaaacactacaggtgttgaatggttaaaatgtaggcctccagttcattttcagttattttctgagtgtgcagacagctatttcgcactgtattaaatgtaacttatttaatgaaatcagaagcagtagacagatgttggtgcaatacaaatattgtgatgcatttatcttaataaaatgctaaatgtcaatttatcactgcgcatgtttgactttagactgtaaatagagatcagtttgtttctttctgtgctggtaacaatgagcgtcgcacagacatggtttcaggtaaataaatctattctatgat

SEQ ID NO: 122246 - DNA, 1177 bp, Homo Sapiens
  misc_feature (180)..(180): n is a, c, g, or t
agtcgccagggtaattcttcgcttgaggagaaaaccagatttttgtgggcccatgtgttcacagttaaacacaaactgggggccccggcgcggcgcaaaaggaattggttttatgaaagtctttttaaaggggcgaagggcggccgacaaggttttttaaaaagggaaaaggggctgcgntacatagaatagatttatttacctgaaaccatgtctgtgcgacgctcattgttaccagcacagaaagaaacaaactgatctctatttacagtctaaagtcaaacatgcgcagtgataaattgacatttagcattttattaagataaatgcatcacaatatttgtattgcaccaacatctgtctactgcttctgatttcattaaataagttacatttaatacagtgcgaaatagctgtctgcacactcagaaaataactgaaaatgaactggaggcctacattttaaccattcaacacctgtagtgtttttaatgaatttataaataagcaaactgtacagggccaattaaaaagtagcatgttccaatgtcactggagagggatctggctacttacaaccgaaggcatgcattacaattgaatactgtacatttatataagctatgacattttgcagagaaatgtggcgacttggctgacggcttccaagttcttagataaggttacagagcctcattcctcttgcagcaaagaaaccaaacttctctggagaggctttctgattaagctaaattgtacatctgtaatcagtattttgatttaaaagctaacaaccccattggtaatacacatttcctccacataacacaaagtgagttgggaagttttttacttttctttttccccaacatcagtcatgcacagggttggtagatgtgttgctaaaaacgcacatgcacgcaaccgaacacccttacatttctgcaaaatggtttaggaagcggttactccagtattgctgaaaaggaaagagagaggaaatcagcttcatgaaatacagagaggaaacgttagaatacctatttaaatagatgaagatcaacagcgacagatgaaaaggaacattcagcttgatcttttcaaggtttcaagaccagcatttctgatttactgtccctgaggtgccgcccacacagggtagcatctagaagcactg

SEQ ID NO: 122247 - DNA, 1069 bp, Homo Sapiens
  misc_feature (541)..(591): n is a, c, g, or t
  misc_feature (630)..(975): n is a, c, g, or t
  misc_feature (1028)..(1028): n is a, c, g, or t
  misc_feature (1033)..(1033): n is a, c, g, or t
aatggatcctaccagctgctaagttaagaataatttccagtgagggcttttgtagtaaattagagatgatgctggtttgtcaatctccccttccagcagaggaatgtgtgggtaagagagtcacaatgtttctgaacaaagccatagctcctaagtggtgaagctgggcctagagcccctgtttcctgacagctggcctggcggtgggctctgtacagcattgattcccagccagcagacaccctgaaaagtcacatagcagtgggagtgcagatgcttagactctccccatcagaaccactcagttggaatcttcagggttggggccaggtcagcagcagccgcagaagatactctggtcttcctgcttcagcagacaaaggtttctaaacccaaacgtgaggcatgaggataaatgaaattgtaaatggaagcagaaaaatgtccaggtctgagttcctctgctgtgttttagtcagtttcagtgagttgagattgtgccatgcattctagcctggcaacagagcgagactccatctcnnnnnnnnnnnnnnnnnnnnnnnnnnnnnnnnnnnnnnnnnnnnnnnnnnngcctacagccgcggccgctcccctcgttccgaattcttnnnnnnnnnnnnnnnnnnnnnnnnnnnnnnnnnnnnnnnnnnnnnnnnnnnnnnnnnnnnnnnnnnnnnnnnnnnnnnnnnnnnnnnnnnnnnnnnnnnnnnnnnnnnnnnnnnnnnnnnnnnnnnnnnnnnnnnnnnnnnnnnnnnnnnnnnnnnnnnnnnnnnnnnnnnnnnnnnnnnnnnnnnnnnnnnnnnnnnnnnnnnnnnnnnnnnnnnnnnnnnnnnnnnnnnnnnnnnnnnnnnnnnnnnnnnnnnnnnnnnnnnnnnnnnnnnnnnnnnnnnnnnnnnnnnnnnnnnnnnnnnnnnnnnnnnnnnnnnnnnnnnnnnnnnnnnnnnnnnnnnnnnntataccgtatcacagatcaggggatacgaggaaacatgtagcaaaggcagaanagcangacgtaaaggcgcgtgctgggttttcaaggtccgcc

SEQ ID NO: 122248 - DNA, 772 bp, Homo Sapiens
ttttttctgttcctaacacaaatgtgaatttattggttgatttgatatttaaaatagtacttttacaaaatcatctcagaaaatatactacatttattaaaattcctacaaaccattgcagaaaatattaaaccctctaaccaacctaacactcgctttcagaggcacttgtgatgattttcacagcttccatagttgcaaagaacaaagaaatcatcttccaacaggggtggaattagataagaataatccaaaaaatatttatttctttacagactcacagattgcttgatgtttaggggctcttacctaggatacctaattattcaaggttttcctaatttagtagactttttcattgcctacaatctacaatattcagcaaagtattaaggaaaatgaacccaagaaccttaaccacctcaaatagttttatggatatactaaactgtcaagtacaatctttatcttaagacttgagaactggaatgcaggaaaacaaactttggtggaatactggaataaaagacataaagctgggcagaactaggtgtggcaaccttgtatgttaattctgaaagccagaccagtgacgctaagaataacaaatagattcagatttgtttttcagaaacttgagctatttcggccaggtgcactgtctcacacctgttatcccaacatttaggaggtcaaggtgggagaatcacttgagcccagagttcaagaccgcctagcaacacagtgagacctgtctccctcctgcaatgtg

SEQ ID NO: 122249 - DNA, 429 bp, Homo Sapiens
ttttttttattaggaaattgtagataattttaatgaagtcaacgtcaagaatataatctggttgtaataccaatacaatgtgttctaaaataatttttctattgagttaaatattcatctgtagatcctataacagcatgttcatattcacaaaatctgaatgaaaagtaaacacaacttggcatttctgacgcagggtaacacaaagttcacttcggaggggactgagatttttgtttaattttgcttttgaaaccaagcacagttatagtcaaaatgagggacattattcagaatgaggttatgtatttatttaacaaaatactgcttctctgaagtacatttcattagggagagtgacagtaatgctaaaaaaaagaacatgaaaatgcacacagcatttctgaaaggttataataatttatttaa

SEQ ID NO: 122250 - DNA, 1785 bp, Homo Sapiens
  misc_feature (130)..(152): n is a, c, g, or t
  misc_feature (282)..(314): n is a, c, g, or t
  misc_feature (316)..(316): n is a, c, g, or t
  misc_feature (323)..(323): n is a, c, g, or t
  misc_feature (331)..(462): n is a, c, g, or t
  misc_feature (1767)..(1767): n is a, c, g, or t
ataaatttttgggaccaacttttctcccaaaatcccctcaaaggtgaccggccaggaccccgacattccaattttgatgaaggagcccccccctgtggggtcaatccccgaattactccccttgagaaannnnnnnnnnnnnnnnnnnnnnncaagacgccgggggcgtataccacgggacgggattctcttgttggtgttaatgccggggagatccccggagacccctcagattttctggaaacgtatttttttcgggtgtgggcccgctccccggggcgnnnnnnnnnnnnnnnnnnnnnnnnnnnnnnnnncntggtccntgttcttnnnnnnnnnnnnnnnnnnnnnnnnnnnnnnnnnnnnnnnnnnnnnnnnnnnnnnnnnnnnnnnnnnnnnnnnnnnnnnnnnnnnnnnnnnnnnnnnnnnnnnnnnnnnnnnnnnnnnnnnnnnnnnnnnnnngaagagggataaaaatgttttaattgttgaaatacattggtgaattgagtaacttacattgcaatactaagtagatacacaagtcattatcaaattaatttccagatatcccactaaccatccatcgcaagtccttgaaaagttatagaaataatatgatgagattgtcgtgatgtagaatgagcaacccaaacagctatgaagtatttgtagttgcacatgcctttcacgaaagaaaataaaaatgtaatcaaaatgtgcatatggcatgcaaatttgagtttatttttaaatagtgcaatgaaatacacattgttcctaaaaaaggaaattctgacatttaaatgaaatttgaaaaccaaatagtaagaaatggaaagagatagttgtaagaatccatttaccaattttacagctaaaaattaaagtgaagtagaaatagcaaaagataacagacaaatatattattttaggtcattaatttatagtgccttatcatcttaagttataaatagaataaggattttgttatataaaaactatcaaaaaagtatcagtgaaaagacatgacctccatgaaatgtgctgagtggccagggtggaaatgttgtcaaaatgcagcggccctggctgggcaacaacagcctccatgacagtttgttaacttgtctttcgtaggtggccacagaaagttccataaacaagtgtactgtttaaccaattcccttctattaccacaacaatatgtacccagggttttatgtatacacttaagatttgggggaatgcaaaagggaagggtgactgtttagaatttccttggaaatgtctgtgcacattacaacgtcccacggagccaaattccttccaaactgatgagcaagctcttgattcttgagtcatgatgttattttcttctaatttttccgaaccgtctttgtttgactggacaccatattgacagcttcagatggtaggccaacatatactcctccatagtttctcctcttgtcatcttctgttacggattcttctgttacatctttggctgctcctgcagggccttggcccgcgcccgcgctggtggcggtggagttcccgcagcccatcgcgcagccggccggggaagccgcgctccggagctctcggccgcgggtcctgggggcggagacccagacgaagggcggcgcaccccgagcgggaggctgacggggccgcgaggggccaggaaccgagtgggggccgccccctcccaccgccgggagacgcgccccggggcgcagcgggctgcgggctccgggcggnaccacccgcacccctcgc

SEQ ID NO: 122251 - DNA, 749 bp, Homo Sapiens
tttatctaaaaacaaagtactacttttatttggctcatttctccatttattagaataaccacatttggagaggcatgaagcacttaagttttacatgactacaaagttatcacaaatctcaaactttttagccacagatatttcacctctgtttaaagaaaaagctttcaaaacatctgagttagcttaatacacagagaccctgaaatatatgggaactacatattttaaatgcttgtacttcctgctctaataatgtcttctttaaacggaatccagcataaaagggattgaaatgtataaggtcatgatgcaaatgctttggagatagtgaaactgatctgcacaacatggaaaaagatgtcatgtgcacagaagttctgcaaggattcactgagccatctgggcttccatggcttgtgctgtccattctggtgctgtttgactaattttctccaaaaggttattcacttggaaacaaagtgattggatctgcttatcccacgttggcagggcttctcgtgtttcaaaatgaactattccatcaatctggtcaataaatccattcatacgtccttcggttatcatttgagatgctatcttttccgccttagctgcagggatctctaaaagagctccaagttcttcgaaggtaatattattatataatttgcttgcagacaacaattgtgttcaataacagctctgtccaagatgctggaaaccctatcatcccagcactttgggaa

SEQ ID NO: 122252 - DNA, 1233 bp, Homo Sapiens
aaggccttgggcctgtcccattcggggggctgtttggcataattttctcccaaaagggttattcccctgggaaacaaagtgaattggatctcgcttatccccacggtggccggggtttctcgtgtttcaaaatgacctattccatcaatccgggtcaataaaatccattcatccgtccttcggttatcatttgagatgctatcttttccgccttagctgcagggatctctaaaagagctccaagttcttcgaaggtaatattattataataattgcttggcagacaacaaattgtgttcaataacagctctgtccaagatgctggaaccatcagctgtagttgctttttggtgaggcatcagcatgggcagcaaattcttgaagttgatttcctctgatgatcctatctagatacattttctctaggatcccataggcagcaagttggtggcccctttcatccttaaaaagagtagctagcatccgagaacgctgctgccctgctgatgctaagatcgtacagtgcaaagcatgttttaaggcctctagtctttcactttcgtggactattgtcttgtaagagagctcattgtacctttgtgcagcttcaatgaattttcttctataatcaagaacacgtgcatagcataccttataatgtatctgtaattgttcattggttgattcattctgaagcaacgatgctcgatttatgtaagcctctgcctggactggatcatcatcctccagatatagcctagcaatcttcaagtaagtctccagtttataatctacattgtactgtttttgtcctgtttccaaaggaattcccaccaacacttgggctgcatttctccaatcttcttctttctcatatatagatgcaagatgctgtcttatggaagcaacctgctcctcaaatgaaatgactctaggctggatcttttccaaggtgaagtgatagatttctttggctgtgctatcaggcaagttaggaagatgtgtgcaaaaatcagtcagcaactgccgcgagatcacgagactgacattctcatttaccattgcttccacaaaagctttcaaagcttctagttgttctgctccagataactgaatggctttttccaggatctgacgatacttgccagccagatctttatgagagccgctcgaattcatgagctgggccaaatcctgtcgcacggctgccgccatctttctcccagctccccc

SEQ ID NO: 122253 - DNA, 968 bp, Homo Sapiens
  misc_feature (230)..(230): n is a, c, g, or t
cataaccgtgtttatgggtctatagagatcaatgaagaaacataaacattgtacagacatatccaattcacatatttctgaaaagatcaggggtttttgtgttattcagccaagcaaagcaaagcttggatacactggagtctccactcatgagaagaaaggggctgacagttgggaaacctgcactgatcattgcagagatgttcaccaccagctgactgggattattncaaaagagccaaacaaacttgaaagttgaagagagagtgtaaaaggacacaaacgtgctcaccaggaggatggttttggtagctccggactcaggggaggatgtgggggacacgctggtcctatgaatgtgctggacccgccgcttgtgcctgtgcaggatgcaaacgatggagctgctgccccagagcatgagccccaggcagatcacatcagggaaggacagcagtgccgcgtcagcgactctctggtgccctcgtgatcagcagcagaacagtatcccagatcttttgtcttcgtggtatttttgttgctccacttgccggtcacgtgcatgagaacaatgatattgaccagggaggagccagctgaggaacacacaggagccagcgtgcttgggggcgttccctttaagctctgcccacctgagctcctggggctgatggtgatggcctgggagacactcaggaggcaggtgctgccaatggacactcccctgcctactccagggagaccaggttcctataattctccagcatcacgtccctgtatagagtcctctgagcagggtccaggcatttccactcctcctgagagaattctatggccacatccctgaatgtcaatagaccctgaggaagagccatccctgactcctttgctttcctcttcctcttccgggtttcttcctcacgtaccaagagtctttagaagtcaatcccgcggcggtggacagtcac

SEQ ID NO: 122254 - DNA, 1048 bp, Homo Sapiens
  misc_feature (63)..(73): n is a, c, g, or t
ccctgggggaggacacacaccggggtgtgtaacggtggccccccaggggggcgatggggttgnnnnnnnnnnngggtgttcccccgcagtggcgagggccgggtgtgagagccccaggtctcacagtgtccagaccaggccgggtttctttgtaggaatgaaggaagatcatttgcgcccaacggaccgttctgtaagtgcgggactaaacaacaggattgtggttcttctgggcccaggtaatacacggaactctggtttgttgatccccctggcgccaccgggccgaatcattctttagaaggcggtccaccttacacgcctctgtgtttctgctccatcacccatctggtccaggattgggcatcagccagtcctcaaacttgcagtaattctcattgggcaccagcaggtttccgatcctattgatcccgttctcccggagctccttccccctgaggctaaactcgcccaagtatgtgggcgccaggcacttgatgaggtcttcctccacgccgccagctgtggtcaccaatacgtccaccatgttgtgctgcacaaggtagcgaatggtctcacggatgcctgaactgatgaggttggatgtatatcccaggaaaatggtgcagctggtaagtgggcggcggctctgggtcaggtccgcgtgctggtcttcatcctgtgacagtggttccagcttcttctcgatcatggcattgacttgctgtacagcgcgcccgaagttggttgcttggaagccggtggtgccgaaggcctccagcagtgcgcggtaattcacaccgcggttgaagtcgtagccccggacctgggtgctttcgggcggcaacgtcgagctgtgctttagcacggcggccagcgcccccgctggcgcctcccgttccagggaaccttccatgcgcctatagccggctctcgagtcaaagctgcccctaggccgggcttacggcggcccagaaacgcgttaaaccccgacgcgcgcgtctccgcctcgtgccgattcgacacccagcctcgtacctagccgtaa

SEQ ID NO: 122255 - DNA, 830 bp, Homo Sapiens
cagcattatgaagctttttatttgtgagtcaacaaggcttcagtctcagtcaaataatggaagggctccccaagaaagacaacagagaaaatacaaaaatacacgagggcagatcttaacttctagagcaaaattatccttacccaggaagaccaggttcctgtagttctccaacatcacatcccagtacaaagctttctgcacagggtccagggatttccactcctcctgagagaattctatggctacatccctgaatgtcaaaggtccctgtgtaagagccatccctgactccttttctttcctcttcttcctcttctgggcttctctctcagtcaatataattaattctttacaagtcaaatctcgtaggcctggcgtggtggctcccgtctgtaatcccagcactctgaggcagaaagactgcttgagcccaggaggttgaggctgcagtgagcggagatcatggcactgtactctagtctgacagagcaagaccttggggcgaaggggctgttgctggtattttaaggtccgtagcgatccccaggaaacgggtatggacaagggaagactgccaagtgcacgttcgattcaggcagacggggcgaagcaaatgtttagtccaggtagacggaaactgacgcgcagcgctgtgatcttttccccgcgcgatctgcttccgggtgtgcaggaagctacacgccctgagaaaaaagactgagagacctggggcgggagaggggcctgggcggggtgcgacccgcaagcctcgtgccgaattcgccacccaggcctcgctaccttaggaccgttatagttactgccgg

SEQ ID NO: 122256 - DNA, 2529 bp, Homo Sapiens
gaacgagctcagtgtcaacccccgggttataacgacggcagtaactactaacggtcttaaggtagcgaggcctgggtggcgaattcggcacgaggggaattttccgtacagaccgatttaaggctgcaaggaaggagtcctgggagcatggctttccctgagccaaagccgcggcctccagagctgccgcagaaacggttgaagacgctggactgcgggcagggggcagtgcgagccgtacgatttaatgtggatggcaattactgcctgacgtgcggcagtgacaagacgctgaagctgtggaacccgcttcgggggacgctgctgcggacgtacagcggccacggctacgaggtgctggatgcggccggctcctttgacaacagtagtctctgctccggcggcggggacaaggcggtggttctgtgggatgtggcatcagggcaggtcgtgcgcaaattccggggccacgcagggaaggtgaacacggtgcagtttaatgaagaggccacagttatcctgtccggctctattgattccagtatccgctgttgggattgccgctcacggaggcctgagccagtgcagacgctggatgaggccagagatggcgtgtccagtgtgaaggtgtcagaccacgagatcctggcaggctccgtggatggccgcgtgagacgctatgacctaaggatggggcagctcttctcagactacgtgggcagccccatcacctgcacctgcttcagccgggatgggcagtgcaccctggtgtccagcctggactccacattgcggctcctggacaaagacacaggggagctgctgggcgagtacaagggccataagaaccaggaatacaagctggactgctgcctgagcgagcgtgacacacatgtggtcagctgttctgaggacgggaaggtgttcttctgggacctggtggagggtgcgctggctctggccctgcctgtgggttccggtgtggtgcagtcgctggcctaccacccaacagagccctgcctgctgaccgccatgggaggcagcgtccagtgctggcgagaggaggcctatgaggcagaggatggagcaggctgaagccaggggacccaccaacaggaccaaggaccgagacacagacatggaaggacttcagataccatcttattctagagacgtagctgaccaaaaagtaggggaggggctgggtctgcaaattaataaatagaagagggggtaagaccttcctgggaccgcagccgctcagtcctcgttcttctcatgcatgaaggcatccatcttctgggcaaaggtttcagccacaagcagggggaagaccagggaggcgtcagcatagaccttgacgggctgtgcatccacccggatcttgccccaggagacagcctcgtctggtcgggcacctgagtcagagccatcaaactcctgggctgtgttgatgtaaacagcgtagtcggccccgttccgcatgaggttggcattggcaatgtggtgcttgaccacgcccccgcccagaatgatcatcccagtgcacttggcaaagatggcctgtgtgttgatgagcctcaggtcctcaacgatgtccaggaccaggcccgggttcttgtaggaatggaagaagatcatgtcgcccagcgagccgtctgtaagtgcgggactaaacacagggatgtggttcttctgggcccagtaatacacggactctgggttgttgatctccttgcccagccgggcgatcatcttagaaggcgtccactttacaccctctgtgttctgctccatcaccatctggtccagaatgggcatcagccagtcctcaaacttgcagtaattctcattgggcaccagcaggtttccgatcctattgatcccgttctcccggagctccttccccctgaggctaaactcgcccaagtatgtgggcgccaggcacttgatgaggtcttcctccacgccgccagctgtggtcaccaatacgtccaccatgttgtgctgcacaaggtagcgaatggtctcacggatgcctgaactgatgaggttggatgtatatcccaggaaaatggtgcagctggtaagtgggcggcggctctgggtcaggtccgcgtgctggtcttcatcctgtgacagtggttccagcttcttctcgatcatggcattgacttgctgtacagcgcgcccgaagttggttgcttggaagccggtggtgccgaaggcctccagcagtgcgcggtaattcacaccgcggttgaagtcgtagccccggacctgggtgctttcgggcggcaacgtcgagctgtgctttagcacggcggccagcgcccccgctggcgcctcccgttccagggaaccttccatgcgcctatagccggctctcgagtcaaagctgcccctaggccgggcttacggcggcccagaaacgcgttaaaccccgacgcgcgcgtctccgcagcctcgtgccgaattcgccacccaggcctcgctaccttaggaccgttatagttactgccgttgccg

SEQ ID NO: 122257 - DNA, 540 bp, Homo Sapiens
ggttcgacttgattacatccatttattaccttttcatctggaaatagctccagttcagacagatgtaagtgaaaggatactccaagttgttttttaattggtttgtcttctgcattgcttcccaatgcatagctgctccctgtgttcacacctttgatgcactccctcccatctggattttttgctattttcacttcactctcaccagtccagggctctctcctttgctccaacatggagttaatattcaggtcaggaagagagattcccagggagaccaggttcctgtagttctccaacatcacatccttgtataaagccctctgtgcagggtccaggcatttccactcctcctgagagaattctatggccacgtccctgaatgttaagtgtccctgaggaagagccatccctgactcctttgctttcctcttccttctcttctgggctttttcatcacacagcatgactctttagaagtcaatcgcgccgcggcgtgaccttcactccacgcgatccgcttccgggtttgtgggaccc

SEQ ID NO: 122258 - DNA, 504 bp, Homo Sapiens
atatacatccaacctcatcagttcaggcatccgtgagaccattcgctaccttgtgcagcacaacatggtggggacctggtgagaccgtggccttggcctctgggtcaatgggcaatgcagttattgatcgtttaagtgagatgggcagataggggtctgttataagcagaggaatagaatcaagttttgttttgtagcagagctccctcataagagtcactggacaaggatgaggttagaagttctgcccagaatgagggcaggggcttccttcttgggccaaattcactgccttgtggctgcaggtggacgtattggtgaccacagctggcggcgtggaggaagacctcatcaagtgcctggcgcccacatacttgggcgagtttagcctcagggggcaggagctccgggagaacgggatcaatatggatcaggatacctgctggtgcccaatgagaattacttgcaagtttgaggactggctatgcccattctggtcaatgc

SEQ ID NO: 122259 - DNA, 714 bp, Homo Sapiens
ttttaaatggtagtcagatttcacgtgtatttttgctaaaactgaaagctgtcaggatccacattggtgttaccagtttgtactgaagcctgatacaatacccaacagtattgctctggttttttcaagcacacactccaagcaagtggtcagtctggcttaattcattatggctttttttcagggtaagagattcacacgcaagagaataaggctacaaatgctccaaacatgggtccagaactctggctcttttgtgaggcctagagtcacagaaaatgccatctgttaagaagctgcttttgcataaaaaaatataaaaagttacaaaattccatcaaagacagatacacagtataaatcgttaggtgaacacagaaggctggtctcatctcctgcagtggcccatagacctgccctgaggtctggaagttcactgtcctgagggtccaggaactcctgcctgctggctgggctctaggaagaaaggagggtttggctgggcccgcccagctccccatgacactggtcactgtgatgccactgttgtaccctctgtcttctggaccagtcagtctatgagccctctttgaaacagtcttagacccagaatggtcatctcacccccagaagacatggttccaagggtgggaggtgttagttatgggtgccgagcccacttcctgggcgacaggcaaggcatttctccctgct

SEQ ID NO: 122260 - DNA, 989 bp, Homo Sapiens
  misc_feature (28)..(28): n is a, c, g, or t
  misc_feature (83)..(83): n is a, c, g, or t
  misc_feature (176)..(176): n is a, c, g, or t
  misc_feature (178)..(178): n is a, c, g, or t
gaggaatcccaaggcccttagttcatgncccagggatttccttagagaaaccagcttatggcccatgtttcaccttaccttancgggggcccgcgccgcccaacgaaaatgtcctagaaagcttcttcgagggccggagggcggccgacatgttttttttagtttatagggttttnantttttgtctggcttaattcattatggctttttttcagggtaagagattcacacgcaagagaataaggctacaaatgctccaaacatgggtccagaactctggctcttttgtgaggcctagagtcacagaaaatgccatctgttaagaagctgcttttgcataaaaaaatataaaaagttacaaaattccatcaaagacagatacacagtataaatcgttaggtgaacacagaaggctggtctcatctcctgcagtggcccatagacctgccctgaggtctggaagttcactgtcctgagggtccaggaactcctgcctgctggctgggctctaggaagaaggagggtttggctgggcccgcccagctccccatgacactgtcactgtgatgccactgttgtaccctctgtcttctggaccagtcagtctatgagctcttctttgaaacagtcttagacccagaatggtcatctcacccccagaagacatggtttccaagggtgggaggtgttagttatgggtgccgagccccacttcctgggcgacaaggcaaaggtcaatttctccctgcttcaagaatgaagagggaactggtgctccttgaaccaaagattcttggaagggtcattgtcaccaaagtggctggtgtgggcaggagcaccaagtgcagacaaacccaccggggcctggcggggcagccctgtcatggtttctgtctttgttcctgttagtgaaacagaagacccccgacccccgccacctagcagcatggaacacctgctgcccagatacagacaaggctcgtgctttg

SEQ ID NO: 122261 - DNA, 1041 bp, Homo Sapiens
  misc_feature (514)..(531): n is a, c, g, or t
  misc_feature (579)..(840): n is a, c, g, or t
  misc_feature (953)..(953): n is a, c, g, or t
  misc_feature (955)..(955): n is a, c, g, or t
taacatagttctcaaaaagaagtgcaataaacttttattctttcttgattagatggagttacaattgccaaaataaaaatccaaggtccaattctggttttaaaactagaaaaggaaaaaatgttattatcagtaatgactttgggaagaattctttaacacacagtgagggtgagttcttttggaaacaactgtattctatgtttatacatatttatatataaaaggtgtcctcattgggggtggggggtgctgatgccaccaagttcctttgaagccttttctcccccactgccaatgcccgaggggaaggagtcttcaatggcggctcaatctagctcttgcgtttagacttggatctcattccaatttaggcttttctttctcttcttccatacttttctgtgtatcccagatatagttgttcagaacttctcccagcaggtacaggaagttcattaagatggttgtagaccccaaagaagatgattctgggatacacagaaaagtatgnnnnnnnnnnnnnnnnnngcctacagccgcggccgctccaacatcaaacctcgtgccgaattcttnnnnnnnnnnnnnnnnnnnnnnnnnnnnnnnnnnnnnnnnnnnnnnnnnnnnnnnnnnnnnnnnnnnnnnnnnnnnnnnnnnnnnnnnnnnnnnnnnnnnnnnnnnnnnnnnnnnnnnnnnnnnnnnnnnnnnnnnnnnnnnnnnnnnnnnnnnnnnnnnnnnnnnnnnnnnnnnnnnnnnnnnnnnnnnnnnnnnnnnnnnnnnnnnnnnnnnnnnnnnnnnnnnnnnnnnnnnnnnnnnnnnnnnnnnnnnnnnnnnnnngctctccgctcctcgctcatgaccgctgcgccggtcgtcggctggggagcggacagtcactcaagcgtatacgtatcaagatcagggatacgcagagacatgtagcaaagcananagggcagacgtaaaagcgcgtgtgggttttcatagtcgcccctgagagacaaaaatcagtaatcaaagtgggaacgaagacataga

SEQ ID NO: 122262 - DNA, 1418 bp, Homo Sapiens
cagggaagctttgtctttattagtcagcatttgcatctaggaaaagtttcacatgattaaatcaagagatgcaatacactcaggcttttcatgaaattgacatcattattacaaatggtgctcatttgaggcaactgtgacattatgcaatgagaaacatctgtccccttccctctcaggtccccatggtggcctaggttcatgattacagccacctttaggattaaatacacaaaagccttactctatatatgcccctttgactttaacatatttctcaaaaagaagtgcaataaacttttattctttcttgattagatggagttacaattgccaaaataaaaatccaaggtccaattctggttttaaaactagaaaaggaaaaaatgttattatcagtaatgactttgggaagaattctttaacacacagtgagggtgagttcttttggaaacaactgtattctatgtttatacatatttatatataaaaggtgtcctcattgggggaggggggtgctgatgccaccaagttcctttgaagccttttctcccccactgccaatgcccgaggggaaggagtcttcaatggcggctcaatctagctcttgcgtttagacttggatctcattccaatttaggcttttctttctcttcttccatacttttctgtgtatcccagatatagttgttcagaacttctcccagcaggtacaggaagttcattaagatggttgtagacccaaagaagatgattctggctcctgggccaatgtgttccaggaaagggtacacccacatgccagttacatgatgcacccagcacacccataatatatagccaacagagaaggtacatatggcggtaagtccgctgctcctgctgggatactgatggtgcgatgtcctcatctcgattaatataaagggcagaaccgtcgtgtgcattccgtgattcagccaccctgggataaaattatccagcagcttcgggtatatcatctctctgtcataggcataaatgatccagaacactgctacaacaaaaaccccaacaggaaaggccaacacagctaacatccagtcccggagagagatgagcttcttgagctgcctctcttgctcctggttcccacttcctcgagtcagaagactggaaagatcagtcagcacacagatgccaaaaaagacagcctggataaccagatcaatgaacgtcaggaatttccagctccctccgtaggtctggtgtgagggcatttcgatggccttgtagttacacaggatagagcagtaagacagcaggattgccatccgcagcacctggcaggggacaagcgccatgttcgccagaggcctggaccggctccccggccgtaatggccgaattcccgggcatatgtccggtaccgtcgactg

SEQ ID NO: 122263 - DNA, 2248 bp, Homo Sapiens
  misc_feature (776)..(787): n is a, c, g, or t
  misc_feature (2061)..(2069): n is a, c, g, or t
  misc_feature (2117)..(2151): n is a, c, g, or t
  misc_feature (2154)..(2192): n is a, c, g, or t
ataatttctaccttcattattttacaactgtttattatttagactgtatgctttttaataatatatgggaaaacattattttcattagtaagatgactccaaattatagagaggatgagtagcttttgaattttcctgcaggcaaaatataaattcttgatacatttcaattcttagatcaaagtatttgcatatcttcctcaatcaaggtgttccattcactttttgatgttttatcaccatcacttcttatctgagatcttatggttcattttgaggctcttagccatcctttatcctcttattttctcaaatgcatattcaaattaggtaaaaggaaataagggtaaatttttaaaagatggtttaaaatggttttcagactttgtaattcctgttgccttttaatatataagggaatgtatccatatagagaacatttcaatgatcaatgcagaaataatgtatttgtcttaaaaaagaaactttcaagaaagggacaatgaatcaggtagttcattatttggagaagtaatacagactataaacatcacatggaaaatttaggcattaagacctgaattaagtttaaaatttcagtttctaggcaggtatgacaccatttctttcaagataaatatcataatggtgagtgaagatttttacatttccccagtggattttctgacagtcaatagggaaaaaactattctgcatcatttcatattttaaattttgtcttcatttctgaagaaaaagacctgagggctgattcnnnnnnnnnnnncaatttcttaaactttcacaacattcagaagtttttctgcattgtgtcttctctgatgtctaaaaagatttgagctttgactatacgatttcccacactgaacgcattcataaggtttctccccagtatggattctctgatgattaataagccccgaattctggctaaaggctttcccacattcaagacatttgtaaggtttttctccagtgtggactctctggtgttgcacaagaatggaacttcggctgaatgctttcccacactcaacacatccataaggtttctccccactgtgaattctttgatgaagaataagggctgagccctgactgaagtgttttccacattcatcacatatatgttgtttctttcgagagggatttctctttctttcaaacctgcccttggggaaacaggtttctccatatttaaaaatttgaggaacacccatactgagagtgccaggaacttcatgggattctaatgctgaaggaagctcctgctttggagctagtgctccattttcagtcctaccatcatcatcacagtgccttagggaatggagctcccaggatgcccacttgagctggttctccacagcatcaagctcagaacttggtaatccctgagcttcttcttgagataccatgtcttctactagtacttcccgttttcgtcgacggagagaaaccggttgtccagggtcatcaagttcactctccaatcctccagcactgtcactgcctcctctccattctctggatgatgatctcgaacccaagtctgtagctctttgggtaggatggcaacaaactgctccagcactaccagctccaagatttgttcttttgtgtgcgtctctggcctgagccacagacggcaaagttctcggagctggctcacagcctcacggggcccaggtgaatcctggtatccaaactgcctgaatcgctgtcggaaaatctctgggtctgggagatggttccaggggatacttgatccctcttcgccatcaggatcctcctccaacttcactctcagaattttttcctcttcatctggagttgggatgataagtattgaatcttcttccactgactgtgcagacattctgatttataatatttcaagaaaagacaactgaggcagaatataagcctcagggcaataccccgttttcttcacaggcactcctccggctcaggaaccgcagcagcttcgctgtccacggcagacgcagaaacgccgttcacaagccttttcccagaaannnnnnnnnggccgtaatggccgaattcccgggcatatgtccggtaccgtcgactgnnnnnnnnnnnnnnnnnnnnnnnnnnnnnnnnnnncgnnnnnnnnnnnnnnnnnnnnnnnnnnnnnnnnnnnnnnnctcgcgataggccggcccccttatttagtgtggttgattccaaaaaaaattttttt

SEQ ID NO: 122264 - DNA, 545 bp, Homo Sapiens
ggcacgaggtgtcacttccagtgctcatgtactccattaatgttgctctttctggagagtctcatgaggtggtcgtgaggattaacagagattgatttattaattaaacatttaaatgtgtctgatgtaatagacattatggaaaatctttatgcaagtgaagagccagcagtttatgaacccagtctaatgaccatgtgtcaagacagtaatcaaaacgatgagcgttctaagtctctgctgcttagtggccaagaggtaccatggttgtcatcagtcagatatggaactgtggaggatttgcttgcttttgcaaaccatatatccaacactgcaaagcatttttatggacaacgaccacaggaatctggaattttattaaacatggtacgtttctttccgatcagttgggtgctatgtgctcagctttcctactgcagtttcatttaatgcagagtggtgtttgaatttggcttagatgggctggcaggcatgattttaaaaaatgtaatcatcagtaagaagtacttccatgttaaagatgc

SEQ ID NO: 122265 - DNA, 428 bp, Homo Sapiens
gcaagttttcagtgttcacgtggtttttttgatctataaataacagttaaaatgtctattggggtccttatttaactctcaaaagggttttagaagtaaatagcagattcaactatccattgaagccacttttactaatatgtgataacatgagcttagagtagactacttttcttactatactccatatcagggtaacccatggcgtgcaattattttatctagaagtagttccaagatgttatggtactagttcaaaagaactacatccagatctttgtgttccattttatagagatgatacattgttgaactgtaggcttttgtgcattttcaggaacatggtctcgtgctaaagagtttttattttcattaaattatatgcttttaaaaattacataggcaagagagcttgaggcaaacaaaaa

SEQ ID NO: 122266 - DNA, 942 bp, Homo Sapiens
  misc_feature (154)..(154): n is a, c, g, or t
gtgtgcccaggaatcctcctagggaaaaccagttaatggaccaatgttccacttttccctaacggggcaccgggggccccaaacggaatggttttagaaagctttcttcaaggcccgaaggccggccccccaaggaaatttttaatgatacgtntttgtcccgggggaaaaaaatatttcatttggtttatatttcaaatgtaatttaaaaagtttataagccaggaaattcgataatatgaaagcaaggagaaactaagttgcaccatttagctaagttcagggacaacattcatttataataaatcaaaaatttgatttttttcatgccatcagttgtacttaagcatatccatcatatttcagttgcaaaagatggtgaagaactcaagctgaagaggtgtctgctgaattttgttgcttcggtaagagcttttcaccatcagtttttagaaagtacgcatggctctccttctgttgatatctctcttgatttggcaaagagtacaatgaggacagcaaagagttgccatatagtcatcacaaatagatccagggatgccatatcgggtcctgtagagagtcctcattgcgacgcttgttccacacagacagcattcattcatatcagctgcaacttgacacccaaggcacgggaaacaaaatgtgccacagagacagactccgcagtcgctgaaacagtcacacatgcctgtctgccagttggagttctggggggccggaccgggaccgactccaggttgggtcacaacgaccaccggcgcctgagcttgcattttcagtgcagggccttaaaagcagtggaaattagtaaacaaggttccgagcaggaaatgtcttgtggcctgggagagaatctcaccacaaatgaaaactacgtgaaaggggagaggtaactgtgtttctatcgcagggcatccc

SEQ ID NO: 122267 - DNA, 1057 bp, Homo Sapiens
cttattcagtctccgtagagactgtcaaaaattgccagcgctgattatatttcaagtcatcacggtggggtattgggaaaatttccaattagcaataatcgcgtctcggataaatctcattggctacggtactgccactgtgcaaagctagcttgacgtaggactttgatggtcatgtataacacctcacaggggcagaacctcctccatccccgactccaaagactcatgtaatcagtacgcaagaaagttcagagatgagacctctggttgtattccacctttgggacatgggggatgtctttagttcaaagtcacaaataaatgcaggttctacaattcagaggcttcatatccctgctggagtattacatgtttattcaggatggaccacttttcttagcaacagtttctaaacctttgccaggtctgggaagtctggcaggagagatttctaagaaccaatcattcctgcacacatttcttgaagataatatacattattccctagttatctcttcctaggtttttgtaggctcatttcaatattacaacaatctttattggaaaaccccaagtattttgtcttgaaaaatcagcaatccaggtattaaaaatagcatggaatgcccaattttactttgataattacatggtagtcagtttccgctcctggctaaagccttggattttcttctgggcagttcctaaaggcacaggtggcatggaagaaatcattccattttcatctcctccccttatttgattggtgtctggttaccaaaagagtcatcaggcccttggattaccttcttgaactgatcttctagatcgcaagtcaagactgccatcatgttcccccaaatgcaaaaagccttgttgctccacctctctcctttccagaacaagtgagctggggtttgctttcttctccatatcctgcagcttgatcaatttttctatcaggaacattttatctttgccctcattaatgatctgctcatggagcagccttatcataatcttccttccctctgtgatctgccgagtaagatag

SEQ ID NO: 122268 - DNA, 1828 bp, Homo Sapiens
  misc_feature (1455)..(1534): n is a, c, g, or t
tttttttcataggtctgtcaggttttatttatagagtctggtgaacttgaactagagaaagctgcaaaaagtggtttggagagcatggcagggccatggagaagggctaatagaagcaggtcccttgcccagaccctcagggagcccttttggtggatagcggacacctgaggcaggaggtggcaggggccaagtccaggcaggcagcagcagggctgcaactgagagctgaggctggagaggtagcgctcgccctaacctgatcctgcaggtctcaggccctggggtcatatactcgccccatgaagacagggaacttgtgctgctggtcccagagcacgaagaggaagggctgctgcacttcaaagaccagcagggtgcgggccacagagatggcggaggctgcagccgcctccaccccagtctctgtcagttccagcactgtctggtgctgcatcgcagaaacctgaagatctgggtcctctgtcagcccacacaggttaaggtcataagaaaaatcgaagaattccaatttctccatgattgagagcatatcctggctggtcgtcactttgatgcggggtagtgttaggagagtgggctggaacttggacatctccagtttctccatgatggccttgaaaacagaagggctgagagcctgttccatgtcttcaagacgatgtttcaggttctggggtaccaggatcaccaaactcagattgtgggagagctgcagctgccccaccttggctttcaaagtttggtcaatgaaatgggccacagggtacttcttgctattcatcatgggcacttttataactgagtttttgaagtgaaagggttccattctggttttcttgggatcaaatgttgtcttccacttggcactcaggtagatagcattgaggaggacaaggcgggtatcggagggcagactgtctagcagccggctgatcttgttgttggtgttcttggccacccaggtgttgatgagctccaagttggcgtcactgttgttgcttaggactctggggctgctgctgtacagggtccgagaggcattcacaaaggtgtcccttatggccaggtctgggctgtggaagatctgagagactgaggtgacacctttggtcgtgaagcccttcagggcctggtggacacaggtgaagtccttggggtaagagaggatgctctccaggtttgttttggtgttctccccagccccgagcaggacctgggtaaggaggctggcgatgctgaatggggaaaaggccatgttggtctccaccttcttcattgctgagaaggcgtggtagagcttcagggagaaatctaccaaagcatcccccaacacggcctctgttgaatgactctccaagtcagagcagagagtaacagttcctgggcagaaggacccagtagtgggctgggtaggagaatctgttgggagcnnnnnnnnnnnnnnnnnnnnnnnnnnnnnnnnnnnnnnnnnnnnnnnnnnnnnnnnnnnnnnnnnnnnnnnnnnnnnnnnattagctgttattttggtggctgaattggttgttgagttggttgtcggcaagctggaaacctccaggatgggttcaacgaatagcatcttggagataactgttgttgcgaccttcccttcgcctctgtcttgcaaactctctggatcctgggagctggagctggtagcatttggatttgaggaggctctatccccagccagcagcagcagcaggagggtcagcagggtcagcctggaggccatctgggcggcgacgtcagcggactccaaacttctggtcatcccgggaattcc

SEQ ID NO: 122269 - DNA, 445 bp, Homo Sapiens
  misc_feature (64)..(64): n is a, c, g, or t
  misc_feature (67)..(67): n is a, c, g, or t
  misc_feature (124)..(124): n is a, c, g, or t
  misc_feature (317)..(317): n is a, c, g, or t
  misc_feature (368)..(368): n is a, c, g, or t
  misc_feature (379)..(379): n is a, c, g, or t
  misc_feature (415)..(415): n is a, c, g, or t
  misc_feature (421)..(421): n is a, c, g, or t
  misc_feature (432)..(432): n is a, c, g, or t
ttcttatgaccttaacctgtgtgggctgacagaggacccagatcttcaggtttctgcgatgcancanccagacagtgctggaactgacagagactggggtggaggcggctgcagctccgccatnctctgtggcccgcaccctgctggtctttgaagtgcagcagcccttcctcttcgtgctctgggaccagcagcacaagttccctgtcttcatggggcgagtatatgaccccagggccttgaggaccttgcaggattcaggtttaggggcgagcgttaccttttccagccttcagttcttcagtttgcagccctgntttggccttgcctgggattttggccccttgccaccttcctgcctcaaggtnttccgttattncaaccaaaaagggtttcccttaagggtttttggggnaaaggnacctttttttntttaaggcctttt

SEQ ID NO: 122270 - DNA, 850 bp, Homo Sapiens
cttgtcttggtgtcccttttggcctagctcttgggctgtggatagactcctgaggtcctttgcgtgtgtcactcttttgcttccgttgagtcccttcccgggttctggttggtcctattgtgttgtacgttccgttggggcgttaagtcgaggtattgcttcgtcccattgttttgtttttgcttgttctcctgctgctccgcgagcaggacctgtgttaaggagtctgtcctatgtctgaatggggtatataggccatgttggtctccacctgtctgtcattgctgagaaggctgtgcgtagtaagcttcatgggagaaaatctacctagagcatcccccaacacggcctctgttgaatgactctccaagtcagagcagagtagtaacagctcctgggcagaaggacccagtagtggcgctgggtaggagaatctgttgggatctgggtatttgcttggttggcttggatggtgggttggctgctgggctctgtggtgggttgtgtggtgggttcatcagtggtattagctgttattttggtggctgaacttggcttgcttgagcttggttgtcggcaagctggaaacctccaggatgggttcaacgaatagcatcttggagataactgttgttgcgaccttcccttcgcctctgtcttgcaaactctctggatcctgggagctggagctggtagcatttggatttgaggaggctctatccccagccagcagcagcagcaggagggtcagcagggtcagcctggaggccatctgggcgtctacgtcagcggacctgcccccggcctgtaatggccgaattcccgggcatatgtccggtaccgtcgactg

SEQ ID NO: 122271 - DNA, 810 bp, Homo Sapiens
  misc_feature (312)..(312): n is a, c, g, or t
  misc_feature (688)..(722): n is a, c, g, or t
  misc_feature (726)..(767): n is a, c, g, or t
tttggttttcttcctcagccctcgagcaggacctgggtaaggaggctggcgattcttgaatggggtataaggccatgttgtcttccaccttcttcagttgctgagaaggcgtgttagagcttcagggagatatctacctaagcatccccctacacggcctcttttgatgactctccaagtcagagcagagagtaacagctcctgggcagaaggacccagtagtggcatgggtaggagaatctgttgggatctgggtatttgattggctgggttggatggtggttcggctgctgggctctgtggtggcttgtntggtgggttcatcagtggtattagctgttattttggtggctgaattggttgttgagttggttttcggccaagctggaaacctccaggatgggttcaacgaatagcatcttggagataactgttgttgcgaccttcccttcgcctctgtcttgcaaactctctggatcctgggagctggagctggtagcatttggatttgaggaggctctatccccagccaagcagcagcagcaggagggtcagcagggtcagcctggaggccatctgggcggcgacgtcagcggactccaaacttctggtcaccaggcagctccagtgcagactccccggccgtaatggccgaattcccgggcatatgtccggtaccgtcgactgnnnnnnnnnnnnnnnnnnnnnnnnnnnnnnnnnnncggnnnnnnnnnnnnnnnnnnnnnnnnnnnnnnnnnnnnnnnnnnataaaaacgcgtagcgccctatagtgagtctatacagtcttgg

SEQ ID NO: 122272 - DNA, 779 bp, Homo Sapiens
  misc_feature (655)..(689): n is a, c, g, or t
ctggtaaggaggcttgcgatgctgatggggcaaaggccatgcttggtctccaccgtcttcagtggctgagaaggccttggtagagctttcagggagaaatctgccgtgagcatcccccaacacggcctctgttgaatgactctccaagtcagagcagagagtaacaggtcctgggcagaaggacccagtagtggcctgggtaggagaatctgttgggaactgggtaattgtttggctgggttggatgtggcttgggtgttgggctctgttggtgggttgtgtggtgggttcatcagtggtattagctgttattttggtggctgaattggttgttgagttggttgtcggcaagctggaaacctccaggatgggttcaacgaatagcatcttggagataactgttgttgcgaccttcccttcgcctctgtcttgcaaactctctggatcctgggagctggagctggtagcatttggatttgaggaggctctatccccagccagcagcagcagcaggagggtcagcagggtcagcctggaggccatctgggcggcgacgtcagcggactccaaacttctggtcaccaggcagctccagtgcagactccccggccgtaatggccgaattcccgggcatatgtccggtaccgtcgactgnnnnnnnnnnnnnnnnnnnnnnnnnnnnnnnnnnncgccgcttcctcgctcagctagcttcgctgcgctcgtcgttcgctgatagcgtgcccacataggtgatcgttctttgcgcgttgttttct

SEQ ID NO: 122273 - DNA, 2081 bp, Homo Sapiens
  misc_feature (432)..(462): n is a, c, g, or t
  misc_feature (634)..(701): n is a, c, g, or t
aacggtggaagcggataagagggtcgcatgtggctgggtgagtagtaggagtttcaataggcgcgggtgcagataaaggtatggctgatttggtgataattgcgagaatgaaagatgtaaggatatggcgggagggggaggcgctatgtatgaagggtggcaggtgtaaaaaaggggtacacggactgtgaaaacacgcgtgtgtgtatacgcgcggcggtgaagaaagtggtgttgtggggggtgtaagacatactgtgctgtgtgcgggaggggcggggaaatatatatatgcggggaggggggaggcggtacgaggagcggacgcgctattggcggggcacacaagagtgataggagggtgtagacgggagaggagcggcaaggggaagggggtgggggaatgtgggatgtggagcaaatgaagggtannnnnnnnnnnnnnnnnnnnnnnnnnnnnnntgtgagttcagaatcggaaaagtattttacatgggggagggtcgcgggtgacgccaaagcgaaaaggctgtataagggatagggaaagtgtaaaaggaggtgagggatgggcaatccgattgagggaaagggaaagggggaaagggtggacgagtgacatgagtggattgannnnnnnnnnnnnnnnnnnnnnnnnnnnnnnnnnnnnnnnnnnnnnnnnnnnnnnnnnnnnnnnnnnnttaaggtggtttgtgtgtttagggtttgttgtgtgttttttatcaaatgaatactttattagagacataacacgtataaaataaatttcttttcatcatggagttaccagattttaaaaccaaccaacactttctcatttttacagctaagacatgttaaattcttaaatgccataatttttgttcaactgctttgtcattcaactcacaagtctagaatgtgattaagctacaaatctaagtattcacagatgtgtcttaggcttggtttgtaacaatctagaagcaatctgtttacaaaagtgccaccaaagcattttaaagaaaccaatttaatgccaccaaacataagcctgctatacctgggaaacaaaaaatctcacacctaaattctagcagagtaaacgattccaactagaatgtactgtatatccatatggcacatttatgactttgtaatatgtaattcataatacaggtttaggtgtgtggtatggagctaggaaaaccaaagtagtaggatattatagaaaagatctgatgttaagtataaagtcatatgcctgatttcctcaaaccttttgtttttcctcatgtcttctgtctttatatttttatcacaaaccaagatctaacagggttctttctagaggattattagataagtaacacttgatcattaagcacggatcatgccactcattcatggttgttctatgttccatgaactctaatagcccaacttatacatggcactccaaggggatgcttcagccagaaagtaaagggctgaaaaagtagaacaatacaaaagccctcgtgtggtgggaactgtggcctcactcttacttgtccttccattcaaaacagtttggcacctttccatgacgaggatctctacagttaggttaaaatacttttctgtgctattcagccagaaatagtttttgtgctggatatgattttaaaaccgattttgtctgtcacccgtgccaaaaccttacagatgtctgggctaataccaaaacacataagaatctaccactttatatttaatactctattccaatttaactccaagtaatgccaaataattagaagtaaaaacttaattcttctgagagctctatttggaaaagcttcacatatccacaccccaatatgggtatattcatgcaccgggccaaccactgtattctgaagcataaataaactccaagtaagacatccgtagctagatacccgttcccgtattggttaatggtctctggggatccccttttaagcactctcagatgaggatcttgctccgttgttagactatccttagtttgattaagccactgaagcttacttcataaattactttttcctataccc

SEQ ID NO: 122274 - DNA, 994 bp, Homo Sapiens
  misc_feature (61)..(80): n is a, c, g, or t
gtgccaagctaaaattaaccctcaactaaagggaataatcttgcggccgcggctgtaggcnnnnnnnnnnnnnnnnnnnnaacaggcccaaaataaaactttttattgaggaagtaataacacatctatgaaaatacattctctcacctattgcacatgagtatttcttaattctgttcagtgcaattcaaaagcaagtgaagaattccagaaacattcttcatgacacatgcagatatctgcaaggctcatcttcttcagtcacagaacatgcaggaaaaattaaccattttggctcataatacattagatgaataattattagatttattaaaaacacccatatctgtcttccccctatctcgcctagcaatgtaaccagctgttactctttaatatgtgtgtcaccatcctggcattggggtcaaactcaaactgtgatgatccactgaagaagtagaaaaatccaaatgcctgtaatacagcatcaaccttaggctcaactcctggaaagtcatcagctattagtctagggaagccttgctccatggactggctattttcatcaaatctccagtatttgtccgctgcaaagaagtatgttttcttcttttccttgtcagaaacagctgcatcaattttccttatggttggaggaaaacccagggtatggatgcctcttggataacctgcttgtacctcatttcctctgatggcccagaactcatttcctttaaaaataaaaacggtgtccctgctgttaacttcatatgcagcatccaaatatgatggaagagagggccaaaatgcagaaatcaaatgaaattcaggttcagggttccagtgggatcttcgccaaaaatatctgtctttaaagaacagatattctcccctcagagtgctgatggcatcgaaggactaagcaggatcacacttggctggcatctcagatcccgctcagatttactcatcggggtcctctagatacagccga

SEQ ID NO: 122275 - DNA, 1035 bp, Homo Sapiens
  misc_feature (752)..(752): n is a, c, g, or t
  misc_feature (778)..(778): n is a, c, g, or t
  misc_feature (799)..(799): n is a, c, g, or t
  misc_feature (806)..(806): n is a, c, g, or t
  misc_feature (870)..(926): n is a, c, g, or t
ctcagaaagccttagcaaaatgggtgcttttattttcacagacatgtctatgcaatacactcagtcacaagagagagcttcttaagcctgaccataatttaaactctgaaaggtgagtgagcctgttaagagacctccacccttctagtaacctatatcccttgatatgggaaggatatcttagttctccctagccccttgcttaggattaagtgagagacttcagctttggtgtaaagctgtcagctgccctaatcaaggacaatacacaaaaattagactccttataagaataagggattaaatggaggaagatctagaagtgggtgggaacaaaagagcagaactgagcctgcatctgcagaaaatgtccaaagacaactggcagagttcactccatggggaaaaggcatgttagtgtgtaggtagagaaactggacaaggaaggatggccttagccttccataatggagaagtcgggcaggggatgtctgcatgcaatagacaactgaattagaaagagcagaaatgtaaaccagcagtgcttccctatcttgggcctggctagcttaaaggggctctactgtcattggtcaaaaaactttcatgaggagattcaatcactaatgcaacaaactctaatgagttctaagttggagagagctcagttctaaagcttgggggtagacaggtcactgagagaggaggaaatgaggagtgggatctgaacattgtaataagtcatctagtanctctgatcactttggacattgctggnggatacataacagctcactantacattnacacacatacttatatctgtttgctcctcccactcggtgcgattcttggggctcgaggggcaannnnnnnnnnnnnnnnnnnnnnnnnnnnnnnnnnnnnnnnnnnnnnnnnnnnnnnnngtatcgctcacattccaacaccatacgagcgggagcataagtgtaaagctggggtggctatgatgagctatccaataatgcgttgggtcatggccgctttcaatcggaa

SEQ ID NO: 122276 - DNA, 1619 bp, Homo Sapiens
ttcgttggaaaacagagagaaattgtaataatgaaaaaaggacagagtttagtgaccaatcacttattttctttaaaaacacataaccacattaactttttgctttatacaaccatctagaaactataaaacagtaccacattgtgcatttaacctacttatcaagaagggaacttcataagtcataagaattctacccatataggaaggaaaaaggagacagctaatagcatagtcacagatacaacatgagtccaagcaagcatcaattcttcgacatcaccttttccatttaccagagtggagactgagaaagagagtgagggagaaaaaagagggaaggaagcacccacagaggactaatcacaatccatagttacttttgacaactatagctcagggtttcatagaatagtatcatttgaccaacacagtgtggtggagggagaggggtgaaggaaacacaaatagaaggagagagtttgaacagaaaaatacaattttccccctattcccctcctaaatactcttcattgatacaagcttctgtgctaatccagaaaatggcaagaaattaatcttcacaacgtgattaagagttctgttctttttgtaattgaaatgtgagtggctcacaattttacaattcaaaataacgtcatgaacaatgaccctttagggattttccacaatctttccctccaattcccaccatgctggtgttgctacagggcaatcagggaagtgcaggtagggacttcagagataatgatcaagggatagtgagatggaagcctggctctttcttagaagtccacaactttctagaagtactgcagtctttccctctgatttgtggtggcacagaggaaagggcataggaagaactaaggtaatatggtggaagtttagtcaagtaactggtttgaaggtatacgagactgtgtacttagtagatatactgaatccaaggcaaacaataggttatttgattgtcctccttaggttgatggcaccatacaaaaaactgagggtggctttgatttgacgataaaataaaccaaaggtttgctacaaggaaacatacttcagttgcaaagttgtataatgattctcctcactttaagggaaactctcatcttgttctcacttcctcttccaccataaataagcaaacatattctggaaggctgttttctaggggcaactcagtatcagttttgataattcatacaagaaaggcatcatgagccatgccaatcaacaggctcctctctgttctcaggcaaacttcctgtatggactaccttaggctcttccaaacctaatgagatgtttttactttttcatatttggagagtatgctggttagatcattggtttgtaacaccaaccagtgcaaatttctcatgctatcatataatcaactctgtcccacattaccatgtgctctaacattgtatagacttaaaatacaatgcagaaagttgagagtttgtaggatttactatcaagactgacttctgaaatgcagaaacgtatgtgtttgcatttagaaaacctttaacactccttgtcttagctaatgatcacaagcaagaaaaatttagatcactcag

SEQ ID NO: 122277 - DNA, 761 bp, Homo Sapiens
tttttttggagagatgggggtcttgttatattgcacaggctggtctcgaacttccccgcctcaagtgattctcccatttcagcctcccaaagctgggattacaggtgtgatccaccatgcccagcctgccctttaattttttggtgacttctaaagcacagtttttagttttttaatatttaaaaaataaatattttacttaatgtttcacataatataatcccccctcccaagactatacaagtttttctttatattttcttctcgtaaggctatggtttcatttttatataaaatctttaaaatcatccaaatgcatgaaagtcacaataaatcactagaaatttattttagaacatggtgtattttttccctccaaacaattggccaatgaccctttcatttattgtatagtttatattttcctcactgattataaatgtaacattttaaaaaaagagatggggtcttgctatgttactcaggctgaagtgcagtggctattcacaggtgcaatcacagtgcactaaaacctcaaactcctgtgctcaagtgatcttcccatttcagcctcctgagtagctgagaccacaggcttgtgctaccattcccaacttgaatgccacttttattatctatctacttgggtctgaatacattgcattttaatgtgaaaatacaaagatgcccacgtatctaccatttccctctgtgtgtgttgcctgggactcttcaaagctgttttatcagctatgtgtgga

SEQ ID NO: 122278 - DNA, 2899 bp, Homo Sapiens
  misc_feature (264)..(264): n is a, c, g, or t
  misc_feature (408)..(408): n is a, c, g, or t
  misc_feature (509)..(569): n is a, c, g, or t
  misc_feature (649)..(697): n is a, c, g, or t
  misc_feature (817)..(817): n is a, c, g, or t
  misc_feature (819)..(819): n is a, c, g, or t
  misc_feature (1671)..(1679): n is a, c, g, or t
agatggtcgtacgggtgttgacgcgtgatgagtagcgaggtatggaaacaatagtaggtgggagaagaatagtttaggtgtgaacgtgtgtgggaaacgggtgtggcgaagtggaaaattgtggaatataaagtggtgatgtttggacgatttgaagatttcaggtgtgtccacgtgttcgaggaccgtgatacagggaatgagacttgtgtgtgttggtgtaagacagggtgtaaagaaggtgtgggcaggaaaaaggagaanagggaaagaagtgtagaaagggtcaacgaggggggagggaataaaaagggggcgaggatgggtggaaaaagaggcgggaagatgggagaagaaaggagagaaggtggttagagaaatggtgtacaagcaattggacggccggantacgggtgatgtgcatgtgggacacgggcgagatcgaagcatagacggagaggtgagagaggagggccgaaacgggcgaggcggataaagaacgatgggtnnnnnnnnnnnnnnnnnnnnnnnnnnnnnnnnnnnnnnnnnnnnnnnnnnnnnnnnnnnnntcgacgctgcgtggaagttgtaagatcaattcgtgccacgtggagcaacggggttgtaagaatagggcacaggccggacnnnnnnnnnnnnnnnnnnnnnnnnnnnnnnnnnnnnnnnnnnnnnnnnnggagaggggaccggcgcacgagggaagggaagaggggaagcgcggccgagaggagtaagagaggaagaggggcgggggagtaagagaggggaaaatgatgggaaggatgcgggttacagngntagtcaacagtgtttttatttatacctacaaaaagaaaacaagatgatggtatcaaaaggacaatttacaaactaagaatagtaacatagctttcagcatcctgtgcctgaacatcacacatctacaagtctttcaagtcttaatgcaacaggaatgtgtctggagaccagcaagaacatcaatagagagcactgatcccaagcaaaagccactaaccttttagatgagaagtccacacaacgaattgttagggaggattggggagaagcagcccattgcttaatacattggaaccctttccctaagttgagtttcaaccatgaatgcaataactagcataaaacgattcttctgctcatgttctgaagccaacagcagaacctgaattataagtgacagacatggaggcagaagagttaaactctgctagatttcagctgtgctcaggccataatagtttttgaggtttggaatttactgttattttatgattacaatgtcccaggtggaaaaagggaagcaagcaatccaaataaccacttgcttgcccagagacctttccctcaaacagatgctttcaagagctgcgagagagtagggcatcccttgtggtggtacctctatgtttaaagaaagaagaaaaaaacccagaatttggttgtagaaaacaatgcccacaacagactggccagtgcttagacaaatttggggttggggggaacactttggtttgaaagcacagagcagtttgccatgtttcttctgtgcctaccattctcccttggcctcaacttctgtaagatggggggggacaaaaagagaagtaaagttaagaagaaagtggaaaattnnnnnnnnngatgtcaaagtttttacatgcatatatttcagcttatgctgaagacctacctgtatgttgcacattgaatcatactttcagaacccctcagaaaccatccctctctccctaaagaattttaaaaggaaaacaaaacctcgagtatagatcttacagatgagcaagcattcaggccttagccaaagaatgcagtggagccttcccccttcaactgcattgtgaatgaataccaattaacagcataaaaattaatagtcccatatcagatctggaaggggtttctggggctgtctgatgtccctatcctgttgtagtgaacacaatagcagaaaattctttctgggtccatctgctataaagtcttggtaaaacagcattactatgaagaggatgaactcacctaccttcagatggaggaaaagtgaaaaggacttaggctttagtcctccatgacttttcttaagcactacctacctgtaataagctgagtgcaaaaggatgccgaagaaaatctgcacccagaagctgttagaaagcactgcagagaacagggtatgaagaaaataaagagttcttaataaacccttaagattctttgttcaaggtaactttgccaaaagggcagagtaggtggcaaagagttgcttttaatctagctctacactgcatttgaaaataaaatttgcccattttgaatatattgtttataattaaatgtgctttttacactgcaggtcaatataaaaactggttagtaaatttccagcgagcatttatgttcatttgctcacagcagctgtctggatggaaaattaatttcacagatggtccccagttaaactgggaagaaatataggcagcttccacccagatgctgagatgctacagtttaaccactacaataaacacttgtggtttttaatttaaaggatacacaaaactcagcaattcaatttctagcctgacactaaaatggttatttttcagtaacggggggagaagtggggaggcagagtgtgaagggaaataaaaccaattagtaatttttaactatcaaatgcactccagcaatcagtcaaaacaggcccgaggaaacctgttccaacttaagaaacatttaaaagcacaaaagaaaatgtgcagggcactccctctttgttttctaacccagtaatgagaaatttaaagcacagatgccatcttcctctgcgaaacaattc

SEQ ID NO: 122279 - DNA, 1603 bp, Homo Sapiens
  misc_feature (340)..(364): n is a, c, g, or t
  misc_feature (1044)..(1105): n is a, c, g, or t
  misc_feature (1143)..(1556): n is a, c, g, or t
  misc_feature (1558)..(1559): n is a, c, g, or t
  misc_feature (1566)..(1566): n is a, c, g, or t
caaaggtttttctttccatcttctcaatgtccttttctttaatttgagatcgcttctcaggtttttctttactttcctttatatgcttttcttgtttttcaatgtctatttccttttccactaaatgaagccctatagattcctcaatggcactcatacccaaagaagtaaattctgagtctttatctgtgggtatgttttctctctcttcttttagatcttttattttttcctccctaaaaagattcctcgctttcctttttaatcttgtctcgttcctctttaaagttcctctcttttgacacatgcttttccttggttgatttatcatctttgatgnnnnnnnnnnnnnnnnnnnnnnnnnctaatgttaaggattcatgttccatatttaaaaagagatcttcagtttcatcacttttaaaaaaattctctttcccaaattctctatcaaattccacactcctctgcagttctttggcactatccttagttttgtattttgtcctgtttcaccttcaatttcttttttatgctttttcgtgtgtccctctcttgtatgcttcaatttgatgtttttttaatgttttaccttctgttgatccatttttttcagtgtgcaatctgaattttcaaatgttggactatgatcttcatcctttattttggcatttgatttttcaccaaattctaagtggaaatctttctgatgtttgcttttttccttatgcttacaagattttacacttgaactttctggcaagaattcagattctgtattatcataccgaacaagatcaggctgtaatgacatttcagaacttcctggtgataaacatgttttagtatgttcttgttttagtggtgttgactgtttttcacttaatccacaagaatgtttgggagatttaccagtggaaatatgaaataaatgtaatgaagtatcatcttttgggctaaaagatttcctaaagttcccctcctctctggtcttttcagaacaatctagtccagtatttactgtcaagtttgttattcttgtannnnnnnnnnnnnnnnnnnnnnnnnnnnnnnnnnnnnnnnnnnnnnnnnnnnnnnnnnnnnncaattttcttttaactttgccctcgtgccgaattcttnnnnnnnnnnnnnnnnnnnnnnnnnnnnnnnnnnnnnnnnnnnnnnnnnnnnnnnnnnnnnnnnnnnnnnnnnnnnnnnnnnnnnnnnnnnnnnnnnnnnnnnnnnnnnnnnnnnnnnnnnnnnnnnnnnnnnnnnnnnnnnnnnnnnnnnnnnnnnnnnnnnnnnnnnnnnnnnnnnnnnnnnnnnnnnnnnnnnnnnnnnnnnnnnnnnnnnnnnnnnnnnnnnnnnnnnnnnnnnnnnnnnnnnnnnnnnnnnnnnnnnnnnnnnnnnnnnnnnnnnnnnnnnnnnnnnnnnnnnnnnnnnnnnnnnnnnnnnnnnnnnnnnnnnnnnnnnnnnnnnnnnnnnnnnnnnnnnnnnnnnnnnnnnnnnnnnnnnnnnnnnnnnnnnnnnnnnnnnnnnnnnnnnnnnnnnnnanngacgtanaaggcggcgtgctggcgtttttcataagtccgccccc

SEQ ID NO: 122280 - DNA, 1352 bp, Homo Sapiens
  misc_feature (62)..(80): n is a, c, g, or t
gtgctaaccgtaaaattaaccctcaactaaagggaataagcttgcggccgcatacgcggtcnnnnnnnnnnnnnnnnnnnaatttaaaacaattactttattaaaaaatagcaaatctcacaaatacttatttaatttcttatcactggccattggaaaacacaccagcatgtgtactgattgtctaacataaactgaagctgggcttgccacaagacgcctgtgcatcaacagcttgcgatcaacactggaataagtttggtgagctcaggaaagagaaatccctccgccctgtcaagaacatcagcacaatgcatttcaagtataatcccataaggcaacaatatgaagcacagcagcacaatctctgcgtcacatttcctgatgaagccttcaacaaggcctaggcctccagttatggcgaattacagcgagtcacatttactaaaagcagtaagtgaaaacgatcattgaacttgcactttaattactttaattccttgttgtggaagatgattctgctactggatttggctggaaaagtaaagactgctgcttctcttcaaatcacaagaaagcaaactacatttcattttagctagcagaagtatttggaacatcttgtgcatctgccaaatggagtttttgtatggaagaattcaattcttctaaatctgacagaagcctatccagattggagtcactggctgtttttctcttatcctcaggaagttcctctaactccccatagagctccaaattcaagcgagctaatttctcctgcattccccgaacatgttccatctgttcaaatggaacattcatttccaaatgcttgaagttttccagagtggaaatcattcaaaagactgagcagccctctctccatctcctgaacatctgagacatcagtgaggaaggagtgctggatcggagttgactgagcgcctttgccctctccaccctgaggtttggtcttttctttcatcactctttttaactttggtcgctgtgaagttgactgtgatgcaggatttgaaaaccctgtgcttttactcactggaatggcattttttttggcattgacaacctgagtacagtgggcactaaaagacttaggactcctcctcttcactttccgctcttccattgttttaagttccttattgcaccacggccagcttcttaagacctgaagaagaagggtattggggcccccttccgcaacccgcaaagacccgacagcctcagaagccaccgccgcagccacaagcagagccccggtcacatcccgggacccgctcctccgcctcgtgccgattcgccaccaggcctcgtacctagccgtaatt

SEQ ID NO: 122281 - DNA, 1818 bp, Homo Sapiens
tttttttcacagaagcagtcagttttaattttttagccatgttggtaaaagttcattttcagtacatgggtaacacccaggccctttcccattatatccaggtatgctacaagttcttttaactcttatcagaagttattattactgtttccttagagaggctaccaggctaaaattcacttagtttggtttgtctaatgtcctcattattttatcctgaagatgatgtcatttctcaggacttgaaaatgacttggctgaactaaaggtaaaaaagccaagcctctgtcacttttcctagactcctaggcacagctatggagtctttgcacagtgcccataccctaaaaattaataatgaaaaccaaacctcaagaacctagagcagctctctacttgccaccatggactccagtggtcagcataagaaaagcagatagttgcattctatttagtttatagctgctttgttcctttgtgtttcactaagcagaggctcaaaaattcccttgataacttcagctgcccctgttcttttcctcaaactccaggatgagacctttaatgtgggacaatttctggtgaaggtactcacagcgacgcttttcttctctgtaacttgggtactgcttcctgaactttttatattcctggattatcttgtcttccaggaccttgtattctggagttccctcgccgaactcttttaatctctgctcccagctctatgaacctttggcttgcagtcccaacacgggcatgcaggatgcggtattcagcataatctgtctcaaagtcctgctcataggcatgttgctgttctgcactgtggatgggcctgtatttgcagggaggtagttctggtatatcttcaggacttggggattcagaatcttccttgaactgaggaactgtgttctaatctggggtgccatgtcctcatcttcttgctccccaatcttctccctcttgtaaatcctgattggtcaggccttgtagggggcttggcactaaaggcagagttctgaacctcttttctttccagttctacagtggctacaggcactgaacgtttcttgtccagacgtttccggctggcagaggaaggcagtgcctgaacaggttctctgtttggaacatgggtctggcttctcacttcccactgtgccatgtgctcccttgaggatcctgggagtgactgtccttggttgcttgccagtggatctgacactgacacctcctctagtgccatctgtggctgtgatactgcatctccttcagaatagcctcctgtgttctgccaactctcaggatgtctggcatcttcagtcaggttgtgtccctgaactgatgatggggctgggatagaatccatggctgcccaaataatgaggcgctccctgagtgagcccaggcagtggaggctgttaggcccagacctgaggaagcgttggcacacaaggtccaagctaccaccagcgccctcctgacaacactgggacactatgaaggagaagaggcaggaccaaccagggcctgggagtctcagataccctcggtggccttggaaagcaatcaccggccgtacctgttgccgctgacactcttgcagcgcccgcagggcagcgtcgttgagcctgagcagtaagaggctagtccgggcagcttgcgtgaagcagagccggagctgtcctctcagaggctcctggagctcctccatggcgacgagttcgagtgcaagcagcacgggggccacaggcgagggccaccaccgcctcgtgccgaattcaccacccaggcctcgctacctagccgtaa

SEQ ID NO: 122282 - DNA, 608 bp, Homo Sapiens
  misc_feature (210)..(210): n is a, c, g, or t
  misc_feature (213)..(213): n is a, c, g, or t
  misc_feature (429)..(437): n is a, c, g, or t
  misc_feature (502)..(531): n is a, c, g, or t
tttaattctgagatttccccaagctgtggattcttcctactccttaagaaaaaaactttggtttatttagcatctacacttttgtcagttgtgttgctgttttccacccattttattatactcttaaaagatgtaattgttgtcattttgaacagttaaacatcttgagtataaaaagaaccccaatgttatgttatgctttgtaaaatnttnttttttgcttttacctagataaacttctagctaatcaaataaggaaagaaactgtctttttaaagcttcttttgtgttagatactgtattagagatctgcatttatcatgagttcctttttttttttaactttatttttgggaaagtaacacatgaagtagttcagtcatgtcaggtttgtctggggtggaatggaacagtcaggtagttgaaagnnnnnnnnnagagatgaaaagcttgtgaactcctgtaaaacatgctgtatttgaaatacatctgttaaaacttnnnnnnnnnnnnnnnnnnnnnnnnnnnnnnggccaacagccgcggccgcaagctgtgtccctttagtgagggttaatttcggtatggcactggccgtcgttaccaac

SEQ ID NO: 122283 - DNA, 1992 bp, Homo Sapiens
tcaagtaccttgtaaaaaactggctttatttgtcacttattcaccttatctcagttatgccattttggcgtccacagtgacagtcccctggaagctggggtcagcccccacccacccaccgtgaccatcacccacagggcgtgagtgtgggccttgcagggcccagccgatggttacaggctgcaggcgggactatggggctcctcctgaggcctggtgccttccagccccctgcccaccagcttgggtacagctgcctgcctgccagaggccaagcattcctaagcgtgggctgggggaggccctgcccctctgtagcagcagagcagacagggcagtgggagaaccatgtgggtaggagggcatcaggtctcaagagcctctcccctgctcaggactgggtctagacaaggccacgtgtgatagggtggtaagccctgggccatatggaggagcctggggcccatcttggttctgctgctgagttgctgggtggctttaggcaagtcccttcttgtcccttggtcactctgtttcctggctagcactgccagcaaggtctccagagtgtgcccctctgccgggctgtggcggtggccctgtgctttgcaggctgccgtgtgcccactgtcagagtggggtctccccgacaggctgcacgcacccccaggcccccttcttaggatcagggcatcctgcaaaacatccttggtcccaccaatgtctaaagccagctcgaaacctcgagctcctcaggatcttagcacccaactctgctgcccttgctgctgggcagtgcctgtcctaagaggggactccctaaaggccagagagagggtgctcatctccaggacctaggccacctgtcagcacaaacagaacttattccagacataaacatgagtcttcttatttcaaacactggagcaactgatcaacaccaccacagcccatgcaccccgaacctgacttcactaccaaccttgagcctgtgctgtcctctctctgctgacgacactggtgacgcagaaaggaagtcggtggtgtctgctcacttgcgtgcagtcctaagcacagtaagaaaattctgaacacagctgggtgatcttcagcccagaaggtgtaggggcttgtgagcactaagtcagtttctgtccatgtctgatagctaccacaatgtctccccttgctagggcagctgcgaggagacgtgtccagtgatgactggcagaatctggacaaacggacatcactgcaagggtctgtccacctagcttggccaggctcagcttggcagagctgatgacccaagtggactaaacacggagctagcagaaacaggcagactctaagcccaaccagaagagtcagctagaagagccaataggtgcacagacaaatccacagatggccaggagtgtcttctgggaaagccatccctctcttttggaagaagttctgtccttaaaaaaatcacttttaaaataagggaaaacaatggtgtcttagagagaaacagtcctaagccagatattcccacgcctgattgtgaaggagacatgccagcaaggtcccacgtctccgggaaatacatgatctgctcccagcttcacaccctactgccaaaatgaaacgtagacatttcagtgtttgtgcttccaaccagagtgagaaattccctttgtggggaaacaggtgagacggctgcagccgcatacagcactgagaaggtgcaaaggttaaaacaaaagttacatggacacttggggacaatcctataccattcccacttctctggcagtcggctgaataaaatttcactttcacagttctttttgccagtgccaggataaaaagcaaaattttaaattggaaaatgtctagcactttacacagtggaatgaaagaatacgaaattcaaaaacattattaaaagtccatatgccgcagcagcacgcgccatgatgagagctccccttctgtcgtcttctc

SEQ ID NO: 122284 - DNA, 1491 bp, Homo Sapiens
  misc_feature (324)..(324): n is a, c, g, or t
  misc_feature (443)..(451): n is a, c, g, or t
  misc_feature (586)..(603): n is a, c, g, or t
  misc_feature (677)..(717): n is a, c, g, or t
  misc_feature (1054)..(1072): n is a, c, g, or t
  misc_feature (1111)..(1353): n is a, c, g, or t
  misc_feature (1370)..(1370): n is a, c, g, or t
aagttcgaatgttaaaagtcatatcaacgaaagcaaatacagaattgcagttaatatttacaaagtcattatgcagacacactattacatgtagacagttgtagttaaaacaccttgggtatttcatttctaaagcgaagctccacaggcacattctgtttaaggttcttttcattctctcaaaagttataagcaatggagtgtgtaagttgttttaataatagttcagttctttatgtacattgtaaaaatgtcaagcatgttgattcttcaaaaagttgcatttcacttagcagagaaaataaaaatgtcccatttctcccngcgaaaaaggataacattttctaattgtgcaaacactttatgaaagtatcacttgactctatattttgacagctgctttgcatttattattggagaggctcttcatacggcatgttccnnnnnnnnnccttttctagtcaagaggtgttaatattattttggaatttttcaaatttaagagagtggtaaagggttgctcttcaggggttcttaataaacaaccccctaacttcttacccctttaagaggttgtttagggggnnnnnnnnnnnnnnnnnntggttttagactatgagctccttgttttgagaatcagtaccatttagcctcatagcatgcaaatttcacatttnnnnnnnnnnnnnnnnnnnnnnnnnnnnnnnnnnnnnnnnntgaactggtttgagaaaaggcaagggattactatccttattattcagatagggaaagtgaggcccaaagaactcgaagatgcatttgtattgtgcttggtactttagtgaacgtctcacccaagttagctcatttgaaagttggtcctcgcaaccattacatgtaaagtaggaaaagagaagagtaatgatgtgtttgacatatagtgagttagtcactacttgacttccctctatacagcaagtcagtctctgctgctaaaggaaatctaaaacctaatgattaaaaatctcaggttcttggacttggtggaaggaaggttattcttccaaggacnnnnnnnnnnnnnnnnnnngcctacagccgcggccgctcccctcgtgccgaattcttnnnnnnnnnnnnnnnnnnnnnnnnnnnnnnnnnnnnnnnnnnnnnnnnnnnnnnnnnnnnnnnnnnnnnnnnnnnnnnnnnnnnnnnnnnnnnnnnnnnnnnnnnnnnnnnnnnnnnnnnnnnnnnnnnnnnnnnnnnnnnnnnnnnnnnnnnnnnnnnnnnnnnnnnnnnnnnnnnnnnnnnnnnnnnnnnnnnnnnnnnnnnnnnnnnnnnnnnnnnnnnnnnnnnnnnnnnnnnnnnnnnggagaggcggttgcgtnatgggcgctctccgcttctcgctcactgatcgctgcgctcgtcgttcggctgcgggaacgtatagctcactcaaggcggtataggttatcacagatcagggatacgcaggaagacatgtag

SEQ ID NO: 122285 - DNA, 1309 bp, Homo Sapiens
  misc_feature (348)..(369): n is a, c, g, or t
  misc_feature (705)..(724): n is a, c, g, or t
ggacatcttggctatgtaattcttgtaatttttatttaggaagtgttgaagggaggtggcaagagtgtggaggctgacgtgtgagggaggacaggcgggaggaggtgtgaggaggaggctcccgaggggaaggggcggtgcccacaccggggacaggccgcagctccattttcttattgcgctgctaccgttgacttccaggcacggtttggaaatattcacatcgcttctgtgtatctctttcacattgtttgctgctattggaggatcagttttttgttttacaatgtcatatactgccatgtactagttttagttttctcttagaacattgtattacagatgccnnnnnnnnnnnnnnnnnnnnnnatgtgatcaattttgacttaatgtgattactgctctattccaaaaaggttgctgtttcacaatacctcatgcttcacttagccatggtggacccagcgggcaggttctgcctgctttggcgggcagacacgcgggcgcgatcccacacaggctggcgggggccggccccgaggccgcgtgcgtgagaaccgcgccggtgtccccagagaccaggctgtgtccctcttctcttccctgcgcctgtgatgctgggcacttcatctgatcgggggcgtagcatcatagtagtttttacagctgtgttattctttgcgtgtagctatggaagttgcatannnnnnnnnnnnnnnnnnnnaacaagtgtgtcttacgtgccaccacggcgttgtacctgtaggactctcattcgggatgattggaatagcttctggaatttgttcaagttttgggtatgtttaatctgttatgtactagtgttctgtttgttattgttttgttaattacaccataatgctaatttaaagagactccaaatctcaatgaagccagctcacagtgctgtgtgccccggtcacctagcaagctgccgaaccaaaagaatttgcaccccgctgcgggcccacgtggttggggccctgccctggcagggtcatcctgtgctcagaggccttgagggacgctttgtctgtcgtgatggggcaagggcacaagtcctggatgttgtgtgtatcgagaggccaaaggctggtggcaagtgcacggggcacagcggagtctgtcctgtgacgcgcaagtctgagggtctgggcggcgggcggctgggtctgtgcatttctggttgcaccgcggcgcttcccagcaccaacatgtaaccggcatgtttccagcagaagacaaaaagacaaacatgaaagtctagaaataaaactggtaaaacccc

SEQ ID NO: 122286 - DNA, 1039 bp, Homo Sapiens
  misc_feature (1000)..(1001): n is a, c, g, or t
  misc_feature (1008)..(1008): n is a, c, g, or t
attcaacgcgaccattgcccactcatgggtggttaccattaaccctcgttattttcctgcgctaatttcggtaggtgtgtggcccgattgtgccccgccgatgtggggttcttgcacagaattcccagatgccgtgtgcacgctcacgacgtgtttgaaacacggcacgcggctttgctattatattggcctccacctttgggccgccctgttgacaagagaagctggtgtacgggtcagagcttgggccccttcgtggtatctttatgcgccccccctcttttgttgtgtagatggtatgtctttatttgggcttttaccagttttatttctagactttcatgtttgtctttttgtcttctgctggaaacatgccggttacatgttggtgctgggaagcgccgcggtgcaaccagaaatgcacagacccagccgcccgccgcccagaccctcagacttgcgcgtcacaggacagactccgctgtgccccgtgcacttgccaccagcctttggcctctcgatacacacaacatccaggacttgtgcccttgccccatcacgacagacaaagcgtccctcaaggcccccgcgtggttcagacagacgccgcagccaggatggttgaggtaagcgtgagccgtgttctggaggggtggggcggggtgggcctgtgcccgagatggcctccgagcacaggatgaccctgccagggcagggccccaaccacgtgggcccgcagcggggtgcaaattcttttggttcggcagcttgctaggtgaccggggcacacagcactgtgagctggcttcattgagatttggagtctctttaaattagcattatggtgtaattaacaaaacaataacaaacagaacactagtacataacagattaaacatacccaaaacttgaacaaattccagaagctattccaatcatcccgaatgagagtcctacaggtacaacgccgtggtggcacgtaagacacacttgttataanntatatantaataattatgccacttccatagctacacgc

SEQ ID NO: 122287 - DNA, 1488 bp, Homo Sapiens
  misc_feature (137)..(145): n is a, c, g, or t
  misc_feature (245)..(255): n is a, c, g, or t
  misc_feature (822)..(844): n is a, c, g, or t
ctttataagatcacatgtataaaacaagaaatgaaatgtgattttatttaaggcaatactgggctacttcacaaatcaccacctcaaatatttacactgctccacactactagttttctatcacattcacaaaggannnnnnnnnaataccaaatgtttaaaatcttcaatgtagtaaattctttattcacatttccattgtatttcatggactcatagtaactatatccaattagaagcaatgnnnnnnnnnnnctgtagctataggaaactgctagagaatctgctttaatttcacatgaataccaccccaaaatcctggatggcaaatttacaaagcagagcaaagtgttgatataatgtgcctattttgtgaaaagtaatcttgatatcatcttgtaaataaatgtttcatgtaaaaatcaatgaactatggcagagtttctggttttagttcaaaaagttcttaatttaaaacaataaaagaacaatttaaaaaacttgatcgcttagttaaaaattaaaattccaaatataaatgtgtcatttaatagtttagacttacagactgctggtggcagcacatgatttacaataataaatatatacaaaaaaggtatctacaaataaagagtactgttatacatgagcagtgacctggtgaaacataccaatcacacagataattgtttagttcatgaaaagggcaactgggtgatagaaatttgaggtttagctcactatttacaataactgaagtactgattctgttcctcaagtcccatagggataaaaaaaagttttacatgacaaatgtcatgnnnnnnnnnnnnnnnnnnnnnnnggccaggttaattcatgtcaacaacaaaaaaatataatgaaagtttcacaattctagcatgcttgatggcttcctatttaaaataaaatggtaaatgatgtatttatactacattaattatcagtactgacctctgcctgtggctttacctatactgatatctttcataacagacatatctggatcatttgaatgtacttcaagttttttcagactgacggtaggtttcatttcctgaagttgctttaagacaagctcagtgcaatctttaagattcttgtctaaaacaatttttacattatcactgcactgaagctgtgatggattggcaaactgtacaaacgtttcgctttctttacaaggacatacatgatttccactagtcacagcagtcttatcaatattttttcttgaatttgaatgggatccttttttgtttccagtattcggatggtctttgtcagtatttttcttctgcttcactgcagactcctcaagaaacttcagaaatgatacttcaaatcccattggcttaaaagagctccagtcaaaagatgcaggatgctcctcaatggtttgaatggcaacagcagtttcttcttctttacgcacgctacttaactcagctgctgatgctggttcag

SEQ ID NO: 122288 - DNA, 1260 bp, Homo Sapiens
  misc_feature (91)..(106): n is a, c, g, or t
atattctgcatcatttattaaatatttttatatatgcatttacaaactttactcatttcagaactctgctttcaatgcatttttaaactgnnnnnnnnnnnnnnnngcagagagattctcttgtaaaatgagatccatgtacaaaactaggcaacagatataaaagtttcctttcatatttttcatccatcaagaaaagaaatcatgtgacaagaaataaaaccaaaatgtggctctttcagaagaataacatgtctgtggtcaactatgacttctaatgagatagttcatatttcatctttatatggatgtatatagttttaatacttcttagctactgtagcatgttggttcagatgaagaaaaaataaactctattgtttggactagataatctagaaaccatcaattatgcatgtctttataatgcgacatcaaaatttacccaggagatgacactgattggccagcagtatgcatttatcctgaacattgcatagaaagttccctttaaaaaattcattatcttcttcacaagctaaagtatgagcctctaatttggctctcttatttaaagaaatagtttaaatgatcaatttagaagcttaaaagtatctttgaaactaaagttgcttttcttaaaatgaatgctgatttaacagttcatagacttggagcattatcactaggagacggaggcactactgccactaacgagaaacagcatcaccagaggataattacatggtaccaaatgcccaggggcctgaaactcactattaatataattttggcagcagcatcatttgaaagttaaccatttattacatagtattaacacaccagcttcaaagaagtgcactccctttaggacactcgggagctacaaatgtattgtgattgcataattcgtattgcacagttttataaaaaacataaatactggctattctagttttaaataccaaatacatgtcatatacttttaaatctataatctggttcaagtgcaaatcaggtgctttctgttagtccttccaaaaaaggcatttttaatatttttggcacaaatgaaatgtcatcgtgccacacttctaattacactacatatatccagacctttagagtagcaatcatatacatacagtataaaactgagtatttacaaatgtattcagcataaatgtaaccttcgtgggtgaatcagaaccccggccgtaatggccgaattcccgggcatatgtccggtaccgtcgactg

SEQ ID NO: 122289 - DNA, 1593 bp, Homo Sapiens
  misc_feature (523)..(523): n is a, c, g, or t
  misc_feature (1484)..(1518): n is a, c, g, or t
ccaacgaaattatttattgctgtcaggaggcccaggaccctccagactgaagagtccatgggcccctgtgcatgtgagagctacacagggaatcgctgtcaccttccaaggataagcagacagggccacacatgccatggccactcggtgcacaggggccaggctgtgcccagagacccaggcatccagcttgcattccaagttccttactgagagccccactgcttgatggcaagctctaggcttgcttgggattggtgactttgctcatgaagaagatgttctgggtgtctgtagggacaatgatcatcaggaagggcctgttgaaacgcacaatggtccttgtctccactaatgcagaaaggagggtgattttgactgctgtggcagcagatgcttctgtgccctcctcaaatacatcaagcacagccttatggaccacctatctctctgaactccagagagtctctccaccgcttcagggtctctgggagcagcatggcttccactttcctcccatctntgtcttgatcagggaggatgaagagtgcgctggcattgcctgtgtacttcagctccaccacggtgcaggacagctcctcgtcccggaagtaaggtatagtcaggtgatgcaaactcatcatgggcaccattacccactttttcttgctcaagtagaaccttgactgatgagtatcttgggggtcaaagggcatctcccatttggctttaaagaagatgtaattcaccaggaccatcattgtctgcgagtcaaggtccttgatcagatctgtgattttccccctagttccattcttcacgtagtcgttgatgagcttcttagctgcagctgagtcctgaaagtcagtggcaaaggcctcggagccatacagcctcttggcatcctccgtgaacctgtccagcagactgagttgctctttgacaaacatggcatttcccatactcagctgcagctcatcgctggactgattgagggtgcgcaggaggtgctggaagctctggtgaatttctgcctcagaagtctccgtgaggttgaacttgaggcctttgagaatctctgtcagggtggtattatgggcccccagagacaggaaggccaaggcggtggagatgctcagtggggagaagatgacattcttatcaggggccttcaggactaactgcttgtacaggctgaaagcgaagtccacgttggcggaggctaatccgaggtccacgtgtgtccctcggtcttggttctcctgggtcagattctcctcgtcaagtgggctgttagggtggcagaggacagcagggcagaacccagccgccaagagccccagagtcaggagaggtaacattctctccattctcaactctgcctcagggagctggatgtagctggtggattccaaagccgtctgtctggagtccccggccgtaatggccgaattcccgggcatatgtccggtaccgtcgactgnnnnnnnnnnnnnnnnnnnnnnnnnnnnnnnnnnncggccgcttcctcgctcaatactccgctgcgctcgtcgttcggctgacgcgggcgcccaagtaggtatatagtct

SEQ ID NO: 122290 - DNA, 1855 bp, Homo Sapiens
  misc_feature (277)..(277): n is a, c, g, or t
ctctcgtagggatattatagggttcattagtaacacgcggtgctgtagaatagtggcgcgagcgcggagtgtggagacagtgtacgaactgaaggctcggtgctgacatttgttggtacctctgtagatcgaggcggactgattatggatagcggagagagcataataaaacgttcctatcgcgggggacgaaatccacgtcagatgtgcagccgtataagtgaaccacaattcgtcagagagctacataggtcgcgtcggagacactctgcgaaanagacgtgggggcatacctggatcgtttatgtaggaacatgattgtagatttattttgtgtctgcgtgctcagggtgtcgtgtttagttttattgggatatatccgtggggggatccgcacgcaattccgagtgtacgatcatggggcgatataacaagggaatgaggggtgggcaacacctataaatagccgtggactggggtggggggtattaatgaacagatgcgggggaggagaagcaaaatagcgtctatacaggtccgacggtttcgtgtccgaaccgcgtaacaacatatctagtggataagagaaggagggaattatgtcgggcatatgtagtgccatgccctataataagggataatgtgtgcggggggaaatattctcaagcggcggctcatgagcgtcggaatcgcgtaattgtatcacgacgcgccgggatgcgcaaagggattggtgtggaagatgggcggtaagaactagcgggggagatgcggatgcgagggtttgctcaccgcgggaataacccgtgtctgggaactcgccctgtagggctttgttttggagaaccccactggcggggggcggcgcagcaatattccactaaattgaggggaaggacggaagggaatggtgcaggaatctgcgattatcctgggagagtaggtgagagcccccggtccgtatactaatgttgggccgggccgcaccgaactatctggtgttgaagtcttcctgagggccggagggggcccccggcgggattagagttatttgttgctcatggcgggtattgttgttttattcggtgggagatccggagcagggttttccaacgaaattatttattgctgtcaggaggcccaggaccctccagactgaagagtccatgggcccctgtgcatgtgagagctacacagggaatcgctgtcaccttccaaggataagcagacagggccacacatgccatggccactcggtgcacaggggccaggctgtgcccagagacccaggcatccagcttgcattccaagttccttactgagagccccactgcttgatggcaagctctaggcttgcttgggattggtgactttgctcatgaagaagatgttctgggtgtctgtagggacaatgatcatcaggaagggcctgttgaaacgcacaatggtccttgtctccactaatgcagaaaggagggtgattttgactgctgtggcagcagatgcttctgtgccctcctcaaatacatcaagcacagccttatggaccacctgggagactgctaggttcctggcccctgtgatccctgacaggtcagccttgctggtgaaggcttcctcaatgcccagctggagaagtatgtcgttcaggttatagtccctcgagatggaaaactttggcaggtagagctcacctatctctctgaactccagagagtctctccaccgcttcagggtctctgggagcagcatggcttccacttcctccatcttgtcttgatcagggaggatgaagagtgcgctggcattgcctgtgtacttcagctccacacggtgcaggacagctcctcgtccc

SEQ ID NO: 122291 - DNA, 1041 bp, Homo Sapiens
cccctgagcgctttttacatcggacgaggctagtaacggccgcatggtaactcaggcgccgggcgcactgtcctagctgctggttttccacgctggttttagctcccggcgtctgcaaaatgaagattgaggaggtgaagagcactacgaagacgcagcgcatcgcctcccacagccacgtgaaagggctggggctggacgagagcggcttggccaagcaggcggcctcagggcttgtgggccaggagaacgcgcgagaggcatgtggcgtcatagtagaattaatcaaaagcaagaaaatggctggaagagctgtcttgttggcaggacctcctggaactggcaagacagctctggctctggctattgctcaggagctgggtagtaaggtccccttctgcccaatggtggggagtgaagtttactcaactgagatcaagaagacagaggtgctgatggagaacttccgcagggccattgggctgcgaataaaggagaccaaggaagtttatgaaggtgaagtcacagagctaactccgtgtgagacagagaatcccatgggaggatatggcaaaaccattagccatgtgatcataggactcaaaacagccaaaggaaccaaacagttgaaactggaccccagcatttttgaaagtttgcagaaagagcgagtagaagctggagatgtgatttacattgaagccaacagtggggccgtgaagaggcagggcaggtgtgatacctatgccacagaattcgacttgaagctgaagagtatgtccctggcaaaaggggatgtgcccaaaagaaagaatcatccaggatgtgacttgctgactggatgggggtatggcgggccggcgaacaaattccggcccaatgggcctaatggagccagagagaggacccggcactggggggatacggggcgggaggactccacaggtgtgtgaccggggtgtgggagccacacgcaggggacaccacggggggtaaccctgtcacagcagggggcatggacccctcttgggaagggtgcac

SEQ ID NO: 122292 - DNA, 1796 bp, Homo Sapiens
  misc_feature (1)..(1): n is a, c, g, or t
  misc_feature (35)..(53): n is a, c, g, or t
naactgttctgaaaagtttatttttaaaaaacttnnnnnnnnnnnnnnnnnnnatcaaaataacctatgaagatttatagaaaacacaccaggtaaggaagggttctttcaaagcaaccacaggaacagttacgataacttaaaaagaaatgctttccacactgaactgacagcgctgcagaccacgcctgagtggggacggcagccccaagcccaggggcaagcgcccacaggctggacccaggccaggcacacctggggagtctcttactgctgaaaacctcagccatctcacttcatgtacttatcctgctggtcagccaggattttggcggaggacttggcatcatagaaaagttcactgatctcttcgacatgctctttctcaatgctgtccttcccgttgattttagcaagcaagttggccggggtcagcagctgcactgagtacctcagtgtggtcttggtgccaatctcccccaggtggttcagtgcctcctcactgatgttgattccttccgtctgggcacggattttaatgatctgtttcatttcctgtggagtatacagcatggtccggattatcatcactcggtccagaaggtcaagagggatgccgtgaggggatgtgatgtcctcagtgcctctgatgacacagttgcctcggttggatgcaaagatgacgatgggagcgatagaagactccagggcgcggtgcaggtaggtgaagcactcaatgtccagcatgtggacctcatcaacaaacagcacacccgggaccagctcagcaatgccctggtcgatgtacttgttcaccaccttattaatctcccctcgaagtttgtctgtgatttctgtcttctttggcttcattagctggcccatcatggacaggatatcttgtcccccctggggccgcgcattagccacatccaagtcatgcaaggtcacatcttggatgatttctttctttttgtgcacatccccttttggcaaggggacatactcttcagcttcaaggtcgaattctgtggcataggtatcacacctgccctgcctcttcacggccccactgttggcttcaatgtaaatcacatctccagcttctactcgctctttctgcaaactttcaaaaatgctggggtccagtttcaactgtttggttcctttggctgttttgagtcctatgatcacatggctaatggttttgccatatcctcccatgggattctctgtctcacacggagttagctctgtgacttcaccttcataaacttccttggtctcctttattcgcagcccaatggccctgcggaagttctccatcagcacctctgtcttcttgatctcagttgagtaaacttcactccccaccattgggcagaaggggaccttactacccagctcctgagcaatagccagagccagagctgtcttgccagttccaggaggtcctgccaacaagacagctcttccagccattttcttgcttttgattaattctactatgacgccacatgcctctcgcgcgttctcctggcccacaagccctgaggccgcctgcttggccaagccgctctcgtccagccccagccctttcacgtggctgtgggaggcgatgcgctgcgtcttcgtagtgctcttcacctcctcaatcttcattttgcagacgccgggagctaaaaccagcgtggaaaaccagcagctaggacagtgcgcccggcgcctgagttaccacctcgtgccgaattcgccacccaggcctcgctaccttaaaccgttagtagtactgccgt

SEQ ID NO: 122293 - DNA, 1458 bp, Homo Sapiens
  misc_feature (169)..(169): n is a, c, g, or t
  misc_feature (185)..(185): n is a, c, g, or t
  misc_feature (191)..(349): n is a, c, g, or t
  misc_feature (353)..(353): n is a, c, g, or t
  misc_feature (355)..(355): n is a, c, g, or t
  misc_feature (358)..(358): n is a, c, g, or t
  misc_feature (362)..(362): n is a, c, g, or t
  misc_feature (900)..(947): n is a, c, g, or t
  misc_feature (965)..(1339): n is a, c, g, or t
  misc_feature (1348)..(1348): n is a, c, g, or t
  misc_feature (1370)..(1370): n is a, c, g, or t
  misc_feature (1386)..(1386): n is a, c, g, or t
gttggtgggaagaaggacaagcccgctttgtgttgtgccggcggtggtgttctttttgagaacacgaaggtttatccccggggttctctcttctctcttggtggggccgcggcccgcccgccaaaaggggttgaaagagatattttcttggggggcgaggggagcggcncacaactttgtttttntttttnnnnnnnnnnnnnnnnnnnnnnnnnnnnnnnnnnnnnnnnnnnnnnnnnnnnnnnnnnnnnnnnnnnnnnnnnnnnnnnnnnnnnnnnnnnnnnnnnnnnnnnnnnnnnnnnnnnnnnnnnnnnnnnnnnnnnnnnnnnnnnnnnnnnnnnnnnnnnnngggngntgngggnttttttgactgtaatcaaacttttaattcttagtttttattctggtaaatgaaaacaaaaaataatcaaaaagaatttttatttgtcattgacagttcaatataaattaagtaaaacattaattcatttattctgcactattatcagaatttttctaatttttccgtaaaatgaccatttctaaacatatagcttaatggtcaaaacaagtgcaataaaagattaatttacaagtatcagaagtgaagactgtggtcctataactctttcccccaccaaagttaaaatataattgtcattccaggaaatcaaaatcttttagaatagcacactccaaacaagtgatgggaacactactaattccttagacttcctttggcagcattacttttgataagaagtctccaaataaaatacaaaattttggcacagacattttaatcttgtcaagacaatgtaaggaaatgccccaaaatattattaaattgaccataattaccaatatcagtccctaagataatttttctgaatgaagaannnnnnnnnnnnnnnnnnnnnnnnnnnnnnnnnnnnnnnnnnnnnnnncctcgtgccgaattcttnnnnnnnnnnnnnnnnnnnnnnnnnnnnnnnnnnnnnnnnnnnnnnnnnnnnnnnnnnnnnnnnnnnnnnnnnnnnnnnnnnnnnnnnnnnnnnnnnnnnnnnnnnnnnnnnnnnnnnnnnnnnnnnnnnnnnnnnnnnnnnnnnnnnnnnnnnnnnnnnnnnnnnnnnnnnnnnnnnnnnnnnnnnnnnnnnnnnnnnnnnnnnnnnnnnnnnnnnnnnnnnnnnnnnnnnnnnnnnnnnnnnnnnnnnnnnnnnnnnnnnnnnnnnnnnnnnnnnnnnnnnnnnnnnnnnnnnnnnnnnnnnnnnnnnnnnnnnnnnnnnnnnnnnnnnnnnnnnnnnnnnnnnnnnnnnnnnnnnnnnnnnnnnnnnnnnnncgcaggaangacatgtgagcaaaggcagcanagggcaggacgtaaanggcgcgtgctgggttttcataggtcggccctgacagcacaaaatcgactaatcgaggtggaccggcagacaa

SEQ ID NO: 122294 - DNA, 665 bp, Homo Sapiens
agtctcgtccaactttattgctctggagaacaggagggcaagccagcgcggggcggtagtgcccaggcatccctctccccgaggccgccggcccggccgtgccgtcggggaggaccccgcacccgccgcgagcgcgcacacaccctcggtgacaaataaatacggcggccgccccgcccgtggggtcggggatccgccctgccctatacggggaagggcgccggcggcccctagcggacacgcgcgcggcctccgggacggccgggtcgtccgcagcgcaggcccggggcggcggcggacgccggggacgcgagaagttatgggccacccgggccggcggcctcagctcagcacgcagcgctcccgccggctcaactgccggctcagcttgcggcgccgctgttccaggccgcgctccaggcgctcgtcctcctccagggcgatccgctccttgtggtccaggtcccggactagctcatcgcgctggttcaccagcgacaccagctcctccagtaggagctgctctcggtgctgctgagcggacgttttctgccagtcttcgatggccagcatggcccgcagctcgcggctcagcagctcgaaccttcgctccaagtcctgctcctccatgctggaaggtggcggggggtgggtggcgggggggt

SEQ ID NO: 122295 - DNA, 543 bp, Homo Sapiens
gaagcagcactgaagcgaaggtacgagctgctagccacgagctgcgggccatgctggccatcgaaggtgggacatgggctcaggggccgggaggcaagacagagccagggtggaggcggcacagccttgggcccgcgcctcctgacgcttagccgcgtcgaccctcagactggcagaaaacgtccgctcagcagcaccgagagcagctcctactggaggagctggtgtcgctggtgaaccagcgcgatgagctagtccgggacctggaccacaaggagcggatcgccctggaggaggacgagcgcctggagcgcggcctggaacagcggcgccgcaagctgagccggcagttgagccggcgggagcgctgcgtgctgagctgaggccgccggcccgggtggcccataacttctcgcgtccccggcgtccgccgccgctccgggcctgcgctgcggacgacccggccgtcccggaggccgcgcgcgtgtccgctaggggccgccggcgcccttccccgtacagggcagggcggatccccgaccc

SEQ ID NO: 122296 - DNA, 541 bp, Homo Sapiens
ctgatccaggagtggttcactctggtcaacaagaagaacgctctcatccggaggcaggaccagctgcagctgctcatggaggagcaggacttggagcgaaggttcgagctgctgagccgcgagctgcgggccatgctggccatcgaagactggcagaaaacgtccgctcagcagcaccgagagcagctcctactggaggagctggtgtcgctggtgaaccagcgcgatgagctagtccgggacctggaccacaaggagcggatcgccctggaggaggacgagcgcctggagcgcggcctggaacagcggcgccgcaagctgagccggcagttgagccggcgggagcgctgcgtgctgagctgaggccgccggcccgggtggcccataacttctcgcgtccccggcgtccgccgccgccccgggcctgcgctgcggacgacccggccgtcccggaggccgcgcgcgtgtccgctaggggccgccggcgcccttccccgtacagggcagggcggatccccgaccccacgggcggggcggccgc

SEQ ID NO: 122297 - DNA, 1019 bp, Homo Sapiens
  misc_feature (79)..(87): n is a, c, g, or t
  misc_feature (603)..(612): n is a, c, g, or t
  misc_feature (797)..(797): n is a, c, g, or t
  misc_feature (817)..(817): n is a, c, g, or t
  misc_feature (838)..(838): n is a, c, g, or t
  misc_feature (852)..(852): n is a, c, g, or t
  misc_feature (927)..(927): n is a, c, g, or t
ctcagataatttaatcagaattttaatataaacaggtcattatcccatattttacatgcagaacgatttcaatattccnnnnnnnnnggcgtcttctgtacatggtgctacttggctcttgtaggaaaacattgaaaaaataataattgagctgttggggggttttgtgtttctgagttgttttctgcaaaagctgcagcacatttgatcctgcgttgccaacgcacagggccgaggccacccaggcacacaaagggacgaggagaagcaactttcaggcaaagtgtaaagactaaacaagctgttcctgaatatgtgcatgggtgcacacttattttgaggctcttccttccttctccaatgggaccaagagccccagatttgtgatctggtttttaacaaggattttcagtggcccgcacccagatagaaatttggctggtggctggttctggaccttgactagtatcagaaggtaaaagtaagctcaaaaagccattgtgtcccctcccctcactcccatttctcggggacccttaaggaaatattcaccttccattgcactccctgaaagtccaccatgttcttttgtatgttctaggnnnnnnnnnngtgctgacctgttcttttcattcccaacctcacctcgcatataaattaatattctgaagaacatgctggaagattttctgaagtgacacccctctctgtgtaccatgtatataaaatcggcattccctgttccccatcctcaacaaaaccattgtttctgaagagctaagtgtcaggactcacangtgacattcaaggacattancccctaactcaccactgtganggagagaatgatancactgggacacagcacatcattaccgatgacagcgcagtcaatgctgagacctctgctcttcaacgtgtacagcnactacaatacactcccatccatagcaattcctggtgacactgcctgctagaaagtgaagattgtcgtcattggtacaatcccaggtcaggag

SEQ ID NO: 122298 - DNA, 893 bp, Homo Sapiens
  misc_feature (146)..(210): n is a, c, g, or t
ttttaatttcaaagtttggctattttaattcaatttcattgttcaaggtagtatgggtatattaagtggttcatttccctcctgaagaaaacaacttctgtctgatgtgattttgtgaaattcaaacatgactctttgactgtttnnnnnnnnnnnnnnnnnnnnnnnnnnnnnnnnnnnnnnnnnnnnnnnnnnnnnnnnnnnnnnnnngtaaacctccaagtagtttggaaacacttgcctatttgctcattcctctgggcacagcctttcagagcatttatcccacctgtactgaaaaatctgttttcccaggtggtggtggggccactggatagaagggatcacagagaaatgaggagtgagcgagctttgtaaactacttctaattctcttcattagtatgctatgatccaccccagcttctgcaaggtcagacatgcaagacaagtacttggccaaaacagcaggattctaactagtgtaaaaatagattttaaataaaatagaatctctataggaaagagaattaggttatgctttacattcccactcttaagatatctgtatatataagtccaagagagactcaaagagttggtctgccctaagtaaaaattaagaatgtctgagtacattcattttgcaacattacacgtaaagtttttttgggaaatgctgcagcacatcccacaaaaacagatggtgattagtgatacagttgatgtgctaacaagtaacatgtaagacatttaggtcaaaggggatgaggcctaattacaggctaaaaacctattctgaaatgtgatcatttgaaaacctgtggctaattataaagcaaaaactaaaacctgttgtttaacaatacatcttactaacctatccctctaccc

SEQ ID NO: 122299 - DNA, 2186 bp, Homo Sapiens
tttttgttgttccggtcggagtgagtttattagaagttagaaagacacaaatacacaaatcactgagcacttcaagattagtagagaaaagcagaatgcccaaatttcacacacagactacacagcaaatgctactggggcatatcctagggagacccggagtccgagcggggcccccagggctctaagtaccacggagcacgtgcggcacatgccttgctgtaaggcttagttacgtcaacaggtcaccgtcatgccattgcaacaacaccttgtgtgacacttaactacctgttaccaaagtgaacagctaatcgctcttaatttttaaactcgtgtattacacagtaaatggattttattaatacagtttatattactaagtacatatctggcaaagctacatgtatacagaaatcaggaacccccccaaaaaggacagcagcaccgaaaggaatggccagttcacagagaggtgcagctctgacaagatcctagaggctgctagacacagcgggcagcactggagagagaagggaagctgcgggaggcgccacccgtcatgcaggagacagtgtgagagtcacgggcggctaggccatgggacgctgagcaagtcagttaaccagcccgagcttcattttcctcatttcctcccctccgtcagggccactctcgtacttgaccacgtccacgttgaggctctcacggctcctgcgcttctccatgttctcagggtcattgagcacttctgccaccctctgtttgtgaacattgtcaagaccctgtttacgagacctcatagcagcttcttctaacgtttctgcagcttcaaatttgccttgacgtctgtaaagtgccccaaggttttttagagtggttgtaacagttggactatcaactttgcaggctttgtaccagccgccatactctccaaagatgtcccatccttttgctttcctttgcattcttctctttcttcagcatgcatccagatgggtttattttcatcatctacagaaccaaactccctttcatgtgcacgagtgagaatctctttgtacagtgtttctgcttgcttgaactttccttgtttcaaatagcaggatgccagggcttatttttcgtcttagccacgttggggtcacttcaggtcccagttttgtctggtagatctacgagggctctttgataataatattctacttctttcatacttgccctggatgtctggcacagtaaggccaagttactttaactggcttggcgaacatccggggtgatccttccccaaaaccttttctcggatttccagagctcttttacacaacggctctgcttctttgtacttccctcttttaccataaaggactgcaaggttattcaaagtcgccgccaccgcaggatgatctttgcccaaagttttctcacgaatagccaaggcatcattcagtaggttagctgcatctattgtatttattcatgatccctgtacaccaaggcccaggatgttgagcatggtggccacgtccgggtggtcgtgtcctgaagtcttctccaggtcctccagggcctgcttgcagaggggcacagctacctcgtagcgcccctgcgaggcgtactggatcaccaggttgtggagcgtccgcagccgcgcggggatctcgtagccgccctgctgggcagccgcggctgcactgctgtgctgctgctggattccttgccctgggtcgtcttcatcattggggaaaaggtcatccagaggctctttggtagaatcagtgtctttgtcctcggatggggaaatgtcgtcatcatatttttttagctgattcataaactccagatgcttcttctcctcctccagttgagccacagactgctcactcttctgcagtttctgctgcgtgttggccagttcatcccgtagccactgattctcctggcacagacgacgaacctgcgcacgcagtttctgcttctcggactccacagcattcaggtgatttgacaaagccatcataacctgtgcctcactcaggccgagctccaacatctccagtgacttccggatcatgtttgatttctcctccaccaaattactttcatcatctttcttcaaacacttcagtgtctccagcaaactttcctcgtgccggattcaccacccaggcctcgtacctagc

SEQ ID NO: 122300 - DNA, 914 bp, Homo Sapiens
gggcagccgcggctgcactgctgtgctgctgctggattccttgccctgggtcgtcttcatcattggggaaaaggtcatccagaggctctttggtagaatcagtgtctttgtcctcggatggggaaatgtcgtcatcatatttttttagctgattcataaactccagatgcttcttctcctcctccagttgagccacagactgctcactcttctgcagtttctgctgcgtgttggccagttcatcccgtagccactgattctcctggcacagacgacgaacctgcgcacgcagtttctgcttctcggactccacagcattcaggtgatttgacaaagccatcataacctgtgcctcactcaggccgagctccaacatctccagtgacttccggatcatgtttgatttctcctccaccaaattactttcatcatctttcttcaaacacttcagtgtctccagcaaactttgtaaaatggaattgtgctcattcttcaaagcttccagcccctgaattacttgctttgtcttagaaataatttcatcctgtgtaagcttctccaacttgtcttcctttatgtacaccattgtggacatgttgtcatacattcgccttgctcctgagggccgcgctctctcgcgctgtcagcacctggagcgccgccgggcgcgcgcgcggagcagcgactgtgcgccgagcccgcctcggctgtgtgaggcacggcgcagcagtcaccagctaggggcgccggagctaccgccccgcagcatcctcggccacccacgcgctgtccccttggccgccgagcacagccccgcggctcctcgcaccagcagcccagccgacccagccagtcccgctcggccgcctgcgccgctccctcgtgccgattacacccccaggctcgcacctagc

SEQ ID NO: 122301 - DNA, 577 bp, Homo Sapiens
aaagcataaggcatataaacttttaatttaaaaaaatgtacaataaaatacgttatcgcacacaacgtgaggaagttacacatgggaagggagccgtgggcccagctcatgccccaggtctcctgggagagaccacgccgcaccagggcaccagcttaggcccagccccagccccaaggtcacgccagccgtgtggttattagtatcatgtcctatgcacacagacgcaggagaaatgagtgagcgctgcggctcccggccaggggccctccctgccgccctggctgtcccgggccagctccgggccacactcggcagtcccatcctggagcggggccaggttggggtcagttagcggtggcgtcttccaggccactgctgctgctgtcgttttccacaaaaagaggctcggccagagacgcccccgttccactctacgctcatactcacttcctcccctccgtcaggggcactctcgtacttgaccacgtccacgttgaggctctcacgggtcctgcgcttctccatgttctcagggtcattgagcacttctgccaccctctgtttgtgaaaattg

SEQ ID NO: 122302 - DNA, 731 bp, Homo Sapiens
aggtatataaacttttaatttaaaaaaatgtacaataaaatacgttatcgcacacaacgtgaggaagttacacatgggaagggagccgtgggcccagctcatgccccaggtctcctgggagagaccacgccgcaccagggcaccagcttaggcccagccccagccccaaggtcacgccagccgtgtggttattagtatcatgtcctatgcacacagacgcaggagaaatgagtgagcgctgcggctcccggccaggggccctccctgccgccctggctgtcccgggccagctccgggccacactcggcagtcccatcctggagcggggccaggttggggtcagttagcggtggcgtcttccaggccactgctgctgctgtcgttttccacaaaaagaggctcggccagagacgccctggagatgaagcacagacgagtttcactcagggcgtgcaggcggccctcaggcgtcttcagagctccgggcgtgacaccagcgtgtggctgcagaccttggacttgagggacagcctaggggccccttagcagcctccatctggccagagctgctggcaaggcccgtggggcctgaactacactgcttggtgccaggagcagctgtgtcaccctcccccatcaccatggctcaccaagctgtgcggtcagaggccagaccagccatgccaatggctctggcacccacaggccacggcagcaacaagtgggaggcc

SEQ ID NO: 122303 - DNA, 1472 bp, Homo Sapiens
  misc_feature (126)..(126): n is a, c, g, or t
  misc_feature (143)..(615): n is a, c, g, or t
  misc_feature (666)..(684): n is a, c, g, or t
cacggtgacttggaagcccagctcccgaggagaaagcgacagttcgtagcgcagggtcgaacagagacgcagaggagctccaggggaacgcctgttcttatagtctgtcggtttcccactctgacngaggtcgatttgtgatnnnnnnnnnnnnnnnnnnnnnnnnnnnnnnnnnnnnnnnnnnnnnnnnnnnnnnnnnnnnnnnnnnnnnnnnnnnnnnnnnnnnnnnnnnnnnnnnnnnnnnnnnnnnnnnnnnnnnnnnnnnnnnnnnnnnnnnnnnnnnnnnnnnnnnnnnnnnnnnnnnnnnnnnnnnnnnnnnnnnnnnnnnnnnnnnnnnnnnnnnnnnnnnnnnnnnnnnnnnnnnnnnnnnnnnnnnnnnnnnnnnnnnnnnnnnnnnnnnnnnnnnnnnnnnnnnnnnnnnnnnnnnnnnnnnnnnnnnnnnnnnnnnnnnnnnnnnnnnnnnnnnnnnnnnnnnnnnnnnnnnnnnnnnnnnnnnnnnnnnnnnnnnnnnnnnnnnnnnnnnnnnnnnnnnnnnnnnnnnnnnnnnnnnnnnnnnnnnnnnnnnnnnnnnnnnnnnnnnnnnnnnnnnnnnnnnnnnnnnnnnnnnnnnnnnnnaagaattcggcacgaggcattctgatgttggagcggccgcggctgtaggcnnnnnnnnnnnnnnnnnnnggtttaacaaaattgtttaataaaatttataaaaatgcatctttgagaatacttttctcagcttgaattgttttccttttccacccccaaagaaaatacacaattatcagcacccacacatgtatacactcaaaactacagtgacattctctacacagaactatattcgatatagcttgaactgccgaaaaatcaagacaattccaaaaagtgattgcagggttgatttttttctccaaaacacttgagaaacagtaaagctatttcaacaaaagtcttttctttgattgtcaaaagttgaaattcacatttaaataaaaagagatccaaatcaagatcctcactaccccctacccctcaactaaccccctttagggccacattttcttcttgctcctaagaaaaaaatttggaattttgaatattctcggttttctgtgcacacctggaattgggcaaatgtgttcagctcagccagcattttctgtagacatcatcaaaagcaggcacttggggattctgggctttgagtacaaaccacggatcttgtgtcagaaacacatgttgagactcctccattccttccagaattttcagagatgaggtagacccacctcaatcatcctcagcatcagtttgctaaattgccaggctcaatgacaagctctcctgccatctccaagcccacttttcatagttccggtctgtctttggctgcagcactttaggcactattctaagtcctgagtttatcactttggttaaagctaaaaaaccttaaggaccac

SEQ ID NO: 122304 - DNA, 1315 bp, Homo Sapiens
taacatccatacagttgtttaagctttatttttaaatgcatgcatgtttcaaggaaacaaaaatttcaagatacagaatacaacatatcagattaaataattcagaattattttaatgtatacacaaataacaatataaagcacatacataagatacattatataatttgaggtttcaaaaagcagtaatttggttttaaaattctgacaccaatatctaatgtaacattcaagtaaaacatatttcaaaagttaagactcctgagactaacacataactctatgacagcctgcctttaccacgatcttcaaaatagtgctgttcaattctcctacagaaagcaaggaggttgctatagtttttcaccttctcagaaagttcatcatttgtcaattgtgtggtaagaatggtgtatagatggccaaataccagtgcgtcaagttcagtaggctgcttattgaagaaatacggttgtgttcccagtctttgagagagagcttgacagcactggtctacatcctctaagacctggtccagagtcttctttccccatccaatagctttcatcttacgtttgacttcccactgtttttgataggccaaaatatgattcagaggccaagggtaaggagatccatacctagcatgagtgatctcccctactgtagcttcatcacaccactgaagatacagctctgcagtcaacagcatattgttgactaattccatgtaagctttcatttctgctttttggacttcctccagcccatcactaagagaatggcccttggctttaacaaattggactattggaccaagttctgatactacttgatttcccacatgaataaaaggtactttaccagatggagacatatattctgcatttgccctacaaactactttgataggcaagttacacatttgcaaaaaggcctgcactgcaagagaagctgcattgtcagaaagtaaaatttgctcccctttcaattgctgatataatgtagcattttcaggccaaggttctgcagctgcaatctgggagacgaaggcttccgccactagagacatgtcggctgggaggcccggcgcccgggtgcctgccccccacgggcctcagcgtcctccaccgcaaacccggaggctctcggcagttaacgagcctagccccgccaacgttcagactcgcaaagcccactccaacagcagcggcggctgcagtgaggcccccaagcgacgcgtggtcgacgatatcccgggattccggaccggtaccagcctgcttttttaaacgtggtgctatagtcacaagcg

SEQ ID NO: 122305 - DNA, 1104 bp, Homo Sapiens
  misc_feature (847)..(953): n is a, c, g, or t
tttccaaaaaccccacttgggggaaaccagttaaaaggttatttccaaacaaaatgttcttttcctttggattggtcaaaaaagttggaaattccacattttaaataaaaaagaggatcccaaattcaagatccttcatttacccccttacccttcaactaaccccctttagggcccacattttcttcttgctcctaagaaaaaaatttggaattttgaatattctcggttttctgtgcacacctggaattgggcaaatgtgttcagctcagccagcattttctgtagacatcatcaaaagcaggcacttggggattctgggctttgagtacaaaccacggatcttgtgtcagaaacacatgttgagactcctccattccttccagaattttcagagatgaggtagacccacctcaatcatcctcagcatcagtttgctaaattgccaggctcaatgacaagctctcctgccatctccaagcccacttttcatagttccgctctgtctttggctgcagcactttaggcactattctaagtcctggagtatatcactcttgcttcagagctaaataaacattaatgaacacacttactcagaacaagtcactggatagctgcccattgcaagttacatactcaggagatgaaagagggaagccattaaaggtcttcagagtagacaatacctagtcaagatgtggccagacaaagacacaaacttcttaccctaaaagagcccaataatttctgcatcagagaactcctatcttgggcaaagcaactgaattcaggagtgagagttgatattaaaacatggaggctgggcacagcagctcatgcccannnnnnnnnnnnnnnnnnnnnnnnnnnnnnnnnnnnnnnnnnnnnnnnnnnnnnnnnnnnnnnnnnnnnnnnnnnnnnnnnnnnnnnnnnnnnnnnnnnnnnnnnnnggaggctggtgggagaactgcttgagccccagagtttgaggttacagtgagctatgatcacatcactgcatcccaggcctgggcgatggagcgaaactgtctcttaaaaaatggcagggagttggggagctgggcaggtgcagtggctcat

SEQ ID NO: 122306 - DNA, 652 bp, Homo Sapiens
  misc_feature (236)..(244): n is a, c, g, or t
tcgtgttcatttgtactttattacttttatatacaatgtagcatttaaagtatcctgaaggttaactgaagctatattaaaattttatctttcatcaaatcagattactattttagagagttcctttccctgggaaaagctttgagcatctctgtaccaaacagtgtgaaagatgttctatccccacctccacccccatcaatatcctccaaagggacctaagaacttgaagcagnnnnnnnnncattaaatgctaaattgtcacctctgaaaaaatctgcacatgtgggtacaaaggagaaaaaggagggaggtgtacaggagaggtgataacagttaatcctgacttatctcaagtcataaatacttcttgataacagaaatcattaagtcatcagattaaaagaagtgtatatattaggtatgttcttgctgaggtatctttatcattatcttaatatatcctatgtgatttctcataaagacttttctgtccttcaccattattatttcagaagaccttggcctttaaggaattaggcacccccagcatcatatgaccaggaggcttcacctcttgctagccctttccccaggtaacactcatcagggggtggccatgagggttacagtaggctctcttgcagccact

SEQ ID NO: 122307 - DNA, 776 bp, Homo Sapiens
  misc_feature (729)..(730): n is a, c, g, or t
  misc_feature (758)..(758): n is a, c, g, or t
cacttaattatacatacgttttatttaaagaaaagcaaaacacacaaccacagcatttcaattaaggagcttagaaaaatttcaagtgcgttcttggttctccagttaccattccaataaaaaactttttaaaccaaagttaaaattaagtgaaaaagaaagaagtcccagtaagcagaccgaacaatacaaattcaaaatactactctatcttcttgtgttcgttcccaccaaagtgtgctgtttaaagttccacaactattatcttcctcctcttgttctttagtgagttctacaaaaacctgttccaatgttgcttgagaaaagctatattcttcaatggcaaaagcatgtttagcttcttccagcttaaaaaaagattgtgaaagggactgaacatcttccttaggaattttataagccaaaatagaagaaaaactttcctgacggcttgcatttgggaaaatatactgaatttctctttgaaggcggtctacttctaggttttctatccagtccttcaatttaatttccaaaaagtagccttttccaaatttactctttagatgttgtactgttccgatacatcttaactgcccagacaccatgatagctactcgatcacagacagcctctgcctcctccatatagtgagtggtcagaatagcagcccgctttctgtttttaaatgcagttcgaattgctcgccacatgtgctgtttggcttgnngatcatactgtagatggtcatctagcanagtatctgaggatcccta

SEQ ID NO: 122308 - DNA, 730 bp, Homo Sapiens
  misc_feature (163)..(171): n is a, c, g, or t
ttttttttacacacatattatatacaacttttaaaatagctgcacaattttatatctcacttttagagaagtgcagtccaggcagaccatgcttctcaatatattaaaaatattaaataaaacccaaccagtttcatacttttctaatagtcaagctggctgnnnnnnnnnggactggagaaagaacaggcagttgtaaaatggggatcagtcttcacaaacacactacttaaaaatcttgctatttccttatccctttgacagcatctctacaatctcacctttaaagctggaaataacacattgctaacttagagacaacatcgggtgcaacatgcatatgtcaactgcccactcaaccaactgcaaccctgaggatttttctggcccagtagaaagaggaaacacgaagataatctctgctgtagagctgcttctccagtttacgacttcatgtgttttcaggatgtttcttggacatgcatgtgtgacagtcacttcatggttctacttcccataagcagatctctcctccattctgtctgtcatcacaagaaagccactgtcatccgtccaaaggttttccaaggtaaaccaaagtcacttctgtgttgccatatacagcagaaactgctgggtataagcagacctttggaagtcctctaaaagcaacccccaggaactcatatccacgttcaaaagctaaagtcttatcttccatgtccaagcc

SEQ ID NO: 122309 - DNA, 685 bp, Homo Sapiens
  misc_feature (606)..(606): n is a, c, g, or t
tttcacatttttaccagatctacttttatttcagaaggaagtttgtattatagtatttacttttgtttatatacaagttcttcacatttgtgtttaaaatgcacagacctcccttagttctcttgttcctgcttaaattagctgttattttacaatacaaaaaataccaaaaaattgcagtcctaaatgtatgtataacacccacaatccccgcaatgaaatagtttacaatacttactccatatttacatgagtgtaatagatgctaaattatacatattaacaaactaagcttgaatccaaacaaacgaaatcgtaaataactataaaacaaaaacatttccagagccagaattagttcaacgaaacaggcttcactagtgtttagaatgttttgtgcacaaattcagttactgaaaatcaattccattactgcctttaaaagatgaggtgccaattttcctctccatttcaaaacatctccttgtaggcagggtgtttgactctcatcaaggggcaatatctcttggtgggcctggctatctagaaaccaccgcaatggctggagccaagtttggtcaatggggtaaacatttcagaaggtangcagggcatgccctgaggccaggaggcctctgccgtcctggctgtgtcctcaaggatggcaattctcacagaaaccacc

SEQ ID NO: 122310 - DNA, 1606 bp, Homo Sapiens
  misc_feature (91)..(91): n is a, c, g, or t
  misc_feature (127)..(127): n is a, c, g, or t
  misc_feature (207)..(264): n is a, c, g, or t
  misc_feature (268)..(395): n is a, c, g, or t
ggggcccgcccttgggacagcgacccaaataaaagggcccctgaaaaccgccactgggggggttgtgtttgagagaaccccccctcgggtngccccgccgggggcgttcttttgttgggtttggatnttcactaacgcttttgttccgggccccggggtgtttccctggggtgccgtgtttttcccccgtttcgcccttcgcccgtnnnnnnnnnnnnnnnnnnnnnnnnnnnnnnnnnnnnnnnnnnnnnnnnnnnnnnnnnntccnnnnnnnnnnnnnnnnnnnnnnnnnnnnnnnnnnnnnnnnnnnnnnnnnnnnnnnnnnnnnnnnnnnnnnnnnnnnnnnnnnnnnnnnnnnnnnnnnnnnnnnnnnnnnnnnnnnnnnnnnnnnnnnnccatttgaaaatgtgacccatttatttgaactgaaaggcatcattacaaagtgcaaacatttctttggtaatgaactgaatacaatggtcataaaaaaggcatttggctgttggagcagttagaaaagtaaataaatatgtacattccactcctgttacagcgatcccgcacagtggctgctagacacgttcacccaggcactgcccactgttctgattacagagagtatcaaactggtgattccgcagacattttggtttgaattacagaattttttttggtaaatcacagtcagcttccccctttggcttagacaacacaattccttgtgactggcccagaccgcacattacgcaggtgtgctacaggtgtgccgcctcagcactgagaccatgaggcctccagggcatgtaagaggcacagaacactcccagaacccagaatctgctgtcatctgagtgcctgagcaacttacataaccatcagcttttagacgaacttacacatttcctatttgacagaaatctcttccacaatttggtcactacatttgacttgctatttcaaaagaagtccacatgtcatgaaacaccaaccaatttttatcaatcacttaccaatatgaggttaagaagttaagacaaccatttttacagataaaacacatgaatccaatgaccttcctcacagctgaaatgctgcctccgccgcagcaacttggccggcccgtgctggaagggtctgggtgtctccttgggaggatgtgcacctggaacacgggttgtgcacaaatcacaccaggcactgtatgcgcccatcctgtcagaaggaagctggcctcccccaccccatggaagcctcgacgccataccccagtgctggacacctgccaccctgaaccgaaacggcccctgacctcaggggttccctccaccacctcagctgggccttgcttgcgggcaggtggcccggaccttggtgcctcgtgtgcccagcactgtgcctggcacatggtggatactcaggtcagcgtgctgcactgaagctgtgtgttcggggaaaggttgctcagaacacagatcgctttgtatttagagaaaaatggaaggttttggtcaattaaagagagaccatgaggtatgagagttgattttcatgacgtctaaaagaactttgcatagtggaaatggtttttctgccatatctaata

SEQ ID NO: 122311 - DNA, 967 bp, Homo Sapiens
  misc_feature (126)..(136): n is a, c, g, or t
  misc_feature (366)..(844): n is a, c, g, or t
  misc_feature (881)..(881): n is a, c, g, or t
attaacaatgtgacctgatcacaattctttaaagtctagactagttttccgtatgttttccacattttattctgacatcatatcttttaaaaacaaaaggatgcgaacatttgcacttctcaatgnnnnnnnnnnncccatagatgtagtttcacttatttccttcaggctttttatcagcaagaagcaatgtctgattttgataccacccatttgctatgaaaatataagaaggcgtcatcttcaaagcaacactccagttgggcttcttcatcgtttagctgcatgatttcttctacgacatttgtaacagacacaacgtatatagaatttcagtttgggttttttcctcgttccgaattcttnnnnnnnnnnnnnnnnnnnnnnnnnnnnnnnnnnnnnnnnnnnnnnnnnnnnnnnnnnnnnnnnnnnnnnnnnnnnnnnnnnnnnnnnnnnnnnnnnnnnnnnnnnnnnnnnnnnnnnnnnnnnnnnnnnnnnnnnnnnnnnnnnnnnnnnnnnnnnnnnnnnnnnnnnnnnnnnnnnnnnnnnnnnnnnnnnnnnnnnnnnnnnnnnnnnnnnnnnnnnnnnnnnnnnnnnnnnnnnnnnnnnnnnnnnnnnnnnnnnnnnnnnnnnnnnnnnnnnnnnnnnnnnnnnnnnnnnnnnnnnnnnnnnnnnnnnnnnnnnnnnnnnnnnnnnnnnnnnnnnnnnnnnnnnnnnnnnnnnnnnnnnnnnnnnnnnnnnnnnnnnnnnnnnnnnnnnnnnnnnnnnnnnnnnnnnnnnnnnnnnnnnnnnnnnnnnnnnnnnnnnnnnnnnnnnnnnnnnnnnnnnnnnnnnnnnnnnnnnntcgagctcagtcagagtggcgaaaccgacagactatnaaatacaggcgttcccctggagctcctcgtggctctctgttcgacctgcggctacggatactgtccgcttctccctcggaagcggg

SEQ ID NO: 122312 - DNA, 1394 bp, Homo Sapiens
tttttaaaataagtatgttttctgcttatttgtgttttcttttctttgaatatattgcacaatattttattattaaaaaaaggttttatgtctcaggcaaaaagtttttctccttcaatcgggaggtgttaatgtgtattattttctaaaagaggtaagtggttgtctgtgtggccatcctcaaaaggaacagaattgacaggtttataggatccaagtctgaaacgacagcaaattatttcaactataaattttccaattccatgtaacatgcctgttgttgaaaagattcctccaacaataccacagagtcttacaaaaaactgccagaatggcatgtgctcctcagtaactgtcaccataagagaactgagatcatatttcataaatatcccagagactccatggctgcctgcagcatggttaatgatacgttccctttctgtcacagaaaactgatgggtgtctgctgatattttatatgtatgtagttttgttggcacaactgtaataaaatattggaacatctggttgtgatctatagcaattttttcagttccatctaaaggattaataattgctggaacaagctctccaaaagacaaatgatctattctatgagaaaatttgtaagattcatggttgacaagtgctgccaaatgtgcatgaccacgaggatgtggaattgccttgcccactgttatgtgaaaattccctgctactttattgacatatagatggccatgaattctgcatgcatttggagactgtgatgaatcatcttctcttggtggaagagctgttgatgtacttttaaaagcacttttaaatatcacatcttgaagtgaatgctcttcttgtagcctactctgaatcagctgcagcatcctctgccactctttctgctgtggtgaaagatcaaatactgttggttcataaactaaaccatctgcagatgcaaccattgtttctgctaaatccaatacatccgctccaacatattgacacttcatggcaacagtaatatctatattaattcttaatttgctagaaaaatccttgtctacttcgtattcatacttcatccatgtatcttgatatactgagaattccattatggttaataaagccatagttgtaaatgctattagagaaactgtacctccactggctgaagtctctacatagctctcaggaaccttcggaaaggcatccaactcttttaccaaacttaaagtttttttccgattcagtcgcctcatcttcaggaaaaccttcctcttccttcatatagtcatgcttgtgttatggtcccagcctaccgccatgtttcacagaagcccccccggccgtaatggccgaattcccgggcatatgtccggtaccgtcgactg

SEQ ID NO: 122313 - DNA, 1382 bp, Homo Sapiens
  misc_feature (522)..(549): n is a, c, g, or t
gaactgcaattatgataactcaacaggatcaattttatttacatgctgaataaatgaatgaaacatattctctacatccataacttaagtacaatcagttataattacaacactgcagcaatctgagctgccacctgctgggatcggtctaagggaaacgttctgatgttccagaataatgttcttaatactctgcaaaaaatgaaacaaaataaaaacacaacttcacaattccttactgggttacggctggttccaagaatttcttttcttcagctcctgtttttgctgctttccaagagtcaacacacgttggatttacttctgaattgtcaatgaggtaatgtgtgcatcagtgaaataaacagaaaattcattcattcatggcctttgcacagcttttattattaagctatgagcatcctgtttgaggctagttttactagcggctatgtgcacatttgtccgcaataaaagaagtttactcattcccctgtccccttttctaatagaaggttagcnnnnnnnnnnnnnnnnnnnnnnnnnnnngcacatcccttttcactttacagtacatttgactatagtgcacaacatgattccgagtcaaaacagtggcccattgggcactgagcttctgattggtgtagggcagtccaatcagtgctggtgtcactgggttaccccaaccatgtccggccaaaatggcactacccagtggtagtgaaccatctaattaaaaccaaaactcccccagggaaaatgctacactatcagagtcagtcttgagtcagatctttatttggtgctccatccagatatatttttagtgctttctctttacgaggtgagtatgttacacgatgtccagtcttctggagtcgactgctttcttttttcatcagttcatttctttgctcatctgtcaattccattaattcttctgttttatccctataaaatatgaccgcaccatcatcacagatataaagaggccagacattcagggtagaaactttaggattccagtctaaatcttgatgaatatcaaggacagaaatatcacagggaaatgttcctctacccttagcaaattcaatatcatccaaaggaatcccactgatttcactaagcttctctcgcaattcgtccacactactgctttccaatacaacctcctggaagggatccaacttcatctctgaaggcttccaccgtcttgacaaaactgcaagctgtgacatggacttcatcttctctaccccatcaagaacttcaaggaaaacctcccagttgctggaaatattaatatcttcttcatacatatgataatccaaaaagacagtgccaggattcttccatgtttttttccttagacgaaa

SEQ ID NO: 122314 - DNA, 1260 bp, Homo Sapiens
  misc_feature (404)..(415): n is a, c, g, or t
  misc_feature (590)..(598): n is a, c, g, or t
  misc_feature (912)..(924): n is a, c, g, or t
gtccccataatgagtcctgtttgattggtagcctggatcccttgttacaaacacttcgtgttcaagattatattctttgggtttataggaacaggaagtgctgaaaatgtcaaacatcatctctgaagaaaaagaagttgcaatggcttaagagtttagactaagaagggagctcagagaagtactttcagcataggaatgaacagtattctcaaatcgcagaataccgagttcccctccctcagacgagggctatatgtaacaaaaataacaataagcataggtatagtttaagagccttttacgtagtaattcttccaggccataaccatacaaatctgatcatttagacatgacaaatttctatatacaaaaaaacatgtaactttcaacccttctctgcnnnnnnnnnnnnacaaacaaagtatgaaactcattgtttcaacagagccatatctttcaaacactgaatgaatcatttcgacattcatttttcttttgtgcaattttttaaaacattacctgtactcctcaaagtgagtgcttcaaaattttgttttcttcagcttctcaaatcaggtgtacatttnnnnnnnnnttcccacaaggtatagtgctacaagaaaagatcctatcatcagtaaggtaacgtatttgaagcgaggtcatctatgtaaaagaaatctcagctccggagtagaggtgtgcaagttgtttggagtttccctatgccagaaacacaacactgtccgtggaaaagagaggaaaccaacccaacacaatagcagatgcatgtgctttataaaaaagtatattctctgtatatttattacttgatgtgttcttaaattctctatttcagaaattctgggttaaaaacaaatgtggaagcaaaggcctccacgccacttnnnnnnnnnnnnngtgtaattctctcctttcacatcaccaccgaagaaaccgaattgggccatggagtctgctggccctgttttcacctggtgcaaattgaagtgcaaagggtttcagaaggcaacagaccagtctgttgagctgcttgtggttcatgaaacagtagccatgacaaccaacacagctcaagaagcccggccttcggtaccgagagctctgcttcctcacccatatctgaaatagcacggtattagtgtcttcaaaagcattggagatttttctctctatgaaagaaataggtttccttagtagtcacagatgttaaagggtattgtcaatcgtttcctt

SEQ ID NO: 122315 - DNA, 581 bp, Homo Sapiens
aagaacaacagacatttatttcttacagtttgtaaggctgggaagtccaagatcaaggtgccagtaggttcagtgtctggtgaaggtcaacttcctgtttcaaagctggctttacctggcaggcctcatgaaaaaaagctgtccttcccatactaggcttggtgcacaacctgtgcgttgcagtgtctgaagggggttgcattcaataactcagggcccctggccggtcatgttctttcacatattcacattcctagtccaggtgccttcattcttaggtctctctatgtgaggccttcggctgaggtgcttttcaggcacctctgatgaaatctcctccttgtggctgaatacgggctgatgacgatctgaagggagtttttaggcacatgtgaagctttcctctgtaggcagccatttatggaactgaagtgtgataggaagctgggtggaccagctgacatggtaagtgcagatgcaggatcccagagattatcaagcagccagggacagtagacccttttgtgcatgcaggctcaaaagacctgtgaagatgctgacacctcaggctcatccctcgc

SEQ ID NO: 122316 - DNA, 767 bp, Homo Sapiens
  misc_feature (647)..(681): n is a, c, g, or t
ttatgaacaacagacatttatttcttacagtttgtaaggctgggaagtccaagatcaaggtgccagtaggttcagtggtctggtgaaggtcaacttcctgtttcatagctggctttacctggcaggcctcatgaagaaaagctgtccttcccatactaggcttggtgcacagcctgtgcgttgcagtgtctgaagggggttgcattcaataactcagggcccctggccggtcatgttctttcacatattcacattcctagtccaggtgccttcattcttaggtctctctatgtgaggccttcggctgaggtgcttttcaggcacctctgatgagatctcctcttatctccccttgggtggtaccaagtgcttctgagttgcagataacttcagccggcttgcttcttttcaggactggcttctatgtgcagttacattgtacctttctcttctttcccaagtcagtaaccatacttccatatattttcttccaagggttcattgaatttttctctatgaagttatttctttcctcccctcaccctattcttttacctcacagtttttcccttttagaatacatcctgtgttttgattgaaatttagaaagacgagaacaatttattatttaaaactgaagctctcannnnnnnnnnnnnnnnnnnnnnnnnnnnnnnnnnntggttttaacttcacatcactggaagaggtactgaagagggtaggaaagacagcttcgaatcgcctccatcacttctcccttaacc

SEQ ID NO: 122317 - DNA, 785 bp, Homo Sapiens
ccccccccgcctggtctttaataaacagagtattttcacagcaccggcttctagtggcttccaggaaggacaaggtcctcggtcccgtaaaccctgatccaagactttgccaaatgcataagcttttactgtttttatattaggaaatcatacaggaccaagaaccgctggggtcctggccagccagggcaggcccaggatggggctccggggccatggaggcgaaggcacagtggcaggcaagggatgaggtggtcacaggtacacgggctgctcctggcctgtaaggaggcgatatgtggcagctggcatcgtcttgatatgcacctcgccataggcctcggtgagcagctcgatgatgcgggcgtgtggcgtggccaccacactctgcccattgatctcaatgatgcggtggccgacgcggatgcccccacgctcggcgatgccaccacggaggaggctgcagatgatgccgtcctccacgcagaagcccagctgctcgcgggcgtggggccggtggatgatggcggtggtgacgggagggcagtggacgatgctgagtgtcaccgacgtctgcgacttcgtctcgcggacagcggcctggcacgcagccaggggcagccccaccaggctggtcccgttgatggcggtcaggcggtccccgatgctgagggcccccgagcgctcagcaccccgcccccgggcggtgcagccgccctgcagtcccctggccccgtcctccccgtccgcgtggtacggcccgtcccggggaggcagcggccgca

SEQ ID NO: 122318 - DNA, 580 bp, Homo Sapiens
  misc_feature (20)..(20): n is a, c, g, or t
  misc_feature (37)..(37): n is a, c, g, or t
  misc_feature (61)..(61): n is a, c, g, or t
  misc_feature (90)..(90): n is a, c, g, or t
  misc_feature (120)..(120): n is a, c, g, or t
aatcactaattttaacatantatgccttcaataaatnatgctgttagttcacatttgaatntttaagaggatagtgctgatgtcaaccangaagaagttaatgatgtgaaaagaggttanaacccccccaccccggggccaggggccggggcctcacgatgccgtcctccacgcagaagcccagctgctcgcgggcgtggggccggtggatgatggcggtggtgacgggagggcagtggacgatgctgagtgtcaccgacgtctgcgacttcgtctcctgtggggcgggggccgttggcctcactcagctgccggacagcctggcaggttgtagccccctctgggcctcagtttaccctctcataaaccagagacctggagtccaggggctcaattctggaagaccccctcagatgtgatagagaacagactcgggcccggtgggcatggggtcgaagctgtctgacccgagccatatcgcttccttatggccaaaagccaagccgacagccgggctctccaggcaggctgcaaacatctgtaagaggctgcacggactgtggcctcattcctctgacgg

SEQ ID NO: 122319 - DNA, 1366 bp, Homo Sapiens
  misc_feature (88)..(96): n is a, c, g, or t
gcaaaagatcaccaagccaaacatttggccatatttttatttactacatatactataaacatatacaatacatgctaccaaaaaaaannnnnnnnnaaatttaactgtcaagaaagtgtatagtgttataatacaatggcacatgtttatattttatttcaaattggtttgcttatcacctatttcaaaccattaacagtgaaatgttacttgtggataattaaaaattatctatttgcattattaacaataaacaattccaacaaattaataagaattaaccatgtcaaatattagtattcaaaaaatgggatttgcagaaatgattatataaaatatagcagccaatttcagtttactttgccaataggatttcagcatttgcttttttttggaagacacttataagacatcctttgatttcttgaggggcattaactgccacactcaacagtcaaatccagcccagtggttcatgaacggccctggatcactgatcactgaggaatccttaggacttgagtagcgctgcctgttccactgatattacatatgatgaaaagagacattacaagccaatatcaaagtcaaagaaaataggaacattcacatcagttgtgacaaggtttttctacaagtatttttgatgccatactttcaggaaaacaagatttaatgtgtgtgtggactttacagtatctacgttctaactgaaaatttaacaaagcagtcagatggaattacatgtagtattacaaatgtgttcattcaacactaatgagcacccactctgtgcatagcactgggctaccattttacaagttgagtttaacgtctttatcaagcatgaccttagtgtgaggtaaaatacattaaattagcgtcaacgcgttagtctgcttgcggccatgtacggaatcctgggccagctggcttccctgtgccacgtcaccggtttctcaggtctcctcattcactcagacaaatacgtgcacactgactgtgtgtcagacagtgtgccggtcactcggacaccacaatctggtataggttcaaagaatgtaaatttatcattttaacctatgcagaacaattagaaaggcagattatttttccacaatgaggtccaaagcaaactataaggtgtttctattggtcataccacaccagagaccggtaagtgcctttatagactgagaactaacgtggaagtttcatgctgtcgtctaaatagcctaggtcatttttggtctcataggtctattttgtggagcacctgaccccatataaatcattccatacttaaatgggtttgtaaactaaacctgaacataaacaaagagccaaaatgaaggcagtttacaat

SEQ ID NO: 122320 - DNA, 498 bp, Homo Sapiens
gaacgaggaaaaaaaatctatttttgtacaaatgtaattttatccctcatgtatacttggatatggcggggggagggctgggactgtttcgtttctgcttctagagattgaggtgaaagcttcgtccgagaaacgccaggacagacgatggcagaggagagggctcctgtgacggcggcgaggcttgggaggaaaccgccgcaatgggggtgtcttccctcggggcaggagggtgggcctgaggctttcaagggttttcttccctttcgagtaatttttaaagccttgctctgttgtgtcctgttgccggctctggccttcctgtgactgactgtgaagtggcttctccgtacgattgtctctgaaacatcgtggccgcaggtgccagggtttgatggacagtagcattagaattgtggaaaaggaacacgcaaagggagaagtgtgagaggagaaacaaaatatgagcgtttaaaatacatcgccattcagttcgtt

SEQ ID NO: 122321 - DNA, 570 bp, Homo Sapiens
aaaaggcaggcaggaaccaacatttattaaaactttgctgtgtatatattatgctggacagctaataacatcatattgtaattcctactgaatacttttgctcataagagttttttcactacagacaaattgggtaaaatcaaaatctgacattacaggaattactcaagtttcaatgcgtcactgtagctaagccagtgaactcctttgttctgctgagaaagagcaagaagaatgaatcttcacaggactactagaaacttcttcccagcaaggtatgaggaagccctaagtcaatggtgtaatcctaaatcagggtttgaaaacccacctaacaggcagagtgaaattaacaggcaaagtgaaatcaggcttccctgggaaagtctcaataggaaacaacctgtagatgagtcatctttgaggtaccaggtgtttcttaactctctccaagtccttcccacctccagaataccagcagaaaacacaaaagagaacttggtcacttcttcttgcctctcctcttatccttgcctttacctttgccttttgaatccttgctcctcgtgc

SEQ ID NO: 122322 - DNA, 1212 bp, Homo Sapiens
  misc_feature (399)..(434): n is a, c, g, or t
  misc_feature (490)..(501): n is a, c, g, or t
  misc_feature (1124)..(1124): n is a, c, g, or t
  misc_feature (1150)..(1150): n is a, c, g, or t
  misc_feature (1173)..(1173): n is a, c, g, or t
  misc_feature (1176)..(1176): n is a, c, g, or t
catttcaataatcattttattagtacagaagaatccccactagtatttacatagtgcaaaaaagctgttattaccccccaaatgtgatataacaattatccttcatacagcaaaagatgaaaatcccttcatgttataactcacactaattttgctagttttttattagagcattacaattaagacattaaattataaacttatgtggtatatttagaaattaaattataaaataatacaaatactttcaaggtgtgatgtgccaacaaaatttaaatttttctcattaggattcagatttcagattaggcaaacagtttggttgattctgtgatgtatgtaaaggttggaagggatgagggaggaggaagatgtctgtaaataaattatttcacagannnnnnnnnnnnnnnnnnnnnnnnnnnnnnnnnnnntgagttgatgttctaacctgttggcccaacatacagaaaatacatgacaagggtgnnnnnnnnnnnnaagcaaacagcagctttacaaacagtaatacttctttatacatatattaaagtaacaatgtgttaagattgaacagtttcatgttaaagagttgaaaatgagtgtagcattcactactcatttgcacatttcaattcccacccctccctcctcccccagcttatttagaaatcagacaagtacatatttggatattaatttctcagtatttaaactatgtgaattccttttgactaattcttttccaaatactggaatcatataaaataccatctctgcaaaaaccacctccagtcaaagccagtaaaaacttctcaatgtataacacacattacttttccacatttagtcaaaagaaatatattacatcatttacaaacatatttaaaccgaaaattaagctaatatgaacatctgtcttttgagaagtaatcttcacagcaaacaaacctactgaagcagaaatctaactttggaagtgtaattcatattttagttaatatgcttacatactgaaatagaaatctattattaattattgccagtaaaaccacctctacacattaagagaaaaatcactatgttttttatttcttgtgatgatgaacaacccttactcttcncactggatctctttataggtcttcanagagccaaccatgcccacttcanaanatatataaaaactttcctaattttcacaactcctcc

SEQ ID NO: 122323 - DNA, 1043 bp, Homo Sapiens
  misc_feature (634)..(634): n is a, c, g, or t
  misc_feature (673)..(791): n is a, c, g, or t
  misc_feature (794)..(795): n is a, c, g, or t
  misc_feature (845)..(845): n is a, c, g, or t
  misc_feature (856)..(856): n is a, c, g, or t
  misc_feature (974)..(975): n is a, c, g, or t
ttttcgttaaatgcatcagcaagtttatttacaaatgcaattgaacagaaaggctcaccagtttctgaagaagacttctagtatacaaaccatggttatttttcattaatgaaaataagcagctttctattgggaattacttagcaacatttctggtaaagaaaatagagctcccttcatcaagcaaataaatggtacattaactgcatttttaaaaatcagaataataggtagaaggaaggatacagaaagcacatttggggatagattttaatgaaattttccatatggttctgcattaatttagaatacattacaataaacagagcaaatgcaattatgtatttatattaactatttcaaataatgtttaagaacctttttttaaaaaacaataaaataccctcttcaaaacaccactaactagaaagtcaaactagatcattatctgcctcaaaaatattcgtaggttcttattttttcccttgtgctctcaagatgctgaattcaacaggtaaatactgcacttttccccacacacaattaccttataaataaacaacagaaatactggttctaccaagactacaatgcttctatgtaatctaaagaggcaaaaaaagttattcttttntttagaaaaaaagcagaaaaggctcgtgccgaattcttnnnnnnnnnnnnnnnnnnnnnnnnnnnnnnnnnnnnnnnnnnnnnnnnnnnnnnnnnnnnnnnnnnnnnnnnnnnnnnnnnnnnnnnnnnnnnnnnnnnnnnnnnnnnnnnnnnnnnnnganntgctaaggcttgtggtggctaaggagggagctaagtcacattgagttgcnttgcgctcacngtcggctttccagtctgcgaacctgtctgtgtcactgcattaatgatctggcaaccgtgtggagaggggtttggtttgggcgtccctcttctctctactaggactcgtgggtccggtnnttggtgcgggacggtacactccctcaaggtggtatagcgtttcaagcacagggatactgagtaagact

SEQ ID NO: 122324 - DNA, 1375 bp, Homo Sapiens
  misc_feature (421)..(460): n is a, c, g, or t
  misc_feature (1277)..(1311): n is a, c, g, or t
ggccattaccccattttaaattcagaataatagtagaaggaaggatccagaaagcacatttgggatagattttaaaggaaagtgtccaatatggttctgcattaatttagaatacagtgacgatacacagagcaaaagccaattaggtatgtatattaactatgtcaaataatggtttaagaacctttttttaaaaaacagtaaataccctcttcaaaacaccactaactagaaagtcaaactagatcattatctgcctcaaaaatattcgtaggttcttattttttcccttgtgctctcaagatgctgaattcaacaggtaaatactgcacttttccccacacacaattaccttataaataaacaaccaaaatactggttctaccaagactacaatgcttctatgtaatctaaagaggcnnnnnnnnnnnnnnnnnnnnnnnnnnnnnnnnnnnnnnnngacatacaacacatatttatagatctacatgagcagcaaccacctcttcttctatctgcaacagtgctttcgtatggaggcttacatcacatggcggttggccgtccagatttgaatctgagatagcagtcgttgcagtacagttggtggtttctgatcctgacttcagctcctgaggaagagcctccgaggtcacactcacaggcaacacacttaaaacaatgcaaatgataacaaagacccagggactcgatgatcatggcggctcctttgcccagaatgttattgcagtaggagcatatgcgcttcccactgactgacctgttacgcagctgagagcctgactgtgaagctgaaggggaatggcttctcggggtgggggactgtgtcggtggccacacctgtggtggaggtcttcacggagccagctgaaggtgggggcacgctggaggaggggttccgcatgtaggcacggtttgatgtggacaccagctgagtggtgggcgactaaaatcttgccccagaggaagaagcatagaatcctgtgggctgattgagccaaggaggctgtctccaagaattggatcggggggagtccaggttatctaaagattcgcctcttctcatgatcccaggaagactaacaggctctttgttgacactggcactgcgctgtcggatccagctgttgtcattgtgaaggggtgttctcttcctcatttcctgaaggatttgttgcctctccattctgctcctgatggtacccccggaccgtaatggccgaattcccgggcatatgtccggtaccgtcgactgnnnnnnnnnnnnnnnnnnnnnnnnnnnnnnnnnnncggccgcttcctcgctcaccgactcgctgcgctcgtcgttcggcttctcgagctagcccctatt

SEQ ID NO: 122325 - DNA, 775 bp, Homo Sapiens
  misc_feature (757)..(757): n is a, c, g, or t
caacactagggaaactcaaaatgtttattcattaatttccattcacctccctttaatttacagtatgtacgctttaacaatgacagaaaagtgaattatcaaacttcattgataaatactgacataacaggttaaatgtatttcttaagcactatgtatgtgttcttccacattcctatcgtctacttcagatctgaaatgctggctccctcctggtactcctcctctaagcaggctcttcagcatagaatagcaactcaaaggccaaaccttcttgcccaaggtgaaagtggtcaggcttcgattcttctttagaaaatgctgtgcggggtctcattggatggccttgtgagatccgaccagatcacttttggacaaaaagaggagtcaaagagaacttgggtttccagaaaaaaataaagtgctgccccctataaatcagtctctgtggaataggtgtcttcctaaagaggtagaaataatagggggtatgtgttgcagatgcccatatttcaataatactgaacactgtatctttaagggttgcatctttaggggtttacaatggactgactccactcatctctctgattttttcataagtaagccagaacaccattgaccaaggggtcattctcagccaagatggtaaaaagcctttatatagactcatgaatccttcaccttgaacagcctgaatcaagcagtcagtcgatgatttatacaaaagtccccttcccttgtttatctcgtggtntgatctcgtgccgaattc

SEQ ID NO: 122326 - DNA, 724 bp, Homo Sapiens
  misc_feature (50)..(79): n is a, c, g, or t
  misc_feature (123)..(181): n is a, c, g, or t
acggtccaggttggatgcaattattttgatccagtctttacttaattttnnnnnnnnnnnnnnnnnnnnnnnnnnnnnnttttccctaagtggttcaatgcagaacacttgggaagttaagcnnnnnnnnnnnnnnnnnnnnnnnnnnnnnnnnnnnnnnnnnnnnnnnnnnnnnnnnnnntttacaacgcaattacatattgacaaattcaatgaaaaagtagaccatctaaatattttaagagattaaacttcacattctctgcaactagaaaaacaataagctactgcatatcagtacatgacattcaaatatattttaaaatgtacttccccctcttaaaatggcagtgagtatacattagtgcaaccacaaagcacttgtaaacttttttctgtccaacatcatccatgtccattagaacaaattctgtttggctggctccaaggcctttcttgggcctgagcttttcatgtttttctgtgttaacagttacagcctttatccataaccgcagccatccatccagaaatgcccaccgtctgaggttgggagagccggtggtatgtagctgaatttgaagaactcttacctttctaaaataagaacatggatttgattcaaagattcgagacataactgtataccataaacagatttttacttatcactttttaggcaagaatttttgctaaactgagtaagagtcaggccgctggcagt

SEQ ID NO: 122327 - DNA, 2408 bp, Homo Sapiens
tttcgctacaaatcaaaaggctttattccttatataaacccacacttagaaaaaataaatagttaataaattataggcaaaccagttggtctcagccacgcctcccactgaggtccagggcagccgctgcagcagcagacgagcgggaaggtgtggccacagcttggctcaagggcgtggtctggactggggacgaagggacagaggaggaaggcaaggtctgggtgagggcagggatgggggctaaaggtgggttcctgaggcgtgcccaggctctggcccgggcagcaggggtgaggcaggggctcagctcctcctgggcctgggtgatgcggcgtgcgaagcggctgcgatcccgagcaagctgctcccaggggccctggcgggcggcctgggccggccctgcccagacagccaggaaatggacagtgaccttctcggagaagcgcacctttctggcctttaggggagtctcagggtccggatcatgagtaggggtttctgggcgcttgagccgcctttgcagtcggaggggcagcctaggaggagcccagggaggcggtggcttctctccaggtacatagatggccactcggaaggggcagggctcagcttctccccagtcctcagcagcttcctcttcctctgtctcttttccaggtcgatatccccagcccctgaagtgggccctctggtccgggtgggagggatgtgggtctgactcagcttctcctaaggctgcttctgaatcatcttccttatcctcactatccacatcctcatcttcctcctcctccgtgtcctctcctggccgatacacccaggccttcaagaaagcacttgcagggggtgtggaagcagaagtctcagcttctctttcatcctcggctgatcctgtatcactgtcctcatcttcctcctcctctgtgtcctctcctggctgatagacccaggacttcaagaagacacctgtagcaggagtggaagaggaagcctcagcttctccctcttcctcatctgatccagagtcactgtcctcatcttcttcctcatcttcctcttcctctgtgtcctctcctggccaatacacccaggccttcaggaaggcacttggtggggggatgcagggaggacactcagcttctccatccttctcagctgcccccaaaggcttgacctcaccctcctcttcatcactgggttggcaccaccaggacttgagctggggcctctgggctggggctgaggattgcggccctggggcagcttctcctttcccagtttctttgtgtgccttttcctccttctcctcggacgcctctcctgaacgatactcccaggacctggggtcggagcctgaagatcggggggacacggaggtcttcctggctcctttacttctttctgttcttttatcctccgtggcttgattctcttcctcccctgggcaagacacccaagtgctgggcttggatcctggagacaaggcagaagtagaggttctgtgagcttctttctttacagcttcttcatcgtcctcctcctccacggctggacaacactcccggtgtgatggtggataagagaacttgttaactccctcctcttcagcaactccctcttcctcggctttctcctcccctgggttcttatcagaaccttgcagtgtccttatcagaaggctgggagacaggggagcacgctggccatctgcaaattgacttccctgccctctagggacactggttgcctctcgctcaccatacatgccatcatcatcatccaaaagtccccaggcttcaggaagggaactgctggttttcagccccagtgtttctctgtcctctccagggcctccactgtcttcagcctcctcttcagggcgtctgccccaaggggtatgggggattgccagaggagtcctagcttctccctccaggccagcttctaccagagctgctccttttactgcttccaccagccagggctctagaggtcccaggcccctcaggcggctccaggcgcggctgaggaggcccatcactggggacaggaggaagaaagggtgggcatccctccacggggtagcctgatggggtgcttggcctggggccatgtgtctgggcggctgggagctgcgcgtcaccccgggggcaggagcgccggttcggtctgccagaagcgatcacaggtccggacggttagggaggccagcgcgttcatctcaccctcaggcgtcgggctccgagtaactcagagtatctccggctgcctcaagtgccgtggcgacaagcgggcgcggggtcgtgcagcgtcttgcataagatcaacaactgggatgggaaccgataagagcccccggcccgtaatggccgaattcccgggcatatgtccggtaccgtcgactg

SEQ ID NO: 122328 - DNA, 984 bp, Homo Sapiens
  misc_feature (849)..(849): n is a, c, g, or t
  misc_feature (883)..(883): n is a, c, g, or t
  misc_feature (899)..(899): n is a, c, g, or t
tttcatcttccattatttgattaatggatattcgtgtctatatatgcgcagatctgttttatgtacaacaattggttctatcaaatattcagaccaaggcattctactggtaatttccccccaaatcaattcaggtaaaattagatacttatgcacttcacgggctatcaaaacttgcaacttcattatcaatttcagttctgaggtcatacacacaattcaaaatatacattaactaggttaaggcgataaaagtgggctgaaagaaaccacaggattcagaacaatgaaactgtgtattttgcttgcatgagagtcataacgtgaacagcaagtattgtgcgtatctcatagctcttcagtggagaggaagcggcttctgaacatctaaggtgactgcacagcaggtgggaaacagctggtgtggcctgctggaggcttcgccgagggagggctcatttcttctctgcctctccttttttgggttcttgtttcaatttgtaatcagccagggcggccttgattgcatcttcagccagcatggagcagtgcagtttcacgggaggaaggcagagctccttggcgatatctgtgtttttgatagtcaaggcttcctccaccgtctttcctttcacccattcagtggctaatgagctggaggcaattgcggaaccacagccaaatgttttaaacctagcatccacaatcttccccttttcatccacttgaatctgtaatttcattacgtcaccacatgctggagcccccaccagtccagttccaacatttttagatgtcttgtcaagggaccccacgtttctaggattttcataatgatcaacaacctanatgagagggtaagataatcatgtcactctctatnggactggctctggttngatggtagctctcgggtagaactttgactggcagcatcctaatacaaatcactgagtaaaagtcaactcagtcatgagacattgt

SEQ ID NO: 122329 - DNA, 1067 bp, Homo Sapiens
  misc_feature (73)..(73): n is a, c, g, or t
  misc_feature (75)..(75): n is a, c, g, or t
  misc_feature (194)..(194): n is a, c, g, or t
ctcatcgtcttttatactatttatttgcccaatttgtgtttccacaattgttttaccaatttccgccaaggcntntaatgtatttcccccaaatcattcaggtaagtggatagtgtcactcaacggctccaaacgtgcaattcatatcaattcagtctgagtctacacacaattcaaaatgtccttaactaggntacggcgataaaggtggctgaaagaacccacaggatcagaaccagtgaaactgtgtattttgcttgcatgagagtcataacgtgaacagcaagtattgtgcgtatctcatagctcttcagtggagagggagcggcttctgaacatctaaggtgactgcacagcaggtgggaaacagctggtgtggcctgctggaggcttcgccgagggagggctcatttcttctctgcctctccttttttgggttcttgtttcaatttgtaatcagccagggcggccttgattgcatcttcagccagcactggaagtaacggaaggaaagaagcctaagtttctagatgtgaaagaaatggacttgggaatagaatctttaagagcctgggaggaagtggtgctggtggggactaatggagtaaccaagccagaaagctggggtgaggagttgctgggcacgtcagcagctgcttcctgagctgagttactcctgcgggtgatcctggagacagactacggttaaaaatctgtgatcccaggctagttccttagcctctttgaccctactttctcttctatagaactgggataatcatgcttttcttgccaggatagtttggggacttacagaagatgtcttgccacatagtagggaccacaggaaatgttacttcttgcctgctccccatcaaagtctagctttggacaaaatcttgtcatgataaaaaagttgacatgccctttggaaaaaagatcatgtcaatctgttgatgggatggcatttgccacatcaccctctagtgatcgagagtttgaccacttttatttaggagtcaatattcaaagtgaggctatggggaaaataaaaactgagagagctg

SEQ ID NO: 122330 - DNA, 424 bp, Homo Sapiens
tttcagaacaatgaaactgtgtattttgcttgcatgagagtcataacgtgaacagcaagtattgtgcgtatctcatagctcttcagtggagaggaagcggcttctgaacatctaaggtgactgcacagcaggtgggaaacagctggtgtggcctgctggaggcttcgccgagggagggctcatttcttctctgcctctccttttttgggttcttgtttcaatttgtaatcagccagggcggccttgattgcatcttcagccagcacttggcaagaggcctgactctctgctgatttttaactaatttggttagtaaacctccatcgatgcattaaggctaatgtttctcattccttctttccctgagaaggttaagaaatgatggaaaaagcattagatttaatacagagaccaaactggaaag

SEQ ID NO: 122331 - DNA, 1047 bp, Homo Sapiens
atataatggcccaggttcggtttttatttccaaaccatgggtttttatcaaaattttccaggcccaaggcatttttaaggggttaatttccccccccaaatccatttcagggtaaaaattagatactttatgcacttccccggggctatcaaaaactggcaacttcattatcaaatttcagttcctgaggtcatccccacaattccaaaatattctttaactaggttaagggcgataaaagtgggctgaaagaaaccacaggattcagaacaatgaaactgtgtattttgcttgcatgagagtcataacgtgaacagcaagtattgtgcgtatctcatagctcttcagtggagaggaagcggcttctgaacatctaaggtgactgcacagcaggtgggaaacagctggtgtggcctgctggaggcttcgccgagggagggctcatttcttctctgcctctccttttttgggttcttgtttcaatttgtaatcagccagggcggccttgattgcatcttcagccagcatggagcagtgcagtttcacgggaggaaggcagagctccttggcgatatctgtgtttttgatagtcaaggcttcctccaccgtctttcctttcacccattcagtggctaatgagctggaggcaattgcggaaccacagccaaatgttttaaacctagcatccacaatcttccccttttcatccacttgaatctgtaatttcattacgtcaccacatgctggagcccccaccagtccagttccaacatttttagatgtcttgtcaagggaccccacgtttctaggattttcataatgatcaacaaccttcttgtgatagagtcgggccggggccgacagctcccgggcgggcaggcgggggctccgcagcagcagagccgatgccgcccgcctcagacggccagccccagccgccgccatcttgccggcttgcgcctgcgccagtccagagcgacgccgaggggcggggcgcgtctgcgagtcggctccgagctgggagcgcgatcccgggaattccggacc

SEQ ID NO: 122332 - DNA, 775 bp, Homo Sapiens
tttccacttgtaaaatcattttattggtataaatatacatatgaataaaatacttccagcctgtaatgtaagtgaatatttgtgaaatgtcttataaagagtagtattttgatttttacaggtgtcaaagtattctctcttaaaatcacacattaaaagctaatatgcagacagaaattaaaggccttcaaaaacatgaatattcataaaacctcattccaatcaactatatacattaatctgggcacatggtaaaatcagccatgggcctctctcactctgttcttagctgtgctcgttgatggtatgcaaaggtcaccgaccaagctttaaatgtacaattccacatcaggaaggaagaagttccccatgggagaaggtaaaaaccatacccaagatctaatatatataatctatacaaattattagtgtgctctgttaatataattacaatgtgcaattgcatacatcaagaataaattgctatattgagtcctgtgcggatttgacacaggtacacttagcagtactccgaggtctgctgtggtgttacttgtgtgagtgtgtgtccagttatttcatttatctccaaaaactcatcttgcagggcaatctgtagctgcctcagataaattcaagtagggcccatgggataattgctggctttcattaaaggcatatgaaggaatgtttagaaatcaaatgcaaagggttggaggaagaccaaacaaatgtgctttgattaccaagaaatggatctgtttctatacaaaaa

SEQ ID NO: 122333 - DNA, 919 bp, Homo Sapiens
  misc_feature (132)..(295): n is a, c, g, or t
aatttcccagcactcacaagaatgcaatcgcggtcacaggacgttttcgaccattacatgtagaaataatcggcagatggctcacgcctgtgatcccagcactttggaaggcagagcggcggatcacctgannnnnnnnnnnnnnnnnnnnnnnnnnnnnnnnnnnnnnnnnnnnnnnnnnnnnnnnnnnnnnnnnnnnnnnnnnnnnnnnnnnnnnnnnnnnnnnnnnnnnnnnnnnnnnnnnnnnnnnnnnnnnnnnnnnnnnnnnnnnnnnnnnnnnnnnnnnnnnnnnnnncgtgcccctgtactctagcctaggtgacggagtgagcctccgtctccaaaaaagaaaaggaaaagcacacgaagtatagggacatggggaataagttaaaaatcaaaaggactcactcattgctttctaacatcttttacttcttgaccttttgaaacatccaaaaattagtagtagtataatctatgtcacaatcataatataacagttaagaaaaaacataaaatgaaggcctaaaaagatctttgttactcatctagaattatttggtataacagtattttcccatggaggaagacttggatttcaggcattaaacaacgcagaaaaaaatctcaaggcatcacagggagagggagataacttttgactctggtttcccgtgtttcaggccaggaagagcaaggggagaaaaatatttgtccatgggaacaagtaatcatgctctaaaggacaatttcattcgaatccattcatttccttttcatgcaaaatttcaaagataaagcaacataaaatatggggccacataaaagggagaaggtcttcaaggagaatttgtgcctttaagtttttactggtacaacagtctttcagcctggaggtactcaaagacgaatcatg

SEQ ID NO: 122334 - DNA, 555 bp, Homo Sapiens
gaagccactgagacattcttgttttattcccagacccctaaatcagaaaacccgatcgaatactgagcataatttcttcattgacatttgtctctaaatgtcaagttgttctggaaattttttcttgattttatgattccttgccttattcatttgagacaaactgagttagcatgatgttgtcggaggaatctccagtatgagaaaatgcataatggcctttgttttgcagtgggttgaaaggctttgagaatttgggtttggcagataaatctgatgagttttgcttttctgtttgcttccaagaacttaaggcagacaacttgttgaacagaagttgtcgcagcttactgtccaagagtattccaaagcataagataaaaaatccctggaatgcattgagtaaagcaaaaataacatgccaagccagattctggctgtccactattgttcctattccaaagccccaggtgagccctagcagaggggtcagaatgaggaggctcttccccacgcggatgatggtggtcttgtcatcccctcgtgccgaattct

SEQ ID NO: 122335 - DNA, 730 bp, Homo Sapiens
aaatcttcttttcatttaattgaagacaaaagggagcagtaatgaagccactgagacattcttgttttattcccagacccctaaatcagaaaacccgatcgaatactgagcataatttcttcattgacatttgtctctaaatgtcaagttgttctggaaattttttcttgattttatgattccttgccttattcatttgagacaaactgagttagcatgatgttgtcggaggaatctccagtatgagaaaatgcataatggcctttgttttgcagtgggttgaaaggctttgagaatttgggtttggcagataaatctgatgagttttgctgcacaaaataaaaataagtcatttggacattaatagcattcttttactgttggtctgcatttcctgacttcctgatgttattcatgattctttatttcattttcataggtgctattctctttttaagaatttagaatggttactttctcactctttcttctgctttaatctatttaaaatgcctaaaaatttattttcaagtgaatgctgtgttcctgtgtatttttataacttctaacaacaaactagaaaacagttttaaaggcggcattatcccttttcatgtctatgcttacatttctttggatcacatttgttactggaagagaacccatggaggaaaatggaggaaaaacagtgctctgactaaaaatgattctcaaccctcgtgccgaattc

SEQ ID NO: 122336 - DNA, 660 bp, Homo Sapiens
taaaaacacagaaaaggaaccatattcaaaccatgttttcaaggtagatgcctgtgaagggacacctgaaaaaattcagatgaccaacgtccacacaggtagaaggaacatgttggctggaaagcaagaggccatgattgacatcatccagacaaatccctgccctgagggcccaaagctggccaggcactcccaaggccactgtgggcatctggaggttttggagtcaactaaagaaactccagacctaggggtctctaagacaagttccatctcggaggagatatatgatgatgtcgagtactccaggaaagaggtaccgaagctgaactactctagctcacttgcctcaagtagtgaagaaaatagagaactgtatgaagatgtctacaaaacaaagaacaactacccaaagatagatttagatggaaaagaagcactcaaaagactgcagcaattcttcaagaaagaaaaggatagatttaaaataaagaaaaccaagtcgaaagaaaacttaagtgcattttccattttgctgcctgatttagaacttaagtctcaggaagttattatttatgatgatgtagacctgagtgaaaaagagtcaaaagatgaagataaactgaaaatgtggaagccccaagtttctgacaccaaagg

SEQ ID NO: 122337 - DNA, 380 bp, Homo Sapiens
  misc_feature (72)..(72): n is a, c, g, or t
  misc_feature (78)..(94): n is a, c, g, or t
  misc_feature (205)..(205): n is a, c, g, or t
atggggttatttcattgataagcacataaccctgaaggatagtatcatgaacaaaacatttgaaataaattntaattnnnnnnnnnnnnnnnnntcttaaataattcatgatataggcaagtcaccacataattggttgctttgattaacaaaatcttacaaattcagttaaaaaaatcagcagcataagataaagcaaatatgncaaaaaatttaaaccatgataaaataattaggtttacattatacagttaattacagcaaaaaaaatacaatacagttttgttgctgttttgaaacacaacttaggtttttaattacatcacttgaaattaaaaaaaataaactactttactacaaaatgaattctacattttttg

SEQ ID NO: 122338 - DNA, 2116 bp, Homo Sapiens
  misc_feature (97)..(157): n is a, c, g, or t
  misc_feature (242)..(242): n is a, c, g, or t
aagtgatgtaatttaaaacctaagttgtgtttcaaaacagcaacaaaactgtattgtattttttttgctgtaattaactgtataatgtaaacctaannnnnnnnnnnnnnnnnnnnnnnnnnnnnnnnnnnnnnnnnnnnnnnnnnnnnnnnnnnnnaactgaatttgtaagattttgtttatcaaagcaactattatgtggtgacttgcctatatcatgaattatttaagatttttatagntttttttaattagaatttatttcagatgttttgttcatgatactatccttcagggttatgtgcttatcaatgaaataaccccagaggagtgagggaaaataacgtgtagccagttatattcaggaataacttactgtaaatgatgaacgtgttaggagacctccaatatttgctacttgccaatcctaatttagttacaagaattggtaggcaatcctacttaattttggcaaaagccccgtcatctaaatggcagaataactcagagcatgtctttgaagatgctgggcgtctaccaccaccttatgtccccaccctacccaacaaaaataagtaaaaagaatatggtgtattctacaaatttgtggcatgctcaaagtttatgatcacataaaggcaagaggatacttcatgaataatacatttcaatgcaaataaacagatggttcacttctactagctatgagcctgtttttgtatacactgagttaatctactcaggctgtaggtcccagcaatgttctagagtctggtctttccctttcctgcagcttcgggtccttggacctttcctgtttcctattcacttgggagtgtctgtcagcttgagcaccagttgttctggtgtttcatttgattctacttgtagcataatcatttatacgagctattgggaggttccaaaccctacctagatttgtgtaggtgatgtatcaaattgagcaatataccgtctcatctgaaaatagtagcacacagccatatataggatatcacttttgctaaggactgtttcttcacattgagcagagcaggcataaatggtggttatttagtctaagtcttttatttttttatacctgattttcaacataacacgcaatgtggatgtcgagtagtgttaagaatggtgctgctcctgacaagtgtatgttaactgtttacattttctatctgcagaattatttctctattactgaacttttcctaagtaaaatgtcttcgaagtctcgttatttctgaaatacgctgcctgtaatagacccaggcacccttttaaattatctctggaacaagagggatcccatgtaatgaactaggaaatgcatactcacatacgcaacaacgttctacgcacaaagccccttcgaatttgtgaccaacacgagccaagacttgtgcgtgctcacatgcattcgccccgaaaatttccttggcatttcactcatactacccaccgcacaattacttcctgaatggagacacttttacgtcactggctaatggcgccatatcctaagcacctcccctctctcacccttttttcagcccatctttttgatatcacccagtcgcgccgtctcctaggcgccttaagatttcctcgaattttccgccctctctcccggcccttcttttaatcaacgcccgtttttcctaccccccaacaaagggggccgctaaatcttccgtgtaaggcgcatgtagcaatccctaccaaaacccacctctcgaaacctacaacacccaacacatctcttggcgctcctctatctcttgcgcaccacacttctgtcacactcgttcggtgttctctcaattcatatttccccaaagcgccctcgtaatctccccacctcccctcagacctcttggccacccctgttcctatctttccccgctttctgctatggcccatcagatgaagccggcgcctacatgtctcctacgtattgggattgcccaagctatgaaacagatcgcatacaccctgcccacattgccggcgtgtaacgcgagacgagagaccccgagttcgcgtacgtgccagccaactccccccattctccgcacttctacgcttccccctgccc

SEQ ID NO: 122339 - DNA, 864 bp, Homo Sapiens
tccttttttttaaaccttatgggttaaatgtaacttgaagattttggataaaattggacaagaaaagaaacaccattcttttgaagtagattgaagcagtgatttttaaaacaaagagagcagaactagaacatcttaaatttttaatcctttctttacaggttacctagaccacttttgattaagaaaactgtagaaagttagtaactgccacaagcgaacgccaggcggtggcacgtgtcaatttccacagagtcctgctttgcggggtgtctgaatgcactgcacggggtctctgctcacacttgctggaaccaatcgtggcagattttagtccacaggtcgcttttccccatatttctttgtaaactcttcagcattcttacagaattttttacggtccttagagtattcttcagctaggtcagcccgaagcgggtgctcaggctgggggtcattcaccagtgctatgagggactggattacttggtcggttttggttgctggcttccagttttcggcactaattactggcagacagacctgccccttttcgtcgatgtttgggtgatagatctttgttttaaatgtgatcttcggtggtttgaatgggtactctgctggaaagttgatttcgattctgaaggctcccttatcatatggagggttgtcaggaacaataagcccttgccaagtcaataaattagcttcatcaacctggatgttacggaagtttttcatcccacatttgcggatttcttcaagctccttcatcagcctcctgctggccgccatcttggatttggtgctgctccttcccccccatctgacctgtgtctgacacagctcaagatggattttgaa

SEQ ID NO: 122340 - DNA, 1900 bp, Homo Sapiens
  misc_feature (52)..(68): n is a, c, g, or t
  misc_feature (70)..(71): n is a, c, g, or t
  misc_feature (75)..(255): n is a, c, g, or t
cttggggggcggcgcgcgcgccccaaggaagagtttgttagaaatttttttnnnnnnnnnnnnnnnnncnnccannnnnnnnnnnnnnnnnnnnnnnnnnnnnnnnnnnnnnnnnnnnnnnnnnnnnnnnnnnnnnnnnnnnnnnnnnnnnnnnnnnnnnnnnnnnnnnnnnnnnnnnnnnnnnnnnnnnnnnnnnnnnnnnnnnnnnnnnnnnnnnnnnnnnnnnnnnnnnnnnnnnnnnnnnnnnnnnnnnnntttttaaaacaaaaaggtagatttaatgcagtaacaataatctgaggataaataaatccacgacagactttaaagtttgcaaatctgtttcctttctttgcagagaaaatggttttctgaaagcacacaggactgaagatgtcaaaacaaaacttaatttcttagtctccaggtgacacaggcttggtcctctctgctgccctccgaacacttgtcactggccaagatggtagtttctcttgtttagctcaggatggatgttagtttcaagaataactggatggtttgtttcctgaatcatcttcttgtgagcccatactcttttgtacaaactgagggttcactgtgatctcctggtccatggctttcagccgctcatccagctcaatgcacttcagcatctcctgatcaatgttatgaagcatggctgggttattatatttttcagggttatcatggaaactgaccataccgtccttctggttaatacttgcaaaaatctcaccatcttctatcatgtgcagaacgtatttctctgcctcctgaggtccagacaactgcacacgacttgccatatcttgtaatgatagagttaaaaaggtctttgttagcctctgaatattcttcttataaagagatgacaagcattgcttcaccagccccatgttgttatcgcgagtgaaggtttcactgtgcttattcaccaggtttcggagttctgaggggttgttggttgaatacacttgtgctaactcgtggtatgcattgctaagaggcttaatgaatctacccacaatttgagatgtatattttggtagctgttgtactttgccaagtaatatcaaagacactaaaatatacttgtttatatgattccaacatgatatgactgaccgccatggcaggagtagttatagcctgttcataaaagtagagagctctttcaaagttcttcagcccagtatagatcatccctccataataatagtaacataaaaagtgttttgcatcataggctccattctctttacagatatccatcatatccacgtcaagatatggaagggcaggcttaaagcattttgctagcaaacaaagctggcagagatcagcatgtattgaggtcagctggtttgtattcatctgcatcttgtctatggcttgcttaaggatgccaattcctcgcaggggctgttttctttccacaagtgcatttgttagctgatggcaaagcccagcaaaagtgtctgttgcatatcgaatgtgctccccattacaagtgctgatgaagagctgaacctgtgagaatagcgtttcgaagtcaggaacactgggcatagaaaacttcacaaacaaaacagcaaggacgcccaaggagtgttcttgtacatccagagccccgagcacagtgtccagatgggataagttcttcgcaaggagttccccactcttgttgatcagttcacaaagctgtgtcatttgcccttgagctgagagctgtcggacactgttcacgaactgctccagggcagacgccatgttttcccccgggcggcccgagcggcgaaggcagcacgcgcgggaaaaggctgccgctctgggaggaggggccgcggcgatccacctgaggtcctcgcgagcggcg

SEQ ID NO: 122341 - DNA, 1097 bp, Homo Sapiens
accccttcgggaaatattttttctttaaaaaggggggttggccaaggcctgtgttttccaaccaagccccaatgtttttttatccgcgaaggaaaaggttttcccccctgggcgttattccaaccaggtttttcggaggtttctagagggggtttgtttggtttgaaaatcccccttgggggttaactttcgggggtatgccattggctaagaaggctttaaagaaattttcccccacaatttggaggatgttatattttgggtagcttgttgtactttgcccaaggtaatatcaaaggcccttaaaaatatactttttatatgattccaacatgatatgactgaccggccatggcaggagtagttatagccctgttcataaaagtagagagctctttcaaagttcttcagccccagtatagatcatccctcccataataatagtaacataaaaagtgttttgcatcataggctccattctctttacagatatccatcatatccacgtcaagatatggaagggcaggcttaaagcattttgctagcaaacaaagctggcagagatcagcatgtattgaggtcagctggtttgtattcatctgcatcttgtctatggcttgcttaaggatgccaattcctcgcaggggctgttttctttccacaagtgcatttgttagctgatggcaaagcccagcaaaagtgtctgttgcatatcgaatgtgctccccattacaagtgctgatgaagagctgaacctgtgagaatagcgtttcgaagtcaggaacactgggcatagaaaacttcacaaacaaaacagcaaggacgcccaaggagtgttcttgtacatccagagccccgagcacagtgtccagatgggataagttcttcgcaaggagttccccactcttgttgatcagttcacaaagctgtgtcatttgcccttgagctgagagctgtcggacactgttcacgaactgctccagggcagacgccatgttttcccccgggcggcccgagcggcgaaggcagcacgcgcgggaaaaggctgccgctctgggagcctcgtgccgaattcgccacccaggcctcgctacctt

SEQ ID NO: 122342 - DNA, 1317 bp, Homo Sapiens
  misc_feature (50)..(50): n is a, c, g, or t
  misc_feature (184)..(365): n is a, c, g, or t
  misc_feature (385)..(406): n is a, c, g, or t
ttgctttgtcctgttttctgcgttccctgtctgtgatacctatacgcctntgatgagtgtacgctcccccagcgaagacgagccagcgatcatgagcgagaagcgagagcgccatacggcaacccctttcccgcgcgttgccgattcataatgcagctgcacgacagtttcccgactgaaagcnnnnnnnnnnnnnnnnnnnnnnnnnnnnnnnnnnnnnnnnnnnnnnnnnnnnnnnnnnnnnnnnnnnnnnnnnnnnnnnnnnnnnnnnnnnnnnnnnnnnnnnnnnnnnnnnnnnnnnnnnnnnnnnnnnnnnnnnnnnnnnnnnnnnnnnnnnnnnnnnnnnnnnnnnnnnnnnnnnnnnnaagaattcggcacgaggttnnnnnnnnnnnnnnnnnnnnnnttcttttcataaaaaactttatttctcaaaaaagggggaagaatccaaagtattaaaataatcctctaatttttgttttggaggaaaagggtaggacgacaaaataattcatacaaaaatttcaaacatcactgctgtagatattcctccagctcagtggggaacatcctgaaacttgcatctcctgctgcagcttgggttccagctgcatcacggggaacacagcatctcctggatgcaggaagctgcaagcatctggaatgcttattaatttaccccacaaataaatacaaaaggtcaatcttcccagtggaaatgattccatcgatttttgtgactttctgatgagaatgctaaaaagaagagttgccccttttctaaaattccaaatctttcctttttgaagatgactgcatgtgaaagaaataaaatgtgaaaagatttgttaaggatgactggctctagtaccaactaaatgccaagggggactgtaagtcactgaggtgacacaaagcagccatgggttttcctcgccttttttatggggaaaatgcacctttcaatcctagaagataattggacttggcaaagtccctatcggtagcaactattttcttactttacaaaaaaagggtgagctgggagccagactgtgcacatcagccaagactgctattgccaaacggagcccagaagcatccaggtacactttccaacaggcagaccgtaccaggaactgggagacaagagcgggctctctcctgagataagacaagtttaacgtgaagaccttttggaaaattcccgggttttcctggctcttttcagctggtgtttctctgaggaatagggaggttctcatgaagatattttaaacttccatgctctgagaaatctgagaccacgtggtc

SEQ ID NO: 122343 - DNA, 1618 bp, Homo Sapiens
  misc_feature (136)..(136): n is a, c, g, or t
  misc_feature (361)..(361): n is a, c, g, or t
  misc_feature (559)..(568): n is a, c, g, or t
  misc_feature (674)..(674): n is a, c, g, or t
  misc_feature (703)..(711): n is a, c, g, or t
  misc_feature (874)..(889): n is a, c, g, or t
agatgggcgggagagagcgcacatgcttgtggtgggtcgaaaacacccgacgccctcgattgcgtcgcgcgcgcggggtggggcgaacacagaaatatatattatttgttatgtccgcgggcacacgagaaatttncgcgaggcccacgacaggtcgtgtgtctcatactcaaaacacgcctgtatgtaccggccgacatatatatcaacgaggaggatattcgcgacctcccgcccgcgctgcctaacattggctatggtggagcggagcgggggcgatacacacgcgcccctgcggttttgttcggcgaaagcaaaagtaggcgcgctgttatatatatggggggggagagcgcgtaanaagcacacggcgcgcgggtgtgtcttatttctgccgtgagagtgtgtgggggcgttaaccgcacaatagtcgggtgcgcgggcaaacggcggcgcgagaaacgcggttgttgagagcgaggctaggagcgcgggcgtctcgtcgcgtatcaggagagagcctcacttctccctcggctgtggtagagaagagagcgannnnnnnnnnaacagcgtatatacagcgcgccgcctcggggaggagagacccgcccccatatggtgaggagagtgtttgtggtacaaagagaaacagctcactatggtttttcccnccccgcgcgcgggtacgttttttttgttnnnnnnnnnaagagaaaccccccaccgccccctttgttgtaattggcggcgcgggctgttcttttcgaaaggaacacggataacggcgggccgaattggccgcgttcccccgtgaagggggggcacgggcggcccacaacaggagagggttttggaaaaacctctttgtgannnnnnnnnnnnnnnnccaacccaggaacgattgccggagatatggggaatgaggtcccgtatgggggggttagattaggggggccaaattggccacgatgtcgttggcctggggatatcttaccatttattataattgcgcacattagtgtggattaagtatgattagaaacactaagcaattgaaaagaagcaaaaaggtaatgcatccctcttcctcagatctgcaaaattctgtgcctttttagacatgagagaggctgttttggatctaagtcaataatggctcttgcaagatttctttcaatgtcttgcatgttggttctaaaactcccttaaaggcagactataccttgaacgggggaagccagcctatcttgggcctctttaccttgcctttcatccactggtcctgcactgagactcagggatagcacctctcaccaacggggtgacttttatttccttcactcattcattgagtgcctgtgtgttagtgtccaccacgtgccaagtctgatgttggggactacagctgaggaagagcagttggtatttagtgtgggtacatgccctccagaggaaatccactacaaataaatggaatgttcctctctgatcatttggcaggaagaacaagcccacaagccaatgtgcatagggctcaaaaactggagaaagacgtagacattttataattaaatcaagagcagaggccctcattttgtatcagaaatactctaag

SEQ ID NO: 122344 - DNA, 2862 bp, Homo Sapiens
  misc_feature (73)..(282): n is a, c, g, or t
  misc_feature (295)..(295): n is a, c, g, or t
cagccagcgatcatgagcgagagcggagagcgccatacgcaaccgctttccccgcggtgccgattcataatgnnnnnnnnnnnnnnnnnnnnnnnnnnnnnnnnnnnnnnnnnnnnnnnnnnnnnnnnnnnnnnnnnnnnnnnnnnnnnnnnnnnnnnnnnnnnnnnnnnnnnnnnnnnnnnnnnnnnnnnnnnnnnnnnnnnnnnnnnnnnnnnnnnnnnnnnnnnnnnnnnnnnnnnnnnnnnnnnnnnnnnnnnnnnnnnnnnnnnnnnnnnnnnnnnncccaagattcggncacgaggaactttattattattgaacgaatatccaaggatcttaaagaaatcaatcgaagtgtgatacagtctagtgtttattttatgttatggaaggtacacttgaatttcaaaaatttaaaacatatataaaaagtggttagggactaacatttgtatcaacagttgataaatgtctaagattgtttattatacagcagggtacaatggtagtgctaatgccaacagggcaccatggaagttagtctaaaaattatcgctaggctttatacaagcaacaacatatgctgctgctcttagaattttgggaaatgatctgcttctaatactaagcagttctttaacatttttaaatgttatacagtgttacagtatttagtttggcaaatgtttcaaaataaagtagaaatgtattcataacatcacagaaatgcacatccaatgttgttttcaataagaaccataggtacagatcagaactcttccctatatgaaataatttacacacagatgaatgctataatatcactatctaaaataatcactaaatacagttctttttcagaaataaacaagcaaagatttttttcattatcaaatatcaaaaacatgttgataatgtatgtttttcaaataaatgatactttaaaattataggaataatctcagtgaattcagtgaatgtgcaacctaaatcaaccaagtatactgtagtacaaccatattaagaaaccaatgatcagaaaatacaaccgtatgaaagaaatttataatccacaaaactttttcaggtcttaaggtaaaatagttccacagtctacaggtaaaaccaaggcaacaaaaatgcgtgcttatcttgattaagtaggtaattttatgcagaagatgtaacactttgtttgtagacagcatggtatgcatttctcagcaagacataaggaaaacaagattccaaaagatccattgtaaggaatggagattcttgtacaatcatatctagcagtaaataaacagattctctatttcttgttgtagttttatctgtctcctggccaattttcagtagactggaggatgcaagcgccagaaattctttaagacggtcttcaatgcttcctttgtgaattgtaaacaaagctgcagcaatctggttgatggctttggccaagcaatgtatgttgttgcaatgcccttctatagcagggctgtactgagacatcacattactggccagtgttggcaaagaaactgccacaaacaccatgagaaggcaggcaattttatactcttcttctggactaatgttttccgatttttgtgaagaaagagctacgaccaatgcaggatcaatctcacaaggtaatccggcagctgatgataactcatacacattcattgcaaccttcatatcagtttcccttggaatgtgatccttaaaatcttcaattgaacttacaagaaaaggaatgtggtaggataacacatctctaagtgcttcttgtgccaatgatcggaaggataaaattacaccaattattgtcatcctcttcaagacactgtcaacagatgataatcttttaaacagtgcagccatctggtctggtttgtcaaagctggtcctcatttgtgttaacacatcaacattctccaccacaagtttcttaagttcagcaacttgtgatgaaatatgccacatgaggctttcacttagaaacttcataccatatgggcctagtagttctgataatgacctcatttctgatatgtcagaatattcctctgcattgaatgttaattcattttctgtaggtaagttcacaaacgctttcattgcaggaaaatatgctatatggccattgctgacttgtcgtaacaaagtttccaaataccaatttgtgtatagacttgtaatggttggctctccatgactgtctaaatgttgtgtttgttgaagaagcacattattaaatactcttgtaatatcaatctgcacatagttttctattgactggagtacggtcatgtatgctcttacacttgttagaagttctgaaggttttgcaatttcctgtgtggcttgattatacatagtcatccccacaattgacttggtaaagcgtatttccagatgagaagtcaaatattctcgtggggtaaaggtatgttcccataccaccatgtttggtacataatttatagagaagcataactcagaaagtgcagtgtgcaatttatcaaggttggtcacaaccagcctgtttttcctcatgctctcaacacctggtttctccctttcaggttcccctttcttaccagtctgcttttttgatttcttattcactgcttgactgatagttttggcacaatgcttgggtagccactggtcactaagggtacactgttctgtgccaatatcagtgatgagatttcgagcttgtttggccatttcatctaggaacatattacataaggaaagactgcgatctccaatatgatgtcgctcttctggacatagttcatgcgtgcaactcataaaatgagtgcaaagtagtggaaatgcaattcc

SEQ ID NO: 122345 - DNA, 420 bp, Homo Sapiens
tttttaaaatatttgaagaaatttattgagtcaaatatgagtgaccatgccccatgacacagccctcagaaggtcctgaggacatgtggcaaaggtgttcttcaaagtgttcattattaaggcatccatctcccataacttcaatgcactttgctaaacaatgcattatttctgaggacatctgaaactgtttctgtaccaatggtcttaatcagaacatcacataaattgccacatctgtgtgagatactcaggaccacggactctcacacactccagaagaaaaggcacggattctgctgctgcccctccaacaccattgtggaaataaaatttcagtaaagggaccaccagtttgacaacctgcttggtgtactccacaaagcagtcaaatcagctatgtgctggcaaaaaggtcac

SEQ ID NO: 122346 - DNA, 4224 bp, Homo Sapiens
ttgctgaaattgcaacctttaaaggaccccattgtgaatggaataggtatcataacttagctttaaagttggaagatgttaaaaaactcgatggcttaagtctgaattggcacaagggaaaatattaaggggaaaaacactcagctatttactgattagctattactttaaaaaaatattagatcattcttatattaaaaacatgaaatgaatccaagcccagacagtactgagtttttacacaagcctcttttgtattcaatgttgtttattgaggagtgaatgagagactactgccagacatgccaatgacacttcacattcaagggctggaagctggaaagcttcccgactgagtcactgtataagccttctgggaaaaagaaccaaagtgacatcaaatatgccatcttcatgcttgttgtctgtcatcagtttttttcaacttttgggtctactggtttgctgggtaggaggcttctttctaccctacagaaagactcacactcccaattcacaatgaacactgaatgcagagcaatttgtgtgaacacacatctacgctgagtaactgttcttaaagctgtttttccttaaatttccttatgtctaacgagaaaaattaatttgatttccctttccccttcaggtgggcgggttataccaatagaaaaatagtcttcagtgctagctaccgcagggcttccaggaactccttcagtggtctggtagaaatccatggaaactccattctgcaacacagcgctgctcttcctgcttgtggctctccagaagaatggcctacacacaacactaccgatctcttttgctcaaaaacaaaacaaagaaacctaaaggaaagggtaagcgtttatttggagttagttttctggtgggtgacattaaggcccttcacgcagagttcaggagctcctgaatggcggcctgctgctcaggactgagctgtgctatgcactcagtccacagtcctccagaagtctgtacttggcgaacgacattggccagacgtttggcacaaggatcttcatgtttaattgcctcgtgcatttctccttccgcaattatactaaatattttgggcagattggtattgtttgggccaagaacaattggatgattactttcaatcaggtcacacagataattgaaagtctgaacagcttcttctttatcttcatgtagtggaagccaagacaaccagtgtggaaggacctcttcaacgtttacacagtcaggcttgaacttcatgattttccctactgctgagatgcagttctctgtagcattgacattttctttggtcttagaatccgcagactgaataactcttaccagcaggggaagtgcttctgtacaaaaagggcgataattatctccaccgtactgtgccatgactcccaggccatatgcagctgcttgcctgacttctgggctgttgtcacatacatattggagcattggtcttaagaaatattctgcgtatttaaatgaggctggactacagtgttctatgacatcatcaaagatgcataatccccattgtctgtctggccatggtctatgtggacaaatgaggttgacaattaatggaagcagctgttcaaaccatggtaacaccttttctttgtagctactgaatattgagtgtaaaatatctgacactttggtcagaatataaacatcattatcatcctcatcttgtagtgactcttcgacctgttcatcatagtcttcatcttgtcttttaacttgtcgtaattcttgatttttaaaatgttcttcaagctttgctttcaatatacctcccagttcttcaaagtgttcattattaaggcatccatctcccattacttcaatgcactttgcaaaagaatgcattatttctgagaggacgtctgaatctggttctgtaccaatggccttaattagagcatcacacataaaatgccacatctgtgtgagatactcaggaccacggactcttgcacactccaggagaagaggcatggattccgctgctgccactcgaacaccatcgtggaaataaaatttcagtaaagggaccatcagtttgacaaccctgttcggtgtactcccacaaagccttcctttaactccttagcatagcaaacccaacatctggcaagcagttgatttttcttctagtcctgcagttttaataccaaagctttgctgatctccaaggttcacaaattcccaaccatcatcatcactcatattctccatgtcttgggtatctaaaagggctacttcggggttaattgaaagccgtcttcattaaaggccccataaccactggaaggtattgctgaaattcttttccaaggattttgcacattctggcccatgctgagatcatgtaagagatctgaggatcatcatcttccatatcattgaagtctgtctgggtctttaacaaaagctgcatcacatctgatgcatcctgcatgaatttttccttcccaacagccagaccaatgaggctaatgcattcaatagtttttcctctcagaagtctcagttctttttgaaccgcattctcaacgatgtgcttcagtgatggcataaataaatcatagtaggggacaaatttttcttctgcagtatcggcaactgatgcaatggatgtcacaacttgttccaaaactaacttggtgcctttctgaatcagctcttgaaagcttcagtaccataatggaatgcagatgtttcaccaaattatccaagtatggaataagtagtgacttgggacagtcttcagtaaagttaatgagggcagcagctgcatgggcctgcacacgttgattgccttggtcttccatggtctgcagcagagctgcaatcaccttctcatgaaatttcttttggaaaccaggtgcaaaatctgtagccatctgtcccacggcattacaggctgcataccttactcttggatgaggatcctggagaaaaagtaaaacaaaatttacgatctcatttagaattccttccatttgctggtggcacccttcaccaatggcagataaggccatcaatcctgcatgccggtatttccagtcaggattttgaagcatttgcataatgtgttccttgatcatcggcagaacgagctttccaccaagtccgcaagccattcgatctagagcactctcgcctgcaactgcattgctgtcaaaatcatcatcttctagttcatctgcatttgcccagtcctcatcttcttccaaatcaaccatcattgctaacatctgaggaatagtctgtgcaacaatattggtatgttttcttaacatagcagctgcagtctcagagagggtgacgatcacttcaagggcaagctggcgttgcatattgttgaggctagtgtctccacacaactttagacttagctgtagagttgcttccaagtgaggacgcaaatactttggaacagtatctgcaatctcaacgagggattttaggacagaatcatcattctggtagcacgagtcatttaccgcctgtaggaatcccggtagcaagtctgcaaaatgtttgaacagagcaacattatgctcatttgcaagtataaatgcagctgtagctctagcagataacgtcctgatcgacgggtgttcctgatcttgcatacactgaactaacattcgtttgatgacatctaaatagtgttgttgctggttcccaaaaattccaggaaagttccagaaaatgtgaagggcagcttcccgcagtcccacattttgagagctgactgaatcaaaaaggaacttcaaaccttcgggccactggttattgccatcctcatctattaaattcctggccagttctgccgcaatatcacaaacttttttcctcatgctagattgtgtttccatctgaataatcatgagtagctcactcttgatggcagtctgaacatcagagggaagtgctggatagacttcatcaaatgcagaggacaagagacgtcttaggagaacggcggccatttgtctagcctcttcagcagctgttgtatttctgatggcttgtaagaggaatgtgatctttgactggcctgggatattctcataggtttcctctgcctgtttccggaccacattgtcggggctgagcaggtttcccaggagcaggtagaactgttgctgctccgccgcggccgccgccattgcgctaggcccc

SEQ ID NO: 122347 - DNA, 1414 bp, Homo Sapiens
  misc_feature (111)..(134): n is a, c, g, or t
  misc_feature (979)..(995): n is a, c, g, or t
agatcttatattgtgttttgtatgcagcccttttagaactacttgtagtgagggtgctgtgtgtgcttttcttaaatatttatttttttcaacatgctttcaacctgtcannnnnnnnnnnnnnnnnnnnnnnngggcagtgtttgaagattgttgatttttttctggggataatctatattatattgacttcctattacttattataaacctgtgtttgtattggagatgtgtctactattgggggaagaggttctcgtaatcgctcggtgggaaatcatggctctgccgtcctgcctctctgtggccgtgggttcacgtggcctctgcggtgagtctccaagtttctgcctaggcgcctgtgcgtttcctttctgtgacgggattagcttagacatccttgcaaagcgatcactttcaataaattgggaaattgctgctccagcagatcctcctgcgtctcagatgatccttcctccggcctcgcctggggtggcggcggccgacgggtgaccctcggccctctgtgggcagctgccagactccacccacttgcccaccacagggtcccagccccacggccttcctcccgagaggcagacaaagcttctggaaaaacctcaaatctttaatttctctcttcgcctggtgcagcccagacgtgagacacctgagcttcaaaaacaaacatggtaaaaacagccccagggcccgagagccgttgagttaagtgcgagtgggggagtcccctctccaacacccctcaaagtgcatcgggactggccccccaaagctgggcccataacacccttgataaatctacgggccgacaggcgggagggtggctgcccccagggcccttggggctaaggggacagcggtgtggtttggctttagtgcaaaaagctggtttctttagaggcactttgagtggtgggacccctccccgacctggcgggggggagggttcagggtcagnnnnnnnnnnnnnnnnnaagtaaaagcagaccctgcagctggtgaaggccagcccctggggctgtcctcgggctgtttcagccccgggcctggagggggtggggagggagaaggtggtagcttatgttcttgaacgagccggacttagtccaggaaccgctggcaggctttcttccagcggcaggctgtgcaccagaggtcccggcgctccatgccatacaccttccggcacttcttcgcgtcgccgcggggcttcctcagggtgactccgatcctggaggacaaggcgggtgggcaggctccgacctccgtgggctgcggctccaggcgggcgggcgtcaggcagccctggtagacacggtcactgtgacaggactgggggttagcaacggtgctcaggacagggggcgggggcaggggcggggcaggcggccgc

SEQ ID NO: 122348 - DNA, 403 bp, Homo Sapiens
tgtcctgagcaccgttgctaactcccagtcctgtcacagtgaccgtgtctaccaggtgggtgaggccacgggtggtagctggggcgggtctcagggctctctggagtggagtgaagccctggctgtgtctccctgtagggctgcctgacgcccgcccgcctggagccgcagcccacggaggtcggagcctgcccacccgccttgtcctccaggatcggagtcaccctgaggaagccccgcggcgacgcaaggaagtgccggaaagtgtatgtcatggagcgccgggacctctggtgtactgactgccgctggaaaaaatactcccagcggttcctggactaagtctggctcgttcaagaacataatgatataccttctccctccccaccccctccaggcccgg

SEQ ID NO: 122349 - DNA, 662 bp, Homo Sapiens
aggcaaaagataccttttattaaataaataaagcaagtaagcagggatactggcttaattatcagtagaaatgagtttgaaggttagaaagtaggctagataagaggttctcaataatttttctgctacaatccaaaggagacaacatgtttcccattagaagcagtggtttacgatggcaatgaatcacaaacggtgggagttggaaaggcagcacgtgcaaggtgggggaaaggggagtgggtaaatacctatctaattccaggttgagtaacactgggcaaggtaccagaaggactttttaaactgtatgattacctgggaatttttaaagaaggatcctggcaaacttcttgacagcatttcatatgagagagaagtatttgccatgcatttatctatggatgtagcagtactagctattgacagcaagtggaaagtataaaacacaaaggctaagattatacatatgctccccattactaaccacctaataccaagcaaattgtgttctgacctgcctttcagcctcttttacaaccattttcctggatttctaacccattcacttgttctctgtcccttctataaaaatgcttataacagctgaattgacaagcaatagaggagcaactctaatctgattcaacaacaacaacaac

SEQ ID NO: 122350 - DNA, 1520 bp, Homo Sapiens
attcaaccaaaaggggtattttattgttgttagttattcaacatcttgccctgagaggacagggccattagcatgtgaattatttgatccgttctcctcttccaaagctataatatctggaatttcatcagtctcagatgtcaagtctatggtggtgaaatcaaacaccagccagttgaggggcgtgttgttaacaagataatccatcacgtcatctaaagattccttcattttcctgcagctgccccttgctagaagtgaggaggctgtcagacacttctttaaaggaggcagcattgcggaacactgagtagatgtcgcctgccatcacccccatgtgcttggcttgatcttggatgttctgtggtacaccttggatgttggacaggagggtgtggcacgtggtctggagctgctgagtcaggttgcgggcaattgcaagagtacgtgactcaatgtgctcagcacagtgggactcatcagtatcatcatatccaatgctccttttccactctacccatgagaggtagagcttatcctgagcatcctgaattttctgattggcactatacacattcttcctggcaaattcaatcaggtgaacagtagaatggagctgagaaatggtctgttggcttttttgcttagctttctttaaccctgctgagagcctgctggtaggcacgggagtgaagcttggtagacagggatcccagtctaacataataacttggcttctgaaccagatcaaatccttcaactttttttgcttctttttctagttcttcctcagtgagagggaggtactgttctaccaacagctctgatttggtgagtgcattttctacgccactgctcacgagctgcatcatccgactccccaagactgtgttaatgctgccactgaccacagacttggtcttctccacactgccagtcactgcccctttggtcttgtccatcacccctgtgatcgtgctggccacagaatccttggccccagtcacagtagtcgtcacagcatcttttgccccagtcacagcgcctttggcattggcaacaatctgagttgatggctgattcagaataggcagtctctcctcaatcctgtctagccccttacaggcataggtattggcaactgcaatttgcggctctagcttctggatgatgggcagagcactggtcatggccacggaggtgatggtcttcacaccgttctctgccatctcacacacagacttcaggtagggatactggtcctttgtactgagataggctgaggacatgaggtcatacgtggagctcaccaagggcaggttgaccacccgagtcaccacactcggttgtggatcaactgcaacggatgccatttttcttcctggagaaagaaatcgacggactgcagcgaaaggcgaagagcaggcgcgtcccgaagacgactccggctgccacgacccggtcaaaccccccggccgtaatggccgaattcccgggcatatgtccggtaccgtcgactg

SEQ ID NO: 122351 - DNA, 987 bp, Homo Sapiens
ttttaactggtctatcctgcagtgaattttattgaattcaaaggtagtattcctatttgagaaatgaaaaactaaaatcaagttttacaagcaagcatcatgagataaagcagtgaagacgccttttcagatcacaccagagcagacaccagtttctaccccagcccacatgaagatgtttttattcaatacaaacagtaacagaggcaacacaatggccatagaatgagaacataagtgcatttgaattttttctgagttctggctataggctctgacaagcctatcattcttttcttaccaggtgaacagaaatcatctgctaatgccagaaactttaaagctcttaattcagctggaaacaactacaattgagggcctttatactagctacttgcttcccaatttagggttgcctagcaagttaatttcaacataacaaaaggtgtcatctgtctggccacagcatgcactagtgataggggcaggtttaatgagttttatgctcagatcgctgggtctcctggctgctcttgtccatctctgcaccttggtcctgagcattctgagactcagtcagctgaggataaaagggacctaccagccagttgaggggcgtgttgttaacaagataatccatcacgtcatctaaagattccttcattttctgcagctgccccttgctagaagtgaggaggctgtcagacacttctttaaaggaggcagcattgcggaacacttgagtagatgtcgcctggcatcacccccatgtgcttggcttgatcttgggtgttctgtgggacacttgggatgttggacaggagggtgtggcacgtgggtctggagctgctgagtcaagttggcggcattggcaagagtactgacccaatgtgctcagcacagtgggactcatcagtatcaacatatccatggccgttttccactctacccatggaggtagacttatctggacatctgaattttcgg

SEQ ID NO: 122352 - DNA, 513 bp, Homo Sapiens
aagtgaaacaggccactttattaaaataggtccaaatgtaacacacgataacattcattttaaataaaaactacaaacatgacttgacttctccaaatatacattctctcaggtagtccatccgagcatcctttgttgacagtgccatagagttccattcaaactgggaaatctgaattacacgataccccagaatttccaaatgtcgttttttcatagcagattttcctttcatgtgagggatatttctacaaagtgcttttgaatccaaaaattccaaagcaatcctttcagcccctggtggcagccttgatccaactatttcgatatttgattcccagggcatttctggtagttgtcccaatgttatattatggcttccatacggaagaggtttttttcttttatccaagatacactcaaaatctactttgtggtaataaggcgtaagaaccgaggcttttacacaattgattcctcctagtacctctgctaacattttaaaaatctgct

SEQ ID NO: 122353 - DNA, 1578 bp, Homo Sapiens
  misc_feature (1477)..(1486): n is a, c, g, or t
aaagaattaccataagttttatttttgcttagttttattaaaaaaataaatatgtcataaagctttctttttccttagggagaaaaaaaggaacaagtctcataaaaccaaataagcaatggtaaggtgtcttaacttgaaaaagattaggagtcactggtttacaagttataattgaatgaaagaactgtaacagccacagttggccatttcatgccaatggcagcaaacaacaggattaactagggcaaaataaataagtgtgtggaagccctgataagtgcttaataaacagactgattcactgagacatcagtacagatacatcttgcttaaacaacacagaagttcctgaaaagttttgtgtaaatgatataaccacaaacattaccaggagagcttggtaactgaaagaattccatggcgaattcttttgtgaacaactactttcacttttgtaaatccaggtatttgctttttataaggagtttacctagttgctacctctctgaactgaggaaacagcatattcaccatacgttgtgctccagctggaccactggcacaatttccaagtttgtgtttctattaagtaagtagtgtaagtacggtacagagtcagccagtgaacccagctgtatctgacaaagcaggtgtaggagtgggactgccatctaccaataattccagcaaatacttttgctaatatactttgtgcaaaaccacagtaataaccttatcaatttcggctatagatgtacttcctttttctaaaactttcagtcacaagctaggtctggaccccgaaaaggaagtaatacttctaaccctcaagactgcctttaaccaaattagctgcccaactccttcaaattggaatggatgataatgaaagagactgagttttccaaagctgaagtttaacaacacaaaaatcacatttcatatcactaattagtgaaaagttttgctggtgacaaaaatttttcaaatggttgttttttgttgttgttttaacttcctctaaatagaactctgaattctggggcaaactctgcagaagttaaagtcactgatgttctctggttggctgatacattttagtactgctgatagaaataaaaatttctttctacccaccagaatttcatgaacttatactataccaaagcagtgatgctttggacagggaatacgcatggtagtactagttccagtaagttttatcaaacgtaaataaataaatagaatcctcacattgctcacagcctccattccatttggtcaaacttctaccaggcccaagccacatttaaattaggctgttcagttttttaatttaatgctcctaataacattgctgtctatatgtacaagtgtgaatgaaaagagtgtgtaatctgtagtcttttccacactgagtacactagcaattagtaaataattaaagagtaagtggtcattttaaaacttgtannnnnnnnnnaaaaaaagcattttctagcactttaaaaaatgggtctgaaaagtgccctattcggacgcgtgggtcgacgatatcccgggaattccggaccg

SEQ ID NO: 122354 - DNA, 811 bp, Homo Sapiens
ttttatgtaactttctaaataatttttaattctaaatttaaaaaaataccttccaataaggagcttggaaaagaatacaaaataatggaccttgaggaacataatattctagaaacaaaaggcagcgcctcccttgctagagctcactgtattaaactccaggtacctgacaaatttaagatctgtatcctggctggaatctagcagtctcttcaaaaattagttctttgagcttttccttaggcaagtcatccaattccatgtcgaacttgaatggtgcttcggcgatgggcttgtcactcgggtcgtaatactgctccagatatgggtgggccagagcctgttctacttcaatcctcttgtgtgggttgaatgtcaacattttgtccaataagtccagagctttggagtcagcatttgggaccagcctgttccatggcactttatttttgtgtggaagagaaagcaaatagttcctagcttttaaatttattatacaattcaggtcttcttgtgatggggatccaagaatacccaaaatgtggttcagctggtcaagataatgcttccctggaaagatgggcctgttagaaagcatttctgccagaatgcagcctacagaccaaatatcaatggacttggtgtagcccttggaattcaacataatttctggagccctgtaccaacgtgtggccacatattctgtcaggaaccctgtgtgatcatggtctggatctgcaacacgggccaggccaaagtcacagatactctgcagcaagctcctcctctgcgccgccatcttggaggaccc

SEQ ID NO: 122355 - DNA, 2066 bp, Homo Sapiens
  misc_feature (902)..(902): n is a, c, g, or t
gaagatagaagatgtacatttattttcatgaattacaaatgcatttctgttcatattagcaggcagtctttatataacccattctccattgctgtcaaaaatcaaacaagaaaaaaggacagctgagaaatgaaaagctaaaaatagaattatttttcctaaatgatctgctggatagcattttccgtggaacacaactcagaggtaacaatagagttttcatttcaatcgtaggcatgtggcacttggacagtcatctctgcacagaaagctgtaacagtcatgcgagggtacagtaattattgaacaaggcaaatttctcaccacagagagcagtggggaagtcaagaggaggcaccgcactgggacagaacaccgagtcaactccacagtacacagtggcaggaacaaatacttaaagagatcagtaaaatatggatagagctccaaacacgagttagtgctagctttttctgacagtctgactcagcagtatcagaaatatttgagtacttgaggacagaacagtgcttcacgtcatgagctcctggaggctttattacaaattgttatactgtaggttgaaaaatgaacttgagatgctgacatgctgtagaaggaaaaagaattgtatactttctcatttaaagacgcagtgttcctctctgctaaatcctcaggcatggaacgtggttactgaaacacccacatttgaagtagctcaagggcgtatatgcaccagcatgtggagttccaccctgggacatccccagaaaccgcccacagctcagcactgcaaccttttgtacttctctcaccaaaatgtcgagtgaagctgccactttaaatctttttttgtaagtcttacaaacattaagtactgcacataacgcttcttgacnaagtgttacacctctatatggtacaagtgaccacagtaactacagagtgacactgctgggtgcagtacttcctttttatttagaaaaatgactgcattttctaaaagctgggccaatagcacataccttatatatgttagtgactaccatgatatgagaaaagacgtggacaagtgctccccaaggattccggagacggaagcacttgctgcaggctgcaacatcagccaaggtatttccacaagctcctgctctggggaaacagttatggtcaaaaggtgaagtgcaaataaggggctgtcactgacttaaagtgccctaggtagtagccttccctatcataaagtgagatgccagtgactagagccaattggggaagaatctctctctggtgcggctgcatggtcagcagggcatcatgtagaaaaggattcaggagagggaggaaccactgcatctttcaaaccagaaagcaattagtgactaaagcaacagtaagcagtaggtgcactgaagtacatactgccgcaggtcaccaatgggtgacacacacagggctgccaggaggaattctctggactgaagaaattctttgaaagcataaaagccacaactaccagaaaccgcccctccaaacggctcaaaggagtcaaagtggataagccaagacgggctggagacaggaccaggggtcaagaactgggaagaagaacaccgatgtctgagcacgtccagtcctctgagcccttgtcctgacaatttaagatctgtatcctggctggaatctagcagtctcttcaaaaattagttctttgagcttttccttaggcaagtcatccaattccatgtcgaacttgaatggtgcttcggcgatgggctcgtcactcgggtcgtaatactgctccagatatgggtgggccagagcctgttctacttcaatcctcttgtgtgggttgaatgtcaacattttgtccataagtccagagctttggagtcagcatttgggaacagcctgttccatggcaccttatttttgtgtggaagagaaagcaatagttcctagcttttaaatttattatacaattcaggtcttcttgtgatggggatccaagaatcgacgccgtggtcgacgatatcccgggaactccgacgcgtaccagcctg

SEQ ID NO: 122356 - DNA, 1156 bp, Homo Sapiens
  misc_feature (1045)..(1079): n is a, c, g, or t
tttttttccattgtgtcagcttttggacacacactttattgcacttgatttttttatacatccatttcctaaacaagatatgtttattcatctttttaatcctcatggctcagcacagggcctgacatacataggcattcaaccaatatttgatctccaaagcatgaccattcatgcatccataatcctttttctatagtataaagatggctgacattcaggcccccatgtatattttaaggaatatataattcccaataagctcttctttttaaaggtgattaacagttctagtgttcaatttcaaaatcaaaatgacatcatatcaggtgtcattaaaagacaaatgccaaaccatatttgcctacacaccactgccttttccctttctttcattttatctgtccatatgaaagccatggttttttttgtagttttcaccatctctaagagccctgaacaatttttgatcctataagggctttttacttcagtttctgtcacctataaaagctgtgtgtcgagactgaagattatccactatcttctcttctatctctacgcctttttctatttcttcctctgatagcaataacttggtttccgagtctttggttacaataaacacaaaggactgtcgtgactcaaggatattagccaccaccacttgatgctgataaatttccaaagccttccgagctcgattaattacaatggcggggtcagtctccaacttaaaggaaattataaatgctttgggagcccaatctttaaccaaaggagaaagcagttttggcaccatcttcattgttatctgcagtgggcccccagatgactggatcttgtgttcaggcatttcagagacaggaacatagaaatctgacacagccgcagccaggtaaaacatcgcagaagggcctcagcccagcgcgcagcaccgggaggctgggggaactcggctaccggatccatttccgccatctgcagcgcagcccccggccgtaatggccgaattcccgggcatatgtccggtaccgtcgactgnnnnnnnnnnnnnnnnnnnnnnnnnnnnnnnnnnncgccgcttcctcgctcactacttcgctgcgctcggtcgttcggctactagcgcgacccctatatgatgtagttgcaa

SEQ ID NO: 122357 - DNA, 1082 bp, Homo Sapiens
ggggcggaaatggatctggtagccgagttcccccagcctcccggtgctgcgcgctgggctgaggttatggctcgcttcgcggccaggctgggcgcgcagggccggcgggtggtgttggttacgtcaggcggcaccaaggtcccactggaagcgcggccggtgcgcttcctggacaacttcagcagcgggcggcgcggtgcaacctcggccgaggccttcctagccgccggctacggggtcctgttcttgtatcgcgctcgctctgccttcccctatgcccaccgcttcccaccccagacttggctgtccgctctgcggccttcgggcccagccctttcgggcttgctgagcctggaggccgaggagaatgcacttccgggttttgctgaggctctgaggagctaccaggaggctgcggctgcaggcaccttcctggcagtagagttcaccactttggcggactatttgcatctgttgcaggctgcggcccaggcactcaatccgctaggcccttctgcgatgttttaccctggctgcggctgtgtcagatttctatgttcctgtctctgaaatgcctgaacacaagatccagtcatctgggggcccactgcagataacaatgaagatggtgccaaaactgctttctcctttggttaaagattgggctcccaaagcatttataatttcctttaagttggagactgaccccgccattgtaattaatcgagctcggaaggctttggcaatttatcagcgatcaagtggtggtggctaatatccttgagtcacgacagccctttgtgtttattgtaaccaagactcggaaacccagttattgctttccgaggaagaaatagaaaaaggcgttgagattgaagagaagatagtggaatatcttcagtctcgaaaccagcttttaataggtgacagaaactgaaataaaaacccttttaggatcaaaaattgtccggggttctaaagaagggggaaactccaaaaaaacctgggtttcctttggacagaataaatgaaaaaagggaaaaggccggggggggtaggcaaatagggttgggcttggcttt

SEQ ID NO: 122358 - DNA, 1591 bp, Homo Sapiens
cagtcgacggtaccggacatatgcccgggaattcggccattacggccgggcagtgggaagatcattgaagggaaaaatgttactatttactgaggtatttttcacagaatgattgaattaaaaaaaactcaacttgcattttcattgtgggtgcttagagaagttctacaaaattcaaactgtgaaggtttatgcttcattaattatgaccatactttttcattttctgacgatccctgatttccttatggactcaataagaatcttttatatcaagtaaaatgaaagttgatgatagaatatcaaatagtgaatttgatatgaaatctaagagtgtgagtcacttgcatatgtaatgctttgggtttttgcatattttcttaggtcacagtgacaggtttctgagttgtttcccttttcaagtctctgggaggccagtggcagcagcaggtctgtgtttcaccttcttcccatgtgagcttggaaaactttggcatcttaattagtcttgaatcatacacctgatccccaaacattgcctgctctcaatgaaacatgctttggaaatggaagggactcagaaagtcgaaatcccaagaactccaagccaaaagtgttaggttttagtgaaatttgtgtcaggtataagcatacctgtttgggccagaattattatcacagcctttctgacccaaactttcaaaagcaaataaacagcatataaaacgttaattatctttccattgtaattgtgatgatctactctgtatgggtaccaaaatcaccttctctcttcaagtcaaagttgaatttagaactttgaatacaggtcaaaaaatgtagaaaatatcattttatattccctaatctatatagctgaaaaagggttgtattttcttagctgaatatgaatacctcttaaacataaattagttcctctccagtgaagtatcttattttaccaatccatttcaggaaagaggttctgctgccgtaaaggcagaaattttatttttatcccttttatttgaatgagagatttgaaaatcgaattatgtaaatatttcaatgcatctgctattattttgtggagtttattaaactactttaaaaaaattgtatagtctatttattgtatgtatgtacatacagtctgatacctaaaatttaaagtggattccataaaaccagactcaagtcttgtttagactactgaatactgttttagcctgtgccctggattctacctctgtataggaaaattttccatattcattaattagtgttgatctgtattaattggttatgtttcttgcactaaggatgtttaaaactccgctgtaagtgtagattttagttttactggcaggatgaatcacttgacacataggtagatacttgaggttcattttcttttctttttctacatgatgatgaatagttatgttttcttctctgatttgttcaaagtttgccaaaagaaaacacaaaaccagtacagtacttactgataaatcgtagtgactgtaatttgtttgtaaggcgaattaatgctctacaattaaagctggattactattgaggaaaaaaa

SEQ ID NO: 122359 - DNA, 651 bp, Homo Sapiens
ttttttagagagaaaatatttaatctatttcacgaaaaaaatgtacaaagctttagaaaagaggcattaggtttccatatacagtataaacacattctcaccttctatgatcacttgtattacacttctctttgctagtaaagaagccactgcactctcgttccaaacaatcttctgttaacacatgcacttgaaaaagtcactgaaaagtacagtcttgaaataaatgtagaaatacaatgttgtacaaaaatatattaatctgtctacatgaaacacttaaaaatgcacaccaagtacattcttttagaactagactatgtctagaaataccaatatatgaacttgtagattggattttcgctgcatttttaatcactggagaaaaaaatataatcaagcctttggaataagaaacatgaagttagcacagcagaccaactctattctcagaaatgaaaccataaactttatccatacaaaagatgggaaagagtttgagtttctaaaattgacatatttatgaaatgttataatttaaaactgcaatcacacagcaaactttcatttgttcataatccacatgtaaagatatgacaattacaacatttctaattgtctctcaatgcaacttaacagtgagaatttacg

SEQ ID NO: 122360 - DNA, 836 bp, Homo Sapiens
catttacatgaaaatacgtttaatacatattctgtcattagcagtaagtagaactgtgctcttatatcacaagtactttctttaagacaatccaggatcagtaaataacaatagcttttgcttattttattcaatatatttgaaatgatcattcacaaatttaacctatccttaaaaataggcattacttattttagtataatcccatttgtatacaaaacaaaccctttacatattcacacttaggtaagtgcacagaaaaaagcatgaaagaatatacattattaaattcaaacgctggtaacctttgggagggtaataaagggagatcatttttttattccattctgtatatttgaattttttacaacatgtatttatgggttactgaaattatttttaaaaggcataatagggtccagttaaaccatactttctagccattatttgcatattaatcaagacttctgttatttcaagtagctcttaaagtttgtcaaacagtttctaatttcctcctcaattttgcttgccccagtcatttatttagtaaacactcttcctcactcataattccagtttagtcagaagtacaacttaaagtggctccaggctccaggtaatcctgttcaaaattcaggaactcaagaaatttagatgggtttttggaactacaaaatggtttagataatgtgctctatatccaaactcacaaatgaatatatgtggtaccaggggatactttgtattgccatctggggacttttgcattaatgttgcctttagggaagtggtttataatccttggctgcccaacagaaaaatctgtggaactt

SEQ ID NO: 122361 - DNA, 743 bp, Homo Sapiens
  misc_feature (670)..(688): n is a, c, g, or t
ttagagagagtggagctgctttattgcccttggagcccgcgctctcggaggctgtcttctgtcgccaagggtcccggaccgagtacacggtggcagctggcttagttggtggacggcttggcccactcgacgttgaggatgaggtggtcgtagccaaagccggacaccccggcaatggcacgcgcagcatcctcgcggcggtggaagctgatgaaggcgaagcccttggattggccagtggtcttgtccttagccaggtagatgcgggagatggagccgaaaggccggaagagctcctgcaggtcggtctcacgcgtgtcctctgacaagttggtgacacggatggtggcgttgtcgtcggctctgcggttgggctgcatggactccccgcggcggctggccccgtcgcgcaggctcggcggcacatacttccctgtcttgttctgcgtggcctgcaccggctctagctctggggaccaaaagacagtcaagttcaacctcactgtggcgcaggcgtggggacagagccgccccaggaagctcgggcttcagtgttgagccagcgcaggcactgtgtgccaaaccacaggcagccagttggccacgaggacaccaaggtgacacctgagaagctgacaccattttgagctcccagccagcgacactggtnnnnnnnnnnnnnnnnnnncccgaccccacccagagagggcgggaggacacaggggcggcagctcacatgcaca

SEQ ID NO: 122362 - DNA, 923 bp, Homo Sapiens
  misc_feature (813)..(847): n is a, c, g, or t
  misc_feature (895)..(895): n is a, c, g, or t
ctctgacaagtgtgacacggatggggcgttgtcgtcggctctgcgttgggctgcatggactccccgcggcggctggccccgtcgcgcaggctcggcggcaacatacttccctgtcttgttctgcgtggcctgcaccggctctagctcagtagacaggcccagctgctcggccagctccttctgcatgggccccagcgtatccttgtaggggcagcgggtggtccagtggtcgcccttgcagatgcggcaggacacgatcttctggcccttgagtttgttcatagggtcctcctcctcctggcagttcaggtcctctttgctggtgatgaacgtcatagagacatcgtcactgacagtggtggtggccacattgggtccgggggggtcaaactctgagttcccgaacttcttccagttcttcctccttgcgacagcctttgaagccttccgggtctcaatcctgaaggtgcggacaatcttgaacttcttgccatcctcatctatcttgtactctgtcactgtctttatgtttccgttgatgacctccttgggaggcggcagtggagctcccggcagtagctctggctctgggctggtgtcacctgtggccagagggatccccttgaggagctcgctggtgacacatttgtcgtcctccccctcctcctccacctggtcggcccaactgggcttcgaatcaaagtctccagtaggcatcgcaaaaagtattctccacgcagcccaagcccggccagagagcgccccggccgtaatggccgaattcccgggcatatgtccggtaccgtcgactgnnnnnnnnnnnnnnnnnnnnnnnnnnnnnnnnnnncggccgcttcctcgctcactacatcgctgcgctcgtcgttcgctgcgncaatagcgcctatagtgatctatacatt

SEQ ID NO: 122363 - DNA, 984 bp, Homo Sapiens
ccgcagatccttgggggggtggaaagttgatgaaagcaaagccccttggccttggcccagtggtctgtcccttacccaggttagatgcggggagatggaacccgaaaggcccggaaagagctccctgcaggtcggtcctcacgcgtgtccctctgccaaggttggtgacacgggatggtggccgtggtcgtcggctctgcggttggggctgcatggactcccccgcggcgggctggccccgtcgcgcaggctcgggcggcacatacttcccctgtcttgttctgcgtggcctgcaccggctctagctctcccggcagcttctctttctcgccagtagacaggcccagctgctcggccagctccttctgcatgggccccagcgtatccttgtaggggcagcgggtggtccagtggtcgcccttgcagatgcggcaggacacgatcttctggcccttgagtttgttcatagggtcctcctcctcctggcagttcaggtcctctttgctggtgatgaacgtcatagagacatcgtcactgacagtggtggtggccacattgggtccgggggggtcaaactctgagttcccgaacttcttccagttcttcctccttgcgacagcctttgaagccttccgggtctcaatcctgaaggtgcggacaatcttgaacttcttgccatcctcatctatcttgtactctgtcactgtctttatgtttccgttgatgacctccttgggaggcggcagtggagctcccggcagtagctctggctctgggctggtgtcacctgtggccagagggatccccttgaggagctcgctggtgacacatttgtcgtcctccccctcctcctccacctggtcggcccaactgggcttcgaatcaaagtctccagtaggcatcgcaaaaagtattctccacgcagcccaagcccggccccctcgtgccgatttacaacccagcctcgtacctagccagtaagtt

SEQ ID NO: 122364 - DNA, 1114 bp, Homo Sapiens
  misc_feature (874)..(874): n is a, c, g, or t
  misc_feature (974)..(986): n is a, c, g, or t
  misc_feature (1017)..(1026): n is a, c, g, or t
aactaggcctcaagttttgtacaaaacccccgcaggttttgttaaaaacgtacggccagtactatacggtcctaaggtagcgaggcctgggtggcgaattcggcacgaggtggagactttgattcgaagcccagttgggccgaccaggtggaggaggagggggaggacgacaaatgtgtcaccagcgagctcctcaaggggatccctctggccacaggtgacaccagcccagagccagagctactgccgggagctccactgccgcctcccaaggaggtcatcaacggaaacataaagacagtgacagagtacaagatagatgaggatggcaagaagttcaagattgtccgcaccttcaggattgagacccggaaggcttcaaaggctgtcgcaaggaggaagaactggaagaagttcgggaactcagagtttgacccccccggacccaatgtggccaccaccactgtcagtgacgatgtctctatgacgttcatcaccagcaaagaggacctgaactgccaggaggaggaggaccctatgaacaaactcaagggccagaagatcgtgtcctgccgcatctgcaagggcgaccactggaccacccgctgcccctacaaggatacgctggggcccatgcagaaggagctggccgagcagctgggcctgtctactggcgagaaggagaagctgccgggagagctagagccggtgcaggccacgcagaacaagacagggaagtatgtgccgccgagcctgcgcgacggggccagccgccgccggggagtccatgcaggccaaccgcagaggcgacgacaacgccaccatccgtgtcaccaaacttgtcaggaggacacgcgttgagacgaacctgcangagctcttccggccttttcggctccatctcccgcatctaacctggctaaggaccaagaccactgggccaatccaaaggcctttggccctcatcaagcttnnnnnnnnnnnnnaagagatgctgccccgttgccaatttggccnnnnnnnnnntccccccctttctagctacaacaaacccactccaaccactacaacgaccaatcaaatagcgcgaccaagccactcgccacaacgacga

SEQ ID NO: 122365 - DNA, 1268 bp, Homo Sapiens
aatttttctgtgggagaccacggtgttggccccgttgcaattttcttattgtggcccgcgggtcccaaaccaagtggttatgaaagcttttttggggagcggggggcggcggagcccggttttggtcgtcttccctttcctgttttttccagagtggagctgctttattgcccttggagcccgcgctctcggaggctgtcttctgtcgccaagggtcccggaccgagtacacagtggcagctggcttagttggtggacggcttggcccactcgacgttgaggatgaggtggtcgtagccaaagccggacaccccggcaatggcacgcgcagcatcctcgcggcggtggaagctgatgaaggcgaagcccttggattggccagtggtcttgtccttagccaggtagatgcgggagatggagccgaaaggccggaagagctcctgcaggtcggtctcacgcgtgtcctctgacaagttggtgacacggatggtggcgttgtcgtcggctctgcggttgggctgcatggactccccgcggcggctggccccgtcgcgcaggctcggcggcacatacttccctgtcttgttctgcgtggcctgcaccggctctagctctcccggcagcttctccttctcgccagtagacaggcccagctgctcggccagctccttctgcatgggccccagcgtatccttgtaggggcagcgggtggtccagtggtcgcccttgcagatgcggcaggacacgatcttctggcccttgagtttgttcatagggtcctcctcctcctggcagttcaggtcctctttgctggtgatgaacgtcatagagacatcgtcactgacagtggtggtggccacattgggtccgggggggtcaaactctgagttcccgaacttcttccagttcttcctccttgcgacagcctttgaagccttccgggtctcaatcctgaaggtgcggacaatcttgaacttcttgccatcctcatctatcttgtactctgtcactgtctttatgtttccgttgatgacctccttgggaggcggcagtggagctcccggcagtagctctggctctgggctggtgtcacctgtggccagagggatccccttgaggagctcgctggtgacacatttgtcgtcctccccctcctcctccacctggtcggcccaactgggcttcgaatcaaagtctccagtaggcatcgcaaaaagtattctccacgcagccctcgtgccgaattcgccacccaggcctcgcttcct

SEQ ID NO: 122366 - DNA, 1053 bp, Homo Sapiens
cgccttcccgcggacggccccctccggacgcggagggccggtccagccgcgccgctgtgaagcccccccgcgcagtgggggcacggcgagcctttcttttggggggggtgaaaggttgagtaagggcaaagccccttggattgccccaagtggttttttccctttagcccgggtagaatccgggagaatggaccccgaaaggcccgggaaggagctccttgcaggttcggtttccacgggtgtccttcttgacaagtttggtgccccgggatggtggcggttgttgtcggctctgcggttggggcgccatggactccccccggcggctggcccggtcgcgccaggctcggccggcacatacttccctgtcttgttctgcgtggcgtgcaccggctctagctctcccggcagcttctctttctcgccagtagacaggcccagctgctcggccagctccttctgcatgggccccagcgtatccttgtaggggcagcgggtggtccagtggtcgcccttgcagatgcggcaggacacgatcttctggcccttgagtttgttcatagggtcctcctcctcctggcagttcaggtcctctttgctggtgatgaacgtcatagagacatcgtcactgacagtggtggtggccacattgggtccgggggggtcaaactctgagttcccgaacttcttccagttcttcctccttgcgacagcctttgaagccttccgggtctcaatcctgaaggtgcggacaatcttgaacttcttgccatcctcatctatcttgtactctgtcactgtctttatgtttccgttgatgacctccttgggaggcggcagtggagctcccggcagtagctctggctctgggctggtgtcacctgtggccagagggatccccttgaggagctcgctggtgacacatttgtcgtcctccccctcctcctccacctggtcggcccaactgggcttcgaatcaaagtctccagtaggcatcgcaaaaagtattctccacgcagccccctcgtgccgaattcgccacccaggcctcgc

SEQ ID NO: 122367 - DNA, 1753 bp, Homo Sapiens
  misc_feature (127)..(135): n is a, c, g, or t
ttttttcatttgcatatcacaaagttttattaatgtaattttaaggccaattaaactaattttattcaaagtaagtctacattaaattacaatattaacaatctctagacacaacgaacttataagnnnnnnnnntagaaatctgtttggtctttcttagaccacatatcatggaactcataaatgaaaattttcaaagatagaaatgacaattaaagagtgaggattttaatatggaaacccacaaggtgtcatatttcaaacccgcatgtttcaaaaagagactcttaataatttagcacaaaatcaaattatataaacttggtatattccagaaaatattgctttaaacacttatgccatgatcaaaattcctttggtagcttttaatcaaaatgaaacatgctattatgtaaaatataaagtacttttaaatgttatctcaaaagtatctttgtcatagttacccttctaacatcactactgaactttcctttcactgttcaacctcatgtatatatacacaacacaaaaccaggtaccaacaaaatccttttaatctttccacaaaataacctctgcttcacaacatcaagactttaagtctccataaactttttacagtttacagcagagaacaaggatcgtccctgcgcatgactgtaaaaaccaaaccaaactttattattgcaatcacacaaatactgcaattaaaaaaaatcaaagagcagttaccccaatgcaaaaaaacagggactgccagactcaatcttagaatggaaacacaaacacactagccccaaaccctaaaacagagattcacaaggaactcagctgacgaacagacgcagcagggcggacaccatggccttggcacctcagggagctcacttagaaacctgacttacgaaaaatcagccatcaaagtttacaacttttggaaatacatgaaacagagaggggccagtggctagggtgcgtcatccattcgccagctttgaaccctggctctttctaatgttcacccatgaagggcccttgttttcactctaaatgctgatcatctgagcgagctgtcttcagggatacctaaggaatcttcagagctaaaaaatgcagcatctagggtcttcttcattgtgcactcatgatcacacacgagaacaaaccaaacttgcagctttttgacacaagaacaagaccttttaaaggaacttctctttagtaacatcttcttgtccaatctcaaagttattttgcacagagtaacagaaacaatttaaatgcctaaaagaactagaggaaaaactggagggaaaaagatacatctgcaggttgaagtcttgagccttgtgaaagatgacccaggagccacctcccttccttcgccttccaatgtccacagctggatcaatcagagtcccagaaatggcacaggtgtgcttcctgctctgagggtacattctagtgtttcatgaaggggaaccgtctgcagatgcgtcaggccacgtagtggtactgattcggattgtctttgtctctctccatatagtctctgtctatcagagattcaattctctttttcaaattccaggctttactggaaatttcagctgattatataattcggaaactagaagattatgaccaagagtctttctcatcttcattattctgacgatagcagcatcaatctgatattgtctatcctgaaacactctctcagtggtgctaacctgttcctcaacctgta

SEQ ID NO: 122368 - DNA, 1615 bp, Homo Sapiens
  misc_feature (144)..(144): n is a, c, g, or t
  misc_feature (326)..(334): n is a, c, g, or t
  misc_feature (952)..(961): n is a, c, g, or t
  misc_feature (1503)..(1537): n is a, c, g, or t
tacacggcgcatgattatcttgagaaggcgaaaacggggggcgggggaggattaaatgttattgtttaaaggcacggtggggggagaactctcgtgtgttgtgaaagccccacctaatagacccccccgcagaggcccaccttntggggtattgtggtgataaaagacaagactgttttgcgcgggcggggttgtttttttatctttggggaagaacaccaaacacccccgttgtttaataggggccggggtattccttgggggaggaactgcatgtgtggcaccacgttttgttgttgctgatgaaggggggacccccgccgccnnnnnnnnngagtgtgttgggaataaatttttttaaagggggaaggggggtgccaaacattttgcggagggggcggagggcagccaaacaagagaggaaaaaggggcagacggggggggtgttcgaggcgcatacggtgtattggggagttttccaagagtaattggattgttgacggaaaacagcggaagggaggggttaatggggtgtttggtactcttacgtacagattatttattgtaaaaatgtaagcaattacaaattgatctgttgtgaaatcagtgctgaattaacattaatgtaactccagtgaaaaaaatgaatttgatcaattattatcaggaataaacattaagccatgacggtgctcaagttatcttctgatgacactgctgtattaaatgtacttttcctatgagaaccttagaaaaataaaaatttctgagtagatcatctttatcttttctttttatatatttatagccatattttaatataataggccatgaggtgatatgtaaacatacataatttcaacaaattttgtcaaataaaatcatatttctagctagaaacttgccttctaatcattttaaatgaataatccaatcatccgtcaaaacaaannnnnnnnnnaaatgactgttaaatcctaaccttcattttcccctggggaaatagcattaaaattgttacacaatctgctatagaaagtgggattctctattttgaagccactagcttgcatttgcacatctagcacaggagaatcttcatccagtgatgagcgggttacacggatgaacgctaagcttcgctgcacaggtgcagggccccggcctcacagatttgccttctcccttgccgccaagtgagatccggactgcacaaaggtgtgaatcgcattcttaggcttctcagcattgtacttgtccagaagagcctggatgtggctcccgtagtcagggtggacctcagtgaagttcttgaccgctttcttctggatgaaaatttgtgcatccttcaggtggccggcaatgttctcacacagacgtttcctctgttcctcattcagcacgttcacatagaatgcccgcacctgagtaacgttatcatcattggcagtgcccggccgtaatggccgaattcccgggcatatgtccggtaccgtcgactgnnnnnnnnnnnnnnnnnnnnnnnnnnnnnnnnnnncggccgcttcctcgctcactgacttcgctgcgctcggttcgttcgctgcgagagctagcgccctatagtggatgatca

SEQ ID NO: 122369 - DNA, 1778 bp, Homo Sapiens
  misc_feature (61)..(492): n is a, c, g, or t
  misc_feature (1546)..(1546): n is a, c, g, or t
  misc_feature (1664)..(1664): n is a, c, g, or t
  misc_feature (1683)..(1683): n is a, c, g, or t
  misc_feature (1739)..(1740): n is a, c, g, or t
tcggatcccagcaatgcaccccacacctgcgtatttgtttggaaataaaataagtgtaaannnnnnnnnnnnnnnnnnnnnnnnnnnnnnnnnnnnnnnnnnnnnnnnnnnnnnnnnnnnnnnnnnnnnnnnnnnnnnnnnnnnnnnnnnnnnnnnnnnnnnnnnnnnnnnnnnnnnnnnnnnnnnnnnnnnnnnnnnnnnnnnnnnnnnnnnnnnnnnnnnnnnnnnnnnnnnnnnnnnnnnnnnnnnnnnnnnnnnnnnnnnnnnnnnnnnnnnnnnnnnnnnnnnnnnnnnnnnnnnnnnnnnnnnnnnnnnnnnnnnnnnnnnnnnnnnnnnnnnnnnnnnnnnnnnnnnnnnnnnnnnnnnnnnnnnnnnnnnnnnnnnnnnnnnnnnnnnnnnnnnnnnnnnnnnnnnnnnnnnnnnnnnnnnnnnnnnnnnnnnnnnnnnnnnnnnnnnnnnnnnnnnnnnnnnnnnnnnnnnnnnnnnnnnnnnaaggctatattcctggctctgtgtttccgagactgcttttaatcccaacttctctacatttagattaaaaaatattttattcatggtcaatctggaacataattactgcatcttaagtttccactgatgtatatagaaggctaaaggcacaatttttatcaaatctagtagagtaaccaaacataaaatcattaattactttcaacttaataactaattgacattcctcaaaagagctgttttcaatcctgatagttctttattttttcaaaatatatttgccatgggatgctaatttgcaataggtgtcataatgagaataacccaaactggataaatgtgacaaatgattgacaaagcatttcacacccttcaattacaccacatcaagaatgaggggaaagcgttgtaaaagtagactactgcaatgctacttatattcttgcaataaaaccagcaagcatccatatcaagagagttatcatctcacttccaactttttcccctcaagaacaatttgaatctctttggcatccaaagtctcataggtcaataaagcttctgcgagattcttatgctcctttgcatgagttttcaagatatgttttgctcgttcatatgagtcccttagaaggattcttatttcttgttcgatggcagattgggtttctggacttagtttccctgtatcactgtaggtcataactccaagcttttcactcattccaaatttggtaaccatccgctttgctattttagtggcattatcaaaatcactggaagcacctgttgtaatatggtcggttccaaatataagctcctctgccactcttcctcccatactaacatccatttgtgcaagcagctgggctctagtttcattccatctgtcattctcaggtaacagggacacatgtccaagtgttggcccccgtggcatgattgtagctttgttgataggcattgcatcttttgtgttatatgcaataatggcatgaccagattcatgatatgctgtgatggttttgttttttttatcaatttccacacttcnttctttcagggcccattagaattttgtcttttgagaactccagctccttcatggtaaccatttcttttccatcacagtgctttatgcagctggtcacagatctccactctgctcgggnaaagcacatactcgactanattctgatcacggatgtcaactatttatgaaaccatcaatttcgtcgacttacacnngctgacgtactgcgtcaacacagctgtaagatacatgc

SEQ ID NO: 122370 - DNA, 1468 bp, Homo Sapiens
  misc_feature (323)..(383): n is a, c, g, or t
cgcattggcctcctatgccacgcactttcagcagctctttaggacacttttgtcattttaagagaatagcttcgttcgcatgagacccgatcctagtcgctaatccatgcccttctcactccaatttcttactgtttcgggtttgttctgatactagtttggttttccaaaggaatcccagttgacacaaagagaagagagaataatacttttcaaatcaaatttctgccccaggtatttgtagagcaaagcagctgcttcaccagggtaggataccttccccagggcccagtaagactttcatgggccacaaaggcaaaacnnnnnnnnnnnnnnnnnnnnnnnnnnnnnnnnnnnnnnnnnnnnnnnnnnnnnnnnnnnnntgactatgttggtgcaaataccaatatgattttcaatccccaatgttcatttccttttcttctgattataaaataaaacactttttgtaggccccttaaaaggccttagagagtgtgccttatgggtaataatcgggccttttcccactctcggatcatggaggtcggagctattttatgtcttattcttctctgcatttctcagcctctctcttgagctaagaaagttgacgaatctttgcagaactggaacttgtattccccattgcttgacatcaagttggaaatgtagtaaacattccccacattgttgaattgagtcacgatagaaagcagggtattagcgcacagcatttttaattgccaaggaaaattttattttagctttgcattaacatattctaaataatcctttcacttaatgcaatcagattcctgtgacaagccaaatacttgtttttttgtgtgtgtgtgtttccccttcacttttcattgtatgcccttcagaaaaatctgagaagtgggcttccatttttgaaaaacaggacttccttagtaccatagatacgtagattgcaattttgcttttcctgcagcattactgaccttgtgaaatgatgcctatgtatacgtcattaatctatttgcttaacttttaatatctagtaatgctagaaatacaagaattttttaaaagaatttgcttaaagcttcaaaactcactaaggtttggatatgcaactccacaggtaatatgaatgagatgctttgtaaacaagcagccatgccttacagcctgcaacaaacaagcaaacaaacaacaaaactatgccttaaagaaggtttgtgaggtttctcctggacaaaggaattccaatttcctgttttacattcaaatcaaaactttcatatggtaaatggtttgaaatttaatatgactacagttaccacaaatcgacctgatttccacatgtcctgaaatgtgatctcaattattttgaggcactcttaaactcaatgtatttgcatctagagatatacttcatccttcatttgctattgacattttacaggttaaataactg

SEQ ID NO: 122371 - DNA, 1213 bp, Homo Sapiens
  misc_feature (253)..(261): n is a, c, g, or t
tttaaatagatatgaaatacgtaccaagtttatttgcctttaaatgatacaaacagaaaagacatgttagtcaaaatattaaattttcttgcattttacagaagaaaaataaactgaagtaaaactgtaggaactgctgaacgtcagataaatgtttcttcagaacaagagatattagttcctaaaagattcttctaaagtttttttaaaagagattaagaaaaacagtaagccactgggttattacattctnnnnnnnnnctacatgtttcttaatggacatatgtttacatttacagatagtaaacttagtttcctgtctcataaaactcagaagacgccagtgatgtctaaactatggaaaagaataaaagcctctttttcatatgaaaaaacattcaaactaaatctaccttaacattattttctatgaaaacttaataaagaatggctcttctgaaaacaaaatgctatacaaatcagtttcaaaaaagaaatacattatgagattaggcttatagctagtggtatcaagtaaaaccccaaacgatgacacaagaattcacagtattagccggtcctccccaccctcctgaattacctgaccaatggaagtttggctttgttgtttcagaaagcactgtttcttacattccattaattgttccaaatcacgccacatttttgcttgtttcatatttggaccatgactttctcgtataactttttgtttttcccgaagtttctttccaaggttttcttgttcagcagtatttttggtatactgttccctaattgcctttcttttttcttgttgatcagaagagatatatgccttcatctcatcagtagcacgacgaagttgaacttctaggttcttaatcatacaatttgtataatggtatctactttcttcttgaagacattcttcacggagtcttctaacttccagttctaatttggaccgattgctttcgaggcctgctgcacagctatcatactgggatttcttttcatcacactcctgggtcagttcttgatatttttgacgcaactgtcgtagctcttttataactgaggcaagagctgacttcttttcagataccaatgaatacagttttttcaccatttcagacatatcatccaatgttcgtcctttcatttcatcaacttcactcttcagtgcagatactctttctagctcttcttgggt

SEQ ID NO: 122372 - DNA, 748 bp, Homo Sapiens
  misc_feature (347)..(368): n is a, c, g, or t
gcggccgcggctgtaggctttttaaaaataacctgttgatatataattgtcagtccaaatgaatatgtgaaacagctggaattgtacaaattttggttgtatttaaagctcagtttcctttttgttttattgtatgcgttgggtttgcagcatgaacttgcacagataatgcacgttttctggttaagtaaacatgatgcacactattctgtaacagaaagccctattgtgccttacctgtgtgcttttgtgggcaccttgtttatgaagaataaaaaatgatttgttatctgaagagaataaattttaaattctcagtttatgtctcagatgctaacgtgtgaaannnnnnnnnnnnnnnnnnnnnnaagtaaccagtcttcctgtattttatgtgcatcatagtgatttatctgagcttagtgacccccatcttgtaacctgttgcaagagtgaatgtaaaaaatagttgtggcattttaaaaggtcgcctttgatgcagatgcatctttttcttgcttctaaaacatatttcatgtaaacattgtacatttattattgtaatatatactattatgcagcttattttacctgaaactgttaagccgaccaagatccctccctgcaagacagatgggaatgtgtataataactaggtatttgagaagttctgaagtttgatgtaatctgttacttgtcctgttaaaaaaaggccgaaattctaattaaaaatttattagttttaaaa

SEQ ID NO: 122373 - DNA, 723 bp, Homo Sapiens
ttttttccagagaggatgggattttattggtcgctcgctcctttggcgctagaaggtgcagccccagtgcagtggccacgctgtcccatcttcctgctcccccgaacaccacgccgcctggtattgttcttggtgtggcctctggcccctctcctgtccacctgccttccggaagcccgaagtcccctctccccgactgcgctgtgctgtgtgccttgcaagagtgacttaccacatgaggtaaatcctactgggccttctggggccctgaaggcacagcacaggggtctcagccggagtggggcaggagatggggaagtagcacagcacggcgggggactcgggcacggggtccggggaggtggaagcggtgcttgtgaaggagggaacggtaaccagagggagaggacagtcaggaggttcctgggccactggggaggcaggtggcactagtggcaggaggaggcagcagtaattggtattgggctgcaggacaggggagaaagcgaagacggagcagtaaggggtgtattcaacacagaacagggggtgcttgctgctgccacctggagagggttcgctggggtccactttctctgctttccttacagtcatggtacttttatgtttctgcttgactgatgtttggtcaattgctggaagtttggagtcacactttaatgcagatatcttgatagatgacttggttcagttagagcatct

SEQ ID NO: 122374 - DNA, 1093 bp, Homo Sapiens
tgtgttttttcatagcaggatttcaggcacctttattcatggcagatatttttggtcagggcagcctgcctttgaaatcgttccattacttgaggaggtcgactcctgcctaagtcacaactctcctacaaccgcaaccggccatatcatttccatttgccacttccgaggcttgagaacatcaccagggacgcaggtttcggatggtctggtcaatgctgcagtgtgtgtggggcattcgggggctccagcctgcatcacaacctactggcctgatcaaaggaggttctgtagttgggtaaccagagtggtgaattcattttatcacagaaggatctcactcctttatgttccccatgtaatttgtatacagcacaaattatttcttactttgatagatttgcaatataaacaccaagactggtgagatgagaaacttaaaaaaatcatgtttttcaaattttcaagtttttgtgtaaaagcactttgtggtgacaatcatatggatcaccttccaggtcatcagtattggcctctaggtttagcactcctggcactgcatttttgagtggccagagataaaggtattatccctgtcttctataatcaatgataacattgacactctgcaagaatttagataagaaacagtttaagtaaaatagtgttttttaaaaacttgagtctactacaagtcgttgatcatattctagccaagcaactggcatggacttaatatggtctcttttccttctctctttcttttcaagtcactagctcaaaggaaagactgattgagttttaaaatcctgccagattttttatggtaaccattgtagatgaaccacgtaggtagggtcctactgaagtattagaatctcatgcaaaactctaacaaacgcctcattacagaaggctattctgttattttctgtactgtaaaagttctgacacaagacagtggcagtggttacttttcatcgactttagcatgtgatctcagggactcagacatacgtctaagttctattctgagttttggccccggccgtaatggccgaattcccgggcatatgtccggtaccgtcgactg

SEQ ID NO: 122375 - DNA, 932 bp, Homo Sapiens
  misc_feature (816)..(850): n is a, c, g, or t
aattaattgggtgttagctcaaccagtcccggtgtggcaaagaattaaagaaccttcaaaggtctacaaacatcttactttcaccaagactaactataattgaagggtttactatttgtttaataaaaaatcacacatcaactttatccaaacagcaactactacggaaggaatgacaagggaggaaatgacttcacagaagtacactgttagaatctgacaatggttatgcaagaaccgccaaagttttagtgtttaataatgaatagcacaactgaccaaggtccaagatgtgaagataccatgttcaagaaactggggggaaatcactctacaaactaactatatactaggtgataagaatgcatactttataatataaaacctgtctacacatagtagttagctgcaaaaagccattcgatcttctcttggcttggaaaaatgccagattccagtataaattattagcaaccttcaactcttttgcgtggcaggtatcttgttttcactttccagttcttccaccccagcctgtgtcatgaggtccgcgatattcttttccagatcatcaatgcgactactcatatcatcaattctcccaatgatctggtcagacatggtctgaaatttatcttgcatctgctgcaggagtgtctgcaccaccgaggtgaggtcctgcacggtcttggggtcagtctcggccatctccccgatgcccagcttggcggtgatgtctcagaccgtaacctacacttccgtttccccggccgtaatggccgaattcccgggcatatgtccggtaccgtcgactgnnnnnnnnnnnnnnnnnnnnnnnnnnnnnnnnnnncgccgcttcctcgctcactacttcgctgcgctcgtcgttcggtatgacgcgctagcgccctatagtgagtctatacattctt

SEQ ID NO: 122376 - DNA, 886 bp, Homo Sapiens
  misc_feature (82)..(82): n is a, c, g, or t
  misc_feature (86)..(86): n is a, c, g, or t
  misc_feature (88)..(89): n is a, c, g, or t
  misc_feature (91)..(91): n is a, c, g, or t
  misc_feature (95)..(95): n is a, c, g, or t
  misc_feature (97)..(101): n is a, c, g, or t
  misc_feature (106)..(111): n is a, c, g, or t
  misc_feature (113)..(122): n is a, c, g, or t
  misc_feature (775)..(809): n is a, c, g, or t
ggggggcccggggccccaaaggaaaaggttttaagaagtttttttggaggggccagaggcgggcccaccaaatgtttttttntggntnntntttntnnnnnaaaannnnnntnnnnnnnnnntacttctcttctcaaggatctacaagtatcctatgaccttcacagaatacactctcaatctgacaatgttttgcaagaaccgccaaagttttagtgtttaataatgaatagcacaactgaccaaggtccaagatgtgaagataccatgttcaagaaactggggggaaatcactctacaaactaactatatactaggtgataagaatgcatactttataatataaaacctgtctacacatagtagttagctgcaaaaagccattcgatcttctcttggcttggaaaaatgccagattccagtataaattattagcaaccttcaactcttttgcgtggcaggtatcttgttttcactttccagttcttccaccccagcctgtgtcatgaggtccgcgatattcttttccagatcatcaatgcgactactcatatcatcaattctcccaatgatctggtcagacatggtctgaaatttatcttgcatctgctgcaggagtgtctgcaccaccgaggtgaggtcctgcacggtcttggggtcagtctcggccatctccccgatgcccagcttggcggtgatgtctcagaccgtaacctacacttcccccggccgtaatggccgaattcccgggcatatgtccggtaccgtcgactgnnnnnnnnnnnnnnnnnnnnnnnnnnnnnnnnnnncggccgcttcctcgctcactactgcgctgcgctcgttcgttcgctcgacgagctagccccatagtgatcatcatttg

SEQ ID NO: 122377 - DNA, 1369 bp, Homo Sapiens
  misc_feature (69)..(69): n is a, c, g, or t
cgttgatcatattctagccaagcaactggcatggacttaatatggtctcttttccttctctctttcttntcaagtcactagctcaaaggaaagactgattgagttttaaaatcctgccagattttttatggtaaccattgtagatgaaccacgtaggtagggtcctactgaagtattagaatctcatgcaaaactctaacaaacgcctcagtacagaaaataacagaatagccttctgtaatgaggcgtttggtagggtcctactgaagtattagaatctcatgcaaaactctaacaaacgcctccattacagaaggctattttgttattttctgtactgtaaaagttctgacacaagacagtggcagtggttacttttcatcgactttagcatgtgatctcagggactcagacatacgtctaagttctattctgagttttggcaacagagcagtgacagatatttctgaatgaacaatttttaggtgttttcagccatttgaaaagtattgccaacacactatttggtgttagctcaacagtcacgttgtgccaagaattaaagaactctaaagtctacaaacatcttacttcaccaagactaactataattgaagggtttactatttgtttaataaaaaatcacacatcaacttttatccaaacagcaactactacaaaaggaatgacaagaaaaaaaatgacttcacagaaatacactaaaaaatctgacaatgttatgcaagaaccgccaaagttttagtgtttaataatgaatagcacaactgaccaaggtccaagatgtgaagataccatgttcaagaaactggggggaaatcactctacaaactaactatatactaggtgataagaatgcatactttataatataaaacctgtctacacatagtagttagctgcaaaaagccattcgatcttctcttggcttggaaaaatgccagattccagtataaattattagcaaccttcaactcttttgcgtggcaggtatcttgttttcactttccagttcttccaccccagcctgtgtcatgaggtccgcgatattcttttccagatcatcaatgcgactactcatatcatcaattctcccaatgatctggtcagacatggtctgaaatttatcttgcatctgctgcaggagtgtctgcaccaccgaggtgaggtcctgcacggtcttggggtcagtctcggccatctccccgatgcccagcttggcggtgatgtctcagaccgtaacctacacttccgtttgtccgctcagtcgccccgggccgctgcttctcgcgacgagactccccggccgtaatggccgaattcccgggcatatgtccggtaccgtcgactg

SEQ ID NO: 122378 - DNA, 902 bp, Homo Sapiens
  misc_feature (267)..(284): n is a, c, g, or t
  misc_feature (286)..(295): n is a, c, g, or t
  misc_feature (309)..(309): n is a, c, g, or t
  misc_feature (325)..(327): n is a, c, g, or t
  misc_feature (330)..(330): n is a, c, g, or t
  misc_feature (332)..(333): n is a, c, g, or t
  misc_feature (335)..(346): n is a, c, g, or t
cgcctggggactcccccgtgagaaagaacccccgtaaaggcccctccagaactccccctcttgggaatttgttcaaaaaccctccgggttccccccgcgggcgtttttttatgtggtggggaatcccaagcccttagttccatgccccgggatctccctagggaaccacgctaaggcccatgttccccttccctacggggggccgcgccgcccaacgaaaaggttttagaaaacttttttcgagggcccgaggcggcccgacaaggnnnnnnnnnnnnnnnnnntnnnnnnnnnnaagggcccgaggcnggccggacatgttttnnnttntnntnnnnnnnnnnnntttttacaagaaccgccaaagttttagtgtttaataatgaatagcacaactgaccaaggtccaagatgtgaagataccatgttcaagaaactggggggaaatcactctacaaactaactatatactaggtgataagaatgcatactttataatataaaacctgtctacacatagtagttagctgcaaaaagccattcgatcttctcttggcttggaaaaatgccagattccagtataaattattagcaaccttcaactcttttgcgtggcaggtatcttgttttcactttccagttcttccaccccagcctgtgtcatgaggtccgcgatattcttttccagatcatcaatgcgactactcatatcatcaattctcccaatgatctggtcagacatggtctgaaatttatcttgcatctgctgcaggagtgtctgcaccaccgaggtgaggtcctgcacggtcttggggtcagtctcggccatctccccgatgcccagcttggcggtgatgtctcagaccgtaacctacacttccgtttgtccgctcagtcgcccc

SEQ ID NO: 122379 - DNA, 1072 bp, Homo Sapiens
  misc_feature (621)..(1010): n is a, c, g, or t
  misc_feature (1026)..(1026): n is a, c, g, or t
tttctgacaatacatatacaaacatctttattgacaagtgagccaataagggcacatttagtttacagataaccaaaaacatttgaaatgcataacattaaaatttccaagattcatgttgcagtacaaacatgtggcaggttaaacatcaggcataaaaaggacaaatactgaaacgcaaagggccagagatcccaagtcgcttaacactatttaaaatgttattcaactgcaaacttcagcctctggaaccatcccagatagctactggttaagtgatacgaagtaggaaaaaagaaggttctggaaggtctcaaggaggctgtgcagaaaacagcaccagatggaagcaagagcagaaagaagtcacgtcccatctttatgacaagacacagaacaagatggtcacagttcttcatgggtaaacaaaagatgtggaagacacagccaaccttaagtaacttctactgacggatgctctggcacttctctatgtagagaaggagagagaaagagagcaccaagcaggagtgggggactctatatttattgtctgccagttcttttatatgcattgtcttatttaatccttatgacaacctccctcgtgccgaattcttnnnnnnnnnnnnnnnnnnnnnnnnnnnnnnnnnnnnnnnnnnnnnnnnnnnnnnnnnnnnnnnnnnnnnnnnnnnnnnnnnnnnnnnnnnnnnnnnnnnnnnnnnnnnnnnnnnnnnnnnnnnnnnnnnnnnnnnnnnnnnnnnnnnnnnnnnnnnnnnnnnnnnnnnnnnnnnnnnnnnnnnnnnnnnnnnnnnnnnnnnnnnnnnnnnnnnnnnnnnnnnnnnnnnnnnnnnnnnnnnnnnnnnnnnnnnnnnnnnnnnnnnnnnnnnnnnnnnnnnnnnnnnnnnnnnnnnnnnnnnnnnnnnnnnnnnnnnnnnnnnnnnnnnnnnnnnnnnnnnnnnnnnnnnnnnnnnnnnnnnnnnnnnnnnnnnnnnnnnnnnnnnnnnnnncagtgagcaaaggcancaaagggcagaacgtaaaaggcgcgtgctggcgttttcataagtcc

SEQ ID NO: 122380 - DNA, 1087 bp, Homo Sapiens
  misc_feature (65)..(155): n is a, c, g, or t
  misc_feature (800)..(848): n is a, c, g, or t
  misc_feature (950)..(950): n is a, c, g, or t
aagatattttgtcatgctttgttgctcaggcgggaggacagtggcatgatcgtagctcactgcannnnnnnnnnnnnnnnnnnnnnnnnnnnnnnnnnnnnnnnnnnnnnnnnnnnnnnnnnnnnnnnnnnnnnnnnnnnnnnnnnnnnnnnnnntacaaggtctcagtatcatttttctctctttgcccatggcaagaccagcaacttaccatcaatataggtatatatgaaacttgataaaacttttcaaaaaactcaacattaagggctctaatcagaaattctcatcaatttgaacctattccagaggttgaggggagagaagtcatactgaactatataccagtgttaagccaatgttacttttaattattttttgttaccctgaaaaatgaataatatgttgccatgtgcaggtcttgccaattctgctaagtctgttcatgtgaaatggatgctgtgatatcctcagaaagtttgtcttaggtatgttaaacatggtccctgccatcttttctactgtgtattcctatcactggcatacccaaatcctttttaatgatgcagaggcagcttagcctgtgttcaaattatatgaatcctaagttagaagggggtccacattacaaagtttaccacttacttgaaaaggacacttacttaactaggaccaatatttgacttccaaacacctttactcactcattccttggtctcagcagcagcacgtcatataggtagttactcatggaggcagaagcagggggaagaaggaggtgtctctgtgagctgttttgnnnnnnnnnnnnnnnnnnnnnnnnnnnnnnnnnnnnnnnnnnnnnnnnncctcagggcttaaaggaggggatcgctcctttatctcaggaggcagttcttgatacagtgtttcactagccacatgattagctggaaaataccttcctgtcnctttcctatgctgccatacaccagtcttcattatctttgaaaaaactcggatatgtctccgcgatggatggttagttcatctgatcgatcgctgtgtagtcataaagagcactactctctgtatgctttgtgtagct

SEQ ID NO: 122381 - DNA, 946 bp, Homo Sapiens
  misc_feature (40)..(40): n is a, c, g, or t
  misc_feature (809)..(850): n is a, c, g, or t
tgttcatggcatccgcggctcagccaagctgttgtttaanaagagcaataaaaatgattatgactaaacgccttctaacttaatgctttcggacggggatccccggcaaataacgtaagaggatttttatttgtgcatgtgttcctgcaattgatctctttgatgacattctcattcatagaaagcgtttgatttatgagcgtaggacgaatcgcatccaggagctgcgcagccctggccgcggccgggacgccctgctccgcgctgagcttggggccagaaaccagccatagtccccacactccgccgccgcagctgagatttagcggaggaaggggcgagggaaggtagggagcaaacctatgaagaaacatcgcgttgtcattggaacttccaagcctttgctgttaagagccaggttcttaaatcaacccgccccacacacatgttgcttacatgctgcgttttctcacggtctgttttgcctgaacccatcaacagctgggagattaatcaaccacactgaaaatgtggagggatttatgggggagggggttgaaatgtgggtgtttgaaacaaaagtgtataaacaaatgaattgttgataacttagttattgacctggagactggtagcttattaaagaaactccgtgttactcattcctggagttgggggtttctgtaggcactttatttctccactttcaagagcttgggcttggcccaaatcttagactgtcctattctgcctctattaccaatttaaatctatggcttgaacctgtgcactgaaaatcaaatcctttnnnnnnnnnnnnnnnnnnnnnnnnnnnnnnnnnnnnnnnnnncacttattagaagccctagtcattttttggctttctgttttgttgctgtccattgaagactttgaacatgccgccttaataaatgtattaaaattg

SEQ ID NO: 122382 - DNA, 1194 bp, Homo Sapiens
  misc_feature (636)..(636): n is a, c, g, or t
cagggtcagaaaaatcaatatttcattcttaaacctgtttacattgctaataatagatcgttaatgcttcgaagtcaggttagcaagttgagatttaaaatggtgtgtttctacaccctaggttataaattaacgcaggttctagagagagagaaaagcactttaaatgaaatatcaataaaatgtgatctagggtgtgtcactgggttgttgcttttcccccctcccttgttaggtctccccatgtttatttttccctttctgagctctcttctgatgcctacttacttaccgtgagaaaacgcagcatgtaagcaacatgtgtgtggggcgggttgatttaagaacctggctcttaacagcaaaggcttggaagttccaatgacaacgcgatgtttcttcataggtttgctccctaccttccctcgccccttcctccgctaaatcttagctgcggcggcggagtgtggggactatggctggtttctggccccaagctcagcgcggagcagggcgtgccggccgcggccaggggtgcgcagctcctggatgcgattcgtcctacgctcataaatcaaacgctttctatgaatgagaatgtcatcaaagagatcaattgcaggaacacatgcacanataaaaatcctcttacgttatttgccggggatccccgtccgaaacattaagttagaaggcgtttagtcataattcatttttattgctctttttaaacaacagcttggctgagccgcggatgccatgaacagttcagggcctcggcgtcattttatctcctccttattcctttcctttctagcataagagccctgaaagaggcgttttgagccaagagaaccgcttgtaggcgatcattttaagcgtaaccaagctcgcctttcacccagtctcccaaggcgttgaaagagaccagctccagtcttggggcgctgacctacttgcctagagggccaaggatctcctactcggtggaacggcccccagaatttcttgggggaggggtgtggggaaagaactgagctacagaagcctaagggctagaggccaggggaggctgcctttgtgtgctgttcccagggagcggcgctctgggctgccaggcgaggcatagccagcccggctgcgagcacccggcctgcggggagccgggaacagtaagcggagaagggcggccgc

SEQ ID NO: 122383 - DNA, 1854 bp, Homo Sapiens
agttttctccagcttgcgtggtgcgtgctggtgtctcgctgcttggtcctctcctgttcttcggcccccggttgccagattgcttttcttccaggcctcaaccagatttgttgaaagacattcaagattacgaagtttagatgaccaaaatggatatccgaggtgctgtggatgctgctgtccccaccaatattattgctgccaaggctgcagaagttcgtgcaaacaaagtcaactggcaatcctatcttcagggacagatgatttctgctgaagattgtgagtttattcagaggtttgaaatgaaacgaagccctgaagagaagcaagagatgcttcaaactgaaggcagccagtgtgctaaaacatttataaatctgatgactcatatctgcaaagaacagaccgttcagtatatactaactatggtggatgatatgctgcaggaaaatcatcagcgtgttagcattttctttgactatgcaagatgtagcaagaacactgcgtggccctactttctgccaatgttgaatcgccaggatcccttcactgttcatatggcagcaagaattattgccaagttagcagcttggggaaaagaactgatggaaggcagtgacttaaattactatttcaattggataaaaactcagctgagttcacagaaactgcgtggtagcggtgttgctgttgaaacaggaacagtctcttcaagtgatagttcgcagtatgtgcagtgcgtggccgggtgtttgcagctgatgctccgggtcaatgagtaccgctttgcttgggtggaagcagatggggtaaattgcataatgggagtgttgagtaacaagtgtggctttcagctccagtatcaaatgattttttcaatatggctcctggcattcagtcctcaaatgtgtgaacacctgcggcgctataatatcattccagttctgtctgatatccttcaggagtctgtcaaagagaaagtaacaagaatcattcttgcagcatttccgtaactttttagagaaatcaactgaaagagaaactcgccaagaatatgccctggctatgattcagtgcaaagttctgaaacagttggagaacttggaacagcagaagtacgatgatgaagaatatcagcgaagatatcaaatttcttttggaaaaaacttggagagagtgtccaggaccttagttcatttgatgaatacagttcagaacttaaatctggaagggttggaatggaagtcctgtgcacaaatctgaggaaattttggaagagagaatgcctgtgaggttaaatgagaagaattatgaaactcttgaaaatctttgacaaactttttggaagtgtcagatgaatccccaagtcttagctgttgctgctcacgatgttggagaatatgtgcggcattatccacgaggcaaacgggtcatcgagcagctcggtgggaagcagctggtcatgaaccacatgccgtgcagaagctcatggtgcacaactgggaataccttggcaagcagctccagtccgagcagccccagaccgctgccgcccgaagctaagcctgcctctggccttcccctccgcctcaatgcagaaccagtagtgggagcactgtgtttagagttaagagtgaacactgtttgattttacttggaatttcctctgttatatagcttttcccaatgctaatttccaaacaacaacaacaaaataacatgtttgcctgttaagttgtataaaagtaggtgattctgtatttaaagaaaatattactgttacatatactgcttgcaatttctgtatttattgttctctggaaataaatatagttattaaaggattctcactcc

SEQ ID NO: 122384 - DNA, 730 bp, Homo Sapiens
ttttggagtgagaatcctttaataactatatttatttccagagaacaataaatacagaaattgcaagcagtatatgtaacagtaatattttctttaaatacagaatcacctacttttatacaacttaacaggcaaacatgttattttgttgttgttgtttggaaattagcattgggaaaagctatataacagaggaaattccaagtaaaatcaaacagtgttcactcttaactctaaacacagtgctcccactactggttctgcattgaggcggaggggaaggccagaggcaggcttagcttcgggcggcagcggtctggggctgctcggactggagctgcttgccaaggtattcccagttgtgcaccatgagcttctgcacggccagcagagcattatagcggacctgctggtcttcatgatgcatgtggttcatgaccagctgcttcccaccgagctgctcgatgacccgtttgcctcgtggataatgccgcacatattctccaacatcgtgagcagcaacagctaagacttggggatcatctgacacttccaaaagttttgtcaagattttcaagagttcataattcttctcatttaacctcacagcattctctctccaaaatttctcagatttgtgcacaggactccattccaaccttccagatttaagttctgaactgtattcatcaaatgaactaaggtcctggacactctcttcaggtgtgcc

SEQ ID NO: 122385 - DNA, 448 bp, Homo Sapiens
  misc_feature (448)..(448): n is a, c, g, or t
ctgataggttggtggtcctttttatttatttgtaggaatgctttgtatgtggtatggtttggctgtgtgccctcattcaaatctcatctcgaattgtgatcccacatgttgagggagggaggtgattggatcacggggggcggttcccccatgctgttcttatgataatgagtgagttctcacgagacctggtggttttatttggggctcttccccactttactttctcttctctctctcctgccaccttgtgaagaagagcatgtttgcttcccctttcgccatgattgtaagtttcccgaggcctccccagccctacagactgtgaatcaattaaacctcttttgtttataaattacccagtctcagggaagttcttgaaagcagtgtgaaaacaggctaatacagtatatgaggatattagctctgtttgttatctatgttaccn

SEQ ID NO: 122386 - DNA, 687 bp, Homo Sapiens
tttttttgcactcaatgaacaaatctttgttgtttattttaaaattcaagacaatttttttgcaaatgctgattcaaaacgtaccaatccccatctatcatgcctatgccaatacaatctgtcacaaaaaagtttgcttctcattgtcacatagctatggggactggtggccttctaaaatcactgtccagctgctgcaagtgtgaggccagcaacccacggcagggatgcaggagggaagccatggctaagctgtgggcctggacaaaggccacagatggggttgaaaggtgagaagcggtaagctagaggagacagacggcgttgccattaaaaacaattcaacttcattttaatgttgctatgtaagttcacaataaaatccctggaagttcaaattggaaagagcagtttggggtcatgggctcaacaatataaaggcagattcagtgaggggtaagggtagtggctctgggggcagactgacctagatttgaatgccagttgtaccagactcaagacaccttgggtaagtggttttatgaagtacctcagttcttcatcagtagaaagagtgctaacacctccataagacttttgtatggattgagtaagataatgcatgttaaaccacttgtatagtttctggctaactgtaaacaagatgttctagaagttctagttatc

SEQ ID NO: 122387 - DNA, 889 bp, Homo Sapiens
tcatacataagccttatatttttaataaaaaataaacagtctctgacaagcagttttctgaatcccaaaacaaaggaaaagggagggggagaggtgaaggggtcagctagggtaaaggagtgaagaaggctcagattacccctgccattctgccagggcagaagggatcagagtctgccccaactgaagcaagaagaaaggtggtcagacttcaggaaagacttcctgggagtcagcggtgcacgactggtaagggaagcaggagggagcagatccctgcatgaccctgggagaagggagtgttggtgtccaaagcggcagcttcagagtggagtttccaggagtggcatgttagcatatgattgtttagatgtttggtgttcattaccatagggtcctgggacaggcaggttttttagggtctcttgaaacactgtgtttctggagggtccctggaatggccagaactgaaggatcctctccaggttcttcaatatcagtgtaggagcaggtctgggggtagcccccaccctgttagagagctcatgtgcttggtagaagggagtcccataggggaggcagactgctgtgcatcaccctgctgagtgtcatcagtgatgcagagtagcagaagctcctctcaggggagaaaggtggtcttttgtgctgctgtcatcctagtcagggctgtgcttgggccgcccagccagcatggccaggtgcctgcaccgcagccccggcctgtgcctagagtttaagctacctcagtgcctaggcagttgttgtcagcgtccacatcactggcagaggtcctgcattccttgggagactggaggtgttgctctctgctttacggggccttctccccagggcgcaaggtctcacagcc

SEQ ID NO: 122388 - DNA, 431 bp, Homo Sapiens
tttttcatttttaaagagactcctgctatgttgcacagacttgtgaattcctggtttcaagttatctttccccctatgtcactcaagtaatgtggactacactcatgtgacaccatgcccatctttatgttgtgtatcttatttttgttttgttttactcttgaatcagctcagtctgaaaatctgtcttttaattcatggggattttttagaatgatttcttggagggttttgtcttttgaatgtgtggtcccttctctgcctagaatttttttgtttgaatgagacatggtcttgctgttgtccaggttggagagcagtggtgcaactatagctcactacattcttgaatttctgggctcaagccatcttcccatctcagctttcagaatatcttggctacaggcatgtgacactatgcccagataatt

SEQ ID NO: 122389 - DNA, 1473 bp, Homo Sapiens
  misc_feature (692)..(790): n is a, c, g, or t
  misc_feature (1434)..(1434): n is a, c, g, or t
cctctctctgtgttttactactcaagcttccggtctcacgcgctcggccagtctggatgttttttgttttatcttgtccttatctctttagtttacgtagtgacttggcgtggcgggcgcgtgccgttagtctactttcttgtggcttctccgctctgcgctgtctcgtctcatctgttaaggttaatctgtctttgccgtgttgtgtggctcccttaactgcactccttccgcttcacaactcgtcagtttgctgttccagtgtttgactgtgtgtcgttgtggttcctgtcgtatgtcggccgcgtcttagccgtctggtgtgcggttgatttgtttttgtggtgtctgttcgtaggtgggtatgagtgttcttgtctgcccgtttacattgtgttctatcgttcccgttccttctattccattattattgttgtgtgttttgattctaataattagtatctataccgtgataactacaagttgctgtatttgccatcctcagaatcgaaatttctagtttacaagtagtacgactgggtctctcgactgcttttggatatgtacaattaggcgactcctcaatcaagtgccggacccgtctttctgttcaaaatcagaggcggcggctcgcggtatattcggtcgcctcgctcagtggtagctagtggtcgaagtgcgcgcccccttgnnnnnnnnnnnnnnnnnnnnnnnnnnnnnnnnnnnnnnnnnnnnnnnnnnnnnnnnnnnnnnnnnnnnnnnnnnnnnnnnnnnnnnnnnnnnnnnnnnncagaagcaaggacatgtttattcagatccatggtcgttacaagcttcatttttggtcacaggccctaaaatgccattatgctcagtttacatcaaaatacaaagcccaacatttacaatttcaaaaacattaaagcaaacccccaaaaccccacaccgaaaacaaaggcttggtttggaaatcaccactgagatgctgttctccctcgcatgtcgcctgtggggtgaatgaaggtgaagaccccgtgctggtttctgtcagagaatctgtagttgtatattttgaatacttaagtaccactgaacggttgccatgtctttgagcacttgatgttactgaagtgacaatgcttctgaccatctttggctgcagagcagaaactggcagaatccgaccccatcgacccagcagtgtccccaacgcctgaggaccagcacccatctgtgacaaggcacaggggtccgcgatgttggccactgctttgggtgatgtgctcaatggcttggggtctgcggtgaagcccctgggctctgggagggtcttaggctcctgaaacatggaattctacggcccagtcttggaacagctgggagaacatgaagaacgcacctcagagtgaagaatcaggagagccactctctggntttctcacaactctagaaactttgatcctcgtgccgaat

SEQ ID NO: 122390 - DNA, 2288 bp, Homo Sapiens
  misc_feature (775)..(775): n is a, c, g, or t
tgtaatggatcccacagtggtttgcataagaaggccattttcaactctccactggaggctgctatggcgttccctcacctgcagcagcccagctttctactggctagcctgaaagctgactctataaataagccctttgcacagcagtgccaagacttggttaaagtcattgaggactttccagcaaaggagctgcacaccatcttcccatggctggtagaaagcatttttggcagcctagatggtgtccttgttggctggaacctccgctgcttacaggggcgcgtgaatcctgtggagtacagcatcgtgatggaatttctcgaccctggtggcccaatgatgaagttggtttataagcttcaagctgaagactataagttcgactttcctgtctcctacttgcctggtcctgtgaaggcgtccatccaggagtgcatcctccctgacagtcctctgtaccacaacaaggtccagttcacccctactgggggccttggtctgaacttggccctgaatccgttcgagtattacatattcttctttgccttgagcctcatcactcagaagccacttcctgtgtccctccacgtccgtacttcagactgtgcctatttcatcctggtggacaggtacctgtcatggttcctgcccaccgaaggcagtgtgcccccaccactctcctccagcccaggggggaccagcccctcaccacctcccaggacaccagccataccctttgcttcctatggcctccaccacactagcctcctanagcgacacatctctcatcagacgtctgtgaatgcagaccccgccttccacgagatctggaggtcagaaactctgctccaggtttttgttgaaatgtggcttcatcactattcccttggagatgtatcaaaaaatgcagtcccctcatgccaaagctggaggttctgcactaccggactcagtggtctcccagcgccctctacaggcccggcccaacccagcctccaggccctccacgcctaccaagagtcgttcacgcctactgaggagcatgtgttggtggtgcgcctgctgctgaagcacctgcacgcctttgccaacagcctgaagccagagcaggcctcaccctccgcccactcccacgccaccagccccctggaggagttcaaacgggctgctgtcccgaggttcgtccagcagaaactctacctcttcttgcagcattgctttggccactggcccctggacgcatcgttcagagctgtcctggagatgtggctgagctacctgcagccgtggcggtacgcgcctgacaagcaggctccgggcagcgactcccagccccggtgtgtgtcggagaaatgggcaccctttgtccaggagaacctgctgatgtacaccaagttgtttgtgggctttctgaaccgcgcgctccgcacagacctggtcagccccaagcacgcgctcatggtgttccgagtggccaaagtctttgcccagcccaacctggctgagatgattcagaaaggtgagcagctattcctggagccagagctggtcatcccccaccgccagcaccgactcttcacggcccccacattcactgggagcttcctgtcaccctggccaccagcggtcactgatgcctccttcaaggtgaagagccacgtctacagcctggagggccaggactgcaagtacaccccgatgtttgggcccgaggcccgcaccctggtcctgcgcctcgctcagctcatcacacaggccaaacacacagccaagtccatctccgaccagtgtgcggagagcccggctggccactccttcctctcatggctgggctttagctccatggacaccaatggctcctacacagccaacgacctggacgagatggggcaagacagtgtccggaagacagatgaatacctggagaaggcccctggagtacctgcgccagatattccggctcagcgaagcgcagctcaggcagttcacactcgccttgggcaccaccccagatgagaatggaaaaaagcaactccccgactgcatcgggggtgaggacggactcatccttacgcccctgggggcggtaccagaacatcaatggggctgcaagggttgaaattgagtaccagggggacccgggagctgcagccccttccggagctatgagatcgcccagctttggcccgccccctcttaagggtgggggtctggcattcaaccccagatttggcagggacaaatggcgggctccgggggttcccgggaatgaatttcctcggggg

SEQ ID NO: 122391 - DNA, 2303 bp, Homo Sapiens
gggtattttattgggcgcccccgcgtttgtaggtgttagattcatattggtgtttttgttggtgatgtgtttttgttccagaaggcaaggacatggttattcagaatccatgatcgttacaagcttcattttgggcacagggcgcctaaaagcccaattattctccagttaacatcgaaatgaagaggcccaacattgacaattgcaaaaacagttaaggctaccccccttatccccacatccgaaaacaagggcttggtttggaaatcaccactgagatgctgttctccctcgcatgtcgcctgtggggtgaatgaaggtgaagaccccgtgctggtttctgtcagagaatctgtagttgtatattttgaatacttaagtaccactgaacggttgccatgtctttgagcacttgatgttactgaagtgacaatgcttctgaccatctttggctgcagagcagaaactggcagaatccgaccccatcgacccagcagtgtccccaacgcctgaggaccagcacccatctgtgacaaggcacaggggtccgcgatgttggccactgctttgggtgatgtgctcaatggcttggggtctgcggtgaagcccctgggctctgggagggtcttaggctcctgaaacatggaattctacggcccagtcttggaacagctgggagaacatgaagaacgcccctcacagtgaagaatcaggacagccactctctggttttctcacaactctagaaactttgattctttcctggagtggagacttaagccactgtcctggtcccacacagagagaggaagcgccacaacccactctgccaacctcaaggccagccagtggggaggccaggcccaggtggctgttggcaggctggctcccaagcttggtgcagcagagtagccaaatgggcactggaaaaaaaggccccgagagctggcttggccgtgagtccttggcggagggagggaaaggccggcgctgagctctgcgctgtcacagagcgtagctgttgagccctggcagctactcctttgctggggcccacctgccttcctttcttggttgcgtttcctccagatgcctctgcggctgcaggaaccccgctccagaagcccgaggatgaccgtgttccctcctggaggggcttcccaggtcctctcagcccaagggtggggctgtgtggcaaatccctccagcctgctctgaaggcagctgacaccttcagggctggtgcagcttcccccgctcggtcagcagtgtcatggcagaggcgtagaggacatagcccagggtgagcagcagcgtgcatgggaggggcccgacgcagaacagagaggccacgaagaaggccagcagcagcgagaccagcgtccggtaactgcccaggaagcgcaggctgagcctggggccgcgggtgtggccggccacctgcctccgccccacagggctcagcaggtgcctgctggccagcccaggttctgtgaggtggtagcgacagaagctgccgaggaagtcatcccgggaacacagagccgccatctgtcctgcaaatctgtggttgatggcagacgacagcctaaagagtgtgcggaccaagctggcgatctcatagctccggatgggctgcagctccgggtccccctggtactcaatttcaaaccttcgcagcccattgatgatctggtaccgccccaggggcgtaaggatgagtccgtcctcacccacgatgcagtcggggagttgcttttttccattctcatcctgggtggtgcccaaggcgagtgtgaactgcctgagctgcgcttcgctgagccggaatatctggcgcaggtactccagggccttctccaggtattcatctgtcttccggacactgtcttgccccatctcgtccaggtcgttggctgtgtaggagccattggtgtccatggagctaaagcccagccatgagaggaaggagtggccagccgggctctccgcacactggtcggagatggacttggctgtgtgtttggcctgtgtgatgagctgagcgaggcgcaggaccagggtgcgggcctcgggcccaaacatcggggtgtacttgcagtcctggccctccaggctgtagacgtggctcttcaccttgaaggaggcatcagtgaccgctggtggccagggtgacaggaagctcccagtgaatgtgggggccgtgaagagtcggtgctggcggtgggggatgaccagctctggctccaggaatagctgctcacctttctgcctcgtgccgaattcgccacccaggcctcgct

SEQ ID NO: 122392 - DNA, 1076 bp, Homo Sapiens
  misc_feature (72)..(89): n is a, c, g, or t
  misc_feature (817)..(817): n is a, c, g, or t
  misc_feature (827)..(827): n is a, c, g, or t
  misc_feature (852)..(852): n is a, c, g, or t
  misc_feature (887)..(887): n is a, c, g, or t
  misc_feature (900)..(900): n is a, c, g, or t
  misc_feature (916)..(916): n is a, c, g, or t
  misc_feature (1013)..(1013): n is a, c, g, or t
  misc_feature (1016)..(1016): n is a, c, g, or t
  misc_feature (1022)..(1022): n is a, c, g, or t
tttaacgacggccagtgccattctcaattaacctcactaaagggaataagcttgcggccgcggctgtaggcnnnnnnnnnnnnnnnnnnctagaatatagcatcttcatttatttctgaacgtttaacaaggagaggcatctgccttcagtttccactccagcgcagcggctcgggatgtgaggtgtctgctcaggagttccccggctgttcttccatggagcggccaggtcacaggtgggaggctgctgggacatcgtgagggtactgctaatggccgttacggggacctggggtgcgtcggaaacacgcctttagattccctttctcagaggcactgtctggacggtacctgtgttagaatggtctctcccctgagtgtgcccgcatgtgggccctgaggtggccgggctggtggaagctctttccgcactcgatgcagacgaactctcctggccgggcctgcgtccggagtgtccctctgtgctccaacccagggccgctgacaccccatccctggtagagggtcgcaaagtcctttggaatgtacgtcttaaagatgttgaggatgtccaggcgcttctcatgcccctcggccaccggctcctgtttgatggagtgtaggacggggggcgccccagccacgccgggctgggcctgcaaggccgcgtcgcccctggaccccgcagcacaggtggccagagtcctcagctcctgggctgccttcgaggggggctcgcggggaggtataggaggagcgcccccttcggcctttgcaggaggtggccctgaggctgagcactgaatttggctttcanggagtccggngcactgtgcttacttgtgggggcanagcagccccgctggggggaccccaacttctcacangcttgctattggncgagggctgcgcgcancccgggcgatgacggtgggcgtaggggtgggcgctctgctgaagccccgccacccggggaacggcaccggttggagctacctcctgcctgggctggncangggccntgtgtggcgcgcatgtgctcctggcgtgacagctcgtgcgattctggctcgagg

SEQ ID NO: 122393 - DNA, 988 bp, Homo Sapiens
ggggtaacttttcttggagaggtgggcccccttttgcccgacccctttaaaccccccaagcccaagggtgcatttgttgttcccggaaagtccagggcccaattttgcgcgggtccccctggggtccccccaaagaggtccaagggtaatcatcctgaattcggaaagaactccccccatcttccagcaggatcttcttgccattggcgtgctcctttctcgccatcaattccttgccatgtacatggctgcagctataggaaggtagaaggagtagaaagctgtcttgtacttgacaatagatttttacctctttttcagtgaatctgacaagatcccacattgccctggggggctgtgaggaggtccagggtctgcccaatctcagtctgataggaactctgcaggaagagctcgatcaggttcaggtaatagggctgctcccggcaatagagcttcagcaggcggtagatacatgcttccaggaggttagcatcattgatggcatccaaacccacgcccggcttctgataccagcagatctgtccccggcgggtaagggatgaatccatgatgtcatctgccaccaggaagaaagcttgcagcagttccacacaccagcccacagtccaggcccgctggagactatcagcatcctgtttccttggctccaccagctcccggaatgctactaccaccgtcaaaccccggttatacttgcctccaatggcattgtactccaggacctccttgagccgggcaatagcatctcctatctctgggtgccccatctcatcctcagtcagcaccctaacgatctgggagaagtgctgaacgaaatcctgcttttcttgggcataaacatctgaattctggtctccgttcattctgttcccagatacggattcctgctcggtcccgcttgttggcgggtactcctaaaagcagaatccgctccgcgatcggctctgtgggtcgagtagttccc

SEQ ID NO: 122394 - DNA, 836 bp, Homo Sapiens
  misc_feature (803)..(803): n is a, c, g, or t
taaggctaggtagcgaggcctgggtgttgaattcggcacgaggctcgacccacagagccgatcgcggagcggattctgcttttaggagtacccgccaacaagcgggacctgagcaggaatccgtatctgggaacagagccctttgctcctccctcagaatgaacggagaccagaattcagatgtttatgcccaagaaaagcaggatttcgttcagcacttctcccagatcgttagggtgctgactgaggatgagatggggcacccagagataggagatgctattgcccggctcaaggaggtcctggagtacaatgccattggaggcaagtataaccggggtttgacggtggtagtagcattccgggagctggtggagccaaggaaacaggatgctgatagtctccagcgggcctggactgtgggctggtgtgtggaactgctgcaagctttcttcctggtggcagatgacatcatggattcatcccttacccgccggggacagatctgctggtatcagaagccgggcgtgggtttggatgccatcaatgatgctaacctcctggaagcatgtatctaccgcctgctgaagctctattgccgggagcagccctattacctgaacctgatcgagctcttcctgcagagttcctatcagactgagattgggcagaccctggacctcctcacagccccccagggcaatgtgggatcttgtcagattcactggaaaagaggtacaaaatctattggtcaaagtacaaggaacagcttttctactccctttctaccccttcctaatagnctggccagccatgttaacattggccaagggaaa

SEQ ID NO: 122395 - DNA, 749 bp, Homo Sapiens
  misc_feature (665)..(665): n is a, c, g, or t
ggtcaggtagcgaggcctgggtgtgtgaattcggcacgaggcgcggagcggattctgcttttaggagtacccgccaacaagcgggaccgagcaggaatccgtatctgggaacagaatgaacggagaccagaattcagatgtttatgcccaagaaaagcaggatttcgttcagcacttctcccagatcgttagggtgctgactgaggatgagatggggcacccagagataggagatgctattgcccggctcaaggaggtcctggagtacaatgccattggaggcaagtataaccggggtttgacggtggtagtagcattccgggagctggtggagccaaggaaacaggatgctgatagtctccagcgggcctggactgtgggctggtgtgtggaactgctgcaagctttcttcctggtggcagatgacatcatggattcatcccttacccgccggggacagatctgctggtatcagaagccgggcgtgggtttggatgccatcaatgatgctaacctcctggaagcatgtatctaccgcctgctgaagctctattgccgggagcagccctattacctgaacctgatcgagctcttcctgcagagttcctatcagactgagattgggcagaccctggacctcctcacagcccccccgggcaatgtgngatcttgtcagattcactgaaaagaggtacaaaatctattggtcaagtacaaggaccagcttttctactcccttcctaccctta

SEQ ID NO: 122396 - DNA, 928 bp, Homo Sapiens
ttcggcctgcgccgggccaggcaggcccgatggagccccccccgcgtttctgcatgcgtctttccacatctccagactgccactatagaagtaagattagacttcttgactgacatagattgacctcttttcagtgaatctgaccagatccacattgccttgggggctgtgaggagtccagggtctgcccaatctcagtctgataggaactctgcaggaagagctcgatcaggttcaggtaatagggctgctcccggcaatagagcttcagcaggcggtagatacatgcttccaggaggttagcatcattgatggcatccaaacccacgcccggcttctgataccagcagatctgtccccggcgggtaagggatgaatccatgatgtcatctgccaccaggaagaaagcttgcagcagttccacacaccagcccacagtccaggcccgctggagactatcagcatcctgtttccttggctccaccagctcccggaatgctactaccaccgtcaaaccccggttatacttgcctccaatggcattgtactccaggacctccttgagccgggcaatagcatctcctatctctgggtgccccatctcatcctcagtcagcaccctaacgatctgggagaagtgctgaacgaaatcctgcttttcttgggcataaacatctgaattctggtctccgttcattctgagggaggagcaaagggctcgaggttcctctgtccacgcttggcaccagcagcgggcactgtgccaggccaggactgggtacccgtgcaccagggagggccgccgtagggaacccagccacctctcccggggtgcccagtagggggctggcagcaggaagacccccacagatctcaaccagccctcgtgccgattaaccaccaggcctcgtaccttagccgtaacgtt

SEQ ID NO: 122397 - DNA, 1010 bp, Homo Sapiens
  misc_feature (139)..(151): n is a, c, g, or t
ttcaaacccctccttttacccccctctttccccttcctttcccagttgttttgggcctccaacacaccccccaccttgttcccgatccccccattcccgcacgggctcccaaaagcccagttaactccgattcgaagannnnnnnnnnnnnagatttcttgcatgccgtctcttttccccatcattcctcccattgtacatgcctccactataggaagttagaaggagtagaaacctgtcttgtactttgacaatagatttgtacctcttttccagtgaatctgacaagatccacattgccttgggggcctgtgaggaggtccagggtctgcccaatctcagtctgataggaactctgcaggaagagctcgatcaggttcaggtaataggctgctcccggcaatagagcttcagcaggcggtagatacatgcttccaggaggttagcatcattgatggcatccaaacccacgcccggcttctgataccagcagatctgtccccggcgggtaagggatgaatccatgatgtcatctgccaccaggaagaaagcttgcagcagttccacacaccagcccacagtccaggcccgctggagactatcagcatcctgtttccttggctccaccagctcccggaatgctactaccaccgtcaaaccccggttatacttgcctccaatggcattgtactccaggacctccttgagccgggcaatagcatctcctatctctgggtgccccatctcatcctcagtcagcaccctaacgatctgggagaagtgctgaacgaaatcctgcttttcttgggcataaacatctgaattctggtctccgttcattctgttcccagatacggattcctgctcggtcccgcttgttggcgggtactcctaaaagcagaatcccgctccgcgatcggctctgtgggtcgagtagttcccgccggacgcgtgggtcgacgatatcccgggattccgacccgtaccagcctgctttttgtacacctgtt

SEQ ID NO: 122398 - DNA, 907 bp, Homo Sapiens
ttcctcaggaccgactttcggagccctcaaacaggacccccaccacccattgttccggatgcacccattttcccgtcaccctgggtccccaaagagtcaagtaatcatcctgaatctgaaagacttcccccatctccagcaggatcttcttggcattgcgtgctccttctcgccatcaattcctgccatgtacatggctgcagctataggaaggtagaaggagtagaaagctgtcttgtacttgacaatagatttgtacctcttttcagtgaatctgacaagatccacattgcctgggggctgtgaggaggtccagggtctgcccaatctcagtctgataggaactctgcaggaagagctcgatcaggttcaggtaatagggctgctcccggcaatagagcttcagcaggcggtagatacatgcttccaggaggttagcatcattgatggcatccaaacccacgcccggcttctgataccagcagatctgtccccggcgggtaagggatgaatccatgatgtcatctgccaccaggaagaaagcttgcagcagttccacacaccagcccacagtccaggcccgctggagactatcagcatcctgtttccttggctccaccagctcccggaatgctactaccaccgtcaaaccccggttatacttgcctccaatggcattgtactccaggacctccttgagccgggcaatagcatctcctatctctgggtgccccatctcatcctcagtcagcaccctaacgatctgggagaagtgctgaacgaaatcctgcttttcttgggcataaacatctgaattctggtctccgttcattctgagggaggagcaaagggctctgttcccagatacgcctcgtgccgaattcacacccagccctcgcacctagcc

SEQ ID NO: 122399 - DNA, 1690 bp, Homo Sapiens
  misc_feature (215)..(225): n is a, c, g, or t
cccgtctctcgttatggtacgcccaacacccccccgcgtcgctagagcgttgaaagaaacactagtcccccgcgggcacaagaattttgtgcggcgccgacagggggtttcgtagggttgtgttccaccagcagtttaccgggcgaaaaaaatgtttttagttccccgagagggggcaaaaatctcccggggggggactgcgcccccaattagtnnnnnnnnnnnaaaaaaaagtgttcctttccccaagagttccccaggtagcacgtttttccccaccccgagggttgtaaaaaaggggggccccggcccatgtttataaaaccggccccccttatgggggcccccttttcacaaaaaaaatggggacccgtaaaacttggccccctggggggattattttagaggcggccccccctttttatggggtcttttgtactattgtttacgtgggctttttagaggtttttgcacttgcggcggttcggtatatgtgttttttttaaggttacacgattatttattgagagcctcctctccccgcccttgcaatctctaggtcactttctccgcttgtagattttgcgcgcaagccccagaaagacggctgggggcaggggtgctgcgtactgttcaatgagagccataatgtggctgtaactgtcttcctcatattgcaagaacactgctggcagatccagctcctcatatagcgccttcacccgggccactttctcagcctccttctgcccgtaattttccttcaggatctggtactgttctggagtggcccgttgcagacactgaaccaccagccagctgcatttgttgtcctggatgtcagtgccaattttgccggtcacactggggtccccaaagaggtcaaggtaatcatcctgaatctgaaagaactcccccatctccagcaggatcttcttggcattggcgtgctccttctcgccatcaattcctgccatgtacatggctgcagctataggaaggtagaaggagtagaaagctgtcttgtacttgacaatagatttgtacctcttttcagtgaatctgacaagatccacattgccctggggggctgtgaggaggtccagggtctgcccaatctcagtctgataggaactctgcaggaagagctcgatcaggttcaggtaatagggctgctcccggcaatagagcttcagcaggcggtagatacatgcttccaggaggttagcatcattgatggcatccaaacccacgcccggcttctgataccagcagatctgtccccggcgggtaagggatgaatccatgatgtcatctgccaccaggaagaaagcttgcagcagttccacacaccagcccacagtccaggcccgctggagactatcagcatcctgtttccttggctccaccagctcccggaatgctactaccaccgtcaaaccccggttatacttgcctccaatggcattgtactccaggacctccttgagccgggcaatagcatctcctatctctgggtgccccatctcatcctcagtcagcaccctaacgatctgggagaagtgctgaacgaaatcctgcttttcttgggcataaacatctgaattctggtctccgttcattctgttccccctcgtgccgaattcgccacccaggcctcgctaccttaaaacccgttagagttactgcc

SEQ ID NO: 122400 - DNA, 819 bp, Homo Sapiens
  misc_feature (801)..(801): n is a, c, g, or t
ttgggtccccttctttttccaaggggaattcctggacaaagaatcccaccatttgcccctggggggggctgtaagggaggttccagggttctgccccaatcttcagtctgataggaacttctgcaggaaggagctcgatcaggttcaggtaatagggctgctcccggcaatagagcttcagcaggcggtagatacatgcttccaggaggttagcatcattgatggcatccaaaccccacgcccggcttctgataccagcagatctgtccccggcgggtaagggatgaatccatgatgtcatctgccaccaggaagaaagcttgcagcagttccacacaccagcccacagtccaggcccgctggagactatcagcatcctgtttccttggctccaccagcttcccggaatgcttacttaccaccgtcaaaccccggttatacttgcctccaatggcattgtactccaggacctccttgagccgggcaatagcatctcctatctctgggtgccccatctcatcctcagtcagcaccctaacgatctgggagaagtgctgaacgaaatcctgcttttcttgggcataaacatctgaattctggtctccgttcattctgagggaggagcaaagggctctgttcccagatacggattcctgctcggtcccgcttgttggcgggtactcctaaaagcagaattcgctccgcgatcggctctgtgggtcgagtagttcccgctctccccacgctaagggcggaaatatataattagactacaactcccaatgtgcccgcgggagggancctctgccgaattcggca

SEQ ID NO: 122401 - DNA, 1019 bp, Homo Sapiens
  misc_feature (99)..(99): n is a, c, g, or t
  misc_feature (120)..(120): n is a, c, g, or t
ggcccctggaacccccccagcccaaggtggcatttgttgtcctgggatgtcagtgccaattttgcccggtcacaactggggtcccccaaagaggtcaanaggtaatcatcctgaatctgnaaaagaactccccccatcttccagcaggatcttcttggcattggcgtgctccttctcgccatcaattcctgcccatgtacatggctgcagctataggaaggtagaaggagtagaaagctgtcttgtacttgacaatagatttgtacctcttttcagtgaatctgacaagatccacattgccctggggggctgtgaggaggtccagggtctgcccaatctcagtctgataggaactctgcaggaagagctcgatcaggttcaggtaatagggctgctcccggcaatagagcttcagcaggcggtagatacatgcttccaggaggttagcatcattgatggcatccaaacccacgcccggcttctgataccagcagatctgtccccggcgggtaagggatgaatccatgatgtcatctgccaccaggaagaaagcttgcagcagttccacacaccagcccacagtccaggcccgctggagactatcagcatcctgtttccttggctccaccagctcccggaatgctactaccaccgtcaaaccccggttatacttgcctccaatggcattgtactccaggacctccttgagccgggcaatagcatctcctatctctgggtgccccatctcatcctcagtcagcaccctaacgatctgggagaagtgctgaacgaaatcctgcttttcttgggcataaacatctgaattctggtctccgttcattctgagggaggagcaaagggctctgttcccagatacggattcctgctcggtcccgcttgttggcgggtactcctaaaagcagaatccgctccgcgatcggctctgtgggtcgagtagttcccctcgtgccgaattcgccacccaggcctcgctaccttaggaaccgttatagttactg

SEQ ID NO: 122402 - DNA, 965 bp, Homo Sapiens
  misc_feature (35)..(35): n is a, c, g, or t
  misc_feature (495)..(495): n is a, c, g, or t
tctgttagatttggcggcgcaagccccagaaaaanagggctggggggccgggggtgctgcgttcctgtccattgagagccataatgtggctgtaactgtcttcctcatatggcaagaacactgctggcagatccagctcctcatatagcgcttccacccgggccactttctcagcctccttctgcccgtaattttccttcaggatctggtactgttctggagtggcccgttgcagacactgaaccaccagccagctgcatttgttgtccctggatgtcaagtgccaatttttccggttcacactggggtccccaaggaggtcaaggtaatcatcctgaatcttgaaagaattcccccatctccagcaggatcttcttggcattggcgtgctccttctcgccatcaattccttccatgtacatggctgcagcttataggaaggtagaaggagtagaaagctgtcttgtacttgacaatagatttgtacctcttttncagtgaatctgacaagatccacaatttcgctggggggctgtgaggaggtccagggtctgcccaatctcagtctgataggaactctgcaggaagagctcgatcaggttcaggtaatagggctgctcccggcaatagagcttcagcaggcggtagatacatgcttccaggaggttagcatcattgatggcatccaaacccacgcccggcttctgataccagcagatctgtccccggcgggtaagggatgaatccatgatgtcatctccaatggcattgtactccaggacctccttgagccgggcaatagcatctcctatctctgggtgccccatctcatcctcagtcagcaccctaacgatctgggagaagtgctgaacgaaatcctgcttttcttgggcataaacatctgaatgctggtctccgttcattctgtcctcgtgccgaattcgccacccaggcctcgctacctt

SEQ ID NO: 122403 - DNA, 816 bp, Homo Sapiens
cgcggaggggattctgcttttaggagtacccgccaacaagcgggaccgagcaggaatccgtatctgggaacagagcccttggctcctccctcagaatgaacggagaccagaattcagatgtttatgcccaagaaaagcaggatttcgttcagcacttctcccagatcgttagggtgctgactgaggatgagatggggcacccagagataggagatgctattgcccggctcaaggaggtcctggagtacaatgccattggaggcaagtataaccggggtttgacggtggtagtagcattccgggagctggtggagccaaggaaacaggatgctgatagtctccagcgggcctggactgtgggctggtgtgtggaactgctgcaagctttcttcctggtggcagatgacatcatggattcatcccttacccgccggggacagatctgctggtatcagaagccgggcgtgggtctggatgccatcaatgatgctaacctcctggaagcatgtatctaccgcctgctgaagctctattgccgggagcagccctattacctgaacctgatcgagctcttcctgcaggtgtattgcagacagggcccgatgcccagagggtgcccatggtagccttggcctctataggacatgctcatctagcttggtttcagggtacaggattgcagcgtgcctggaagggacagaaaagcgaggaagggtgttgcggaagtggggttgtggtacgtggcacacgaaaagggcttctctgtcctgtgtaattggagaaagggtgatacaggactgtgtgtattgaatatgc

SEQ ID NO: 122404 - DNA, 809 bp, Homo Sapiens
ggggagtgtggggagagcgggaactactcgacccacagagccgatcgcggagcggattctgcttttaggagtacccgccaacaagcgggaccgagcaggaatccgtatctgggaacagaatgaacggagaccagaattcagatgtttatgcccaagaaaagcaggatttcgttcagcacttctcccagatcgttagggtgctgactgaggatgagatggggcacccagagataggagatgctattgcccggctcaaggaggtcctggagtacaatgccattggaggcaagtataaccggggtttgacggtggtagtagcattccgggagctggtggagccaaggaaacaggatgctgatagtctccagcggggcctggactggtgggctgggtgtgtggaactgctgcaagctttcttcctggtggcagatgacatcatggattcatcccttacccgccggggacagatctgctggtatcagaagccgggcgtgggtttggatgccatcaatgatgctaacctcctggaagcatgtatctaccgcctgctgaagctctattgccgggagcagcccctattacctgaaacctgatcgagctcttcctgcagagttcctatcagactggagattgggccaggaccctgggaccttcctcaccggcccccccaggggcaaatgtgggaatcttggtccaaattcccctgggaaaagaaggtaaccaaatcttattttggtcaaggtaccaagaaacggccttttcctaactcccctttcctaccctttccctaataagcttggcaggcccac

SEQ ID NO: 122405 - DNA, 595 bp, Homo Sapiens
tacattttagctatctattattaaacaacttagtggcttaaaactacaataattttatttatttgcttgtaattttgcaatgtgggctcaaatagcctttctttgctccacacgcagtcacctgaggtggctccagtgggctggagaatccactttttaaatggccttcttcacgtggctggcaaaagttggtgttgactgctggctgggagttcaactgaggctgttggcccaaacctcagttcttcttcacatggttggttgggcttttcacaggcagtaagtctgagaagtcaaacttctaacacagcagctggcttcccccgaatgcaaaaacagaagctatcaggccttcttaaggcatagtcccaaactggcataacatcacttccaacgcattctactattgattaaagcaagttacaggcccaatcagactcaagagaagagaactcctaaaggtgcaaatattgggaagcctggttcatttggggccaccaaagtagcagtgtactgtaagatagtcaccctgccaagtgttctgtagctgtatatttgtaattacttctaattgtattgagttttaaaagtaatc

SEQ ID NO: 122406 - DNA, 677 bp, Homo Sapiens
tttttgggtattgagaatttactgtgtatttgtcagtgtgctaaaccctttttatgcactatttaatcctccaacaatctcatgagataggtactatcacaactaccctcattcaactgatgtggaaactaaagcttagggaagttgagcaacttagccagatcacaaaaccagtgactggtggagttgggacatgaactgagattttgcctgggactggaaactgcaaacgttcatgacttctgtgcctcctggcagtcctagaagatggttggaggttgtggagaaagcttttccaccattaaggtgctgaggcctggaggctgtgccacaccttccccaccgcacataccaggtttccagggtttgcccagccaggaggtcacagtaacaccaggtggaagaggctggtcaatgccctcccagtacacgccaccatcactggtctcagccacattggtaaaaatagtgttactctggattgtagccatggcgttgggattggtggtggcagaggtaccaggggcaaccccaaagaagccgttctcagggttgatggcccggagtcgaccttcactgtcaaacctcatccaagcaatatcatcccccacacactccactttccagcctggcagtgcaggccgcatcatagccaggttggtcttgccacaggcact

SEQ ID NO: 122407 - DNA, 2446 bp, Homo Sapiens
  misc_feature (111)..(123): n is a, c, g, or t
  misc_feature (132)..(233): n is a, c, g, or t
  misc_feature (1276)..(1276): n is a, c, g, or t
ggggggaacccaaccctttttctggcccgggttttctttggaacccgtatggccccgtttcccttccctctggggccccgcgcccaaaagaaggttttgaaaaattttttnnnnnnnnnnnnnccccccaannnnnnnnnnnnnnnnnnnnnnnnnnnnnnnnnnnnnnnnnnnnnnnnnnnnnnnnnnnnnnnnnnnnnnnnnnnnnnnnnnnnnnnnnnnnnnnnnnnnnntaaaatagataagcatctcttattattggacagtctttgtgggaaggtctatggcacattgaagatgttagttaatatcaaattgctcatattttctgcaaggtgccttccctattcccagatgagggtgctatgtcctcttgctagactagggcctcaggtcacattttgtgcacacgtctctccagggcctcaagctcagccaacacctctttgggcagatcctggttgacctgctctgtcaggtagctccgaatgtcacgaacctcctgttcccagaagtccttggggagggagaacagctgagtggtgtctatagctctgaggccgctgagatccaaggctccttcctttggcaccagcccaatgggtgtctctcgggcactgtcctccccctctaaccgccggcagatccagtctagcacccgagcattctccccaaagcctggccacaggaagtgccctgcctcgtcacgccggaaccagttgacatggaagatacggggcagctgggcccccttgcgcccttccatgctcagccagtgttccaggtagtgcccgaagttgtagccaaaaaagggccgcatggcaaatgggtcgtgcatgatgatcttccctttgtgttctgctgcagcagtggactcagagcgcatggcgctgcccacaaacaccccatgacgccagttgaaggcctcgtataccaggggtacccctttgggtctgcggccaccaaagatgatggcgtcaatggggacaccctctggggcctcccaggctgggtccatgatggggcactggcgagccggggcacaaaatcgagagttggggatgtgcacaagggcttccttgtcaccaggtttcccagggtttgcccagccaggaggtcacagtaacaccaggtggaagaggctggtcaatgccctcccagtacacgccaccatcactggtctcagccacattggtaaaaatagtgttactctggattgtagccatggcgttgggattggtggtggcagaggtaccaggggcaaccccaaagaagnccgttctcagggttgatggcccggagtcgaccttcactgtcaaacctcatccaagcaatatcatcccccaccacactccactttccagcctggcagtgcaggccgcatcatagccaggttggtcttgccacaggcactagggaaggcggctgccacatagcgcttcttccctgcagggctggtgatgcccaggatcagcatgtgctctgccagccagccctcatcccgggccagccgagagggcgatgcgtagggcaaagcacttcttgcccagcagggagttgccacccatagcccgctgccgaaggagatgatctccccgctggttccgggcacgtggccaatcagggttttctctgggttgcacggccactggctcactggctccccttgtcctgtcaggggctggcccacggagtgcagacacttgacaaagtcaccatctcccagggcctgaagcacaggtgtccccagtcgggtcataatacgcatgcttgccaccacataggctgagtcagtgagctgcaccccgatgcgggacagcggggagcccacaggacccatgctgaatggaagcacatacatggtgcggccctgcatgcagcctggaaacctctcatccacagctcgctggaaatcagctggggacatccagttgcccagctgcccacgggccccaccaggcgggagtggtaccgtgtcccgctgagaaggagttacaatcaccgtcttgctctctactcgtgccacatccttggggtctgtgcgggccagccagcagttattgtacttggggagctttcggatgaggccctgctgctccagcagggtcagtgtggcagtattctcagcctcagttccatcacagatgtggatgccctctggttggcacaggcgggcactgtgctctacaaaatctcgaatgccagtgggaagctggcccagatctccactaagcactcgcagggtctggatgctacggcatgatggccagcccaaggggctcagcccatgccagttaagccgcaggccagggcggtacaatgcggccatggcacctgggcaggggctgcggggtggccaggaaccgagcggagccggggaggtatggaaggcggggaaggaggagcgccctcgtgccgaattgaccccgagcctctacctagcata

SEQ ID NO: 122408 - DNA, 984 bp, Homo Sapiens
  misc_feature (734)..(734): n is a, c, g, or t
  misc_feature (809)..(809): n is a, c, g, or t
  misc_feature (837)..(837): n is a, c, g, or t
tccaatttttcaaaagaactttattaagaaacagaggaaagatacaaaattcccatctgagaaaggttcccatttttcaaaagaactttattaagaaacacagaaaagatacaaaatccataaccaaaggaactgaagagtttacagcacactgggtttagcccatggcaatgtagagaaatgggctgggctggcgctcagtcactaggcaccgacgtcctgattcctcgtctttgacccagtgtcccttggttgctaagtcaaccagttctaactttctctggagacaagtcaggctgccctcccaaaccttcccaaacctccttcctaatgtctttatacacaggccctcttccatctggtccctaagatttctcacccagcacctcaggtgagatctagtctgatgttgctgtactttgtatactgctccaatcacaggagtctgcagtttctagaaaatctatttttgttcctgtcctgatccatttcataaactgcattcacaatccagttgggtagtctaattttgctacctttggtcaagttacctactttcccaagtctgcatctgaacttggtctttctcctgctaacaacgtattcctaggtactctctctggcagttctctgccccagttcatccaagaccttctccccaatacagaagtccgcaccctttccaatctcccacttaatttatgggatagccctagttctctgcttactttcanggaagacatcagagacttgatcttggactcgcctgttcaacctgccagctaagtcagcactcacggttcctgcanatttgactctgcctggcttcgccctagnattattctgcagattaactcgtgcgattctgctcgaggcaatcctaatgatcgataatcgtacagcaacttcctgggaatgtacgccaatcaacaaacgacgacaaatgtacggggctagatgcatcatatggtccacgccctcacg

SEQ ID NO: 122409 - DNA, 665 bp, Homo Sapiens
  misc_feature (209)..(217): n is a, c, g, or t
tttttgagtttctaccattaacattttatttaaaggctttgggactctgaagtataatgtttgtgaaatgctatgagccagaccctccacactgaaaattcccagtgtaaattaatttgttaaatgctcttagaattcctgcaataaagaacacctatctaaccttagttatccctgtgtttcccaaatatatcttactttggagcacnnnnnnnnnagtaccgatttacatcctgggaaatggtgtttaccatgctttaaaaaaaactgtggtaaaataaagataagatttaccatcttaaccattttagagtgtacagttgagttggcatacagcattcacataacttaactgtgcaaccaatccacaggactttttatcttgcaaaactgaaacactatacccattaaacaactcctcatttcctcctcccccagtccttggcaactaccattctacttgtttctatgcatttgactgctctagatacttcacataaatggaagcatagagtatttgtcttccagtaactggcttacttcacttagcatcatgtcctcaagattcatccatgttgcagcacatgtcagcgtatcttccttttagaggctgaataatattccactgtatgaatatacacattttgttgcctcgtgccgaattc

SEQ ID NO: 122410 - DNA, 820 bp, Homo Sapiens
  misc_feature (71)..(80): n is a, c, g, or t
ttttatcattttttaacaagcaaattttaataatgccttttatttctatacaaagcaatgtaactttctgnnnnnnnnnntggctatacagaaccctttaaacataagagtacagagtttcaaatggcaacaagaagttaagaaacatagggcactgtgtcgttatgggtgaatcctagtcgtcctgcagcccaaggtccaagctagtttactccataaccttaagtaaataaccgcggttcctatgaatacctttccaaaaccatttattataaaaactcactctttatccattatcagtattaacgtatcaaagtgagaaagaacatgggagagaaaaatgacaattaatgcagcgtgaacattttcatcctgaataccagtaaggactctagatgatatatggtgcccacttcatgtgcctcaaaagattttaattttcagaacatttaaacgattaaagagaaatcatcctcttaactaggtattttaaagcttatcaaactgtaggtttacatttgacaaagtcttatggaccaccaaatacgtagaaataggaattccaaatatttcagttcgttgaatatacaaaaccaaataaggcgcaaggacctgaagaataaacacaaagctagtctacaatgtttgagttaacgtgatttaggacccttctattttgttctgcaagataatttacatagttctctctgctatatgtgtcacatctattcagattgttacagatcttttcattctgggactttagacattataggcatacaacttccaactccatgttgctatatctggatcgaatggg

SEQ ID NO: 122411 - DNA, 1139 bp, Homo Sapiens
gtaactgaggcccccaagggtagtagttgccattaatgtttaccccagtgcagtggcttcttgggagttgccctttctctgccctggcccgtggtggttgtggtggggaaaaggggctcagggcaggaccacggcataaggtgggaacatctcaccaggagatgggaaagtctagaagggaagacactcaaagtctggaagggaaaagtctttgggtgaggcagagactccactgccagctttagaggtgggtagaagaaaggccagtgctggtgagggaagccctgatctggaggcctagtcggagacttcgcctgtagtaatacttgtgggcagctggcgttgtcttccagccggccgcccggaactcaatgatctccagcagcagcagctgggccagggagctgaggccagttgggagcaggaagccatcccggatcagcacaaagagctcatccatgcgctgcccattcattttctccagctgctccccaacccggtgcagctgcagcaccaaacagtccacctcctcctccttgctcaaactgtctggctgggccagccggaagaggcagtcatagacagggttcaccagggccatcatgggcatgttgttcaccctcaggtagtcaaagatgttgcagataaaggtgacatagcagacccagccctgcagggagcgtgctcgcagctgctcccgagcctggtactcctgctgcagccggttgaggagtccacgtcggaagacactctggcctgcttgtttactctctgcctgaatgatggcgtagcacatgcgtcctgcttccttgctgaacacacagtcctgcagagaatggtccacaatcacattggccactttctccaagtccacagcacccggatctttgagtgctgtcttcagcagctgctgggtctctgcatcaaaggactggattttatactcctctctactgggctcccccatgactagccagccccggtagctcttgactgggctgggaataaggacagcacctgccgggccggtggcgcgcgcgcgtgcccggggccgctcggcgcctgggagcgcgcaaccagcgtccggcccccggccgtaatggccgaattcccgggcatatgtccggtaccgtcgactg

SEQ ID NO: 122412 - DNA, 2450 bp, Homo Sapiens
  misc_feature (2423)..(2423): n is a, c, g, or t
ggctggaccggtccggattcccgggatcgcccgtcagagctaccggggctggctagtcatgggggagcccagtagagaggagtataaaatccagtcctttgatgcagagacccagcagctgctgaagacagcactcaaagatccgggtgctgtggacttggagaaagtggccaatgtgattgtggaccattctctgcaggactgtgtgttcagcaaggaagcaggacgcatgtgctacgccatcattcaggcagagagtaaacaagcaggccagagtgtcttccgacgtggactcctcaaccggctgcagcaggagtaccaggctcgggagcagctgcgagcacgctccctgcagggctgggtctgctatgtcacctttatctgcaacatctttgactacctgagggtgaacaacatgcccatgatggccctggtgaaccctgtctatgactgcctcttccggctggcccagccagacagtttgagcaaggaggaggaggtgggtggccccagccctggcacaagcacagaaggctgcaggatggacagtccagctcagccgtgtgtcagcccactgctcacggaggtggactgtttggtgctgcagctgcaccgggttggggagcagctggagaaaatgaatgggcagcgcatggatgagctctttgtgctgatccgggatggcttcctgctcccaactggcctcagctccctggcccagctgctgctgctggagatcattgagttccgggcggccggctggaagacaacgccagctgcccacaagtattactacagcgaagtctccgactaggcctccagatcagggcttcctcaccagcactggcctttcttctacccacctctaaagctggcagtggagtctctgcctcacccaaagacttttcccttccagactttgagtgtcttcccttctagactttcccatctcctggtgagatgtttcccacttatgccgtggtcctgccctgagcccctttccccaccacaacccaccacggccaggcagagaagggcaactcccaagagccactgcactgtgtaaccattagtgcaactactaccttggtgcctcagtttacccatctgtaaaatgggtaagcatagccactggtgggatattttgggatgtcaaggggtggaggcagagcacaagtcacaccagaaactgctttttatacattttgtataaggacaactctggaaacaagcctatttcctccagccagtttcactgaatgctgcaccacatgctacaccagttcagcgtgagaattttctaataaatcttttctgatactaaaactgcttcctttatatgtccaaaggtccgccccaacctaagggaagagaaaacagccctgagtttcctggaggaaattcccaagtcaatgtgctccctctttacaaggaaataggggcagagagagcaagttccagcctcaaagaaagaaggattaacggatagtgaatatgctgctacatctttcttacgaggcctgcccacccttacaaaggaactacatccttaacccacaggtagttttcagcgtggcagtagctcacactgtttcttgcggcagagggccctgggctcctcctggagactctaccaccagcggtagtgggccagggcacggttggcctctgccatcttgtgcaagtcatgcttcctcttgatcacggggccctggttatggaaagcctccagcagcttgtgtgacagcttctccggcatcagtgtccgctggtgctttttatcccggcactcagtgatcatccacttcatggctaggaagcggcgacgccggtcgggtaggggtacagggacctggtagaaacggcctcccttgaggatgggtaccagcccaatcataggctcacagtttttcagtgcttgatggaagatggtgtaggggttgcgttcgatggttgcctgttcctctgcagaagcggcatggtacttctcaaactgcttccttttcacagcttccagagtctgaatcatgagggatctggccagtactttgtttcctcctatcatcatcatgttggtgaatttactgatgactgggtcttcaaacacagaacttgttttccctgctggagcagctttgatgagctgagtcttcttgagctcccgaacatatttctcctcctcagttagctcctccactggcttgcgataatattccttgtcaatcaagggatccttgaattcaggactatagcggctccatctcacctgagttagccctggaagctgcaagacagcccgccgcacgcccaacgccaggcccgaccatcctcgggcaaccttcactgcgggggcaaccatcggacgcgtgggtcgacgatatcccgggaattccggaccggtaccagcgtgctttgtggggggnggagtcaatgagagggagaggacggga

SEQ ID NO: 122413 - DNA, 850 bp, Homo Sapiens
ccagttccagagtcgaatcagaagaattgcccaagtactggttcctccaatcatcatcatgttggtgaatttactgaggactggtcttcaaacacagaacttgtttttccctgctggagcagcttttgatgaactgagtcttcttgagctcccgaacatatttctcctcctcagttagctcctccactggcttgcgataatattccttgtcaatcaagggatccttgaattcaggactatagcggctccatctcacctgagttagcctgggagggggggaaaggaggaggcaggcaaaagctgactccacaagcgagtaggtttgacttaacaataggcatgactgccaacgcgccgacgagggagagcggcgcggagaccgcgagctaaacctgagccacaacaattcaggcccttgtcccaagtaggaggacattccccaagcaggcgggtaaagtctcctcctggtcaagtgctaacggtaaggatgggcttggcgcctacacacccatcccaattcacaggcgatcccagatctgagctctttagctgaaccgcactttcagctccgcgttagaaccctagatcagccagactccttaggcgagaggtagtcactaaaccttcggattggcgcagggtcacgcagctaacttagaagcttgaatccagatactccggcccccagggcaatgctctctctaggggcccacgcggcctgcctgtggcccccttccttcctcgcagcgccccccccgctgctcgccaccctctcaccctggaagctgcaagacagcccgccgcacgcccaacgccaggcccgaccatcctcgggccaaccccttgggcc

SEQ ID NO: 122414 - DNA, 817 bp, Homo Sapiens
ctttttttcccgggcactcagtgatcatccatcttcatggctaggaaggcggcgacgcccggtcggggtaggggttacggggaccctggtggaaaagggcctccccttgagggatgggtaaccagcccaatcaatgggcttcccattttttcagtgcttgatggaagaatggtgtaggggttgcgttcgatggttgccctgttccttctgcagaaagcggcatggtacttctccaactgcttccttttcccagtttccagagtctgaatcatgagggatctggccagtactttttttcctcctatcatcatcatgttggtgaatttactgatgactgggtcttcaaacacagaacttgttttccctgctggagcagctttgatgagctgagtcttcttgagctcccgaacatatttctcctcctcagttagctcctccactggcttgcgataatattccttgtcaatcaagggatccttgaattcaggactatagcggctccatctcacctgagttagccctggaagctgcaagacagcccgccgcacgcccaacgccaggcccgaccatcctcgggcaaccttcactgcgggggcagccatcttggctggccacgaggaccccacaaggactgccctcggcgcgcctgagcgagtgacgggaaacgggtgaaaaagactcctcagggtcctaaatctgcgtttctctccactgatctggacgttagagtttttcactccggggtccaaagggaagcgccaaaaggaaacccttgccctccctgtatccgtcgcagtctggcgcggccctcggtccc

SEQ ID NO: 122415 - DNA, 794 bp, Homo Sapiens
ggagaaattcattaaatacactttatttaaatagcatttatctcagttggctctatgccagttggtcttggtattggggtaagggggtattgcaggtaaaaagaggtgaagcagattctggctttcagtttcttagctcagaaattccagcaatccctgtagttctttgcatcccctcaccacctctggaatagagagcagggtcttataaatatgctgaacaatgtcatctagtttttctaactccttgtcagagcgccgaaggttctcctctaggatatttctatggctctggaacttgatcatgagtttttccttctcatttttcatctccaggaacatcactctcagtttgtccacctcctgagagagccacactttctcctggatccaattggtggccataggctggcagttggagtccagctggcctgccagggcctcctggagcactttggtctctgtctccgcacgccgaagtgagcgggtaaggtgggtcacctcctctctaaggcttatgagctcgccactcttgtctatctgttctaggatcttctcattctgctgctgtatcacttcctggagctccttttcattcttgtagcgcaagcacaaggcctggttcagcttctctatgtctgcttcttttgccttctggacttcctgatgctgttcttcctgggcctgcagcctagcttgcagctcacaaatttttcgctgcagagtcctgatggcttcttctttagactcttgtagcagggaacaaagactctcctcgtgccgattagacacca

SEQ ID NO: 122416 - DNA, 604 bp, Homo Sapiens
aagttctaattatgtttaatattggtttgctgctttattgaataatctacatttgcttttaaaaaaaggaaattcacttaactgcatgtcagtcacccaagttttaagtgtacaaatgaaatggaaaacatttattacacaaatttaattacaattctaagaaataaacatgcaaattagatagagttcaatttgcagatgctaatcctcatccttgatcttgttccttcctcccttgattttcagtctgtgcgtcttcttgattcctagggagccaggcagccagaggtctggtttttcacagtcggaggatcactgttttaaagaagtgttatatttagcacatctggtatagtggcagtaaacaaacattatagtctttgtaacacttttgtgcaggtgccttctcccgattttattaggtctatgccttccaagcctctgccttcattacacctgaaatgacccatctcgactatggaggggtccctacacagaagttatgaattaatgactttaaaaaacaaactctgaggccactataggagaaaattactatttgcaacatattctgattccaaggcttaaattacattctcttgag

SEQ ID NO: 122417 - DNA, 1792 bp, Homo Sapiens
  misc_feature (92)..(128): n is a, c, g, or t
  misc_feature (480)..(480): n is a, c, g, or t
  misc_feature (1716)..(1750): n is a, c, g, or t
tgcacaatctttggaacaaaagattaaaggcagaatttaaaggaaaaatacatattcaaagaacatagtgaggtataaaaaagattctttcnnnnnnnnnnnnnnnnnnnnnnnnnnnnnnnnnnnnncctcttcatcttgctatagagttcctctactagtaaatattgcaatagccaggcctcatgaactggggggctgtcccatttgcaggggtctcacgtcacttcagtagggggcaaatcggctgtagccacctcggtataaactcgccacagcgccaactccatagctagcggcaggggcaagggcatggtaggggtcggctgtgtacaccctgccataaccgtcactgtaagcggctgcagcggctgcagcagcggtggctgcggttgcagtaccaggctgtgcatatctgtaggctgcatatccaccatagaggtcagcaccgtaaaatccgtcctggtaaaccacacctgngataggcggggatggctgttggaggtaccgctcggactgcaccatatactgtccgccctctgcccctcaaatgggctcctctgaaagcggctgccgtggtggctgcagtagggtaagggaagccaggaactaaagggagactgattaaaggaatgtaagtgttgataccccctcttcctgataggggcactgctgcatcattgcctagggacacatctgcttgaaagctggatgctgcatataactccggaccatatacagctccaactactgggcttaatttccaaccatttgcatatggtgtgaccatcttccttattggtcattacacgtgctgtagcattattcacctcgattttacggccctctaccacggtgccgtgtaatttctcctgggccctgtctgcatcagcactattctcgaaagttacgaacccgaatcccttagagccacgttcattaaagattatttctacatctaggattttgccaaactgcccaaacatctgccggaggtcagggtcccggaagcggaaaggaatattagagacatgcagccgtttcggggtagatttactctctgaattttcactactttgtgtctgtgactgctggccgtctgtctgtgctccaccttctgtcgtaagagatccattttgtgtgctgggtgagttgctgctctgctccccgtgggcttgcgtacttccgtagagtgtcaggttatgctcaccggtctggccggcatagtcttgagtgtgtggcaccccatactctgtgggaattccattctgcggaggtggtggaaatgggatggtagtaaaaggctgaaccattgcgtcaggagttgttgtcggctcctggttaccctggctgtcccgcgctgggaatccatgataacctggagtcagaggctcgttctgcatcccgccgccaccgtcggccgccgcctcctcagtgcgcggccgcttgctcaggccgggatcggctccgtctcctcccgctccgggcaccggcagctccagctccgactcccgcttcatgccccggtcgtcggcgccgggcccgagctgaggcggctgctgcggctgggcgccctccgccatccgcccgcgcccccctcgcctccgggagccgggcgacccgcgacaggccacctccccctgggcctcggccccgactgtcgcccccggccgtaatggccgaattcccgggcatatgtccggtaccgtcgactgnnnnnnnnnnnnnnnnnnnnnnnnnnnnnnnnnnncggccgcttcctcgctcaaaactcggggcgctcggtcgtttt

SEQ ID NO: 122418 - DNA, 635 bp, Homo Sapiens
atggccaataagaagatggtcacacctatgcaaatggttgaaattaagcccagtagttggagctgtatatggtcgggagttatatgcagcatccagctttcaagcagatgtgtccctaggcaatgatgcagcagtgcccctatcaggaagagggggtatcaacacttacatttcctttaatcagtctccctttagttcctggcttcccttaccctactgcagccaccacggcagccgctttcagaggagcccatttgaggggcagagggcggacagtatatggtgcagtccgagcggtacctccaacagccatccccgcctatccaggggtggatatgcagcctacagatatgcacagcctgctactgcaaccgcagccaccgctgctgcagccgctgcagccgcttacagtgacggttatggcagggtgtacacagccgacccctaccatgcccttgcccctgccgctagctatggagttggcgctgtggcgagtttataccgaggtggctacagccgatttgccccctactgaagtgacgtgagacccctgcaaatgggacagccccccagttcatgaggcctggctattgcaatatttactagtagaggaactctatagcaagatgaagagg

SEQ ID NO: 122419 - DNA, 731 bp, Homo Sapiens
  misc_feature (465)..(541): n is a, c, g, or t
  misc_feature (710)..(710): n is a, c, g, or t
cagaaagtaagaagtaaaattatattttgtttgtagatgacataatcttctggtgtagaaaatcacaaagagccaaccaaaatactactggaactaagtaacatagtcagtggatttgcacaatacagtatcagcaccaaaaattagttgaatttccatacttttaacaataaacaattttaaaagaaaattttaaaacacttccatttgctggagaacttaaagtaagaaatacttagaaataaacgtacaaaggtcagaggtttttaccttgaaatctacaaacattgatcaaaatgattagaaacattgagctacaacccatatttatggtttggaaaaattaatattgttaaatgattatataataacccaatgtgatttagattcaacatggtatccataaaaatccttatcagtttttttaaagaaacaaaaaacaggctgggaaaatggctcacgtcnnnnnnnnnnnnnnnnnnnnnnnnnnnnnnnnnnnnnnnnnnnnnnnnnnnnnnnnnnnnnnnnnnnnnnnnnnnnngtgtaagctgatgtgcctggcccaatcctcttaacataaacactaatgtcaattaatgcttgaactcaatgttaagtcaatacaaactcaagtcaatgctgaattgaccctaatgtcaattaatgcttgatggtttgctctactcattgcatatggacaactactccanaatgaatttctcatattctgc

SEQ ID NO: 122420 - DNA, 1871 bp, Homo Sapiens
  misc_feature (909)..(941): n is a, c, g, or t
tttggttaagagcattttttattaatgaacactcgttaaaaatcagctttaataataaacatcatctggttaagcataaggtcagtccagaaatggatctgagtaatcatgaaaatatttcagtaatcataaatcttaataatagaatttccacctccatacctattatgattcggtgactcttttactgaaagtcattcatatctccacaaaaacaccaattcatggatttgctaaaagacttgaaaattattctttataattttaagtcatgactatactagaacaatttttgtgtctctcaagattcttcacctgacccccaagccttagcctcttcctgaatggacatccgtgggcctgctgtctcagcctcctgcggaagaagctggggctttgggaagatcacatctcacctgttgcaacaggaacctcagtggctacagacatgggtctcacctgatgggactctgtacctcataccttaatggctgctctcctcccacctcttccaggcagtttagtgggatgtggaatctggcttacccaacggcttccttaaatcagagttaaattttcaatcaagggactagaggtcaagaagataaattcctctttctccccccattgctcaagtattttatttgaaaagcagcaaaatgacagttgacatatttagattgaggataactataacattactgaatggattattattcttcagtgcgatacactctgatattcagccttgccctgagttaatcaaatcactggagaacaaaagcgaataacagcaggtctctcttttttattccaatttcttacatttattgtcaatgatgaattcagatgccagtggcctgcctagaaagccactcttaagcaacaaggagtctgccaatccacttnnnnnnnnnnnnnnnnnnnnnnnnnnnnnnnnncctctatgttaatgaagcagcaactgtggccccctagcctcctccacttcaagtacaggtgttcctagcagattaagtcccttaatcctcccagcgacccctagcatctgatgtgctatctgcattggctccgtgtcagtatcagctctggccttggcctacagagcttccaatgaagagactgtaatagaagaagccagaaggaaaaaacaaacaaggcaacatgggggtatttcaagactgtcggaggtgttcctgaatcggtggcattaatctagaggccatgttctgcagtgggagagcaatgggcttgacatcacagggaccaagattcagttgccggctctgagggttcctttctaggtgatctcaggcaaggaagcttcttgcactctgagcatgtttcctcaagtttcaaatgcagagataattctgacctcacaggaattgagacgatgtgtatgaaagcacctattttactacctggcacacaatgtaggtgctcaatagatggtgtttgaatcttaaacttacctggggaaatttttaaaacttcaccattcaatagataggagttagcaaattagcaatatgactgcttacttcctttggtttatttatacataaggctttaaaatcatcaaacgctaggctgtcaaggaaaatatactatttaataatcttagagttcatttaatctcagcacaggggaagggtttcacaatgaagatgtgtagcaggcgttatcccattgttatcactgggcagaacaaagaccaatgagtagacactataagaaggcacattggctggtcacggtggctcacacctgtaatcccagcagtcttgggaggctgaggtgggagttcgagaccagcctgtcgactggagaacctcgtctctacgctggatgaattcggtaccgagctc

SEQ ID NO: 122421 - DNA, 1597 bp, Homo Sapiens
ttagaaattagaatactttattataaatattttcagaatataaactgattttgtatcaagactctttgaaactttagaaactttatgtaacctaagattataatatatttcattttccactttccagcctagaaaatacactgcaagttagatctaataaaggagaaaaaaattgcttcacagagaaaaaccaatgaacataaaatacccaactcaaaactataacaaacccaatcaagaaacagattgtgcaaaggtcattaatcctccaatttaaaataaataacctcccaacagaaaatatttccaccatcaaagcaatttgatgaataaaagcagagtcactttcattaaaggaaattacactatatgttcaaaaaatgtaataatgcttttagaaaatgaggaaaagcaatttctgtgttggagagcaagcatgctaaacactttgtttactaggcctttgttagaagttaaagaacctattcacataagaaaagtggtatgaacacggatatcataaaaccaagctctcacctattttttcaatttaactttgggagaaccaactttgaaagcttcaaaatccaagaatagactggtcccaaagcatttcctcctctgtcctttcttggccttgttcctttttcttttttgtacgcttacgttcctctttcttagagactacatctcggctttttttctcctttcgattcttaagcttttctgtactgacatgtacggtttctatttccacctctgttttctttctttggatgctcttgtgtttgtctaagtcaatttcctcgcagcttttttttctcttatgcttagaccgctcctcctctgatttttctctgccttcctctgggtgccttttcctcttctgatgtatctgtttgtgactggcttgatgagtactggtactgttatctgaggagaagtgcttgtaaactctatgttctacaccatgtgagccacaaatatattcttgttgattaaagttcaggggtactggtttttctgagaaacagtccctcgtgaactgacagtagctcagagagtctagtctcaatctgctgtcatgggctggtaaccactgaggcaaccgattttccactgtttgtggaatattgcatgatcttgggtaggtctggatggtttcagatgggagtctctggtcaaacattctatacgtgggtctggaattaacctctcctttgtacccacaggtttccaaatagtcccctttcatctttctgaaacaagtctttggctctaagcctctggctttctgtactttaatataatcttcaagttcatcttgaaaagagtcatatgtcttctttgaatgcttcattaggttgacaaaacgggattttccttatcaggctgagaatttggtggagaaatctgatcatattcactcagtttttcagcatgaattttcaaatagtgagactacacaataactggtgagctaaaaaccacaattcagagatcaaaaatcaatttttgcggacgcgtgggtcgacgatatcccgggaattccggaccggtaccagcctgctttttgaacactggtctatagtcacca

SEQ ID NO: 122422 - DNA, 990 bp, Homo Sapiens
  misc_feature (61)..(120): n is a, c, g, or t
ggtgggacccttgcgtggcccctccaggggcccggtccctgttgtgcgcccgtccctcagnnnnnnnnnnnnnnnnnnnnnnnnnnnnnnnnnnnnnnnnnnnnnnnnnnnnnnnnnnnntccaggggggacggcccctccggcactagcagcacccgcgggtccccaccattctccggtacaggcggtctccgggctccgcggcccgcatgcttcttccaccagctctgagagctctgcgtggatctcttgttgaaggttcccagcttcaggctgcctcaggattggggatgcctcactgtactccccctgctggccagcaccttgcccttgcggaagagagccttgatgttgtctggctgggctccagcacaaggctgcaggagcgcaggctgcgcggtagtggtcgagcttcagctgcgaggccgccaggttgttcagacacttcaccttcaactgcaggagctgtgcctcctcctcgaacgtcatgtccactttggcgctggaggtgatagccttgatggcgaggtcgtaggagttggcggccaggacgaagtccgcccgcatggtagtgggcgtctgccgcactcccgcttccggttggccagggccacgcgctcctgccccgtgagcatctccaggtcaggcccgtccacagccgtcttcagggtcacctccaggcacagggccgcgtgcggggggatgtatgggctcctgctgccttgggggccgtagccgtacttggagtcagcagtgaccatggccgtctcccccacgtccatgagtgggacactgagatccagggcctggatgacgtcacagtcacccagagtgaacaccagctccggctcctcctgcacccgtgtgccattctccccgacgtctgcagatgtacggtgaccacctgccccgacgcgtgggtcgacgatatcccgggaattccggaccggtaccagcctgctttttgaacactggtcatagttacaagct

SEQ ID NO: 122423 - DNA, 1634 bp, Homo Sapiens
  misc_feature (47)..(65): n is a, c, g, or t
gggtctaggtagcgaggcctgggtggcgaactcggcacgaggcgagnnnnnnnnnnnnnnnnnnngcagggtgggatgctttatttcactgtggcggggagggaacctggacagggggcggcaggcggggtggggggctggcactcaggcggggactaggcaggggaagggctgcccccaggcctgttgaggagaaactgaggccagccctggcggagacctagcccagcggggtaaggagggtgggggaaaactgggtctgaaggaatgagggccccctccctctgggctttcctcctagagggcctcagtccctcctgctggctgggctgcacgacccccaatccttgctcccctaacccggaggagggggccagaccagggagggcagtggacagggagcctgggggagttggggagcgcagggcagggtccatggtgtgcagagggggtggcagccacctaggtggtcagttcctggcagcgatgaccacagagagtgccacaccccccaaggcaacagcagtcgccccaaacagccacttccatgggatggaccaggcacccttgccagggcacttagcaggcagccggctggggttgcccagcattttccggtacaaggcggtctccgtgctccgctgcgccgcatgcttcttcaccagctttgagagctctgcgtggatcgtcttgttggaaggttccagcttcagggctgccctcaggatggggatggcctcactgtactccccctgctgggccagcaccttgcccttgcggaagagagccttgatgttgtctggctggtgctccagcacaaggctgcaggagcgcagggctgcgcggtagtggtcgagcttcagctgcgaggccgccaggttgttcagacacttcaccttcaactgcaggagctgtgcctcctcctcgaacgtcatgtccactttggcgctggaggtgatagccttgatggcgaggtcgtaggagttggcggccaggacgaagtccgcccgctggtagtgggcgttgccgcactcccgcttccggttggccagggccacgcgctcctgccccgtgagcatctccaggtcaggcccgtccacagccgtcttcagggtcacctccaggcacagggccgcgtgcggggggatgtatgggctcctgccttgggggccgtagcagtacttggagtcagcagtgaccatggccgtctcccccacgtccatgagtgggacactgagatccagggcctggatgacgtcacagtcacccagagtgaacaccagctccggctcctcctgcacccgtgtgccattctccagcgacgtctgcagatgtacggtgaccacctggcccttgaccgggcggctcgaacctggcggccctgggaccagcgtcttcttcctcaacagcccgttccccagaatgtccagccactcttctggggccggggctggggcgggctcgggctccatggcagcaaggaactctcgggccagggccccaggctgctcagcctcctccgccgggggttgtcccatgtcctccagcggtggcagctcactcaggtcatcctcttcctcctcttcctactcctcttcctcccctcgtgccgattaacacgcagcctgacctag

SEQ ID NO: 122424 - DNA, 717 bp, Homo Sapiens
  misc_feature (462)..(494): n is a, c, g, or t
  misc_feature (661)..(677): n is a, c, g, or t
ggtcacctccaggcacaggccgcgtgcggggggatgtatgggctcctgctgccttgggggccttagcattacttggagtcagcagtgaccatggccgtctccccccacgtccatgagtgggacactgagatttcagggcctggatgacgtcacagtcacccagagtgaacaccagctccggctcctcctgcacccgtgtgccattctccagcgacgtctgcagatgtacggtgaccacctggcccttgaccgggcggctcgaacctggcggccctgggaccagcgtcttcttcctcaacagcccgttccccagaatgtccagccactcttctggggccggggctggggcgggctcgggctccatggcagcaaggaactctcgggccagggccccaggctgctcagcctcctccgccgggggttgtcccatgtcctccagcggtggcagctcactcaggtcannnnnnnnnnnnnnnnnnnnnnnnnnnnnnnnntcaccctctgcatcctcaaccccatccagtacctcgaagtcctcgagcggtgggaccccggcgggcagtggggcagagggctcagagggttcagcacacgatgccatgctgctggggggacaggaattggccctctggctccgggacccccacttggggtcctgcgnnnnnnnnnnnnnnnnnagccgcggccgccgcgcctcgggaaccaggttcggccccc

SEQ ID NO: 122425 - DNA, 1108 bp, Homo Sapiens
  misc_feature (749)..(783): n is a, c, g, or t
cgagcgcaggcgccggtaattgtcgagctcagcgggaggccgccagttgcttcagacacttcaccttcaactgcaaggactgtgcctcctcctcgaacgtcaagtccacttgggcgctggaggtgatagccttgatggcgatggtccgtaggattgtcggcccaggacgaaggtccgcccgtctggtagtgggcgcttgccgcactcccgcttccggttgccagggccacgcgctcctgccccgtgagcatctccaggtcaggcccgtccacagccgtcttcagggtcacctccaggcacagggccgcgttcggggggatgtatgggctcctgccttggggcctgtacgcagtacttggagtcagcagtgaccatggccgtctcccccacgtccatgagtgggacactgagatccagggcctggatgacgtcacagtcacccagagtgaacaccagctccggctcctgtcttgcacccgtgtgccattctccagctacgtctttcagatgttacggtgaccacttgtcccttgaccgggtcggctcgaaccttgcgtgccctgggaccagcgtcttcttcctcaacagcccgttccccagaatgtccagccactcttctggggccggggctggggcgggctcgggctccatggcagcaaggaactctcgggccagggccccaggctgctcagcctcctccgccgggggttgtcccatgtcctccagcggtggcagctcactcaggtcannnnnnnnnnnnnnnnnnnnnnnnnnnnnnnnnnnaccctctgcatcctcaaccccatccagtacctcgaagtcctcgagcggtgggaccccgtcgggcagtggggcagagggctcagagggttcagcacacgatgccatgctgctggggggacaggaattggcccttgggggctgctgggggcacagtccactctaaatgttatttccttaaagagttcaagcttgacgggcagggcagctctggggttgctgaatgacccatcctgaagccttagttacagaagtgaacctgagggcctgaggaggagcctcgtgccgaattcgccacccagcctcgctaccttaggaccgttatagt

SEQ ID NO: 122426 - DNA, 990 bp, Homo Sapiens
agggggcgcccagcccgggtgggggggtctgcccccttcaggcgggggatttgggcagggggaaggggcttgccccccagggccttttgaggaggaaattgaggcccagcccttgggcggaggaccttgccccagcggggttaaggagggtggggggaaaactgggtctgaaggaatgaggggccccctccctctgggctttcctcctagagggcctcagtccctcctgctggctgggctgcacgacccccaatccttgctcccctaacccggaggagggggccagaccagggagggcagtggacagggagcctgggggagttggggagcgcagggcagggtccatggtgtgcagagggggtggcagccacctaggtggtcagttcctggcagcgatgaccacagagagtgccacaccccccaaggcaacagcagtcgccccaaacagccacttccatgggatggaccaggcacccttgccagggcacttagcaggcagccggctggggttgcccagcattttccggtacaaggcggtctccgtgctccgctgcgccgcatgcttcttcaccagctttgagagctctgcgtggatcgtcttgttggaaggttccagcttcagggctgccctcaggatggggatggcctcactgtactccccctgctgggccagcaccttgcccttgcggaagagagccttgatgttgtctggctggtgctccagcacaaggctgcaggagcgcagggctgcgcggtagtggtcgagcttcagctgcgaggccgccaggttgttcagacacttcaccttcaactgcaggagctgtgcctcctcctcgaacgtcatgtccactttggcgctggaggtgatagccttgatggcgaggtcgtaggagttggcggccaggacgaagtccgcccgctggtagtgggcgttgccgcactcccgcttccggttggcctcgtgccgaattcgccacccaggcctcgcta

SEQ ID NO: 122427 - DNA, 946 bp, Homo Sapiens
  misc_feature (97)..(180): n is a, c, g, or t
  misc_feature (777)..(788): n is a, c, g, or t
gggtcatctagaggatcccagcagctgtcgtgaatggtcatgcgggttaacaaaacggcacatggtggcaaaagggtcatgaggggaaggggtgtcnnnnnnnnnnnnnnnnnnnnnnnnnnnnnnnnnnnnnnnnnnnnnnnnnnnnnnnnnnnnnnnnnnnnnnnnnnnnnnnnnnnnctggatgcatagaacccctgtcttagcctgttctttgctgctacaatagaatacctgagactgagtaatttgtaaagaacagaaatttattttcacagttctagaggctgggaagtccaaaatcaagatgctgacccttggtctggtgagggcttttttggctgcatcctcacatggcagaagcagaagggcaagctgacctgaggctgctcaaagcctcttttaatagggccttaatcccattaatgagagagaaacactcatggcataatcacctcctacagaccctacctcttacttctatcacattgataacacctgaattttggagggagcacattcaaactatagcagttcctaaatactttagtggagttgccaggaagattaaataagtattttgtgaaatcacttagcactgtgcccaacacttggtaggtgcacgcatatcattacagatttcatggtggacattattatgttatattattaatataatacttttgtgattttatatatattgcttaaccacaaggctcttgttaaataagtcaacaaagtaattgatccatctagcatatgaaaaagcaaagaggnnnnnnnnnnnncaaacctttgatatttccaccttttttccttcaagataaatatactgaatgctaaatgaaatctaccttttcactacatttcagaggaattcttagcactcttcactgtatattttcttatattcagttccacataattctgtttgcagcttctacta

SEQ ID NO: 122428 - DNA, 688 bp, Homo Sapiens
ttttttttgatgactaagtatttattgagacaaataatacaaattggtggcatacaaattattaaaaatagaatgctgaattttatttataggtgggccatcagatactgtttacaggttaagccttactataatgaactgcaaagaagtatgtatactgtttgaaatgaggaactttatccaggcaaacatgggatgtcaagagtggcctgtggtactggagacaaggaatatcaagtaattgacatgttacttgtctgtcagattttaagaatactgttatttaggcatattcaaagaaacaactgcctgttttaatagggataagtatataacgaaaacatttaatatccatacccccctcaaaaagccctttattcccaagtagcaactagtgtaaattaattttcaattcctttctacccttcctttgctagaaatacttatgcataactaaaacactcaagtcactgaagggaacaaatccttttactgtcacttgaatctaaaaacactcattttgtaatttgggcgaagtagctctcaaatataatgcatttttttctatcctatatatatacttgggtaaaatcggaaggtgagtgcttaggcagaaataagtaactattaaaccagtgggagcacagttcagttgggcaatactctttatgatactgacaagtgaagg
